United States Patent Application Publication US 2004/0259086 A1 - sequence listing, part 3

SEQ ID NO: 11734 - DNA, 377 bp, Homo sapiens
ccgggcaggtactctggtagccaagttttgcaagagccggggtttccagcagggatggtagccagcctgggcacacttttctgtattgtatttgaacctcatttcctgatgctcatccagaagttcctggctgggtgagtaggtgaacagttcaaggctgtgtggatgaaactctggcatctctttacagtgctgtccggcagggcagtgtgaggccactctgtcctcctttgacctctttcttcttcagcagccaaatggaggctctctaaaggtgatgattaacttggcataaacatgccaagctttcctgagcgtttgccctgaattgggctgtctcttgctgctctgagacagggagactggctgtctggctg

SEQ ID NO: 11735 - DNA, 387 bp, Homo sapiens
ccgggcaggtacgttgaaatattaggggcaggttcccccaatatctggcgcccaacgtggttttctttttcctaagtgcatgtgggaacccgattccctttggtaggtgcggagaaatgttcatcggtccagtccacagaaatgcttgttcggctccccgacgattggtgagttgtctgtgtattgtccggggtaactatgggtcacgcagagtctaaacattatgctcatctctgctatattaaattcctgttaaaatgggggagttcgggttcccatggaaaatatggtcaccctattcagggcagtggaagaacactgtccttggtttcctgaaaagggaacgttagatgtggaactatgggatcatgttggtgcaaaattccg

SEQ ID NO: 11736 - DNA, 363 bp, Homo sapiens
aggtacagatctcatcaggtatgagggcagtctctgacgcgaacgtctcttcctcgtggtttttattgtcagtattcacacgaagtttaagtctcctagtgggcacccagacgggattgacgatctcctggtaaaacacaagcataccctcttccccacgttataattgttccaggttcccaggtattggtttgggagtttttccatgacactggcttgccttcgtttagggagaattttttgcctgtataatggcatttagctgcagtcagagtaattgtttttaggaaacatttagaaaagcttaaacaattgctaaatataattgggaagtggggaagttagtttaaatttatgcctttt

SEQ ID NO: 11737 - DNA, 382 bp, Homo sapiens
aggtactccaacccgttcttaggttttgggttagtgagtggtgtatcagcagcccttactagcaaaagtcctatgtgcacctacctacccttcttcattgatggattggagctatacttacctgggcaggcatgacctcggcattagtccccgcaatcttgactccagcatacaagcaggcccggtaatgggcctccacgatgtccctgccataggctctttgagctcccacaccacagtaatatggacctacagaagcatcaggacaaaacgctaagagtcaagaaatccagagaatcccaaagtcagagatcagaaggccctaagccttgccctcttgaatcactatccttgccttcatctgcaggtgcggggcagggga

SEQ ID NO: 11738 - DNA, 415 bp, Homo sapiens
aggtactccagcctgggcgacagaccgagattctgtctcaaaaaaacattaacaaagaatactccagatcatccagaaagtcagtatctgatagtgtttatatggagaactcctgcactggaatgtaaactcctaaccctagatccatctcttctcaggtcttcctatcacctcagcctacagcagtcaatccttccctctaaccactccctcctcctaagatttcagcatttaatgcctgtacgcggggatgtctcttgtcagctgtctttcagaagacctggtggggcaagtccgcgggcatcatgttgaccgagctggagaaagccttgaactctatcatcgacgtctaccacaagtactcttcatacctcgttggatgtgggaaatgcctactgtcccaatcaaaaagttt

SEQ ID NO: 11739 - DNA, 381 bp, Homo sapiens
aggtacttttttttttttttttttttttttgtctgtaaaatctagcattcagatatttgctgagatttttgcttttttatctaacctcatttggtgtcctgtaaagcgcatcttgaacagcccctagagctaaagtgtagtcactagaccagcagcatcaacatcagctgggagctttactgaattgcagaatatgaggccccagtccagatggactgagtcagagtctggggggatgtgacccaccaatctgtgttccaacaagccctctagaagattcgaacacgcacgaaagtttgacaaccattgctttgaattttgacaccagaaactcagggaaagctacagaatgacgtttgaatgaagaagcaatattagcca

SEQ ID NO: 11740 - DNA, 378 bp, Homo sapiens
ccgggcaggtaccctggcaaggtttgtcctgtcttggtagcagaaagaacttctcaaagtaagggcttcacactaggggagagttcaatggcccaacccagccatggccaccctgacaccatgccctgatgctagtccctgtggcctggcccacactgaaaatactgtggggacaacagaatggatttgcaagttaccactatctctcaccagctgtaagaccctgggcacattgttgatcctaagcctcagtttcctaatctgtaaaagggtgatattaattgttcttgctcacagaactgttatgagaattaacagaaatagcatattcagactatagcagagtgtctggcatgaaacagagactcaataaataca

SEQ ID NO: 11741 - DNA, 440 bp, Homo sapiens
gtcgccgttatactactattgggcgaatcgtagctccactgcggtggcggccgaggtacgttgaaatattaggggcaggttcccccaatatctggcgcccatcgtggttttctttttcctaagtgcatgtgggaacccgattccctttggtaggtgcggagaaatgttcatcggtccagtccacagaaatgcttgttcggctccccgacgattggtgagttgtctgtgtattgtccggggtaactatgggtcacgcagagtctaaacattatgcttatctctgctatattaaattcctgttaaaatgggggagttcgggttcccatggaaaatatggtcaccctattcagggcagtggaagaacactgtccttggtttcctgaaaagggaacgttagatgtggaactatgggatcacgttggtgcaaaattccgagaact

SEQ ID NO: 11742 - DNA, 389 bp, Homo sapiens
aggtaccagttgtaaaattaccaggaaccgccatgcctcaagatcgccctgttttctggcttcatcaatgactgcatgcagtgcaccaccctgtccactacgtgatgctgtaggattaagtctcacagtgggcggctgaggatacagcgccgcgtcctgtgttgctggtgaattagacgccatcgctgtgggttgctggtatggtgccgtgctatttggcacaggacacaccgcttgaggtctgtattgaacctctgaaggaggccgatactgaagctcggttggcagccggtattgataaactaccagcggttgggttcttattttctaccggctgatatttgtggatactgtatcttgagttggcattgccgggatagagactctgt

SEQ ID NO: 11743 - DNA, 387 bp, Homo sapiens
aggtacgcggggacatcaatgcagagtccctctgtgaatttacaacacccaacacccatgagttcagtccttaagaaggaaaattgagcaagtatttaattggttggacattgcataaaagaggtccatatccaggctaactctagaaattttattctcaaacttagttggcctctttttcttctgtcagaggaccattcttagtggcactggggaaatcttggcacccagaagaattcaactgcgctcactgcaaaaatacaatggcctacattggatttgtagaggagaaaggagccctgtattgtgagctgtgctatgagaaattctttgcccctgaatgtggttcgatgccaaaggaagatccttggagaagtcatcaatgcg

SEQ ID NO: 11744 - DNA, 375 bp, Homo sapiens
ccgggcaggtaccagtgaaggacaagaaacttctggaggtcaaactgggggagctgccaagctggatcttgatgcgggacttcagtcctagtggcattttcggagcgtttcaaagaggtcagagccttgtgggatgtctgtaaatgaaagcaaatctctgggtcttcagatctcttttttgccatgaattaatttgggcaatgaaggccttgttgtctgaaagcagtaagttatgtagaggatgacagggagggatgctaggccttggacttctgtggttgattggccctttcaaaggctggctctgagatattacagccaagaacatgcttcctgttgcttggaatcagtatgtctgcctctgtcttagagaaa

SEQ ID NO: 11745 - DNA, 374 bp, Homo sapiens
aggtacagtaacatgctgcacagttttgtaggctatgagcaataggccataccatataggctaggtgtgtagcaggctgtgccacccaggtttgtgtaagtgcactctatgatgcttgcacaacgaccaattccacccaacaacgcatttctcagaatgaatccctgttgtcaagcgatgcatgactgtgcctttgatagttccttacaaattgatcttgagtgtgtattcatgtgtaacctagttactgaataatgcatctcgaaatgttggattctttttgcatccgcctgtgctgtgctgccttccatggagctctatgatgactggcacctcctggtggaggcatccttcccacattacccccagtaaga

SEQ ID NO: 11746 - DNA, 385 bp, Homo sapiens
agttactctttttttttttttccttttttttttaataaaaaagaatcttaaaatctggttgagaattatatctggaatataattgtatatttgaatattgctgtcataacttttcagttggagaagggtcaactcagaggggttccacttcaaaaagaggacagggtgggtgaacagcttgcctggccttttttccccaccctgtgtctccatattccagccttctaagaaaatggctggtgggtgaggataatgcaccaaatccttcttgactggtgatcttgatgcacgtgccatttccctgtctctcccagtgtgggaacttaaacttagggcagagcctattcctggccttataatactgtgttggttgttttgacccttt

SEQ ID NO: 11747 - DNA, 383 bp, Homo sapiens
ccgggcaggtaccaggatccaaagagctcctgtggaaccagacttttccccactctgctgaaaaaacctctcctcagagccctgggctgtgcaacgacaactatgaaaatatttgtttctcacttagggaaatttcccaggaatcctgctaagtccagaggggttttctttctcttccttattcataggttccccttgcctttaaaaggaactaaataaacaagcataaaaacaaaacaagaaaatctcccctgctcccttggcttttatctgaccctgaaatgaccccttgcctggcttgcttcatacaggtctttgaaaggcgttctctgcagaatggtgtgggcacaactttgaagtccaggcttcagtagtggccaaac

SEQ ID NO: 11748 - DNA, 400 bp, Homo sapiens
aggtactttttttttttttttttttttttggaaacagggtttcaccgtgttagccaggatggtctcgatctcctggcctcgtgatccgcccgcctcggcctcccaaagtgctgggatcacaggcgtgagccatcgtgcctggccgctgcttgggtttaaaatgaatcttggatacaggtggccagactaaatggtctctcaacttgtcttcaagtttaggattttaatttttgatatttttcacttctctctggaaatttgttcaattctcaattgttgggggagatgcgcagcttgcttcattattggagtttactgggctgataaatcgaataaattttagaaaattattaattggggtcatgtgagctattcgctaaccagtttttaaaaaatatgg

SEQ ID NO: 11749 - DNA, 400 bp, Homo sapiens
ccgggcaggtactaacaaatgcagtagtcaacaagattaccatgcaatcattaaggagaaccaaagtaagagagccactcagaccagattttgaacgctactaaaattaaagtagttctttgatgaatatgaatgagtagggaaaggattctttgtaatagtgatacctctgcggtaagagaagggtggtatgtgagttttagtctacagattatggcaaattcagtgacaacaatcaaatggtctaagattgacagtagcacagctttactctgtgaaggtaatgttcaggacaaatttcaagaaaactagaaaaccattctttacagctgaaatctttccctaaccattgttatttccacttttaagtcctcaagagatgagaaaagggaggtaagga

SEQ ID NO: 11750 - DNA, 392 bp, Homo sapiens
aggtacgaaaaaatcaggctactaagcccactgttaatatagacgcagaccaattgttaggaacaggtccaaattggagcaccattaaccaacaatcagtgatgcagaatgaggctattgaacaagtaagggctatttgcctcagggcctggggaaaaattcaggacccaggaacagctttccctattaattcaattagacaaggctctaaagagccatatcctgactttgtggcaagattacaagatgctgctcaaaagtctattacagatgacaatgcccgaaaagttattgtagaattaatggcctatgaaaatgcaaatccagaatgttcagttcggccataaagccattaaaaggaaaagttccagcaggagtttgatgtaattacc

SEQ ID NO: 11751 - DNA, 398 bp, Homo sapiens
aggtacttctgctcctttttttggcagtagtggatgtgtcctagtgcttggtttctctgcaggccttttagggagaaatagctgaatttgttacagtataacttactttttatgttgatctgtttccttccctaatgtaaataggtctaatgctagttgtactttttttttttttttttttttttttttggaggggtttgcaactgcgttttattgaaagaaagagtggaggggttaacatggggcccaccttacaacccacttttcacccccaaaatcacccagggatgggactcaggaaagggaagcatgtgtgtgttgaataggagccctaactgtagttacttcttttacagcagggaaggaagagggaagaggcacctttggaaaggatgagg

SEQ ID NO: 11752 - DNA, 403 bp, Homo sapiens
  misc_feature 288: n = A,T,C or G
aggtactttgcttggattgctgtgattcttaaaaaaaaaaaaaaaaagtttttttattttcctgaaggcgacagtctgtcttttggcgagtccaattagtgatcgtttccatttatccttaaccctctgtttgtgatcttcctgattccacctacaagttcattagttctaaataaaagcctgttggcaagtgttggtagattacaactctttttatttgaagttgctcgagaagttagacatgctttagaattatgagtgtggggaaaattttgatgtttccttagngattattataaactgaggaggggaacattgccaaatagggttctgaggggctttgtttctcttcttggctctgaaaacattttctgaaaaaggcaagggaaggtagggggtagtt

SEQ ID NO: 11753 - DNA, 384 bp, Homo sapiens
ccgggcaggtacccaacagccatggctcttgcgactcacctgggcagctgtgtggctgcgcacctgactcactctttctagagggtgccttgaacagcatcagcgtggcccggcgttccctacaaatagcccttgcaattgctgacccccaacaatgttgggaataacagaagggacaagggaacaaagaaaaggccaggaaggtaataattaaccacttactgagttcaaagccatcttgctgttatcaacagcatcgagtaatgataggtatctggaatgttcaatatgacctagaagaaagaattacaggactgtaatatttccataccagttagtttttagaagataaatctggaaagaactagaagaatctctagatga

SEQ ID NO: 11754 - DNA, 383 bp, Homo sapiens
aggtaccgactcctcagaaactggcatgccaaatcaaaatgggtctggttcaatcctccctaatggcaatgtaaacccctctaactaatcccacttctcctaattatctttttctccttacgaacctaaaaatctcaccatttctattagcctgaaaataacatccctctgttcttctcttcctccttcagcactggatctcacttacaataggttttatttaataattatcttccttacactttctgtctcaccagtttccccttaaactgatttacctgctacacaaaattattcttattgggcttatgtgccttttcctccacttattcgacctctcacctggatggatgctcctgcagaaatctatactaacgatagtg

SEQ ID NO: 11755 - DNA, 370 bp, Homo sapiens
aggtactttgcccactcgtcatgtcaggagcatgaaactcacgaggccttcatttacttttatcctgtaacaccttcaatttttcccacatcctcccttgattcgtggatggacaactatggaggccaatcttgctgaggtgaggactgcttgagtctaaattcctctctcctcaaacccaattcaaactggcctgagcaaaatgaatgtattgatccataactgaaaagtccagaatgatcaggcatcaggcatggttgcatccaggggcccatgtattagaaccatctccttccagttctgggctctgcttgcctcccagttggttttactgcacagaggcttattcaagtccagagagatcttatct

SEQ ID NO: 11756 - DNA, 374 bp, Homo sapiens
aggtaccgagacaacaagtgacttatcccaagtcacacaggagttagaggcagggccaggacccaaacccaagtttcccttttatgagtcagctcatttcctgtgactccatattaaagatgccactctgaattttgccttggaagctggcgcttcagtttataacacaaattgacactttaggaagacaagagagctttgtattctccctgcaatcatttactcagtcaggaaaatactaaacactgtctttgcgtagaatataatgctactgatgtgaggaaaagaaatccagtgcctggcacatagaaaaggatagatacacttttgtgggaggaaaaacagtggtaaaaacatggactggagtctcagct

SEQ ID NO: 11757 - DNA, 386 bp, Homo sapiens
aggtacgcgggacatcaatgcagagtccctctgtgaatttacaacacccaacacccatgagttcagtccttaagaaggaaaattgagcaagtatttaattggttggacattgcataaaagaggtccatatccaggctaactctagaaattttattctcaaacttagttggcctctttttcttctgtcagaggaccattcttagtggcactggggaaatcttggcacccagaagaattcaactgcgctcactgcaaaaatacaatggcctacattggatttgtagaggagaaaggagccctgtattgtgagctgtgctatgagaaattctttgcccctgaatgtggtcgatgccaaaggaagatccttggagaagtcatcaatgcgt

SEQ ID NO: 11758 - DNA, 381 bp, Homo sapiens
ccgggcaggtacagagaagcaggttgagtggatggcaaagtgaccggttgaggggccaaaatgataggagggtgaggggctgtggtggatgggggagggcctgcagaattacaggtaaattgtagtttggatggctccggaggcaaagactgtaaaggtttggagagggaagagttagcatagatatggtcctgggctgtctgagttggggccgcaggagctacaagtgtcggctcttcgtgaaaagaaataaaatcatcagggggtgatgttaagccaaagtcactggagttagatattgaatcctcagtatcgtcaggtgggggaggagtaggcaaagggaggggctgagcaaataatgaaggccgagtgggagaggaa

SEQ ID NO: 11759 - DNA, 399 bp, Homo sapiens
ccgggcaggtacttagtggacactccgaggcaggcaggggagtgggaagctttacggtggaaaaggggaaggctgcagcagtgctctgattggaggcttctggcctggagaagttggaagcagctgatagaggtaggtgtcttcagtgattggtttgaggagcctatttgtttttctgtggttgattctgagttgcaagagtcctgaccatttggggctgattgctgctgaggttgtggttttcttgcaggacaggcaagccccaaattgggccttagcccatgagggttcctggctttacccaggaaagaattcaagggtgagccagtggtaaggtggaagaaaacaacttcattaaagaggcagtgtgacagctccgtgacttttcctgcaaagtaa

SEQ ID NO: 11760 - DNA, 392 bp, Homo sapiens
ccgggcaggtacagtggcgtgatcatagctcactgcagcctcaaactcctgggctcaagtgatcctcctgccccagtttcttgagtagttgggactacaggcgtgtgccacatctggctatttttttttttttaatagagaaggggtcttgttatgttgcccaggctcgtcttgaaattctgggctcaagcaatcctttcacctcagccccccaaagcaatggttcacaggttcacaggtatgaactaccatgcctagcctagctatttactcttaaaggaaaaaataattttttattttagttttcaaggcctttcatgctatttacacttgaagtttggccttattattttttgcttagaaatcttttaatggttttaggtcacgttggg

SEQ ID NO: 11761 - DNA, 384 bp, Homo sapiens
ccgggcaggtacttttttttttttttttttttttttttttggtagagatttccccatgttgcccaagttggtctcaaactcctggggctcaagagatctgcccacctctgcctcccaaggtgctgggatttttacaggtgtgagccaccacaaccaacctaatctggttttaaaaataatagagagatagaaaagaccagattctttcatgggaaggaggaggaggtggcaaaagtcaagccattttccgttatgaggttgcagagggcagctctcacccaaggagcgagcatgcaggaaagcagatgagtcgtattaagggaaaggaactggcggtcattaacccaggtcaaacacgggcaggtggcctcccaaggctgaaaa

SEQ ID NO: 11762 - DNA, 384 bp, Homo sapiens
aggtacaggccagactcattcatgttcacaggccccatccatctggcccattaatccagcctatgacggtgatgtaactgaaaggctggaccaggtttatagaaggttagaatcactctgtccaaggaaaatggggtgaaaagggaatttcatcaccttgaccaaagttagtcctgttactggtcctgaacatccagaattaggaagcttactgtggcctcacaccacattagaatttgttctggaaatcaagctataggaacaagagatcgtaagtcatattatactatcaacctaaattccagtctgacaattcctttgcaaaattgtgtaaaactcccttatattgctagttgtaggaaaaacatagttattaaacctgat

SEQ ID NO: 11763 - DNA, 398 bp, Homo sapiens
aggtacctgtggatgggaagaatagaaatcaggagtgggcagagggaaaagttaagctgtgatgtaggcccagtgacaagccactgacacttctatggggagctgtaaatagacctttggcattgtcccaagttgggccaatatggccagggcccttacaggctcacacatcatttattgcttgtgggccactccaggaaggtgcatgactttgggtaaggaggctctctggagctgaggtaatccctgaaaggactaacagctgaagattgtctgctgagaatactgccgaagactaaggcaacaaattctttccacatacaggatctggatggcacatcacagtgcccaaaataaaggctgaactttatttagttataatctgatcagtttggaat

SEQ ID NO: 11764 - DNA, 378 bp, Homo sapiens
aggtacttcaaatgggtcactgaatatcttcaaattgtatgtaaattttggaggggaagtggtatatgcagatttttttttttctggaaagaagaccaatcacttttgccaaattctcaaacaggcccatattttttctaacacacatgcgtgcgcatgcgcacacgcgcgcgcacacacacacacacacacgttaagatgcgaagaatcactgtcataaaatgtcatatttctaatttctgtaaatggggagaattcctcaagcttatataaaagtgatgtaaataattcagttacaattataaaagaaatggtatcacagcaaatccctttggcaccccactgaaaatttctctctgatgtttaaaacaccatttc

SEQ ID NO: 11765 - DNA, 418 bp, Homo sapiens
  misc_feature 145, 173, 181, 194, 195, 237, 238, 267, 268, 275, 276, 298,299, 308, 309, 320, 322, 323, 341, 347, 348, 349: n = A,T,C or G
ccgggcaggtacctctgctcagttttgctgtgaatctaaaactactctatataaagtctataaaaaactaaaacaaaaactaaacccctgaagattggaattttgcaagacggagtagctgttcctcaaaagaacagcttatgtnccccctcttggccagcacttggcttgangacttacnagggtgcaacatnngaaatttcttgtttcgtagcaaggtgcatttgtctcacagtnntgtcagtctgccactttccgagtttattnngggtgtnnttgtttccttttgagaatccanntgcatttcnnctggttgaatncnntcctggaacctccctcanttaggnnntatgaaatagcatgatgccattgcatttaaagtcacggaaaggttggcaaaagaatcacccaacgctga

SEQ ID NO: 11766 - DNA, 403 bp, Homo sapiens
ctgggcaggtacaggttgctgtaggagcccttaatctatgagatcttgacagattgcttgctttcttctttccaccatgggagaatgcaacaaggtcttcaccagatggccgaacagatccaagtgtcatgaccttggactgtccatcctccagaaccataggccaaataaatttcttttcttcataaatttcccagtctgtggtatctggcttaccttgaaatcaactgaaatcagtcactaaggaacaaaattctccagagaaactgtttcttccttgaaatctgaatgcccgaactgtcaaatcatttagccactgaaaacaaggaagagccttctcttgaatgtttgagccagccaagaagagcttgccccacacttggacattcaaatcagccagcag

SEQ ID NO: 11767 - DNA, 377 bp, Homo sapiens
aggtacgcggggctttctcgaaggaatcccttaagtgcacgtctcccgttttcttttcacatcaatgcatagtccctgtgtgaatttacaacacccaacacccatgagttcagtccttaagaaggaaaattgaaccaagtttttatttggttggacattgcataaaagaggtccatatccaggctaattctagaaattttattctcaaacttagttggcctctttttcttctgtcagaggaccattcttagtggcactggggaaatcttggcacccagaagaattcaactgcgctcactgcaataatacaatggcctacattggatttgtagaggagaaaggagccctgtattgtgagctgtgctatgagaaattct

SEQ ID NO: 11768 - DNA, 390 bp, Homo sapiens
aggtacaaactctgtttagataaagaattaaacaaaacttccatttttattaataattcaagtataatccataatatgattattaggtgttataactaataagttgttattttatatcttaatgtaggtaaagagaactggtcttgtggtggtgaaaaacatgaaaattgttggtctccactgttctagtgaagatttacatgccgggcagattgctcttattaaacatgggtcaaggctgaaaaactgtgatctttatttttccagaaaaccatgttctgcttgtttgaaaatgattgtaaatggtaagtgcagaaaagggtttgttggggattaagagtatttatctgggatgggcgtgggggtttatgcctgtcatcccagcacttt

SEQ ID NO: 11769 - DNA, 385 bp, Homo sapiens
aggtacctttcattggattgtccatggtgcatcgctttagcaagcggcgtgactctccgctgcccgtcatcttggccaatatctatctgctggttcctcctgtgctcaacccaattgtctatggagtgaagacaagggagattcgacagcgcatccttcgacttttccatgtggccacacacgcttcagagccctaggtgtcagtgatcaaacttcttttccattcagagtcctctgattcagattttaatgttaacattttggaagacagtattcagaaaaaaaaatttccttaataaaaatacaactcagatccttcaaatatgaaactggttggggaatctccattttttcaatattattttcttctttgttttcttgctac

SEQ ID NO: 11770 - DNA, 377 bp, Homo sapiens
aggtacgcggggagctcaataaaacatcaccaaattcccttaggcagaaaaagggtggggagtgtcctttcttgaaggaatcccttaagtgcacgtctcccgttttcttttcacatcaatgcagagtcccttctggggaatttacaacacccaacacccatgagttcagtccttaagaaggaaaattgagcaagtatttaattggttggacattgcataaaagaggtccatatccaggctaactctagaaattttattctcaaacttagttggcctctttttcttctgtcagaggaccattcttagtggcactggggaaatcttggcacccagaagaattcaactgcgctcactgcaaaaatacaatggcctacatt

SEQ ID NO: 11771 - DNA, 374 bp, Homo sapiens
aggtacgcggggatcctcattctcaatcctacccatgatgcagacagattgcctcatttcagctcaataaaacatcaccaaattcccttaggcagaaaaagggtggggagtgccctttcttgaaggaatcccttaagtgcacgtctcccgttttcttttcacatcaatgcagagtccctctgtgaatttacaacacccaacacccatgagttcagtccttaagaaggaaaattgagcaagtatttaattggttggacattgcataaaagaggtccatatccaggctaactctagaaattttattctcaaacttagttggcctcttttttttctgtcagaggaccattcttagtggcactggggaaatcttggca

SEQ ID NO: 11772 - DNA, 380 bp, Homo sapiens
  misc_feature 277, 363: n = A,T,C or G
ccgggcaggtactgatgccattaataggaatcatgggaacatgggaatgagaaatgagctccaaaagaaaagatgcattctcttttggacatattgagttggctatctctaaaagatattcatgtgcagatgtctggcagactattagaaatgctggtttggaactcaaggaaaaagttacaaaaaattggactaggttaatggatggactattttgaagttaaatcctatgcttcagtataaatgaagacatattttttttttctataaccactanttgaagttcccctccccctccaaattataagtattggtctttgggagtgttttggatccacatttggcaggggactggggatatgngagaaaaggaggtgaaa

SEQ ID NO: 11773 - DNA, 396 bp, Homo sapiens
ccgggcaggactatagattatttgtcttgaagaagagctttgatatgtttcaaaattcgacgttggctttggaaggaaactgtaaatttacagatctttgtccttccccacaaagagccttaatctcacaggttggattatgtggaactcactgctatttttcagttctcctttaagtgactaaggaacatccagatacttccaaaaaaaaaaaagtctaagtttttcactttgtccattgccatttaattatcttctgcatattttaaagcatttcctgtgaacataagtattgcccatccagaaaatttgcgtctacattgattttatgtttaatgaaacctgttcttctcaagttctttatttaatcacataacatagtatcttcaaaggtga

SEQ ID NO: 11774 - DNA, 384 bp, Homo sapiens
ccgggcaggtacattatttctccatatgtctgtcccctctgctccaaaactgcaggggagagtcttgcacatcatctttgtaaaaacagtctttgttttactcagaaaatttgtattgagtcctgctacatacacgctaggcattaggggtctaaaaagaatgaaaataaagcatctcagggatggcttttctagaacacatgcccaagcagagacttaaatattgaggctggccagattaaaaggggtagagggcaggaaagggtgacagcatgcccggcagcagcaagagcgggagcgaggcctgaaagaatgaaagtatttgcctacaatagaaggatgagtgagtagggcactaccagcagctcagtaatgccagagaag

SEQ ID NO: 11775 - DNA, 392 bp, Homo sapiens
aggtaccagttgtaaaattaccaggaaccgccatgcctcaagatcgccctgttttctggcttcatcaatgactgcatgcagtgcaccaccctgtccactacgtgatgctgtaggattaagtctcacagtgggcggctgaggatacagcgccgcgtcctgtgttgctggtgaattagacgccatcgctgtgggttgctggcatggtgccgtgctatttggcacaggacacaccgcttgaggtctgtattgaacctctgaaggaggccgatactgaagctcggttggcagccggtattgataaactaccagcggttgggtcttattttctaccggctgatattgtggatactgtatctgagttggcattgcccggatagagactttgtcccttt

SEQ ID NO: 11776 - DNA, 384 bp, Homo sapiens
ccgggcaggtacgaaaaaatcaggctactaagcccactgttaatatagacgcagaccaattgttaggaacaggtccaaattggagcaccattaaccaacaatcagtgatgcagaatgaggctattgaacaagtaagggctatttgcctcagggcctggggaaaaattcaggacccaggaacagctttccctattaattcaattagacaaggctctaaagagccatatcctgactttgtggcaagattacaagatgctgctcaaaagtctattacagatgacaatgcccgaaaagttattgtagaattaatggcctatgaaaatgcaaatccagaatgtcagtcggccataaagccattaaaaggaaaagttccagcaggagttg

SEQ ID NO: 11777 - DNA, 390 bp, Homo sapiens
ccgggcaggtacccaacagccatggctcttgcgactcacctgggcagctgtgtggctgcgcacctgactcactctttctagagggtgccttgaacagcatcagcgtggcccggcgttccctacaaatagcccttgcaattgctgaccccaaacaatgttgggaataacagaagggacaagggaacaaagaaaaggccaggaaggtaataattaaccacttactgagttcaaagccatcttgctgttatcaacagcatcgagtaatgataggtatctggaatgttcaatatgacctataagaaagaattacagggctgtaatatttccataccagttagtttttagaagataaatctggaaagaactagaagaatctctagatgaaggtta

SEQ ID NO: 11778 - DNA, 374 bp, Homo sapiens
ccgggcaggtacgcggggaggctttgtgacacacacacacacacagcacctgcacgcagatgcacacatctctagtcaaatgaggctctcagctttttgataggggctttttgatacgtgtataaccaatactttattctcactgtagtcaaggactcattgcaattcagaaatgagaagctgatccggaactccactacagctcaaagaaattctcgaatgttctcacctattaacagttattaaaatggaagaagctggggatgaaattgtgagcaatgccatctcctacgctctatacaaagccttcagcaccagtgagcaagacaaggataactggaatgggcagctgaagcttctgctggagtggaacc

SEQ ID NO: 11779 - DNA, 379 bp, Homo sapiens
gccaggtccccggggatcaatgcagagtccctctgtgaatttacaacacccaacacccatgagttcagtccttaagaaggaaaattgagcaagtatttaattggttggacattgcataaaagaggtccatatccaggctaactctagaaattttattctcaaacttagttggcctctttttttttctgtcagaggaccattcttagtggcactggggaaatcttggcacccagaagaattcaactgcgctcactgcaaaaatacaatggcctacattggatttgtagaggagaaaggagccctgtattgtgaagctgtgctatgaagaaattctttgcccctgaatgtggttcgatgccaaagggaagatccttggagg

SEQ ID NO: 11780 - DNA, 392 bp, Homo sapiens
aggtactttttcttttttttttttgtttttttctgggctgttagaatttgacattgttcaactttaactttgtcctcattgaactttatcctgctaaggagctaaaaggtccatatgatcaaaaaggcagctctcaacccagcacgaaattccaaggctcattcatttctgtttacctactgccaaataagtcagacaactgcatacttgctttacagacgaatagaggacagcatgttgttcaataattgtagtttaaaaagtatatgtaagatacatccacaagaagaaagatagagggagcataccgtttgtcttctagtataggctccctgcccatggagatcacagagtagaattatgatgggtgccttagagaccagcctccctag

SEQ ID NO: 11781 - DNA, 398 bp, Homo sapiens
ccgggcaggtactctggtagccaagttttgcaagagccggggtttccagcagggatggtagccagcctgggcacacttttctgtattgtatttgaacctcatttcctgatgctcatccagaagttcctggctgggtgagtaggtgaacagttcaaggctgtgtggatgaaactctggcatctctttacagtgctgtccggcagggcagtgtgaggccactctgtcctcctttgacctctttcttcttcagcagccaaatggaggctctctaaaggtgatgattaacttggcataaacatgccaagctttcctgagcgtttgccctgaattgggctgtctcttgctgctctgagacagggagactggctgtctggctgaccagcccttggggctgaggt

SEQ ID NO: 11782 - DNA, 405 bp, Homo sapiens
ccgggcaggtacttccaaaccctcctgttctttccgttttgttttccccaattttaacataaggcaaaagcagtaattgagcaattctatcacctggattggcactccggggaacagtggagctgacactaactgaattccccctttataatctgaataaattaccccagtatgaatttggactcccttcaaatttagacttgatctccctaaaataaggcctaccctcccttctggcagcgggccatatacccctctaggaatcttttgtgggggctttccagggagtaaagagaccatttgggtggaacataaatctactgcggtgctgcctgctgtggcgcgggacagctgttggattgttgtaattggctgactccctgaagtggtggtattgtctgaggg

SEQ ID NO: 11783 - DNA, 371 bp, Homo sapiens
aggtacagagtgatgccaggcgttcatctccccactgagctcctgctgagtgtttgcctggggccaggtcctccttccgggaagtcattttagctggaaagaacagggtgggggcgggtggcaagggatcagagcatgagcgtttgagggcttcgtcaggggcagtgaggagcctctaaaggactctacatttaggaatgacagagtcaaacaatttaacaaagccctaaaggtccctgccaggaaagaatgagccccatgtatcaccataagcaacttcttagaaacataacccacccctgtcatcccagcactttgggaggccaaggagggaggattgcttgaagccaggagctcgagatcaacctggt

SEQ ID NO: 11784 - DNA, 379 bp, Homo sapiens
aggtactttactgaaaaccaggttatattctaaagaagaaagaaggcaggatagtgcttttgaacaagcctatttccattttgaaagtagatttcaggctaggtgcggtggctcacacctgtaatctcagcactttgggaggccaaggcaggcagatcacttgaggtcaggagttcgagaccagcctgaccaacatggtgagaccctgtctctactaaaaatacaaaaattagctgggtgtggtggcggcgcctgtaatcccagctacttgggaggctaaggcatgagaattgcttgaacccaggaggtggaggctgcagtgagccgagatcacgacactgcactccagctgtgtgacagaatgagaccatctccaaaa

SEQ ID NO: 11785 - DNA, 427 bp, Homo sapiens
aggtacaactgatcagcaaaaatattatgattaatatgttaactgaggaagtatatcctacaatttagaaagattaatatttaaaatagttaaaattattgaaagttttaacttgcccgaaacagtccctaaccataagggacaattaatgatgctataaaattctatctaacattcctagtctacttgttgttttggagggcaggctgccattcctgcctattttaatctttcgaaagtgggctctggtcccatttaaaggtgttagccattttagagatacacaaccctcagaactaccttctataacattacctaattttctaagacttaaaaatgtaatactatagctgggccatgggtgggatcacccccaggtgcacgagttttgaagaccatttctgtgccaaccatgggagaaaacccc

SEQ ID NO: 11786 - DNA, 402 bp, Homo sapiens
ccggccaggtacgcgggggtgacacacacacacacacacagcacctgcacgcagatgcacacatctctagtcaaatgaggctctcagctttttgataggggctttttgatacgtgtataaccaatactttattctcactgtagtcaaggactcattgcaattcagaaatgagaagctgatccggaactccacaacagctcaaagaaattctcgaatgttctcacctattaacagttattaaaatggaagaagctggggatgaaattgtgagcaatgccatctcctacgctctatacaaagccttcagcaccagtgagcaagacaaggataactggaatgggcagctgaagcttctgctggagtggaaccagctggacttagccaatgatgagattttcacca

SEQ ID NO: 11787 - DNA, 400 bp, Homo sapiens
aggtacgcggggagaaaggaaagcatgaggaataggaaaccttgtgggagtataataacaagagtattggttgagtagtcttttgaaaaatataaattatattttcgcaaatagaactccttgagtccccttatggcagtcaagctgaagcagcatgagcgtcatatcatagtgatgtattttaaggtcacaacggcggaaagacatagaaagtatctgacctcttagaaacaagcagctgctgcctggtggtaacagcaaagggtggaagtcaatagagtctctgtgagactgtttcacagaaggatgtgtgtttacccaaggctgcgcatcaaaaagaaatagataaaataaatggaaaattagaagggtctcctgttaaagatggtcttctgaaggc

SEQ ID NO: 11788 - DNA, 377 bp, Homo sapiens
aggtaccctcagtctttcaacgttagtcaaacgttacattttctttcactcttacccttttttgagcttcatttcctctctttatgttctcgagtatagcttcgaggtgtagggtattcattcccaagatccacaacaattacctccctagaaaatgtcactccttttaaaggtcttttttggctttcaacaactgaaggagttctagtgacagatgtgtgtattttctgcaaaccatcatcctcttcttgaccagtttctccagcattctcaggctcttgcttctcatttatttggttctcctcttctgcctccatgctccctttctgttttctaaggggtgttggccaacacttccttacttctgtctctggaaa

SEQ ID NO: 11789 - DNA, 419 bp, Homo sapiens
ccgggcaggtacatacattctaatggtgtaggaatgtataatgaaagatggtcttcaatggctactgaaacacctgatataagggatgctgtgtgcactactacatagagattgggtcttaaaaatatttagggaaaaaagctataattttctttctgaaaaatttaatcttaagtgatatttactaagaaatatatactgcaaaccacaataacaatgatcttctcaaaatttgcctaattgcttcacaaatgagtcaacttacaaagaagaaaacacagaaaattgcttttaaatatataactccttcattttgctgataatcaaatgaaaatttaattcatcccatttaatacaaattaaactcatgctcaatgtaagatatcattatatattttataacaacataaaagttcaag

SEQ ID NO: 11790 - DNA, 389 bp, Homo sapiens
aggtaccagttgtaaaattaccaggaaccgccatgcctcaagatcgccctgttttctggcttcatcaatgactgcatgcagtgcaccaccctgtccactacgtgatgctgtaggattaagtctcacagtgggcggctgaggatacagcgccgcgtcctgtgttgctggtgaattagacgccatcgctgtgggttgctggtatggtgccgtgctatttggcacaggacacaccgcttgaggtctgtattgaacctctgaaggaggccgatactgaagctcggttggcagccggtattgattaactaccagcgggttggggcttatttttctaccggctgatattgggggataccggatttgaattgggaattgccgggataaaaaacttt

SEQ ID NO: 11791 - DNA, 418 bp, Homo sapiens
ccgggcaggtacgcggggacatcaatgcagagtccctctgtgaatttacaacacccaacacccatgagttcagtccttaagaaggaaaattgagcaagtatttaattggttggacattgcataaaagaggtccatatccaggctaactctagaaattttattctcaaacttagttggcctctttttcttctgtcagaggaccattcttagtggcactggggaaatcttggcacccagaagaattcaactgcgctcactgcaaaaatacaatggcctacattggatttgtagaggagaaaggagccctgtattgtgagctgtgctatgagaaattctttgcccctgaatgtggtcgatgccaaaggaagattcttggagaactcatcaatgcgttgaaacaaacttggcatgttccctg

SEQ ID NO: 11792 - DNA, 437 bp, Homo sapiens
ccggccaggtactatatgccatggatgtgaatttcccatagaagctggtgacatgttcctggaagctctgggctacacctggcatgacacttgctttgtatgctcagtgtgttgtgaaagtttggaaggtcagacctttttctccaagaaggacaagccccctgtgtaagaaacatgctcattctgtgaatttttgaaagtcaacagtttcaggaagaagagaaggatatttgaagagaaaaaggaaaattaaaattactaattaatttttaggattcaatattttatattggagttttgaaaaataataggtgggcccttgaaggaaattaaatttccagctttttaaaaacccaaagtctgaaggaaaatattttggggctttcataaaaggtaaaagagaaccgggtttgggcatttaatttattaactttttt

SEQ ID NO: 11793 - DNA, 367 bp, Homo sapiens
ccgggcaggtaccacccccttgccgaaagcactggttcccctgttgaagcttgctagggattacagtgggtttgactcaattcaagtaagtaagcaaacatttaaatatttttcaggcataaatgttagcgttcttatcctgtaatatgcgaagtaaataaatttatatacttactgcctttgttacaatgcatgcaaacacgtggtaaggtgttcataccttaggaagagatctgattctcaagaacagcagaaaataggaagcagagaatgagttaggatgaaattcaaatgggagaaagaaatgaagaagccagatacttccagtagttaatttcttaacatggctacttataataatagagaa

SEQ ID NO: 11794 - DNA, 460 bp, Homo sapiens
  misc_feature 460: n = A,T,C or G
gttgcgccgtatcactactatagggcaattgagctccccgcggtggcggccgaggtacaaagtccctgaggcaaaagcatgcttgctgtgttctaggaaaagcaaggaagacagcatgtctatagcagtgggaggtggaaggataataaacagtaggtgaggttagaggggaccaaatcatgtattttccatccagaggttcccaaccttggctgcacattagatttattctaaggagcttttaaaaaaataccaatgactgggtcccagcctagagtgattaaatcagaatctctggaggtagacttgagaatctgatgtttgcaagtttcctaggcaagtcaaggctgaggaagactgctgcaggccattgtaagagccaggcgttgatctcattcaacctttccctcagctcttctagagacagccagcattctcttatggcacaaatacagccttn

SEQ ID NO: 11795 - DNA, 374 bp, Homo sapiens
ccgggcaggtacgcgggctttcttgaaggaatcccttaagtgcacgtctcccgttttcttttcacatcaatgcagagtccctctgtgaatttacaacacccaacacccatgagttcagtccttaagaaggaaaattgagcaagtatttaattggttggacattgcataaaagaggtccatatccaggctaactctagaaattttattctcaaacttagttggcctctttttcttctgtcagaggaccattcttagtggcactggggaaatcttggcacccagaagaattcaactgcgctcactgcaaaaatacaatggcctacattggattttgtagaggagaaaggagccctgtattgtgagctgtgctatga

SEQ ID NO: 11796 - DNA, 403 bp, Homo sapiens
  misc_feature 403: n = A,T,C or G
ccgggcaggtacagtattgagaagtagggaaagaatagaaggaggagttgaatctgtaattgactgagcaatcagttgagataactcactgcctccacataaccttgggctgtcctatgagtcagtggagagcaacccctctcatgtaggttcagtctgaggtagctcactggcactgggaaagttgatcagggtagtcccatctcatgcacagccccatttccccatgagccgctagagtggctcgtatcagaaagatgccataccaaatgctggcaaggacctggagcaactagaatgcatgtgcatttaccttgtcctgacagccactttggagaactctttggctgtttcttataaagctaaacataatcttcccaaataacatggcaatcccacttcn

SEQ ID NO: 11797 - DNA, 404 bp, Homo sapiens
aggtacttttttttttttttttttttttttttttattgacaacaaaattttttagaggggcttcaacttaactgaataggattaaaggtggattctttggtcagtgttcaagaagagaccctatagctacttacaaaggagtccacacctcaaagtaagccactcagtaaagcttatctattttcactggaacgaaaaggagctaaacaaatgacaaattctactaaactacaaggaaggcaatcagcatcagttgtgcaactttggttaaaatgtcccagccaaaaaacattctctatcatttcatcattttaatcaggtagcttctcattcctatttgctctggggtttctctgctaaaatgtccacatgttgattaaatagcaaactgagacaagccctac

SEQ ID NO: 11798 - DNA, 402 bp, Homo sapiens
aggtacttccaccttctaaggacatccataagtcaggtttgatttcttcactgtcaaagcgttccttcaggaaagtctggaaataaaataagccagatgtggttaaaaaaacaatttcagataactatggaatatttaagaaaatacagagtgatgtcttggactttaaaaaaatagagctgatttcaaatgcttttcaaagatgtttaaaaaaggctatttccacaatcttttttcctgtcgtatattgaaaatcatttaaactgctcaaataatgtttaataattgaaatttaaaataattgtaaagttgactatatcaatttttttttttgagacgaagtcttgctctgtcacttgggctggagtgcagtggcgcaatctcaactaactgcagcctctg

SEQ ID NO: 11799 - DNA, 404 bp, Homo sapiens
aggtactttttttttttttttttttttctagtttctacatttcttttaatgttgttataccactgttacctaactaggaaaaaataaatttttttaaatgaccaagctcattttgaagctgctcggtgtcccataaacactgaggcctgcctgcctcaactaaagcagccacttgaaatgcagctccagctgctcattcttctgtttatcaaaacagggcaaagccgcccaggaaactcgcctcagcaaggtgacctgacctcaggcccatcacagtcacaaatctgcattcccaataaaaaataatcacaacgaagaaagcacccaggtaaccagttatggaaaagcaaaggattgatgagttgggggtgacaggacagtggattactggttttgtttttttg

SEQ ID NO: 11800 - DNA, 415 bp, Homo sapiens
aggtacgcgggagaagaaatagcaagtgccgagaagctggcatcagaaaaacagaggggagatttgtgtggctgcagccgagggagaccaggaagatctgcatggtgggaaggacctgatgatacagaggtctgtaggccatgggaatgggtttggaattttattcaaagagctatgggaagtgactagaaggtttaaagttggggaagaggttttgtgtttctgttatatttgtgttttatacaaattactctggttgctgtgttgataggacagcagaagggtaggagcagggacaccagttaagttattgcaatggttaaggtgagaggtggtggctgggcctaggcctttttggagtgaacaagctatttgcttggcttccatgatccttctccctccactggaatggaag

SEQ ID NO: 11801 - DNA, 460 bp, Homo sapiens
gcagtcatccacttacttctactatacggcgaattggttctccaccgaggtggcgggcgcccgggcaggtactaaaaaatcaggctactaagcccactgtttttatagacgcagaccaattgttaggaacaggggcaaattggagcaccattaaccaacaatcagtgatgcagaatgaggctattgaacaagtaagggctatttgcctcagggcctggggaaaaattcaggacccaggaacagctttccctattaattcaattagacaaggctctaaagagccatatcctgactttgtggcaagattacaagatgctgctcaaaagtctattacagatgacaatgcccgaaaagttattgtagaattaatggcctatgaaaatgcaaatccagaatgtcagtcggccataaagccattaaaaggaaaagttccagcaagagttgatgtaattacagaatg

SEQ ID NO: 11802 - DNA, 461 bp, Homo sapiens
ggaatgtcctttaactctcatataggacgacttggagctccttcgcggtggcggccgaggtacatatatatgtatgcttgtaaatgagcttttattagctgtgtatattaaaggttttctccatcctgtgatctgcttttagattttggaacacatttcattgtgcacattccatttgtattattaatatgacaacatttattactattattattatcatcattaattcaatcacatctactatatccctgataatgaccatgatccttttaataatcacaaaactctcttcccttcatcacggggtaaataacctaccacaatgctgtaagtctccatcagcaccccaggctgcccctgctcacttaccagatctgctactttagccagatcaatcatcatgttaatgtcacacccacattcaataatggtgagtctgcgctttttacctgacacgatcg

SEQ ID NO: 11803 - DNA, 400 bp, Homo sapiens
ccgggcaggtaccagttgtaaaattaccaggaaccgccatgcttcaagatcgccctgttttctggcttcatcaatgactgcatgcagtgcaccaccctgtccactacgtgatgctgtaggattaagtctcacagtgggcggctgaggatacagcgccgcgtcctgtgttgctggtgaattagacgccatcgctgtgggttgctggtatggtgccgtgctatttggcacaggacacaccgcttgaggtctgtattgaacctctgaaggaggccgatactgaagctcggttggcagccggtattgataaactaccagcggttgggtcttattttctaccggctgatattgtggatactgtatctgagttggcattgccgggatagagactctgtccctttct

SEQ ID NO: 11804 - DNA, 482 bp, Homo sapiens
aggtacgatatatgaaggagcttccaacatccagttgaacaccattgcaaagcatatcgatgcagaatactgacgtctataggagtgggacccctccctggtgtcactgctgtaaaattttaaacggttgtgtcttgttgggagtaagtgcccttgcgtggggaataaaccttccacagccattccgaatatttttaaatgaagcccccttaaatccagggttccttggttgtttggccctattttggtttttactctttttcagggcctgttttaaactttaggccaccagggagtatcccaactttttaatacttgggggaaaataaagccaccttgtgattttttttttcccaaaaaactgggtttttaaaaaccttgtaataacggccatacaatattataatcattttttttaccttctgatcctttaacttcttgttcaaccccataggcttaagaggttgccagttggccgttga

SEQ ID NO: 11805 - DNA, 409 bp, Homo sapiens
gcgaggtactttttttttttttttttttctttttttctatgaaagtttttgcgtgacctatttttcctctctccatgcaaaggtaagcctggaaataatacattttattttttagttaaaaaacaagaatagaaaagagcctcatttagtaatgaagggaacgtaacctttattcaatgcaaagggcaatggattctatattcatctatgtgccaagcagccctctgagctttaaaaactaattatagggggagattgtgacttttcagtctttttggctcatgccatattctatggtactggtctcctgagttcacttgtttaaataatttcccctcaccttcccatgcaaggcattaaagagcacaacaggcagctgccactttggggacctttttagtattgctgc

SEQ ID NO: 11806 - DNA, 400 bp, Homo sapiens
ccgggcaggtaccacccccttgctgaaagcactggttcccctgttgaagcttgctagggattacagtgggtttgactcaattcaagtaagtaagcaaacatttaaatatttttcaggcataaatgttagcgttcttatcctgtaatatgcgaagtaaataaatttatatacttactgcctttgttacaatgcatgcaaacacgtggtaaggtgttcataccttaggaagagatctgattctcaagaacagcagaaaataggaagcagagaatgagttaggatgaaattcaaatgggagaaagaaatgaagaagccagatacttccagtagttaatttcttaacatggctacttataataatagagaaatggtaagaaaagaaggaaaagcaagaaaaatg

SEQ ID NO: 11807 - DNA, 404 bp, Homo sapiens
ccgggcaggtacggtgaatagaaaattccccatatgatgtcaactaccaggtgcttgtaagtttgagggctctgaaggccatcctagggatacccacatgatttcagcggtgtctgttgggcagtgccagtcttggaaggtgggccaagcataaattccacaaccttataactaatattagatgaagtttctcaaacattcctttgagacatggcaggacagcgccagggatcctccttcaggaagaaactagattttacattggtacgcgggggttccgggcgtcaccatcgtccgtgcgcaccgcccggcgtccagatttggcaattcttcgctgaagtcatcatgagctttttccaactcctgatgaaaaggaaggaactcattcccttggtggtgttcat

SEQ ID NO: 11808 - DNA, 400 bp, Homo sapiens
aggtacgtaacaggacatcaataaatattagttgaatggaagattaaatcaacaaaatgggtgatggatctctgcagtaagtggaagagttcttcatggcccccaaggttatatccatctagaacttcagcacgtaatttcatctggaaatagtgcctttgcggatataagttaggtaaaactgaagatgagatcatactggattaggatgggatctaaatccaatgaaaatgtcttcataaaaaacaggaaagaacccatagaaacacaaggaagaaggtcatgtgaagatggaggcagagattggagggatgcagccaccggcccaggaatgccagcagccacccagaagctggaaggaaatgagggattctctcctagaacctttagagagaacatg

SEQ ID NO: 11809 - DNA, 405 bp, Homo sapiens
aggtacctaatataaagttaagtggttttatttaatacttttttcctgaccatgattatgttataaataagaggatttatagtttgcatgcctgatataatctatttaatttcctttacaaaatttttgcacatgaaagataaatgtcttcattttaccagctacctccttccagattgaatgcttcagtgcactttgattttcaaattggctattattttttaatgtaattaaccttcacaatttaaattgaaggatattctgatccttaggttataaatatgtgacttgatggtttatgtaacattcaagtagcatgttttctataacaatatgataaaagttttgatacataccttgtatgttgcttgacagatctgttttagaaaacattcctctgccttt

SEQ ID NO: 11810 - DNA, 406 bp, Homo sapiens
ccgggcaggtacattatttctccatatgtctgtcccctctgctccaaaactgcaggggagagtcttgcacatgatctttgtaaaaacagtctttgttttactcagaaaatttgtattgagtcctgctacatacatgctaggcattagggtctaaaaagaatgaaaataaagcatctcagggatggcttttctagaacacatgcccaagcagagacttaaatattgaggctggccagattaaaaggggtagagggcaggaaagggtgacagcatgcccggcagcagcaagagcgggagcgaggcctgaaagaatgaaagtatttgcctacaacagaaggatgagtgagtagggcactaccagcagctcaataatgccagagaaagggcacacagggaaaagggctat

SEQ ID NO: 11811 - DNA, 492 bp, Homo sapiens
  misc_feature 256: n = A,T,C or G
ggcatttctcccagggatctctgtgcttccttttgtgcttcctgtgtgtgtggatatttaaaggggctggaaatgtgcaaaaacatgtcactacttagacattatattgtcatcttgctgtttctagtgatgttaattatctccatttcagcagaatgtgtgggcctcaaaatggtaaaagttaagcaagccctttcttaatttctcaaccctctgtaattcattcagggtcctttccccaccaatgcaagaatcntgtcctggttcttcccttcgggctggcagcccacaacaaaattctcccccctccccatctttctctacccctcgccctaccctcgcgcccgggtcctgcgacacttattagaaaactacgctgggatccccccacggaacattgcaaggatattacgactttataaaaaccttaattccaataccctgttcagaaccctgggaacgggggggagccccacggtacccgcagtcttc

SEQ ID NO: 11812 - DNA, 396 bp, Homo sapiens
  misc_feature 172, 173, 176, 205, 206, 207, 210, 211: n = A,T,C or G
aggtacgcgggggggagtgccctttcttgaaggaatcccttaagtgcacgtctcccgttttcttttcacatcaatgcagagtccctctgtgaatttacaacacccaacacccatgagttcagtccttaagaaggaaaattgagcaagtatttaattggttgggccttgcttnnaanagggccatatccaggctaactcttgaaannnaannctcaaacttaattggccactttttcttctgtcagaggaccattcttagtggcactggggaaatcttggcacccagaagaattcaactgcgctcactgcaaaaatacaatggcctacattggatttgtagaggagaaaggagccctgtattgtgagctgtgctatgagaaattctttgcccctgaa

SEQ ID NO: 11813 - DNA, 474 bp, Homo sapiens
aggtactccagggaaactgacagtgatcgtaaacttgttgataaagaagatatcgacactagcagcaaaggaggctgtgtccaacaggctactggctggaggaaagggacaggcctgggatatggccatcctggattggcttcatcagaggaggctgaaggccggatgaggggccccagtgttggagcctcaggaaagaaccagcataaagacagttccaacggagacttatcgaagatgctgtttcgaaagagtcatggtttgcttcgatttataagaacttcgatttaagtaaagggaggacaagtttccattgggtattacataccttcccttcttgtatttggttttgtattcttcctttttctttttgttaactagtatcttggctgcttagaacctttttttaatataaaaacttttttttttcctctggcaataattataaaatataaataataaaaaaaaagtctg

SEQ ID NO: 11814 - DNA, 408 bp, Homo sapiens
aggtacatctctagatgatcacgaatgtcaaatatcacactacactgtgatatggggattccccttgggggttttcatgtgtatagggtgcctgcagctacactaaacatcttaaagctaccacaatgttcacttcatatttttgctttttataggctttcctggtctcctcctatgttcccatcattttcttgctttgaatctgtaagaatcgagttgaatcttctccattttaaattttccataggctgagaaactgtttagccaagtttggataaaattgtatccaaagtaagagtatacaagctatgggcaagtccaaaatcaagctgttcacaggaccatgttctctctaaaggttctaggagagaatccctcatttccttccagcttctgggtggctgctgg

SEQ ID NO: 11815 - DNA, 405 bp, Homo sapiens
aggtacagcagtcgaagtgagctgccatctctgattctgtatccctgatggctctgcacagcctagtcttccctggtgggaagagtgtcccttgtccacagaggtggtggggacccacattgcttgtagctcccgtgagcatgcaaagaaggccattaccaggaggaaccgcctctcaggatctgatcttttcttccctctttcttgacttccttctatttctaatggcagtgcttatcttcttctctttgcaggttgtaacctccatttctgacatccccactggtattccagttcacctagagctggccagtatgactaacagggagctcatgagcagcattgtccatcagcaggtctttcccgcggtgacttcccttgggctgaatgaacaggagctgttat

SEQ ID NO: 11816 - DNA, 406 bp, Homo sapiens
aggtacgcggggaaaaaagggtggggagtgccctttcttgaaggaatcccttaagtgcacgtctcccgttttcttttcacatcaatgcagagtccctctgtgaatttacaacacccaacacccatgagttcagtccttaagaaggaaaattgagcaagtatttaattggttggacattgcataaaagaggtccatatccaggctaactctagaaattttattctcaaacttagttggcctctttttcttctgtcagaggaccattcttagtggcactggggaaatcttggcacccagaagaattcaactgcgctcactgcaaaaatacaatggcctacattggatttgtagaggagaaaggagccctgtattgtgagctgtgctatgagaaattctttgcccctga

SEQ ID NO: 11817 - DNA, 405 bp, Homo sapiens
aggtacctgtctcatatgtggcaactacgtggggcagcacactcaaggaatgaaggaagtttcagtgaatgacaactttataaagacagtgttgaggcagcccagtgcagcggtttgggagccaggaacagcgtgtgggccggagtgtggctgcaggacaggaggtcaaaaataagggttgagggtggaataggaagaccccggaacgtcatcctgggagcttgagattttattctacatttctcttgttcttaactatttagggtgatggatctctgcagtaagtggaagagttcttcatggcccccaaggttatatccatctagaacttcagcacgtaatttcatctggaaatagtgcctttgcggatataagttaggtaaaactgaagatgagatcatactg

SEQ ID NO: 11818 - DNA, 398 bp, Homo sapiens
aggtacttttttttttttttttttttttttttccttagagcctttcattacaattcagccattctgcaattaattgtcacaaatttctggccaatacattcatttcctatcatattcaaagaaaattatttgaatttaaaattcttactctaaatgaggtatattgaacatttcgaatcttgacagtttaattctatatttgtgtcatgaaatcagttcttttctttttacctgtcttatttctttaagttagttataggtaaaattgtaaccctgactgttatctcatgttaacgcaagacaagaaaatatgtatgaatgtcgggaagagatttgacctggaaacttttcatttattgaaaaggctgcttttgaattttgccacatgaattattact

SEQ ID NO: 11819 - DNA, 440 bp, Homo sapiens
aggtactgaggctgtatacagccacagcctctccccatccctccagccttatctgtcatcaccatcaacccctcccatgcacctaaacaaaatctaacttgtaattccttgaacatgtcaggcatacattattccatctgcctgagaagctcttccttggttcttaaatctagaatgatgtaaagttttgaattaagttgactatcttacttcatgcaaagaagggacacatatgagtattcatcatcacatgaagacagctaaatactaaaagttgtaatttgattataagaagtttagatataatatatgaaatgcaaagagccacaaagggaatgtttatggggcacgttttgtaagccctgggatgtgaagcaaaggcagggaaacctcatagtatcttatataatatacttcatttctttatctctatcacaatt

SEQ ID NO: 11820 - DNA, 411 bp, Homo sapiens
aggtaccagttgtaaaattaccaggaaccgccatgcctcaagatcgccctgttttctggcttcatcaatgactgcatgcagtgcaccaccctgtccactacgtgatgctgtaggattaagtctcacagtgggcggctgaggatacagcgccgcgtcctgtgttgctggtgaattagacgccatcgctgtgggttgctggtatggtgccgtgctatttggcacaggacacaccgcttgaggtctgtattgaacctctgaaggaggccgatactgaagctcggttggcagccggtattgataaactaccagcggttgggtcttattttctaccggctgatattgtggatactgtatctgagttggcattgccgggatagagactctgtccctttctacttgattttctcttgg

SEQ ID NO: 11821 - DNA, 423 bp, Homo sapiens
aggtacctaataaatatttttggcatatgtgaatgaatgaatgagtgaataaataatcagattagttgatgaaagattctaagggaagattaggtaatgtgattataagagaaagatcctgaagaatgcttggaaatggatcctttacccatacatgattttgttcatcagcttatatgtaggatcacagtcatttggaaaatattggtccattgaaatttatacattttccaaatggtgacacacttcattatacagtgtcaaaagttagccttcatgactatcaccactgatctcatcaggaagttttaagtattggatagctataagctcacaatggcagtcctagatagtgcagccgtggattgaaaaagtgttctagtttcctctttttaagccaagaatccatccttaaatataaga

SEQ ID NO: 11822 - DNA, 393 bp, Homo sapiens
  misc_feature 387: n = A,T,C or G
ccgggcaggtacgcggggggcatcgtaaatctcaacatccacatgaacttcacccatatctgcagaagccacaattctatcaaccagtccttggatgagtctgtgatttatggaccaggaaacctgtcaaccaacaacaatactctcagagaccacttcaaagggatttcttcccatagcagaagctcactcatgcccctgagaaatgatgtggataagagaggggagacgacctcagcatccttgctaaatgctggattaagccacactgaataccagatagtcacagaccctggggacgtcccagcttttttgaaatggctgtccttagccagcttgcttgtttatgttgctgctttttcaattggtctaggaccaatgccctgnctggtg

SEQ ID NO: 11823 - DNA, 429 bp, Homo sapiens
  misc_feature 161: n = A,T,C or G
aggtaccaatccttatcatttttattaccaagagttactgaaggaaaacaccaacctttgtgttggctgcaatccaattggaggtttcactgtcatcatcacactttttaatccatttctttaaccactgtttgaaaataacaacggttaggatacaacanaagacttttaaaaatagcaaattactttagcacttaactatggtcaagcttaaatgtaaaagccaatgaataagattatcactaggctcacatcctcttaagccagggaagtcccatagctacaatgtccagtatatataaaatcaaccaaagcaggattttctttggcagaagctgagtggggaacctagagcttgaagagaagcccaactgcaaggtgtgtattcccctaattacaaagcctgacaaagaggtgccttagccatgg

SEQ ID NO: 11824 - DNA, 402 bp, Homo sapiens
ccgggcaggtacaaagtccctgaggcaaaggcatgcttgctgtgttctaggaaaagcaaggaagacagcatgtctatagcagtgggaggtggaaggataataaacagtaggtgaggttagaggggaccaaatcatgtattttccatccagaggttcccaaccttggctgcacattagatttattctaaggagcttttaaaaaataccaatgactgggtcccagcctagagtgattaaatcagaatctctggaggtagacttgagaatctgatgtttgcaagtttcctaggcaagtcaaggctgaggaagactgctgcaggccattgtaagagccaggcgttgatctcattcaacctttccctcagctcttctagagacagccagcattctcttatggcacaa

SEQ ID NO: 11825 - DNA, 394 bp, Homo sapiens
aggtacaacaccatctggcttctctattttgaaactccacaccaggttaatcttgtccatggctgtggcttaaatctaaagtcaggttctggtgttttctggaatccatgcctagctctttgattctgaaaccaaatctggattctggactcttctgtattgattgctaaagcaagtttttgtttggtagcataacctgggtaaggtttttgagtgaaggtattggtgaggattttcaattgatcttctgtgaatttggtgcaattgcacctatgatttgttgctaccatcttgtgtgaagaggggtcttcaactatgcagaaagagagttctggaggctgagctactgtctgggagactgcttacagctcattttttaaaaagaaaggtcaca

SEQ ID NO: 11826 - DNA, 398 bp, Homo sapiens
ccgggcaggtacgcggggacatcaatgcagagtccctctgtgaatttacaacacccaacacccatgagttcagtccttaagaaggaaaattgagcaagtatttaattggttggacattgcataaaagaggtccatatccaggctaactctagaaattttattctcaaacttagttggcctctttttcttctgtcagaggaccattcttagtggcactggggaaatcttggcacccagaagaattcaactgcgctcactgcaaaaatacaatggcctacattggatttgtagaggagaaaggagccctgtattgtgagctgtgctatgagaaattctttgcccctgaatgtggtcgatgccaaaggaagatctttggagaagtcatcaatgcgttgaaa

SEQ ID NO: 11827 - DNA, 422 bp, Homo sapiens
ccgggcaggtacctcaaggtgtgttgtcgtagtcatataattcctttgcttgtaactgcccaataaatggatgaggactcacttcacccataaataagaaaggtgaacagcacatggggcctgtagatgccttttgcagggccctctttttctcttcctaaagttgcaatttgagtatttctctagatgggcacatcatagaaactgtcgtcctagatcagagcctggggagagagatacaggtgtcatgcttacatctgcagagtgggaacaagcccagaaaaatcaagatgattaagcagagagcttccatactggagataaaccagctgtgtaaaaaatcattgcaccaaaaaagcattgcaccatcgacataactgctttaactaagaagtaaaggaactgatgccccagcagagcat

SEQ ID NO: 11828 - DNA, 407 bp, Homo sapiens
ccgggcaggtacaaatattactataccaaggtgtagaggagtatgtctaagcctgtaatgatagcaggtggcaaggtggaggtagatggccttctgtggtagttcacggggaggaagacagtggatccaagcaaataagaaaggccacattttttttttttaattttgcatctcaaggtattttagtcaaaattttttttttagttttccacagcaaacgattacgtaaaatataaacctaatgtattctttaggactaagtgtgccttttctctatatgctaagaggtgtaagtagagaatagacgttatagtatcctagcaaatgaatattcacaagaaaggctacaaaacttcattatcttggcttattctaaatctacctaaagtcatcttgctctcctaaca

SEQ ID NO: 11829 - DNA, 403 bp, Homo sapiens
ccgggcaggtacttccaaaccctcctgttctttcctttttgttttccccaattttaacataaggcaaaagcagtaattgagcaattctatcacctggattggcactccggggaacagtggagctgatcactaactgaattccccctttataatctgaataaattaccccagtatgaatttggactcccttcaaatttagacttgatctccctcaaaggcctaccctcccttctggcagcgggccatatacccctctaggaatcttttgtgggggctttccagggagtaaaaagaccatttgggtggaacataaatctactgcggtgctgcctgctgtggcgcgggacagctgttggattgttgtaattggctgactccctgaagtggtggtattttctgtagg

SEQ ID NO: 11830 - DNA, 406 bp, Homo sapiens
ccgggcaggtacaggttgctgtaggagcccttaatctatgagatcttgacagattgcttgctttcttctttccaccatgggagaatgcaacaaggtcttcaccagatggccgaacagatccaagtgtcatgaccttggactgtccatcctccagaaccataagccaaataaatttcttttcttcataaatttcccagtctgtggtatcttgaaatcaactgaaatcagtcactaaggaacaaaattctccagagaaactgtttcttccttgaatctgaatgcctgactgtcaatcatttagcactgaaacaaggagagcctctctgaatgttgagcagccaagagagctgcccacactggacatcaatcagcagcagggcctgtcctcagggtgactccgtttacc

SEQ ID NO: 11831 - DNA, 403 bp, Homo sapiens
ccgggcaggtacattggatgtgaactcttttaaactataacatggacactttattggaaccaaactttagttttctacattaatgagaaacactggtaactttgcttcattgaaaaaataattgcttgttctctgtcagatgcacttcgtcttagtaacatggccatggggaagacaaccacaggccagatagtcaatctgctgtccaatgatgtgaacaagtttgatcaggtgacagtgttcttacacttcctgtgggcaggaccactgcagacgatcgcagtgactgccctactctggatggagataggaatatcttgccttgctgggatggcagattttatcatttcttctgcccttgcaaagctgttttgggaagttgttctcatcactgaaggataat

SEQ ID NO: 11832 - DNA, 399 bp, Homo sapiens
ccgggcaggtgcatggcgaagctagagactgtaacctgaagattgggacaaattaaagaaaaaaatgtgatttaacacaattacaaaaactgttacgttagggtcaaacaagaaccattttatgaaactgaattacaacaaatgacattatatctaactcttccgggtctccacagcacttatacttacttaagcagcttaaacacttccgagtctccacagcactctgatacttacttaaacagctcttttaacctgccctagtattcttaagtgcagcatatctaatttttttttttcctcagtagtttgaacacttgctggctattttttctgtccaagttctcagtaacttcggcctgtgtagtcagtggttctacacagccgacactacttttt

SEQ ID NO: 11833 - DNA, 421 bp, Homo sapiens
aggtactttgggaggctgaggcaggtgaatcatctgagggcaggacttcgagaccagcctgcctaacacggtgaaacctcatctccactaaaaatacaaaaaaattagccaggcgtgctggcaagcacctataatcccagctaatttcttctagttttaatagtccaagcttcgggagaaaagatagttttagcataggtagatgaaaggaaaaattattttcttaaagatgttgacactcactgggaagctgattttcctttagacaaattcaactgaagagatgttgaagagtacgcgggggtcagaagctggaggagttgaaggcagaggagccagataacttcagcagcaaagtagtgcagaggggccgagagttctttgacagcaacgggaacttcctgtacctgcccgggcggca

SEQ ID NO: 11834 - DNA, 402 bp, Homo sapiens
aggtacgaaaaaatcaggctactaagcccactgttaatatagacgcagaccaattgttaggaacaggtccaaattggagcaccattaaccaacaatcagtgatgcagaatgaggctattgaacaagtaagggctatttgcctcagggcctggggaaaaattcaggacccaggaacagctttccctattaattcaattagacaaggctctaaagagccatatcctgactttgtggcaagattacaagatgctgctcaaaagtctattacagatgacaatgcccgaaaagttattgtagaattaatggcctatgaaaatgcaaatccagaatgtcagtcggccataaagccattaaaaggaaaagttccagcaggagttgatgtaattacagaatatgtgaagg

SEQ ID NO: 11835 - DNA, 402 bp, Homo sapiens
ccgggcaggtacaaagtccctgaggcaaaagcatgcttgctgtgttctaggaaaagcaaggaagacagcatgtctatagcagtgggaggtggaaggataataaacagtaggtgaggttagaggggaccaaatcatgtattttccatccagaggttcccaaccttggctgcacattagatttattctaaggagcttttaaaaaataccaatgactgggtcccagcctagagtgattaaatcagaatctctggaggtagacttgagaatctgatgtttgcaagtttcctaggcaagtcaaggctgaggaagactgctgcaggccattgtaagagccaggcgttgatctcattcaacctttccctcagctcttctagagacagccagcattctcttatggcacaa

SEQ ID NO: 11836 - DNA, 480 bp, Homo sapiens
aggtacttttttttttttttttttttttgtatttttagtagagacagggtttcaccatgttggccaggatgatcttgatctcttgacctcatgatccgcccgtcttggcctcccaaagtgctgggatcacaggcgtgagccaccatacctggccctttatttattctctttaaagagaagagaaaacttatgagagggccaaaatttatttaatttaaatctttttaccattagctgcaaggggaaaaaaatggaattttgccttaatataaggtgatgtaacgcattacacaatgtaacaggaaacaattcacaatttttattaaaagtgcaaaaaatttttgagaacttaataagcctataatgggtaagctttattttttggggtgggggaaagaatatgagaaaaaggaatattaacattcttttttactggccatgaacccatttttgataaaaaaatctttatttgtccctttc

SEQ ID NO: 11837 - DNA, 400 bp, Homo sapiens
ccgggcaggtacgcgggggcttccttccagtaaggagtcggggtcttcctcagttttctcagccaggcggcggcggcgactggcaatgtttggcctcaaaagaaacccgccaagggtgggttggaaaccgaaacgagtcagtgttgaaacgtgtctcatcctattcctgaagccagaatattctggccatgagtcattgtttccgcccatcttgattcttttggaaatggcagctcttgttcaaagaccggaaagggtgggatgtcaatttcaagtggggtcaacctgagttctgtaaatcccagtagcgattttcccgccgcgggtgggtaggcgaatcttgcgccggtttatacaaaggaggccgtgaggacctgcatgcttttctttcttaggcatg

SEQ ID NO: 11838 - DNA, 421 bp, Homo sapiens
ccgggcaggtactccaagccaaagatgatggagagtgaattaagttagtgcaatgggaccaagtctagagctatttagaagtgagaagtgacacggaaaaaaaaaaagattgattggatgtagaacaagttggataagaatccaggacaaccccaggtgtcaggctggggcagctaggtaggtgctattgccatataaagtgttaaaaaagaatagagaaggggctagttgtcgggggaaggagttcagttttagacatgttgaactgcaaggagatttgatactataattaaggaatgtgttttaataaatttaataaacaatgaacacacattattcgcatttcccaaacaatttggatggtagatcaaaaagaatgagagtgaaaataaggggtctgtgaccactcaattaagattga

SEQ ID NO: 11839 - DNA, 403 bp, Homo sapiens
aggtacagatgtccagtagacctactggatatgcaggcctgcagctcaggggagagctgggttaagaaccgccaaggcagtaatcatctgcatttagatggcgagtgaagccatgacaggggctgaaatggcccagcaagaataaatcaaaccatgagaaacacatacatttaagaataaggagatgtggtcaggcgcggtggctcacacctgtaatcccagcactttgggaggccgaggcgggtggatcacttgaggtcagtagtttgagaccagcctggacaacctagtgaaatcccgtctctgctaaaaatacagaacttagctgggtgtggtggtgcgtgcctatagtcccagctgcttgggaggctgaggcacaagaatcggttgaacccgggaggtg

SEQ ID NO: 11840 - DNA, 409 bp, Homo sapiens
aggtactttcccgtgtggaggcgcgcccagtcaccttgttgcggtagcctcaaggtgaggaatcgagacccaccaagtatgatgaataaacccagactctcagcaatgcaggaaaggaacaaacgggcagcttgggaaaagggggctcacataccacagcgactaggtaaactctacacagaccaagattttgatagtttacctgtgcaaattacagttccggagaaaatacggtcaataataaaggaaggaattgaatcgcaggcatcctacaaaattgtaattgaagggaaaccatatactgtgaatttaatgcaaaagtaggtaatcatcattattttatcaattctctttgttctacttataatttttgcttgaaattgtccagaatggaattattttgtatttg

SEQ ID NO: 11841 - DNA, 407 bp, Homo sapiens
ccgggcaggtaccaccctcttgctgaaagcactggttcccctgttgaagcttgctagggattacagtgggtttgactcaattcaagtaagtaagcaaacatttaaatatttttcaggcataaatgttagcgttcttatcctgtaatatgcgaagtaaataaatttatatacttactgcctttgttacaatgcatgcaaacacgtggtaaggtgttcataccttaggaagagatctgattctcaagaacagcagaaaataggaagcagagaatgagttaggatgaaattcaaatgggagaaagaaatgaagaagccagatacttccagtagttaatttcttaacatggctacttataataatagagaaatggttagaaaagaaggaaaagcaagaaaaatgtcgttac

SEQ ID NO: 11842 - DNA, 412 bp, Homo sapiens
ccgggcaggtacgcggggacatcaatgcagagtccctctgtgaatttacaacacccaacacccatgagttcagtccttaagaaggaaaattgagcaagtatttaattggttggacattgcataaaagaggtccatatccaggcttactctagaaaattttattctcaaacttagttggcctctttttcttctgtcagaggaccattcttagtggcactggggaaatcttggcacccagaagaattcaactgcgctcactgcaaaaatacaatggcctacattggatttgtagaggagaaaggagccctgtattgtgagctgtgctatgagaaattctttgcccctgaatgtggtcgatgccaaaggaagatccttggagaagtcatcaatgcgttgaaacaaacttggcatg

SEQ ID NO: 11843 - DNA, 409 bp, Homo sapiens
ccgggcaggtactttttttttttttttttttttgcaataattacttttattgtatactgcacaatataaacagcatgttgcaaagaaatatatatatttgtgtgctttgtgtatgatataaatccatttctgcaaaataaaatacaaacccgatttatctaacaaatatgaaactcaatgaaaaaacaaatcccaaaataatactatttatgtaaaatatagaagctaaacaataaattaataatacatacataaatagcaaaagagtaaagcatagtaaaaaataataagcacccaagtaaagaaaagaaataacgtaaaatttgggatggagtgatttctatgacggggaatagaaaagagatgtggccacgcatgagaatattcaggctcattggtaatgttctgg

SEQ ID NO: 11844 - DNA, 507 bp, Homo sapiens
aggtacgagttgaatcattgttcaaataaggtgtaattgaaaagtgatcctctcttcagagatgtcaaaaacaaacaaatccaagtctggatctcgctcttctcgctcaagatctgcatcaagatctcgttctcgttcattttcgaaagtcttctgttccccaaacccgaatctcttctctcgtttcaaggaaagcgcaggcctgtagttcctaaggtctcggttctcaaatcattatttcttccagccttcataaccagtagaaaatgaaaaccaaccccaaggaagtatattccagaattcggggatttttccgaaggttcacaaaacagagggcttataggaaagggcccttaattatttttccgttgtggtcgttaaacaagcagtggcttttttattcccaattgggggccccaaatattaaccccgtaggtaagggcctattggaaaaacctaactcggcttcaaaaatttgggcaaggaatttaacccgggccaaaggca

SEQ ID NO: 11845 - DNA, 404 bp, Homo sapiens
ccgggcaggtacaaagtccctgaggcaaaagcatgcttgctgtgttctaggaaaagcaaggaagacagcatgtctatagcagtgggaggtggaaggataataaacagtaggtgaggttagaggggaccaaatcatgtattttccatccagaggttcccaaccttggctgcacattagatttattctaaggagcttttaaaaaataccaatgactgggtcccagcctagagtgattaaatcagaatctctggaggtagacttgagaatctgatgtttgcaagtttcctaggcaagtcaaggctgaggaagactgctgcaggccattgtaagagccaggcgttgatctcattcaacctttccctcagctcttctagagacagccagcattctcttatggcacaaat

SEQ ID NO: 11846 - DNA, 401 bp, Homo sapiens
ccgggcaggtacagtagtatttaacctggatgtgaggactaaggaggaaattttctggtgaataccgaagagcaaagagcagcaggtcagcaggaatgactaatgtttttctatgcacgtttaatggaaaattcatgtaggatattttgagtaggtaattggataaccagcatttataactcgcatcctactagtttgactctcactaataagacttgtcaaagatccaagaatctgaaagttgatgataaatgtccatgtgtatcaccatcaatgatcaaaagttagcatccacaacatagaatgggacagatgaacttaatggataaagatgaatatcggagttgttccttttagggaatgatactctccatgacctgtgtgagtcacagccccccgat

SEQ ID NO: 11847 - DNA, 397 bp, Homo sapiens
aggtacttttttttttttttttttttttttttttttttactttttaagcacatgacctttccccaaatatggcccaagcttctactttggggagattaagatttatctagaagaaatgcatatgcaaagaccaagaaagatgaaatattcaactttttgactttcggaaaataagatactgcatcaaaacaagagctctgcaaatcaaattatgttgagaacagattgcataaaacttttacccctttatcctctctttcccatctctgccgagctaaattttattagttatacataaagacgacctaggagaaagaagaagagcattctgcccatttttgatattagaatagttgtgcggaaaattaaagagaagaaaagaaagaaacctaagttt

SEQ ID NO: 11848 - DNA, 412 bp, Homo sapiens
  misc_feature 46: n = A,T,C or G
aggtacttttttttttcaaattttcttttttctcaagccctttgantctctttgtctcatacttcattcagaatgatttacagagaaaatagaggatatcagatggaactttactcaaactcctcctgccacatttgcacaccttcccttcttttagttccttcccttctgcagatgtctcacctctgcccaaggctcttccccttcctatgtcctggatcccacctgcttccagttcctctttaactttctactatatcctctctttcttctccaacactaccaccctccttgccacaaggtttcttcccaccagcatttataatacatgctcatcctctactgttttattaacaaccagccaacctttctccccatctgtctttccccaactaccatctttctcttttaa

SEQ ID NO: 11849 - DNA, 401 bp, Homo sapiens
aggtaccaggcactggaaacgccagacaaacaaggtctctaaccttgccatctttcaacaggaaacactcccctcgccccaccccaggggaatgtagtagtgtaatggtaaaaacataaagagaactatacggacttcaccgaactgacatgaggtttaaatgcgatatggcagacaaagcatataacggtagaaaaagtgaacacttaagaaatgtttaattcccatcgcctttcccagtgtgatcgctcagcagctaaattactgttaaacactggctatctcatgctatataaatctaagacacgataataagcaaaaaaacaaaataataacaacaaacatttttactacttatcctctctagactcttattagaatatccctgggcagttgattcg

SEQ ID NO: 11850 - DNA, 393 bp, Homo sapiens
ccgggcaggtacgaaaaaatcaggctactaagcccactgttaatatagacgcagaccaattgttaggaacaggtccaaattggagcaccattaaccaacaatcagtgatgcagaatgaggctattgaacaagtaagggctatttgccttagggcctggggaaaaattcaggacccaggaacagctttccctattaattcaattagacaaggctctaaagagccatatcctgactttgtggcaagattacaagatgctgctcaaaagtctattacagatgacaatgcccgaaaagttattgtagaattaatggcctatgaaaatgcaaatccagaatgtaagtcggccataaagccattaaaaggaaaagttccggcaggagttgatgtaatta

SEQ ID NO: 11851 - DNA, 408 bp, Homo sapiens
aggtactaaaaataataatctgttgtgagatacaggataattattatttccattttatagatgagaactgaagcttaaattttaagtaacttgtccgaattattaagtggtgaggtaagggcttatatccaggttttccgtctttaaatacaagattttaacattattccacattgcttcacatgcctcagattgtgaccagctgagggaaattgtaatttttctttctaataggtaatcaggtgctccctttcaatattaattttacataggtaaaacttgtaaaagtaagccaaatagtatatatagatattccaaatgactgttctcacatagaggtcttctgacacactgacaacacaccaagtcattcagaaccagtgggactcattaataaagttagtgctt

SEQ ID NO: 11852 - DNA, 397 bp, Homo sapiens
ccgggcaggacgcggggacatcaatgcagagtccctctgtgaatttacaacacccaacacccatgagttcagtccttaagaaggaaaattgagcaagtatttaattggttggacattgcataaaagaggtccatatccaggctaactctagaaattttattctcaaacttagttggcctccttttcttctgtcagaggaccattcttagtggcactggggaaatcttggcacccagaagaattcaactgcgctcactgcaaaaatacaatggcctacattggatttgtagaggagaaaggagccctgtattgtgagctgtgctatgagaaattctttgcccctgaatgtggtcgatgccaaaggaagatccttggagaagtcatcaatgcgttgaaa

SEQ ID NO: 11853 - DNA, 399 bp, Homo sapiens
aggtacctgtctcatatgtggcaactacgtggggcagcacactcaaggaatgaaggaagtttcagtgaatgacaactttataaagacagtgttgaggcagcccagtgcagcggtttgggagccaggaacagcgtgtgggccggagtgtggctgcaggacaggaggtcaaaaataagggttgagggtggaataggaagaccccggaacgtcatcctgggagcttgagattttattctacatttctcttgttcttaactatttagggtgatggatctctgcagtaagtggaagagttcttcatggcccccaaggttatatccatctagaacttcagcacgtaatttcatctggaaatagtgcctttgcggatataagttaggtaaaactgaagatgagatc

SEQ ID NO: 11854 - DNA, 407 bp, Homo sapiens
aggtaccttttttcatagcatagagctctgctatgaagaatacataacacatacacagtatttaagattacatgtgcacacatgaacacacacacacacacacaccaccccttctttaaagaaaaaagaacccatccccttgatataaactgttagactcgttttcagaatgtctcttgccattatgtcaattcagcctgcaaacaaaatttaacatttttgtttttttaaaaaaatcaacttttaaccaaaacttcttagaattatttttcaatattagcataaaatatttgttggtgttttgctattattttaactgcagtggtcaggtatctccttcacaaaaagaaactcaaactgaagctgatgtagatgaaaatgaaaaccaatcacctttatccaattac

SEQ ID NO: 11855 - DNA, 401 bp, Homo sapiens
aggtacttccaaaccctcctgttctttcctttttgttttccccaattttaacataaggcaaaagcagtaattgagcaattctatcacctggattggcactccggggaacagtggagctgatcactaactgaattccccctttataatctgaataaattaccccagtatgaatttggactcccttcaaatttagacttgatctccctcaaaggcctacccccccttctggcagcgggccatatacccctctaggaatcttttgtgggggctttccagggagtaaaaagaccatttgggtggaacataaatctactgcggtgctgcctgctgtggcgcgggacagctgttggattgttgtaattggctgactccctgaagtggtggtattttctgtaggggtt

SEQ ID NO: 11856 - DNA, 406 bp, Homo sapiens
aggtacttaatcctggttggtttacccattctaaattatttatgtgagatagctatctatttggaaaaaagtaaagtgaaagtcttacctcaatccacactcaaaaatagtttactatatgacagatctatggcaggcagatttgatggctcaatgaactccaccctcccagtgttcacacctttatgtagttcccacttacagggagccaaaggtccgtgggacgtgaccaactcagcattccactggaggctatatgatcaaacagcaaactgtttatcatgaatgcaggatgtgagcaaactcaccattgctcctgccgacagaaggttttctggaggcaatcactccctggtgctgaggttatctactgcaacatttagagaatgtggtcttgcaagcctca

SEQ ID NO: 11857 - DNA, 401 bp, Homo sapiens
ccgggcaggtacttttttttttttttttttaaagaatcagaacaggcttaataggaactttgaattttaatccttctattcatctgttatagattattttccctagtgatttctgtattaataaaacttaaacatggcaagttttttctaataagcaaaataaccaacagcttaatatatttgtattaaactctaacagtgcactaactttaaatgttgaaatagattacacattttagggcataatggcagaatatttggctacaatagaccataggattttgttgaagcaaataacaaaatgatgatttatcattttaatgcaaactcaattttattgtttaatgggaatttaatttttgtctttgggaaatctttttgagtagctgattttgtgccct

SEQ ID NO: 11858 - DNA, 411 bp, Homo sapiens
aggtacgcggggaggaaagaagggcacatgagcaaacatgatggcccctttatgagaggtaatttactgaaatgcacagcgattacctgctcacccagccctgatgtaattaaaaatggcaggctaggggctctgtttcccccggctctggcagagaaacctgggtttcgacttgtgaagcttgaggttggatgtgggaattggcttggagtcataggcgatgagaggggcattaggatattatgaagcccgtgaactcaactcctgagaaggacacagcagagcgagagaaaagatggaataaaaaggcctacctcattaggctcgtgtgggtgaggagaactgaagagtctgagagcgcggcacgagccagaggctacggaaaacactgccctcctacactccaccttg

SEQ ID NO: 11859 - DNA, 402 bp, Homo sapiens
aggtacaaaaggatccgctactgtgtgcctttctctagctagctcattttattcttgttatgcatttcccagacaatgcatgctgagggcctactatgcatgagacactgtcctaggaacagaggtggttccctggtggccctactacgtcattatcattgtggattttggattgcagaatattgaactgacacattttttgatggcacatgtcttgagggagagactgcagtagggcaggtgaatctttgccacctgtgcagaccctaatgtttgccacaatgtttgtatctggttgacagctgagcgtgagattgtccgggacatcaaggagaaactgtgttatgtagctctggactttgaaaatgagatggccactgccgcatcctcatcctcccttga

SEQ ID NO: 11860 - DNA, 393 bp, Homo sapiens
aggtaccagttgtaaaattaccaggaaccgccatgcctcaagatcgccctgttttctggcttcatcaatgactgcatgcagtgcaccaccctgtccactacgtgatgctgtaggattaagtctcacagtgggcggctgaggatacagcgccgggtcctgtgttgctggtgaattagacgccatcgctgtgggttgctggtatggtgccgtgctatttggcacaggacacaccgcttgaggtctgtattgaacctctgaaggaggccgatactgaagctcggttggcagccggtattgataaactaccagcggttgggtcttattttctaccggctgatattgtggatactgtatctgagttggcattgccgggatagagactctgtccctttt

SEQ ID NO: 11861 - DNA, 409 bp, Homo sapiens
ccgggcaggtacaagggaggccctcaagaaggtctgtcatctccttacactgaatcaggactggcgtagtgtgacctgtggaatacagtagaagtaaagatgtgtgactcccaaagcttggtcatataaggcattgcagcttcagccttgctctcttggatcacttaccctggagaaagtcatctcccatgctctgaggatactcaagcaactctgtggagtgttccacatggagaggaagtgccgaagacccgcaccaactggccaaaaaagtttgtcaaaattgacaaatgggatctaattaaactcaagagcttctgcacagcaaaagaaactaccatcagagtgaacaggcaacctacaaaatgggagaaaattttcgcaacctactcatctgacaaagggctaa

SEQ ID NO: 11862 - DNA, 963 bp, Homo sapiens
  misc_feature 291: n = A,T,C or G
aggtacgcggagacatcaatgcagagtccctctgtgaatttacaacacccaacacccatgagttcagtccttaagaaggaaaattgagcatgtatttaattggttggacattgcataaaagaggtccatatccaggctaactctagacaattttatatctcaatacttagttcggccctctttattcattctgtcaagaggacgcattctgtagtggcatctggggaagatctctggcactccagatagaattcacactgcgctcatctgcacaaatacaagtggcctacnattggatttgtagaaggagaaaaggagccctgtatatgtgagcatgtgctatgagacaattctgtgcccactgaatgatggtcgatgccaaagggaagaatccttggaagaagtcatcatatgcgtatgaaacaaacattggcattggatcactgtttttgtggtgtgtaagccttgtgcgaaaagcccaattcgggaacaaatggtttttcaactttggaaggatgggtgagactctaactgtgaggacttgatttattatggcccctcgtttgagtactctgccccagggccggtcgggtctaagaaactagtaggattcccccggggcttgcatgaattttcgatattcaaagcttaatcggataccccggtcgaccctcgaagggtggggcccccggtcaccccagcctttttggttcccattttaagtgaaagggttaatttgccccgccttgggcgtaatccattgggccataactggactcccctgtgtggaaaattggtattccctttaccaaattcacaacatattactaaaccgggagccattaaagggtaaaacgctcgtgggggcctaaatgagtgaacctaaccccacatttatttgtggttcgcgcacattgctccgttttcacatacggaaaacttgtcgtgccatgatgtctatag

SEQ ID NO: 11863 - DNA, 841 bp, Homo sapiens
  misc_feature 139, 169, 170, 527: n = A,T,C or G
ccgggcaggtaccttgaattgattttctgactttcttttattggttttcagatttcttctgcatctcactaagcttctttaaaattaatgttttgtattttttaggggatgatgaatatgtttattatcatgatagtgngtgttggttttaatgggtataccatatgtnncaaatcttaaccaaattttatactataaacatgtgcagtttattgtatggcaattatacatcaagatgttaaaatagggccacaaactcttttctgtttctctcagtaagagatgcattataattctcttcccactgagtctggggtggccttggtgtatcgtttgaccattaggatatagcacatactgggacttctgaacataagtcttaggcattgcatctggccagacgaggtggcttatgcctgtaatcccagcactttgggaggctgaggcgggcggatcatgaggtcaggagatggagaccatcctggttaacatggtgaaaccccgtctctactaaaaatacaaaacanaaaaaaattaactaggcgtggtggtgggtgcctgtagtcccaacttcttgggaagctgaggcaagagaatagtgtgaaacctgggaggaaagcttggagttagcccaaattgcaccactgcacttcagcctgggtgacagagccaagactccttttaaaaaaaagaaagagattaaaaagaaggtccttcgccgctctaaaaccaatggatcccccggcctgaggaattcaatttaagcctattgttccgtcaacctagaggggggcccggccccaatttttgtcccttttgtgagggtaatttggcccttggt

SEQ ID NO: 11864 - DNA, 836 bp, Homo sapiens
  misc_feature 511: n = A,T,C or G
aggtacgttcatctacctactttgcacttggatggaagtcctagattgggtcttaaaaggagggaacattctagaacccaccaacccttcctgatactgtcacaagatttttttcccttaattcttttaaaatagggcacatttcaactccctgcccgctgccatttgatgatatttttgtttctctttaggtatcgtcctattttctttttctttaccactgacagcggcttatttcatatgaataatatattaaatacatatgcatttaaaatattgttttgatttgtttgcgaattgtttctcttaaagggtctatctggggaaatgagtaatttttcatatcctgttcttgcaggaagaattttaaatcgttgctccaaagacattggacacttggatgatttgctgccgctgacgtttttagatttcatccaggtaacgttgagagtaatgtcaggatctcaaatggaaaacggaagttcctattttttcaagcccttttcatggngtctgggggtgggactctcggcctggctgtgtgtaatgttaaactaataaaaggccatgtttgtaaaagaaaagtgcggttataactcaaaagctaaattggcatgaagtataccttgtgtggtggagtggctattcagtcccgttaagggttgttggaagcagctttctgcttgtaagtggctctccggctggcttaggtatttggcgtggattttgccttactgggaacccattttattattcagaaacattcccccctacggaaggaaagcccaaattaactaaatttccatgggattaccccaagggcaaatacttaggct

SEQ ID NO: 11865 - DNA, 852 bp, Homo sapiens
aggtaccagttgtaaaattaccaggaaccgccatgcctcaagatcgccctgttttctggcttcatcaatgactgcatgcagtgcaccaccctgtccactacgtgatgctgtaggattaagtctcacagtgggcggctgagatacagcgccgcgtcctgtgttgctggtgaattagacgccatcgctgtgggttgctggtatggtgccgtgctatttggcacaggacacaccgcttgaggtctgtattgaacctctgaaggaggccgatactgaagctcggttggcagccggtattgataaactaccagcggttgggtcttattttctaccggctgatattgtggatactgtatctgagttggcattgccgggatagagactctgtccctttctacttgattttctcttggggtttgtgcttgtctaacctgcgtttgaggttgtaatgttacaggcatctgaaccgcgggaggaggagttgatggcgatcgtggtttaagctttgatggccccaatgattgtgggaccttctttccccaattttggaggattcaagggtattttatccttcctgtaattgactgtagtcaacattttgcgttggactgaaccatttcaaactttgcttcatttttacaatgtgaactttacgttcattggtgggattctgtcccggcctcttttttaacaatatgttacacagcttttaagggcagttgagaacttgaaaacaatatttttcctggtaggaaaggataaaaagttgctttaatattgcgccagacaatcccaaccttaagtggggataatgttaccttgcctattacgctgtctaaaatctttagcaatgcg

SEQ ID NO: 11866 - DNA, 601 bp, Homo sapiens
ccgggcaggtacgcggggaaattcccttaggcagaaaaagggtggggagtgccctttcttgaaggaatcccttaagtgcacgtctcccgttttcttttcacatcaatgcagagtccctctgtgaatttacaacacccacacccatgagttcagtccttaagaaggaaaattgagcaagtatttaattggttggacattgcataaaagaggtccatatccaggctaactctagaaattttattctcaaacttagttggcctctttttttctgtcagaggaccattcttagtggcactggggaaatcttggcacccagaagaattcaactgcgctcactgcaaaaatacaatggcctacattggatttgtagaggagaaaggagccctgtattgtgagctgtgctatgggaaattctttgcccctgaatgtggtcgatgccaaaggaagatccttggagaagtcatcaatgcgttgaaacaaacttggcatgtttcctgttttgtgtgtgtagcctgtggaaagcccattcggaacaatgtttttcacttggaggatggggaaccctactgtgagactgattattatgccctctttggtacct

SEQ ID NO: 11867 - DNA, 473 bp, Homo sapiens
ccgccaggtaccactgcactaccaggttctagcaagaggagaagaaaggaggaaaccacagggaaaaatgttaagaagacacagcatgaattagatcacaatggtctcgttcccttacccgtcaaagtctgcttcacgtgtaacaggagttgccgtgtggctcctctcatccagtgtgactattgccctctcctgttccacatggattgcctcgagccgccgctcactgccatgcccctgggcagatggatgtgtccgaatcacatcgaacatgtggtgctgaaccagaagaatatgacactgagcaatcggtgccaggtgtttgatcgtttccaggacaccgtttcgcagcatgtcgtcaaagtggacttcctgaaccgaatccacaagaagcacccccctaaccggcgtgtgctccagtcggtcaaaagaagaagcttgaaggttcctgatgctataaaatctcagtacct

SEQ ID NO: 11868 - DNA, 811 bp, Homo sapiens
ccgggcaggtacttattttatgtgtttttttttgtttggcgacctcaataaccatttatttctggcacagctttccctctctctctccaggtgaagtttgtgcaagcgtgagttaagagattggatgaaatattcacccaaatgtaagtgtcggtatgttattaatactttctccaagaacatgcacatcttcacctgggcttgctgctgccccatgtagtaaggatgcaacagtttgtggttctctagagagctttgccaccatttttgcagggagagggcttttagtgtcttaaccatagtgacatgtgaacaatcgatatgagagtttttcttgagaatgaatttttatccaacgaaaagggagaggaacagaacattgctggccttggaaatctcaaataaaaggctacgcatgggctcaatatatcatctcaatgaaatggaggtgacagaggatggaatccgggaccttgaggatagctcaatggaatttggccattttatacagcgggcgccgcacatggatggggcagttcttgattactttattcacaccatctgagtatgactgcatacagtctgggatggcaaactccgggtgaaagaatattaaagggccaagaaattttcttgaccaacggtgttaccaaccttttttggttggacgcattgaattcccggtaccttgggccttgtagaacagggggatccccgggtgggcggaattggtgatcagcttattttacccggcggccccgaggggggcccggccccaggtttggtccctttaagggggtaatggacccct

SEQ ID NO: 11869 - DNA, 819 bp, Homo sapiens
  misc_feature 554, 578: n = A,T,C or G
ccggcaggtacgcggggactcgcgtcggttggcgactcccggacgtaggtagtttgttgggccgggttctgaggccttgcttctctttacttttccactctaggccacgatgccgcagtaccccaacatgagcattttctattaaaatttctcatcttctgtgccatcttccatgttgctttgaacatgtggaaattcatttcccatgcactcatatacagaccaaaaatttgggagaaacaatattggcgatggaacagcaacactgttgcatgtcttcttattcttctgtgcatataattatgattgaaccagtctgtaacttcattaggcttcttcaggcagatatggctttaactcataaaagctcaaggaatttcgtcagctggaaggaataccaatgcagacacatgatgcatgtttaaactgaagttgtcatctttgccgtatcacatggccaattcactcatttgaattgtctgtcaaatgcattgggctgaatggaaaaaaacaattattattggtaacagcatgaattcactttcagaagcctngactgtatataattctaaatcggncattggtgcttgagaatcaattagacattacggattttagactgtaaggaattagactttaaggaatttggcctttgggaattcaacattcagaatatggcgttcgggattgcctctcttgggaatcataatccaacccccatgggagaatcctttggccggtctaaaactaatggaatcccccggctggaagaaatacgagttaagcttaatcgtaccgttgaacttgaggggggcccgg

SEQ ID NO: 11870 - DNA, 680 bp, Homo sapiens
  misc_feature 578, 610: n = A,T,C or G
ccgggcaggtactatagattatttgtcttgaagaagagctttgatatgtttcaaaattcgacgttggctttggaaggaaactgtaaatttacagatctttgtccttccccacaaagagccttaatctcacaggttggattatgtggaactcactgctatttttcagttctcctttaagtgactaaggaacatccagatacttccaaaaaaaaaaaaaagtctaagtttttcactttgtccattgccatttaattatcttctgcatattttaaagcatttcctgtgaacataagtattgcccatccagaaaatttgcgtctacattgattttatgtttaatgaaacctgttcttctcaagttctttatttaatcacataacatagtatcttcaaaggtgagataaaaaaatcactggagaaatgttaaaacttcatttatttaagatgactagtgatgcagctagcaaacccaagaagccaactggaatggaaatgctcagtggtgctcagccattacccaggaccagagattcctttgttaacagttcaatttgttgaggcacaagtgaagataaatngggccatgacaaaactatgagaatgaatgatnatcatagtaacatctgacatatattaaaatttgtgttatgccatttctcagttccaccaaatgtaccctc

SEQ ID NO: 11871 - DNA, 807 bp, Homo sapiens
ggtacttttttttttttttgtgacagggtcttgctctgtcacaaaaaaaaaaaaaaaaaaaggaaaggaaaaagaagaagaaaatatgtatattggatatactatgtgccaggcacgattccaagcccctgatacatcttacattttacagatgggggaaggaggtccagagatgttaaatacttgcccaaggtcacacagaaagtggaacactgggatttgaacaaggttttggttgggcatcttctcctatgggagctcagaaatatctgttgtctagccctttctcagcctcccaaccttgtcggttccttacctatgtcacagctgactttgagctaaagtcatctcggggcaactaggtgcctatgtgagctggcgttcatttctcactgattctccttccaaatacctccaggaagaaaagcaagtcctttttggtccaagacattaaaaaagccaagctcaatggctcatgcctataatcccaacacttggggaggctgaagcaggaagatcgcttgagcccgggaactggagaccagcctggacatgttaacaatagcagacccctctacaaaaatgttcaaaagagctggggtggtggggcacacctgtagtcccacttacttggaagctgaggcacgggggtctttaggcccggaacttgaggtgccataagctatggggggcaatttttactccaggtggcaggcaagaaacaagaccttaatgggagattggaaaaatggtggaagccgaccgtgacatttaggaagggaaaaacccgagattatgggcacagct

SEQ ID NO: 11872 - DNA, 812 bp, Homo sapiens
  misc_feature 582: n = A,T,C or G
ccggcaggtacgaaaaaatcaggctactaagcccactgttaatatagacgcagaccaattgttaggaacaggtccaaattggagcaccattaaccaacaatcagtgatgcagaatgaggctattgaacaagtaagggctatttgcctcagggcctggggaaaaattcaggacccaggaacagctttccctattaattcaattagacaaggctctaaagagccatatcctgactttgtggcaagattacaagatgctgctcaaaagtctattacagatgacaatgcccgaaaagttattgtagaattaatggcctatgaaaatgcaaatccagaatgtcagtcggccataaagccattaaaaggaaaagttccagcaggagttgatgtaattacagaatatgtgaaggcttgtgatgggattggaggagctatgcataaggcaatgctaatggctcaagcaatgagggggctcactctaggaagacaagttagaacatttgggaaaaaatgttataattgtggtcaaatcggtcatctgaaaaggaagtgcccaagcttaaataaaccgaatatataaatcangctattaacagcataaaaataaaaggccatctggcctgtgtgccaaatgtggaaaggcaaacattgggcccatcaatgtcattctaaattgataagaagggccaccatggtctggaacaggaaaggggccagccttaggcccccaacaaacggggcattccaaataaactgttgttcctcaggtttcaggccaccacccctacaaaaaatacacactttagggatcgcct

SEQ ID NO: 11873 - DNA, 808 bp, Homo sapiens
  misc_feature 157, 549, 561, 626: n = A,T,C or G
ccgggcaggtacgaaaaaatcaggctactaagcccactgttaatatagacgcagaccaattgttaggaacaggtccaaattggagcaccattaaccaacaatcagtgatgcagaatgaggctattgaacaagtaaggctatttgcctcagggcctgnggaaaaaattcaggacccaggaacagctttccctattaattcaattagacaaggctctaaagagccatatcctgactttgtggcaagattacaagatgctgctcaaaagtctattacagatgacaatgcccgaaaagttattgtagaattaatggcctatgaaaatgcaaatccagaatgtcagtcggccataaagccattaaaaggaaaagttccagcaggagttgatgtaattacagaatatgtgaaggcttgtgatgggattggaagagctatgcataaggcaatgctaatggctcaagcaatgagggggctcactctaggaggacaagttagaacatttgggaaaaaatgttataattgtggtcaaatcggtcatctgaaaaggagtngcccaggcttanataaaccgaatatataaatcaagctattacaagcaaaaataaaaagcatctggcctgtgtccaanatgtggaaaagcaaaacattgggccaatccatgtcaatctaaaattgataaaaatggcaaccattgcttgaaacaaggaagaggggccagcctaagccccccacaaaactgggcatttccagttaaactgttgttcttcaggtttaaggaccaccacccctacgaaaaaccaccattcaggg

SEQ ID NO: 11874 - DNA, 432 bp, Homo sapiens
ccgggcaggtacttttttttttttttttttttttggaaactgtaaaaatgtgaagatactagaatgttaatttgactgctctaagaagtaatttttttaactttgcacaaaacatagtatgaatgtcatatattcaattaaaaatgtgcttatgcatctagtaagcaaagctgaactacccttgcggaaatgtgttacctgttcaatggcctaagggataataggtaattttaaagagggtgatacgagcatttgtagagctctatataactgtataacatcatgtaaatttgtatgattttgttttgtgaatatagtttcaacttgctaagtaaagcagtaaggggcaaacactaaacttaccagttaaaaagcattaaacagttagactttgtaatgatagtctttcaaggtttacccttgctgccatta

SEQ ID NO: 11875 - DNA, 434 bp, Homo sapiens
  misc_feature 387: n = A,T,C or G
aggtaccgactcctcagaaactggcatgccaaatcaaaatgggtctggttcaatcctccctaatggcaatgtaaacccctctaactaatcccacttctcctaattatctttttctccttacgaacctaaaaatctcaccatttctattagcctgaaaataacatccctctgttcttctcttcctccttcagcactggatctcacttacaataggttttatttaataattatcttccttacactttctgtctcaccagtttccccttaaactgatttacctgctacacaaaattattcttattgggcttatgtgccttttcctccacttattcgacctctcacctggatggatgctcctgcagaaatctatactaacgatagtgtgtnggatgcctggaactacagatgaccgttgccccgctcagccaggagaa

SEQ ID NO: 11876 - DNA, 432 bp, Homo sapiens
aggtaccgcacacaattgtatgcgctgcactttcatctgactggaagcacagtgggcttacaccagcatcaacacaaacacgtgagcagtgccttgcactacaacagacgcgatatccctaggggacagcactgttttcagccccattataatctcatgggactactgttacagatgaggtccaccattgaccaaaacatgtggagcacggcaattaattctggatttggatggggacacaaaataagcacagctctggcaggtctaatcaagattaagagagaaaagcaactaaaacatctgagaaaacagatacagagggcataacaccacacagaaaatacttcatacaactgagctattatttttaattgacttgctgggaattactaaattactaaaattgatttaaaaagaaccagaaggcccgct

SEQ ID NO: 11877 - DNA, 427 bp, Homo sapiens
ccgggcaggtacgcggggacatcaatgcagattccctctgtgaatttacaacacccaacacccatgagttcagtccttaagaaggaaaattgagcaagtatttaattggttggacattgcataaaagaggtccatatccaggctaactctagaaattttattctcaaacttagttggcctctttttcttctgtcagaggaccattcttagtggcactggggaaatcttggcacccagaagaattcaactgcgctcactgcaaaaatacaatggcctacattggatttgtagaggagaaaggagccctgtattgtgggctgtgctatgagaaattctttgcccctgaatgtggtcgatgccaaaggaagatccttggaaaagtcatcaatgcgttgaaacaaacttggcatgtttcctgttttggggg

SEQ ID NO: 11878 - DNA, 412 bp, Homo sapiens
ccgggcagttactaagggaggcagttaaagaagttttaaactgagttatttctcagaaccccaaataagagctcagcctatctatggctctgctaatattgattttaaaactataacgttcatctttttcttgctttaaattcaagctgtttttaaaatcaaatctttatccccaaccaaaatgtagattttttagttcaccagagaacttcaactgacctaattaaaactaaaagttcctagctgcttaaatgtttatgtaaaacaaaaagaaaaagttgaagttccggaaaaaatacttagacatttccataatgtagtcactgcctcatttgcttcatcaatactaacagtcgttttttttaagtcaagatatttcaagtagaataaaaacacttcatatatgtatatt

SEQ ID NO: 11879 - DNA, 416 bp, Homo sapiens
ccgggcaggtacgcgggacatcaatgcagagtccctctgtgaatttacaacacccaacacccatgagttcagtccttaagaaggaaaattgagcaagtatttaattggttggacattgcataaaagaggtccatatccaggctaactctagaaattttattctcaaacttagttggcctctttttcttctgtcagaggaccattcttagtggcactggggaaatcttggcacccagaagaattcaactgcgctcactgcaaaaatacaatggcctacattggatttgtagaggagaaaggagccctgaattgtgagctgtgctatgagaaattctttgcccctgaatgtggtcgatgccaaaggaagatccttggagaagtcatcaatgcgttgaaacaaacttggcatgtttcca

SEQ ID NO: 11880 - DNA, 412 bp, Homo sapiens
aggtacttaatcctggttggtttacccattctaaattatttatgtgagatagctatctatttggaaaaaagtaaagtgaaagtcttacctcaatccacactcaaaaatagtttactatatgacagatctatggcaggcagatttgatggctcaatgaactccaccctcccagtgttcacacctttatgtagttcccacttacagggagccaaaggtccgtgggacgtgaccaactcagcattccactggaggctatatgatcaaacagcaaactgtttatcatgaatgcaggatgtgagcaaactcaccattgctcctgccgacagaaggttttctggaggcaatcactccctggtgctgaggttatctactgcaacatttagagaatgtggtcttgcaagcctcctttgga

SEQ ID NO: 11881 - DNA, 412 bp, Homo sapiens
aggtacactgtttccatgttatgtttctacacattgctacctcagtgctcctggaaacttagcttttgatgtctccaagtagtccaccttcatttaactctttgaaactgtatcatctttgccaagtaagagtggtggcctatttcagctgctttgacaaaatgactggctcctgacttaacgttctataaatgaatgtgctgaagcaaagtgcccatggtggcggcgaagaagagaaagatgtgttttgttttggactctctgtggtcccttccaatgctgtgggtttccaaccaggggaagggtcccttttgcattgccaagtgccataaccatgagcactactctgccatggttctgcctcctggccaagcaggctggtttgcaagaatgaaatgaatgattctacagt

SEQ ID NO: 11882 - DNA, 383 bp, Homo sapiens
ccgggcaggtacttccaaaccctcctgttctttcctttttgttttccccaattttaacataaggcaaaagcagtaattgagcaattctatcacctggattggcactccggggaacagtggagctgatcactaactgaattccccctttataatctgaataaattaccccagtatgaatttggactcccttcaaatttagacttgatctccctcaaaggcctaccctcccttctggcagcgggccatatacccctctaggaatcttttgtgggggctttccagggagtaaaaagaccatttgggtggaacataaatctactgcggtgctgcctgctgtggcgcgggacagctgttggattgttgtaattggctgactccctgaa

SEQ ID NO: 11883 - DNA, 409 bp, Homo sapiens
ccgggcaggtacaataaatcttcctgtcccttccaccagaatacacatgtgtgaaggcatcattgacttgcagcgcccaaacaccttcatcatggactcggtatgttgctatacatctctgctggccaagggaccaaaggcgaattgtcccatcagaactgcctgacaggcattgcgtgccatctctgtttaatagcaatgcctccacattatccgtgtgccctttaagcttcattagttttgcacatgttcttggatcccatacccttaacaccttttcagtggaccctgatacaatgattgttcccagttgattcatggccaggttataaatggaatctttgtttccacttaaagaagaaactgtgaccagtgttatttgatgcaatcaaagcctttttaagtatta

SEQ ID NO: 11884 - DNA, 383 bp, Homo sapiens
ccgggcaggtacttcaaatcattttgaggatgtatatgtaggttctgaaactgaattcatagtattgcacatagaccccaacgttgattaccagttcagagtctgcgcccgaggagatggccgacaggagtggagtccttggagtgtcccccagctaggtcattccacattggtgcctcatggtatgctgctaaccttttctctcctgaagcctaactatatattagaatacctgtattctgtgctaagggcagcacactgacaaccagctattctaagcatagatcctgaattgataagaacaacatgcaccatgtcttttactcagattacctcatgtgatttttgttttcttcaggtcttcacagtccaaaaaaaaatgc

SEQ ID NO: 11885 - DNA, 416 bp, Homo sapiens
aggtactaagaaaaattgttttgccttgagatgctgttaatctgtaactttagccccaaccctgtgctcacggaaacatgtgctgtaaggtttaagggatctacggctgtgcaggatgtacagcaaaaaagaaactgagaagcccaaactgctttcttgttaacatccacttatccaaccaatgtggaaacttcttatacttggttccattatgaagttggacaattgctgctatcacacctggcaggtaaaccaatgccaagagagtgatggaaaccattggcaagactttgttgatgaccaggattggaattttataaaaatattgttgatgggaagttgctaaagggtgaattacttccctcaaaagagtgttaagaaaagtcatagatgctataatagcagctattttaatg

SEQ ID NO: 11886 - DNA, 415 bp, Homo sapiens
ccgggcaggtacgcggggacatcaatgcagagtccctctgtgaatttacaacacccaacacccatgagttcagtccttaagaaggaaaattgagcaagtatttaattggttggacattgcataaaagaggtccatatccaggctaactctagaaattttattctcaaacttagttggcctcttttttttctgtcagaggaccattcttagtggcactggggaaatcttggcacccagaaaaattcaactgcgctcactgcagaaatacaatggcctacattggatttgtagaggagaaaggagccctgtatttgtgagctgtgctatgaaaaattctttgcccctgaatgtggtctatgccaaaggaagatccttggagaagtcatcaatgcgttgaaacaaacttggcatgttt

SEQ ID NO: 11887 - DNA, 461 bp, Homo sapiens
gacatggactttcaccaaatgagtactctagggcgaattgagctccaccgccgtggcggccgaggtacctgtcagtgttcaatatttaacaaactccagtcataacaggtaagaggtcagcagtagcttataggccttggttctattatccatgtgcccaactgcagccatcgtgggctggtgttaaaattttcctttcaattgtcatttttctaataattgcaatcagtgagaggagaagaaaaagttcaagggaatgacctggcctttcaccatcctacacaggagatgactgatgacatggattcatacactaatgtatatcgtatattctccaaagaccctcaaaaatcacaagaagttttgaaaaattctgagatcataaactggaaacagaaactccaaatccaaggtaacaagtctgaagaaatgggcaagcagctgtgcttctcaaattgtgt

SEQ ID NO: 11888 - DNA, 389 bp, Homo sapiens
ccgggcaggtaccagttgtaaaattaccaggaaccgccatgcctcaagatcgccctgttttctggcttcatcaatgactgcatgcagtgcaccaccctgtccactacgtgatgctgtaggattaagtctcacagtgggcggctgaggatacagcgccgcgtcctgtgttgctggtgaattagacgccatcgctgtgggttgctggtatggtgccgtgctatttggcacaggacacaccgcttgaggtctgtattgaacctctgaaggaggccgatactgaagctcggttggcagccggtattgataaactaccagcggttgggtcttattttctaccggctgatattgtggatactgtatctgagttggcattgccgggatagagactt

SEQ ID NO: 11889 - DNA, 401 bp, Homo sapiens
aggtaccagttgtaaaattaccaggaaccgccatgcctcaagatcgccctgttttctggcttcatcaatgactgcatgcagtgcaccaccctgtccactacgtgatgctgtaggattaagtctcacagtgggcggctgaggatacagcgccgcgtcctgtgttgctggtgaattagacgccatcgctgtgggttgctggtatggtgccgtgctatttggcacaggacacaccgcttgaggtctgtattgaacctctgaaggaggccgatactgaagctcggttggcagccggtattgataaactaccagcggttgggtcttattttctaccggctgatattgtggatactgtatctgagttggcattgccgggatagagactctgtccctttctacttgaa

SEQ ID NO: 11890 - DNA, 391 bp, Homo sapiens
ccgggcaggtacgcggggaaaaaagggtggggagtgccctttcttgaaggaatcccttaagtgcacgtctcccgttttcttttcacatcaatgcagagtccctctgtgaatttacaacacccaacacccatgagttcagtccttaagaaggaaaattgagcaagtatttaattggttggacattgcataaaagaggtccatatccaggctaactctagaaattttattctcaaacttagttggcctcttttccttctgtcagaggaccattcttagtggcactggggaaatcttggcacccagaagaattcaactgcgctcactgcaaaaatacaatggcctacattggatttgtagaggagaaaggagccctgtattgtgagctgtgcta

SEQ ID NO: 11891 - DNA, 389 bp, Homo sapiens
ccgggcaggtaccagttgtaaaattaccaggaaccgccatgcctcaagatcgccctgttttctggcttcatcaatgactgcatgcagtgcaccaccctgtccactacgtgatgctgtaggattaagtctcacagtgggcggctgaggatacagcgccgcgtcctgtgttgctggtgaattagacgccatcgctgtgggttgctggtatggtgccgtgctatttggcacaggacacaccgcttgaggtctgtattgaacctctgaaggaggccgatactgaagctcggttggcagccggtattgataaactaccagcggttgggtcttattttctaccggctgatattgtggatactgtatctgaattggcattgccgggatagagacta

SEQ ID NO: 11892 - DNA, 398 bp, Homo sapiens
ccgggcaggtacgcggggagaaaaagggtggggagtgccctttcttgaaggaatcccttaagtgcacgtctcccgttttcttttcacatcaatgcagagtccctctgtgaatttacaacacccaacacccatgagttcagtccttaagaaggaaaattgagcaagtatttaattggttggacattgcataaaagaggtccatatccaggctaactctagaaattttattctcaaacttagttggcctctttttcttctgtcagaggaccattcttagtggcactggggaaatcttggcacccagaagaattcaactgcgctcactgcaaaaatacaatggcctacattggatttgtagaggagaaaggagccctgtattgtgagctgtgctatgagaa

SEQ ID NO: 11893 - DNA, 408 bp, Homo sapiens
aggtaccatgctgacttcttggtatcttttaaggcctaattttcccttccttgagattactgtagtgtgttccagctaatttctatttggaaacgagttggaacagctgaaaactaggtattattgaaggcaaagcagcctcacgtcatttttttatcagctcatttgggaagtttttttttttttttttttggttaattagaaagtaggctgggcacggtggctcatgcctataatcccagcacttggggaggccgaggatctcctctctggtggatcacttgagggcaggaatttaagagaccattcctggccaacatggataaaaccccgtctttttttaaaattccaaaaggttctggggcggggggggtttttttttaaaacccaatttcttgggggggctgg

SEQ ID NO: 11894 - DNA, 393 bp, Homo sapiens
ccgggcaggtacgcggggagaaaaagggtggggagtgccctttcttgaaggaatcccttaagtgcacgtctcccgttttcttttcacatcaatgcagagtccctctgtgaatttacaacacccaacacccatgagttcagtccttaagaaggaaaattgagcaagtatttaattggttggacattgcataaaagaggtccatatccaggctaactctagaaattttattctcaaacttagttggcctctttttcttctgtcagaggaccattcttagtggcactggggaaatcttggcacccagaagaattcaactgcgctcactgcaaaaatacaatggcctacattggattggcagaggagaaaggagccctttattgtgagctgtgctat

SEQ ID NO: 11895 - DNA, 397 bp, Homo sapiens
ccgggcaggtacgcggggacatcaatgcagagtccctctgtgaatttacaacacccaacacccatgagctcagtccttaagaaggaaaattgagcaagtatttaattggttggacattgcataaaagaggtccatatccaggctaactctagaaattttattctcaaacttagttggcctctttttcttctgtcagaggaccattcttagtggcactggggaaatcttggcacccagaagaattcaactgcgctcactgcaaaaatacaatggcctacattggatttgtagaggagaaagggagccctgtattgggagctgtgctatgagaaattctttgcccctgaatgtggtcgatgccaaaggaagatccttggaaaagtcatcaatgcgttga

SEQ ID NO: 11896 - DNA, 391 bp, Homo sapiens
ccgggcaggtacgcggggacatcaatgcagagtccctctgtgaatttacaacacccaacacccatgagttcagtccttaagaaggaaaattgaacaagtatttaattggttggacattgcataaaagaggtccatatccaggctaactctagaaattttattctcaaacttagttggcctctttttcttctgtcagaggaccattcttagtggcactggggaaatcttggcacccagaagaattcaactgcgctcactgcaaaaatacaatggcctacattggatttgtagaggagaaaggagccctgtattgtgagctgtgctatgagaaattctttgcccctgaatgtggtcgatgccaaaggaagacccctggagaagtcattaatgc

SEQ ID NO: 11897 - DNA, 393 bp, Homo sapiens
  misc_feature 372, 382: n = A,T,C or G
aggtactttttttttttttttttttttttcctgagccacccatttcctatttgtttattttgaaagttttcataataaaggttaatttttaaaaatttaaaactaccaagatcactaatcctatactaacaaagcatgagatttctcacatcaaaaaaaaaagtccttctgtgagagcccattttttgaatagtttaaaacacaaaacatctgtatttcattatgtgaatgcgcttgagattttaagaatatatcttagcaaggaatagacaatactgaattccctttcccagtgatatcctaatttaaaaatagcaccaaaattggcagggggtggtggctcatgcctgtaatcccacttttgggggaagnttaagcgggngggatcccttt

SEQ ID NO: 11898 - DNA, 385 bp, Homo sapiens
aggtacgcggggacatcaatgcagagtccctctgtgaatttacaacacccaacacccatgagttcagtccttaagaaagaaaattgagcaagtatttaattggttggacattgcataaaagaggtccatatccaggctaactctagaaattttattctcaaacttagttggcctctttttcttctgtcagaggaccattcttagtggcactggggaaatcttggcacccagaagaattcaactgcgctcactgcaaaaatacaatggcctacattggatttgtagaggagaaaggagccctgtattgtgagctgtgctatgagaaattctttgcccctgaatgtggtcgatgccaaaggaagatccttggagaaagtcatcaatg

SEQ ID NO: 11899 - DNA, 377 bp, Homo sapiens
aggtacggggaggaacagagtccctcctttacttctccattagaaagaatgagatggcaagacaatgaaacaggcaaagtggacagagatgcaagacaaaattcaggtgagagagccagagcatcactcagccattcctgacatgtaaaacaggcaactagaaatttgcagaaaggaagcgaggtctccataaagatgtttttaaagtgagcttgaagtatttggagacaattcagtgttacataaaatctgcaaatctctggataaagaagcagagatcccagcatgggacaaatggagccttaaaagtgggaagaagacagagaagaccagggcagaatgcatctcttcctttctcttggctttcctggataagg

SEQ ID NO: 11900 - DNA, 406 bp, Homo sapiens
aggtacgcgggctcctgatctccttaaaaatgaatctagagttggtggctttttccccctcctctttggccagttccacagttcagttcttcctgaaaacagggatgatgaacttgtaggatcaggacaaatgtgtgtttttcaaaaacttaaggctgggtgtgaaacaccttctgtggacaaggatttgtaaacttctctcctccctccagctgcggccccagcctaactgatagttacttgattcagtgtgctagacacttaaatagcatctatgtctctttcaagggaatttgtcaaataatgctgttaagctaaattgtttgaagccatttgcatttttaacggcttgtgattttttgttgggacagcaaattttttttggccaaaagcccagtttttttgg

SEQ ID NO: 11901 - DNA, 382 bp, Homo sapiens
ccgggcaggtacagtagtatttaacctagacgtgaggaaggagtaggaaattttctggtgaatacagaagagcaaagaacagcaggtcagcaggaatgactaatgtttttctatgcgtgtttaatggaatattcgtgtaggatattttgagtaggtaattggataatcagcatttgtaacttgcatcctagtagtctgactctcactaataagacttgtcaaagttccaagaatctgaaagtggatgataaatgtccatgtgtatcaccatccatggccgaaagtcagcatccacagaacacagaattgggacagatgaacttaatagataaagatgaatatcggagttgttcctcttagggaatgatactctccatgagca

SEQ ID NO: 11902 - DNA, 382 bp, Homo sapiens
ccgggcaggtaccaggagggtattgatgtttgaggtccaaactgaaaacccatcacctccttcccactgctatagcagcgttagccctggggttcattatctagccagttcacaccttctaaagtggggctctgaaaatgtcttacttccctcacagacaaagcaattctcaagcctcctgagatcacccaccaaccagagcaactgctgtcacttggaggtgcagctgaattcttctaattgtgacacaaactcttgaaactgtaaatgctgaaagattaaatgaggttataacactcagaaggttttacaagtaaaagtaagtcaaatcaataggtctttatttcatatctgtaatggtttagctctgcgggaagtgtta

SEQ ID NO: 11903 - DNA, 384 bp, Homo sapiens
ccgggcaggtacgaaaaaatcaggctactaagcccactgttaatatagacgcagaccaattgttaggaacaggtccaaattggagcaccattaaccaacaatcagtgatgcagaatgaggctattgaacaagtaaaggctatttgcctcagggcctggggaaaaattcaggacccaggaacagctttccctattaattcaattagacaaggctctaaagagccatatcctgactttgtggcaagattacaagatgctgctcaaaagtctattacagatgacaatgcccgaaaagttattgtagaattaatggcctatgaaaatgcaaatccagaatgttcagtcggccataaagccattaaaaggaaaagttccagcaagagtt

SEQ ID NO: 11904 - DNA, 386 bp, Homo sapiens
aggtactcggggagtcacagaggaagccatttccagagaggaacaaccgtgtagactgctttcctgggagtcaagttaaaacttctctcctgtgaccttgtcacccggcagaggaaagttacccttggctgcagccacgacttccgcatactcttcagaacttgctctgcccttgagttttccagctttcctttaatgcactaaacctttaatattgtattctcctaaatgagacgtctcgcatttgagcaagtaacactcggatcttccccatgtcacggagagacatggatgagaatgaaggctgctgagtgggaggggcttatggggccagttttgaagaggcctcataccttttggccacattccattggccagaactttgt

SEQ ID NO: 11905 - DNA, 302 bp, Homo sapiens
ccgggcaggtactttttttttttttttttttttaagcaagcccccaacaccatagaaaattcttgatttgctcggaggataattggatgaaggattattttcttctttgtttatgtgcaagaaatgaagataaggaattgctttgatcagacaacttcttatctttgtggtagaaacagaactgcccttcttggagtggctctgcctctgagatcactacaggggagacagcatgccctgttcagctggctgaatatttggcaacaatctcctgaagcagctggaattgacaagaagtacct

SEQ ID NO: 11906 - DNA, 383 bp, Homo sapiens
aggtacatcatatttgcttgttggctttatgataacctagaaataatattctggattaactgtgtgactcatgagaagatttgtgcaactatgtttccaaatttacttgattttcaagacttacactagaactgtgagaacagggtaataaataagcatatgtattaatatcacctttggtcaactcttgggtagccccaacggtagtgtaggaattaacgtaatttttcctactaaaagtattggatttggtttgagagaccacagttgaaaatcattgacatacaaaggttaaaaattggttgggttaaaaaatttaaatgcatttgaagtgggtttatagaaaaataatttatctaacttggtttaatatggacaggtta

SEQ ID NO: 11907 - DNA, 386 bp, Homo sapiens
ccgggcaggtacagagacaactagtgacttatcccaagtcacacaggagttagaggcagggccaggacccaaacccaagtttcccttttatgagtcagctcatttcctgtgactccatattaaagataccactctgaatttgccttggaagctggcgcttcagtttataacacaaattgacactttaggaagacaagagagctttgtattctccctgcaatcatttactcagtcaggaaaatactaaacactgtctttgcgtagaatataatgctactgatgtgaggaaaagaaatccagtgcctggcacatagaaaaggatagatacacttttgtgggaggaaaaatagtggtaaaaacatggactggagtctcagctctaccat

SEQ ID NO: 11908 - DNA, 398 bp, Homo sapiens
aggtacactgtttccatgttatgtttctacacattgctacctcagtgctcctggaaacttagcttttgatgtctccaagtagtccaccttcatttaactctttgaaactgtatcatctttgccaagtaagagtggtggcctatttcagctgctttgacaaaatgactggctcctgacttaacgttctataaatgaatgtgctgaagcaaagtgcccatggtggcggcgaagaagagaaagatgtgttttgttttggactctctgtggtcccttccaatgctgtgggtttccaaccaggggaagggtcccttttgcattgccaagtgccataaccatgagcactactctgccatggttctgcctcctggccaagcaagctggtttgcaagaatgaaatg

SEQ ID NO: 11909 - DNA, 509 bp, Homo sapiens
ccgggcaggtacttctgtcttccagttttccacttcaaacttctatcttctccaaattgtttcatcctaccactcccaattaatctttccattttcgtctgcgtttagtaaatgcgttaacctaggcttttaaatgacgcatattcttcccttgtcgtcattggatattcatagggtctttttaatacaccctttcggatttaaatcctctttttctaaaaagaatacagcctttcaaaattaatttttaaatcaccctaacatactttttaaaaacataaaactttttaagacttgcttttaagattcaccctttccaattttttaattcctaaaaaaggcaatttggccacttttcctaattgggttaattaaaattttcgggggcctttcttgtaaagatccctttttacttccttcaaattatatttcttttttaaaaataaccaatttttttttaccttccccattggaaagaaaaatccttttcattctttcaaaaccctttt

SEQ ID NO: 11910 - DNA, 388 bp, Homo sapiens
ccgggcaggtacatctacctaaaggactattatgtggaataatacatactaatgaagtattacatgatttaaagactacaataaaaccaaacatgcttataacattaagaaaaacaataaagatacatgattgaaaccaagttgaaaaatagcatatgccttggaggaaatgtgctcaaattactaatgatttagtgttgtccctactttctctctcttttttctttcttttttttttattatggttagctgtcacatacaactttttttttttttgagatggggtctcgctctgtcaccaggctggagtgcagtggcgcgatctcggctcactgcaacctccacatcccatgttgaaataattcttttgcctcagcctcccgagtag

SEQ ID NO: 11911 - DNA, 400 bp, Homo sapiens
ccgggcaggtactatagattatttgtcttgaagaagagctttgatatgtttcaaaattcgacgttggctttggaaggaaactgtaaatttacagatctttgtccttccccacaaagagccttaatctcacaggttggattatgtggaactcactgctatttttcagttctcctttaagtgactaaggaacatccagatacttccaaaaaaaaaaaaaagtctaagtttttcactttgtccattgccatttaattatcttctgcatattttaaagcatttcctgtgaacataagtattgcccatccagaaaatttgcgtctacattgattttatgtttaatgaaacctgttcttctcaagttctttatttaatcacataacatagtatcttcaaaggtgag

SEQ ID NO: 11912 - DNA, 470 bp, Homo sapiens
tgggaggcggcggctcgctcatatcaatttactagtcgggcgaatcgacactgcgcgcggcggccgctgagtgaggcgtcggctgtgtttctcaccgcggtcttttcctcccactcttggctggttggaccccgctatggaaaagttggcccctgagccagagctccagcagccttgttagggcgtggcctgaggcttggataagtgggatgtaaaacgaagatcaggagcagatttgaagaattacaaagtgaattggtgccagtcagcatgtcagagacagaccacatagcctctacttcctctgataaaaatgttgggaaaacacctgaattaaaggaagactcatgcaacttgttttctggcaatgaaagcagcaaattagaaaatgagtccaaactattgtcattaaacactgataaaactttatgtcaacctaatgagcataataatcgaattgaagcccaggc

SEQ ID NO: 11913 - DNA, 385 bp, Homo sapiens
aggtacaactctggctccatggctcctcacaaatgttccatgtgagatgtaaacatctttatcctcgacaagtcatgttcattccaagaaaccagtctttgttcttaattggacatttgtttctgcaaacagcttaccatacattcaattccaaagttatcagaaacctacactcttatctcacaaatttagaggtgtggtagatcatctccaaagatggccaccaacagttgctctcatcctctgtgcacgtgctatttccaataaggtctatttttttctacagtgagggctgaacttgtgacttgttttgactaataggatatggaagtgatattttggcagctttccacttttgctcttgaaaataagctgacccgtttca

SEQ ID NO: 11914 - DNA, 399 bp, Homo sapiens
ccgggcaggtaccctccaacacctcttccataaaatcagcaaacaactgacagagatcatgcagcgggagcccacgatcggtttaatcatcactcacttccattggatcaactacaaatcaactcagatgagagtgctgagtctcagaggatggacatctcaccccttgccatacagataagtagaaaggatggtattcaaaattaatggccagactctaagtcccagatactatacttcatggtcttccaactctcaaaaagttgtgggagttttttttgtttttgtttttgtttttttgagacggagtctcattctgttgcccaggctggaagtgcagtggagtgatctcagctcattgcaacctccgcatcccaggttcaagctattctcctgccc

SEQ ID NO: 11915 - DNA, 401 bp, Homo sapiens
ccgggcaggtactcactctcaagtttacgttaaatactatcccatacaaaaaccactctttctcttgttttcattatttatatgttgccttgtttaaaggaagaacacaaaaatgccctgctaaagggattctgtttggctgcaggcagcaagagggaaaaacacagagcatattttgcagaaaatgatttattagaagtcagaactatgacacgaagccaagcagggcactctaggactgaatttgctgtgctgccttcatacgctccttgctctttcttttctggcagctgtgactcacacagctcatggagagtatcattccctaagaggaacaactccgatattcatctttatctattaagttcatctgtcccaattctgtgttctgtggatgctga

SEQ ID NO: 11916 - DNA, 397 bp, Homo sapiens
aggtacagtagtatttaacctagacgtgaggaaggagtaggaaattttctggtgaatacagaagagcaaagaacagcaggtcagcaggaatgactaatgtttttctatgcatgtttaatggaatattcgtgtaggatattttgagtaggtaattggataatcagcatttgtaacttgcatcctagtagtctgactctcactaataagacttgtcaaagttccaagaatctgaaagtggatgataaatgtccatgtgtatcaccatccatgaccgaaagttagcatccacagaacacagaattgggacagatgaactttatagataaagatgaatatcggggttgttcctcttagggaatgatactctccaagaactgtgtgagtcacagctggcaaa

SEQ ID NO: 11917 - DNA, 475 bp, Homo sapiens
aggtacttaactagatgagaataacaggtcgccattatttgaattgactcctattcgtttttcatttgttgtgttactcatgttttacttatgggggatatatataacttccgctgttttcagaattattgtatgcagtcagtatgagaaatgcaatttaagttttccttgatgcctttttcacactttctattacttagaaataagtaatacagcttatatttgggcaaaagaataattgaaccaggtttcaattaagaaattttttaagatacaattcttgattggaaaaattaaaaccaattgctttatagggcttttctttaccaaatataaataataaaggttatataaaaaattaatttccataaaaaaaaattattaaaattattattcttaaacaaaatagggtgagaaacggaaaaagagttagataaatttaaatgggtttcctttcccccgtggcgtgcaaaat

SEQ ID NO: 11918 - DNA, 399 bp, Homo sapiens
ggggccattgagactgccatggaagacttgaaaggtcacgtagctgagacttctggagagaccattcaaggcttctggctcttgacaaagatagaccactggaacaatgagaaggagagaattctactggtcacagacaagactctcttgatctgcaaatacgacttcatcatgctgagttgtgtgcagctgcagcggattcctctgagcgctgtctatcgcatctgcctaggcaagttcaccttccctgggatgtccctggacaagagacaaggagaaggccttaggatctactgggggagtccggaggagcagtctcttctgtcccgctggaacccatggtccactgaagttccttatgctactttcactgagcatcctatgaaatacaccagtgag

SEQ ID NO: 11919 - DNA, 480 bp, Homo sapiens
aggtactggctggccaccaaagcacacggagattctgtcaggcgctgagacaccacagccttttcaatcttgtccttaagggctttatctttcatccaattcagcagaggctcaaattcttttctaactggtttcaacgactctccttagcttttctcacttttcattcgaacttcaactcccttcctttggcaaacattcctggtaaccttcttcaccaatcaaatttcggggaaggggccttgaattacaagtatttcaatcccacagggtttctgtgaagggtaaaataaactttcattaggcccccttttttttcaggaagttccgccccaaccaaaatgggaggaaagaatttcagccccttcttttttctggcttggaacccccaagcccatggaaagttaagaatttttggtcctttggttttttcccttttcatttcctttttcccacaattaccctgggattcttagggcg

SEQ ID NO: 11920 - DNA, 398 bp, Homo sapiens
aggtacttccaaaccctcctgttctttcctttttgttttccccaattttaacataaggcaaaagcagtaattgagcaattctatcacctggattggcactccggggaacagtggagctgatcactaactgaattccccctttataatctgaataaattaccccagtatgaatttggactcccttcaaatttagacttgatctccctcaaaggcctaccctcccttctggcagcgggccatatacccctctaggaatcttttgtgggggctttccagggagtaaaaagaccatttgggtggaacataaatctactgcggtgctgcctgctgtggcgcgggacagctgttggattgttgtaattggctgactccctgaagtggtggtattttctgtaggg

SEQ ID NO: 11921 - DNA, 396 bp, Homo sapiens
aggtacctcaaggtgcgttgtcgtagtcatataattcctttgcttgtaactgcccaataaatggatgaggactcacttcacccataaataagaaaggtgaacagcacatggggcctgtagatgccttttgcagggccctctttttctcttcctaaagttgcaatttgagtatttctctagatgggcacatcatagaaactgtcgtcctagatcagagcctggggagagagatacaggtgtcatgcttacatctgcagagtgggaacaagcccagaaaaatcaagatgattaagcagagagcttccatactggagataaaccagctgtgtaaaaaatcgttgcaccaaaaaagcattgcaccatcgacataactgctttaactaagaagtaaaggat

SEQ ID NO: 11922 - DNA, 398 bp, Homo sapiens
  misc_feature 343: n = A,T,C or G
ccgggcaggtacaagttcagagacattcagttgcaaagacatttaagcatattccctctgcttatgggaacttttctaaaaggtttgtaagaggaaacggcaccgcggagggacaggagtggaaatgtatctgtctggttccctcctgactcttgcttcccattggtcaaattttattccacagagatctaatgcttctatacatttggcaacttggtagctactcaagaagccatttcccaagccctgttttgtggcatttcatctaagaccagaagtggaggggagattcagcaggtcagactaccaaccaagagagaaagaggcagctgagggaatgtanaaagcataccaaaaaaaaaaaaaaaaaacccttccttccattcccccccaaaaag

SEQ ID NO: 11923 - DNA, 394 bp, Homo sapiens
aggtacatctctagatgatcacgaatgtcaaatatcacactacactgtgatatggggattccccttgggggttttcatgtgtatagggtgcctgcagctacactaaacatcttaaagctaccacaatgttcacttcatatttttgctttttataggctttcttggtctcctcctatgttcccatcattttcttgctttgaatctgtaagaatcgagttgaatcttctccattttaaattttccataggctgagaaactgtttagccaagtttggataaaattgtatccaaagtaagagtatacaagctatgggcaagtccaaaatcaagctgttcacaggaccatgttctctctaaaggttctaggagagaatccctcatttccttccagcttt

SEQ ID NO: 11924 - DNA, 487 bp, Homo sapiens
aggtacagcatctggtgcaaaatcaatgtggactgaacataaatcacctgatggaaggacttactactacaacactgaaaccaaacagtctacctgggagaaaccagatgaacttaaaacacctgctgggcaacttcttaattttaaatgctccctggaaggaaatacaaagtcagatttcttggaaagcccttacttattattaatttcttcaagacaaaaagaaatcttcgtctggggccacaaccctataataacatttgagggattctttgatagggataacccagaaaatacccaatttgttttgcttggaaagttctttattttacaaaaattcaaaacccttgcattgccaattggatacaaaagtcttgtaagtaaaaggcaagttaaggcaaaggaaagaagttgccactcaacaaacatttcaaacaggcttcccaggttcccctaaccaacaggaaaatttcccggacacaacaaa

SEQ ID NO: 11925 - DNA, 393 bp, Homo sapiens
aggtacctgtggatgggaagaatagaaatcaggagtgggcagagggaaaagttaagctgtgatgtaggcccagtgacaagccactgacacttctatggggagctgtaaatagacctttggcattgtcccaagttgggccaatatggccaggcctttacaggctcacacatcatttattgcttgtgggccactccaggaaggtgcatgactttgggtaaggaggctctctggagctgaggtaatccctgaaaggactaacagctgaagattgtctgctgagaatactgccgaagactaaggcaacaaattcttccacatacaggatctggatggcacatcacagtgcccaaaataaaggctgaacttatttagttataatctgatcagttagga

SEQ ID NO: 11926 - DNA, 395 bp, Homo sapiens
cgggcaggtaccagttgtaaaattaccaggaaccgccatgcctcaagatcgccctgttttctggcttcatcaatgactgcatgcagtgcaccaccctgtccactacgtgatgctgtaggattaagtctcacagtgggcggctgaggatacagcgccgcgtcctgtgttgctggtgaattagacgccatcgctgtgggttgctggtatggtgccgtgctatttggcacaggacgcaccgcttgaggtctgtattgaacctctgaaggaggccgatactgaagctcggttggcagccggtattgataaactaccagcggttgggtcttattttctaccggctgatattgtggatactgtatctgagttggcattgccgggatagagactctgtccct

SEQ ID NO: 11927 - DNA, 418 bp, Homo sapiens
ccgggcaggtacttttattagttctgttttatagatgatgaacccaaggctcagagaggttaagtaacttgtctaagatcacacagtaagtggcaaagctgggatttaaacccacaaagtctggctcctgaaagtatgtttactccagctactccacactcatgtatggtgggcatttgagtttttactggagtgaacaaccaatcaaagtctagtttgattccttgcaaacaagcagcctctcattcatttattcagttttcctctttttttttttttttctgagacggagtctttcttttgtgaattaagactgggcagatacgaatgcattatgaattatcagtaatgtaacgatatactcttgaaaaaaaatatggatgtttgttaaaaaatactggaacctattacttgaatg

SEQ ID NO: 11928 - DNA, 403 bp, Homo sapiens
ccgggcaggtacaggcggtaatatgagccataaggagtggctgtaaatacagatgaagcttccctggcttgcctgctgctcacctcctcctgtgtggtgtggttcataatagtccatggactggtatgagtgtgtggcctgggagttgaggacccctgctctgcgtggtcctaccatagataaaaaagtaaaagtaaggaatttttgatcacaaaagaacactgaagcacaagtcatgttacatatgcttgtcccaataaggtctcactattattgacttcattcctcctcatttgaagttggaaagagatatatttactttgttggaacaagatgtgttcttctacctgctggttaattgtcatcataacagtaattttgttagaacaagatgctctgctac

SEQ ID NO: 11929 - DNA, 410 bp, Homo sapiens
aggtacttcccattgtaaatcacatttttagatagtccagtggccaaagcccccagacgaacaaaaacactcgtatcagccaagacatgccagaggcctagtgattgtttcccagtagctgagggcagaagccagacctctttcaataaggttgatctttcactgtattaacactgtatataaaggacttttataaaagcttgtagttatggtgttattgtcatcatccagtttaatgccctcttttttccagtaagaaaagaaaggtctgggataatcatgttaattgatttgtttacatttttattttaattagtagcacaactgagagtgaaaatggaacccaaatagtccatctttagcataatacttttttttctcctctagtggagcttataccttgccaatta

SEQ ID NO: 11930 - DNA, 379 bp, Homo sapiens
aggtactttttaaatgacaaagagtaatttcaacaaaaccaaatgctgcagtgtggcactcagctataacagtgtattttctttatccaaataaacacaataaaagctttgctttgcattgttcattataaaaaactgaatttttcttttgcaactatttatttttaaatgaggaagtaaaattctcaaaatgatacagttgctgctgcaaagtatgaataataagactgagggaggtaagagagaaaggactagtgcaagccctaacaaaagccctgtaccagatggaaaatgtttttggtgatctggctgctgcttaaagccagttttccctaagaactccaaaggctaaagtctactaggggcagagtgtgaggat

SEQ ID NO: 11931 - DNA, 376 bp, Homo sapiens
ccgggcaggtactctgcattggtgttaatgcccttctggatgtgctgggactcctcaataagtctgtcctccagactgttacattatgctcatacttccacatatccccagaacctaacattttgccatatattttagtagatactaaattatgtttgttaattaggatgctgatggaacccattatttagcagtttttcccttacatttttaggaggtggttttgccagataaatataatgtttaattttttttctaatttagcttattgacatgtgtgtgcagaactgtggtccaagtttccagtctctgattgtgaagaaggaatttgttaaagagaatttagttaagctactgaatcccagatacaacttgc

SEQ ID NO: 11932 - DNA, 416 bp, Homo sapiens
ccgggcaggttcgcggggctgaccacagcagaaaggacggggatgagcactgactggagcaatctgttgactgtcccctgttgtaaaccacagctgcctaattttgagaaacaggggccgagccatcagatgtaggggaatggaagctgatgccaacggaagcccggaggtaaactagggccccggaaaaacgaagaggaaacagaaattatgagtaagcagcggaagttgatactactcccaagatggaggctaatcactctgaacagctctcagcggaacgacagtcaacacctccaggtgacagttcatcattacccagtcacaatggcctggagaaggaagatggccaggattttccaaccccagttcaaccaccagagaaagaggcatgtgtgcaccctgaaatctctgat

SEQ ID NO: 11933 - DNA, 416 bp, Homo sapiens
ccgggcaggtacaaaaattagctgggcatagtggcacatgcctgtagtcccagctactcgggaggctgatgaacaagaatcacttgaacctgggaggaggaggttgcagtgagctgagatcgtgccactgcactccagcctgagcgacagagcaagactgtctcaaaaaaataaaaaagaaaaaaataataaaaaggaaaacaaagcctttagaaaaacaaagcctttgaaaaaggatgtaaaattgaatatatagatacaattatttttaaaaagttttatagaaaaatatcctggattgttgatgttgttttaatatattttaatcatttttgtataatgtcatgtataatatgttataatgaaagtaaaaaaaaaaaggtcttagcagagcaggcagaaaaatgccaaactca

SEQ ID NO: 11934 - DNA, 456 bp, Homo sapiens
ccgggcaggtacgaagaattgcttcattccagtaatgaaataaatctcatttttttctctggttgagtctttcttgggccccttcaaagttgcatacattaacctgacccatccaacccagggctgtagagccaaagtaaactcctaggaaaccatcagtgctgaaaaaaagggtcttgggaattcctagcctttgggcccctaagggagataccacgaatgtgtttcctggaagcctccagggcaatgcaagtgccttacttgcttccaagaaaaagtaatcttacttggggttggggcatttgctggcccaagctttagtaccagcttgtagaacaagggacacaggcctctttggatgaaaacgccccacaaggtgaggaggccttgcttgtgggcaattgctccttttccataggggtaggagggctagttttccccccccaacctggatcg

SEQ ID NO: 11935 - DNA, 410 bp, Homo sapiens
ccgggtaggtacttgcccaatgtttacccttacgacaacgcaggcaaacagtagcaggagcatttggccgtgtttgttgagccggcttggccgcttttaagtttttaacagtgtagtttttttgggtatgaccaagttggccacaattatagcaggctccaagaaaagaatcagtcgagccagtttggttgccgtgcttcatggccggtgcccacagaatagctctgtgggtctccgatccaacgccttcacaagctttaatatatgcaggcaacacctcatgatcaggtaaattttgacgtaggatggaatgcacggccattttacactcatggttcgcattttgaaaagctaacatatgaagaagaataccttgagtgtgctcatcaaagacagattttttaacagct

SEQ ID NO: 11936 - DNA, 406 bp, Homo sapiens
ccgggcaggtacgaaaaaatcaggctactaagcccactgttaatatagacgcagaccaattgttaggaacaggtccaaattggagcaccattaaccaacaatcagtgatgcagaatgaggctattgaacaagtaagggctatttgcctcagggcctggggaaaaaattcaggacccaggaacagctttccctattaattcaattaggcaaggctctaaagagccatatcctgactttgtggcaagattacaagatgctgctcaaaagtctattacagatgacaatgcccgaaaagttattgtagaattaatggcctatgaaaatgcaaatccagaatgtcagtcggccataaagccattaaaaggaaaagttccagcaggagttgatgtaattacagaatatgtgt

SEQ ID NO: 11937 - DNA, 292 bp, Homo sapiens
aggtacaccgccagccatttaagccacaagcttataatgaggagaatctcacactttctcgaaagggtggcactttgctcctggcctgaagctgattctatgtcccggacacgtattgaccttcaggccagcactgtccagtggaaatggaatgtggactatgaatgcaagctacctatgccattttaaatttcctagtagccacagtcaaagaggaaaaagaaacagactacattaatcttaataatactttttggttttttgtttttttcaatttgagagcaggtacctt

SEQ ID NO: 11938 - DNA, 397 bp, Homo sapiens
ccgggctggtacgcgggggcctcatttcagctcaataaaacatcaccaaattcccttaggcagaaaaagggtggggagtgccctttcttgaaggaatcccttaagtgcacgtctcccgttttcttttcacatcaatgcagagtccctctgtgaatttacaacacccaacacccatgagttcagtccttaagaaggaaaattgagcaagtatttaattggttggacattgcataaaagaggtccatatccaggctaactctagaaattttattctcaaacttagttggcctcttttttttctgtcagaggaccattcttagtggcactggggaaatcttggcacccagaagaattcaactgcgctcactgcaaaaatacaatggcctacattggattt

SEQ ID NO: 11939 - DNA, 400 bp, Homo sapiens
ccgggcaggtacttccaaaccctcctgttctttcctttttgttttccccaattttaacataaggcaaaagcagtaattgagcaattctatcacctggattggcactccggggaacagtggagctgatcactaactgaattccccctttataatctgaataaattaccccagtatgaatttggactcccttcaaatttagacttgatctccctcaaaggcctaccctcccttctggcagcgggccatatacccctctaggaatcttttgtgggggctttccagggagtaaaaagaccatttgggtggaacataaatctactgcggtgctgcctgctgtggcgcgggacagctgttggattgttgtaattggctgactccctgaagtggtggtattttctgt

SEQ ID NO: 11940 - DNA, 382 bp, Homo sapiens
ccgggcaggtacttgtatgtgaggaaaaggaggtaaacaaggagttagaaagatgtgatgagaccaggtggtgatggactgaatataaagcaaagacatctggatttttaattctgtagggaatagctgaccaaggtatatgattacatgtctgctttttaaacagctttgtgatttgaaatgctgggttgttattgtttttttttgtttttgtctttttttttaaaaaaaaaaaagatggctaactctgccaaccatagacaaaatatgcatactggcatgtggagaaagaagacaggaattgttagaaagatttcattatttttccagcctccaaaataatgaggtaattttaggcatagtaataagaatgaggaagaca

SEQ ID NO: 11941 - DNA, 440 bp, Homo sapiens
ccgggcaggtacgcgggacagaaaatgagagtttcagatactgagaatagaaccactaagaagcagaaaagagaagatattctcgtgggggagaacaacggctgggaggggaggaagcatggccaaggcaaagaggaatacaacatgtttaagaccacagaacatctgcataggctgtaaatttcgtttgaatgatggatgcaaagatggaagacagatggatagaaggaaaagacagaatcaggatactggatgagtttagtacgcgggaaggcatttgaggcagcccagacgcaggggcattctgactgaggggggccaggcgggagccttgaggaaaacccgcagattaagtttttttttctctttggaaagattagagaattaattacaacttacttaaaaaaattattagtcaatagggttacctaaagatattg

SEQ ID NO: 11942 - DNA, 380 bp, Homo sapiens
  misc_feature 380: n = A,T,C or G
ccgggcaggtacttccaaaccctcctgttctttcctttttgttttccccaattttaacataaggcaaaagcagtaattgagcaattctatcacctggattggcactccggggaacagtggagctgatcactaactgaattccccctttataatctgaataaattaccccagtatgaatttggactcccttcaaatttagacttgatctccctcaaaggcctaccctcccttctggcagcgggccatatacccctctaggaatcttttgtgggggctttccagggagtaaaaagaccatttgggtggaacataaatctactgcggtgctgcctgctgtggcgcgggacagctgttggattgttgtaattggctgactcccn

SEQ ID NO: 11943 - DNA, 418 bp, Homo sapiens
aggtactttttttttttttttttttttggctgttttggggaaaaaaaatcacattccatttttttttccccatgatatggataataaaggctggatgtctctgacctagggtgactgcagtctcaatttacatcttatgtccggacgtcccattcaatgtcgcattcattccaaacaaaagcgtcccagtttagatgacagattatatgactgcccttttttgtcctcaaggtatgatccaaagggaaagcatctttctctgccattgctgtttcccacacgggccaactggttcatatgttcaaagggaatcacgggtttggtattcaatttgggtccaaagaagtcctttttggcgagaacaatttcataaaccccttttactcttaaaattacgggaacttttcctgccaaaatg

SEQ ID NO: 11944 - DNA, 403 bp, Homo sapiens
aggtacaagcttcatttgccacaaaactcacaaaaaagtaattgattaaagaatatctcttttatgcaaaatatacattttaggatataatttaattgatattctactatatactgacattgctccttgatcattgaataaaaaaatactctcattgccagaattatgtttttgtaatatttataattgaggtaataatgataaaagacttaaactatgaataatgttggtgagttccatttaagctataacaatttcccagaactaaacaaatatgtgactaaacataggtcatttttgataaatgaatactaacaatttcacaacataattgacaagctgattacatcagtaatttataagaaaattatacaatcaagttcatagattcaaccaaagaagt

SEQ ID NO: 11945 - DNA, 410 bp, Homo sapiens
aggtacagccatccttgtcttcaagcactttgagaacattttagccattgatgtttacatgtggcacccacccatgcaagataggtttctgtatttatacattaaaataccaaaaaaaaagtatgaaatgccttcaaaaatgttcaaagcttgagagaaaagcttttttcattagtcaaggtgttttgatatggtattaaaataatatctaacaaaatgaaaaaaaaattctcttttctccatgaatgctgacactggggagaatggcaattttaggctgtcaagagcatactaaataagtaaaatatctagaaatgcaatcgacttgcacgggatatgaaaattactggctttcagtcacttttggctatttcatactggcagaaagtaaaaattatggaacacacaag

SEQ ID NO: 11946 - DNA, 416 bp, Homo sapiens
aggtacactagtatttaacctagacgtgaggaaggagtaggaaattttctggtgaatacagaagagcaaagaacagcaggtcagcaggaatgactaatgtttttctatgcatgtttaatggaatattcgtgtaggatattttgagtaggtaattggataatcagcatttgtaacttgcatcctagtagtccgactctcactaataagacttgtcaaagttccaagaatctgaaagtggatgataaatgtccatgtgtatcaccatccatgaccgaaagtcagcatccacagaacacagaattgggacagatgaacttaatagataaagatgaatatcggagttgttcctcttaaggaatgatactctccatgagctgtgtgagtcacagctgcccagaaaagaaagagcagggagc

SEQ ID NO: 11947 - DNA, 488 bp, Homo sapiens
aggtacagatctgggaactaaatattaaaaatgagtgtggctggatatatggagaatgttgggcccagaaggaaccgtagagatcagatattacaacagctttgttttgagggttagaaatatgaaaatgaatttggttaatgaaacgcatcaagtttagtgcatgtcagggtccatgaaatcactgtaccctcctgctcccgttggattatactcccttccaccagtctttggactgcccttcatggtccatccaccagttattttccaatttttgtttttgattggccattgttctttgttgaaaagcccattcaaagcaattttttcttcggtcttggtttttaccctccttcatttgggtaaatagactacaactatttgttggacatttccaatttttcaaaattcttggttaaattcccccgtttcaaaaataaaattattctccaccaaaccaggaatcctggttttttcccttgctccaa

SEQ ID NO: 11948 - DNA, 378 bp, Homo sapiens
aggtaccccagccaggcgcacgatgtcgtgtaagcagggtatccttgtgccagcatttgcttctctgtgaaaacacagcgccgtcaacattttgcactttccagggcccttcggaattggaagtgcctgtagctaatctgtttcccctggagagtccagctgttctcctgatccggccctgcacacacacacccagccacagattactaggatgtcaaacccaggtgatcaggatactctcacggactgccctgctcccccagggctctccctacagtgtaatcctaaagccaaacttcctttcagcagtggctgaagcaaactctgcagtcagaggtcatacccagcaggcttcaccatgcagacttgaatgttgat

SEQ ID NO: 11949 - DNA, 382 bp, Homo sapiens
ccgggcaggtactttttttttttttttttttttttttttggtcttaaataccactccattgtatatttatcaactatactctttgcttattagtggcatgatctttggtttgtttcttaacctctctgaacctctgtctcttcatctgtaaaatggaaaaaataatgcaccttccttgcaggatgacagtaaggataagaagtaaaatgagtaagccatggtgcctggcacagagtagaactcaataaatggcatctagcattatttcccttcacacatacagacagattgtaagcttctagaaggcagaaaccagtatgcattttgccctaagcttccacatcaccacagtgcctaatacccagtttaaatcaacccatat

SEQ ID NO: 11950 - DNA, 383 bp, Homo sapiens
aggtacttccaaaccctcctgttctttcctttttgttttccccaattttaacataaggcaaaagcagtaattgagcaattctatcacctggattggcactccggggaacagtggagctgatcactaactgaattccccctttataatctgaataaattaccccagtatgaatttggactcccttcaaatttagacttgatctccctcaaaggcctaccctcccttctggcagcgggccatatacccctctaggaatcttttgtgggggctttccagggagtaaaaagaccatttgggtggaacataaatctactgcggtgctgcctgctgtggcgcgggacagctgttggattgttgtaattggctgactccctgaagtggtg

SEQ ID NO: 11951 - DNA, 384 bp, Homo sapiens
aggtactttatagtttaggctggacattggaaaaaaaaaaaagccagaacaacatgtaatagataatatggttggctgcacacttccagactgatgaatgatgaatgcgatggactattgtatggagcacatcttcagcaagagggggaaatactcatcatttttggccagcagttgtttgatcaccaaacatcatgccagaatactcagcaaaccttcttagctcttgagaagtcaaagtccgggggaatttattcctggcaattttaattggaccccttatgtgagagcagcggctacccagctggggtggtggagcgaacccgtcactagtggacatgcagtggcagagctcctggtaaccacctagaggaatacacaggc

SEQ ID NO: 11952 - DNA, 371 bp, Homo sapiens
aggtacaatgcttcatttgccacaaaactcacaaaaaagtaattgattaaagaatatctcttttatgcaaaatatacattttaggatataatttaattgatattctactatatactgacattgctccttgatcattgaataaaaaaatactctcattgccagaattatgtttttgtaatatttataattgaggtaataatgataaaagacttaaactatgaataatgttggtgagttccatttaagctataacaatttcccagaactaaacaaatatgtgactaaacataggtcatttttgataaatgaatactaacaatttcacaacataattgacaagctgattacatcagtaaattataagaaaatta

SEQ ID NO: 11953 - DNA, 421 bp, Homo sapiens
ccgggcaggtacccatactgagaggaaacctataatgtcagtgatataattcatatatggttttcagaaaagactcctgaatgttagtaaacttttgttctttttgttcttccccgcgtactcaccacaggggagtaagttggtgggggggatgctgaagatgggacatggtttgagagcatcccataggagtgctgggctgtggcctataatacaccatgggccctgttcacactgcactgctcagcttatcacactagggtggcccatacaggggtccccaatgaggaagcatgacaagatggaccacaaaggcctgcagctgggatagtggctcccggctgtcaacttgtttgggacaggggtggaagcaactcattctcattggagcccagccaggtcctagcttaaacatgtgccg

SEQ ID NO: 11954 - DNA, 368 bp, Homo sapiens
ccgggcaggtacttccaaaccctcccgttctttcctttttgttttccccaattttaacataaggcaaaagcagtaattgagcaattctatcacctggattggcactccggggaacagtggagctgatcactaactgaattccccctttataatctgaataaattaccccagtatgaatttggactcccttcaaatttggacttgatctccctcaaaggcctaccctcccttctggcagcgggccatatacccctctaggaatcttttgtgggggctttccagggagtaaaaagaccatttgggtggaacataaatctactgcggtgctgcctgctgtggcgcgggacagctgttggattgttggaatg

SEQ ID NO: 11955 - DNA, 501 bp, Homo sapiens
ccgggcaggtacttgtgcatgaataaatttattcttcttttctgttgcagatataaatatttctgattgtgccattttgattacccaactaggaaaagagacagtagagacagaagaattaacataggccttttgaaatggaacaccctgaaaatatcaaaaaggaagcacaattaaaattttcttttttttaaaaagtttttcttcacaataaaattttgaagcagaagtaaggaaaaagacaaaatcttctagaataggcatccaggaaggtaagaattggcgacaatagtatttgacttgggtaaaacccagggactattctttggcacttaccctcagattccttttgtcgcttcccggaaggaacaaggtccaaaaaaggtcttcccaaaggttccaagttgtacaaggttggtggttggtgaatttgttttgaggttggtttaaggaaaaaggggagtggttaaaaattgggtttcaaagacaagggggaacttg

SEQ ID NO: 11956 - DNA, 883 bp, Homo sapiens
  misc_feature 180, 181, 210, 225, 487, 540, 543, 576: n = A,T,C or G
aggtaccaaagagggcataataatcagtctcacagtagggttcaccatcctccaagtgaaaaacattgttccgaatgggctttccacaggctacacacacaaaacaggaaacatgccaagtttgtttcaacgcattgatgaacttctccaaggggatcttcctttggcattcgaccacannttcaggggcaaagaatttctcatagcacnagctcacaatacagnggctcctttctcctctacaaatccaatgtaggccattgtatttttgcagtgagcgcagttgaattcttctgggtgccaagatttccccagtgccactaagaatggtcctctgacagaagaaaaagaggccaactaagtttgagaataaaatttctagagttagcctggatatggacctcttttatgcaatgtccaaccaaataaatacttgctcaatttccttcttaaggactgaactcatgggtgttgggtgttgtaaatncacaagaggactctgcattgatgtgaaaagaaaacgggagacgtgcacttaanggnattccttcaagaaagggcactccccaccctttnttcccgcgtacctggccgggccggcgcccgggccagtacttttttttttttttttttttttttccggtttcccaaaccttatttggcttggactttaaaaaaagtttggggccaaattttgattgggtaaaaacatgcctttttaaaactaccaactttatttctttcttttaaaaaactttcctttaaatccaaatctctttaagcacctgacgtttggaaggtactaatgattaataggaacttcggtggtttgctttacctttaaacttcaaatcctggaaattttttttccagggggttaagg

SEQ ID NO: 11957 - DNA, 560 bp, Homo sapiens
  misc_feature 557: n = A,T,C or G
aggtacagagaacagaaaacaaaacaaaaggatgatcaagcagaactttggtaaggaagggtgaagcagagatacttaactcagggtggggacaacagcaatgaccttgtttgaaatgcagctcctgtctctgggctcttgtctctgctggggcatcagttcctttacttcttagttaaagcagttatgtcgatggtgcaatgcttttttggtgcagtgatttttacacagctggtttatctccagtatggaagctctctgcttaatcatcttgatttttctgggcttgttcccactctgcagatgtaagcatgacacctgtatctctctccccaggctctgatctaggacgacagtttctatgatgtgcccatctagagaaatactcaaattgcaactttaggaagagaaaaagagggccctgcaaaaggcatctacaggccccatgtgctgatcacctttcttatttatgggtgaagtgagtcctcatccatttattgggcagttacaagcaaaggaattatatgactacgacaacacaccttgaggtacctgcnccg

SEQ ID NO: 11958 - DNA, 853 bp, Homo sapiens
  misc_feature 141, 853: n = A,T,C or G
ccgccaggtacttccaaaccctcctgttctttcctttttgttttccccaattttaacataaggcaaaagcagtaattgagcaattctatcacctggattggcactccggggaacagtggagctgatcactaactgaatccnctttataatctgaataaattaccccagtatgaatttggactcccttcaaatttagacttgatctccctcaaaggcccaccctcccttctggcagcgggccatatacccctctaggaatcttttgtgggggctttccagggagtaaaaagaccatttgggtggaacataaatctactgcggtgctgcctgctgtggcgcgggacagctgttggattgttgtaattggctgactccctgaagtggtggtattttctgtaggggttgttgtccttgaaaaccctgaggaacaaacagtttaactgggaatgccccagtttgttgggggggcctgaggctggcccctcttcctgtttccagacaatggttgcccatctttatcaaatttagaatgacattgattggcccaatgttttgctttttcacattttggacacaggccaaatggctttttattttttggtggtaatagcttggattattaatatctggttattaaacccgggcaacttcttttcagatgaccgattgaccacaattataacaatttttcccaaatgtttaacttgtcctcctagaggagccccttcatgcttgacccataacattgcctatgcatagctcctcaacccatacaagccttacatatttggaatacattacttcggcggacctttcctttagggcttatggcccacgcattttggattgcatn

SEQ ID NO: 11959 - DNA, 878 bp, Homo sapiens
aggtacatttggtggaactgagaaatggcataacaccaaatttaatatatgtcagatgttactatgattatcattcaatctcatagttttgtcatggcccaatttatcctcacttgtgcctcaacaaattgaactgtaacaaaggaatctctggtcctgggtaatggctgagcaccactgagcatttccattccagttggcttcttgggtttgctagctgcatcactagtcatcttaaataaatgaagttttaacatttccccagtgatttttttatctcacctttgaagatactatgttatgtgattaaataaagaacttgagaagaacaggtttcattaaacataaagtcaatgtagacgcaaattctctggatgggcaatacttatgttcacaggaaatgctttaaaatatgcagaagataattaaatggcaatggacaaagtgaaaaacttaaactttttttttttttggaagtatctggatgttccttagtcacttaaaggagaactggaaaatagcagtgagtttcacataatccaaacctgtgagaattaaggctctttgtggtgaagagacaagagatctggtaaattaacggtttcccttcccaagcccaactgttaatttttgaaccatattcaaactttttcttcaagaccaaataatctataatacctggcccggcaggcctaccggccagggacccgccattacatggtaatatatttaaaataggaatgttgactgatgttaaaacccaaaatgggttccggggatgtggttcccggctgtaatcccacaattttgtgaaaccaaagtgtgccgatacatttaggccgggatttgaaacaacctgtccccatgggggaaccctg

SEQ ID NO: 11960 - DNA, 646 bp, Homo sapiens
  misc_feature 501: n = A,T,C or G
aggtactggactgagtagaaatcaattactttaatattggatgagagagtgattgattgaagatcaggtttttaacctctttttttgttctccttctcacagggagagtcccgtattctcagagtaaaagttgttctggaattgatctcgccaaaaaggacatctttggagccaggtatgctggctttgtttttatttctgtggacttctgaaaaattgacaagcagttttcaaattcaggcacgcatcagaatcacctggaggacttcttaagacaaagctggctgggccccacctgcagggattctgatttaggaagtgatgctggcccagctggttccaggagcacattttgcacagggcttctggacttaccatcacaacagtagttaacagcctgttcttcacatgggctaatttcatgagattagcttctggtgttgtattctcagtagaaaaatacagtgtgggactatggctctgcttattttaatacttcanaaatatttcaaacttaaggaaacataaaagtgtcattttgtttctaggagaactggatatttctgacatgtataatctgattaagagaattggtgatttggggcaatgtggtgatttctgtggcatttctagaagtacctgcccg

SEQ ID NO: 11961 - DNA, 380 bp, Homo sapiens
aggtactcaaatttactacaaaattaataatagtaaatgtaaaatatgtatttatacagccttttgcagacttatgaactatctcaaattcacgaatcctattttttaaatacagttttaagtttcaaccacttgtatcaccaaattttgagacttaactcccatggttaagagatttccaagctgtgttcacacctgtagtcccagctacactgaaagctaaggcgggaggaccacatgagcccaggagttccagactagccttgctctatttaaagagcaagactccactgccaaaaaaaaggaaaaacaaagaagagaattccataaattacttggcttcttatattccatctcttcagtgaaacagtacctgcccg

SEQ ID NO: 11962 - DNA, 857 bp, Homo sapiens
  misc_feature 253, 422, 677: n = A,T,C or G
aggtacctagccacattccctctagttctccacctattcagtgcatctcattaagccaccctcacaaatttccttttatgcttctcttttataatactatctctgcactgcctttttttttaaggcccagaaaacaggttctttgtgggtagacagttcctggtgcacacctttcattcagcactgtaaagatgcaaagtggcaactgagatattaggattcaaaacctcagcactctggatttttaccctgngcttggggaatcaaattttctttttatgaatttgctagctctgattcttctgtgacaccacagtagaaaatcctatcctaattcttaatggtattgttcagaatcctataacttccccttacccatctagtagtttagaataccataacattaaaattagtatgaattntgagtggaactccaaactgacctcttatatcaacacttctaatcatcagcccagatttctcacaatctaagtaaatttcaaattattctcacttcactgccataaggtttaagtgacacacatctactttgatgcttgctgaactttaactggactttaatcagccaactgtgtgggtttatgctgggacttggtttcccacccaactacggatttatggacctcgaaattcccctagggaccttgccccgcggncggccccggaagtacacaaaggtacttgccccttttaagggcgaagaactttgagaacatacctttgccataccccaactttgagaaaagggccttgggagaatatataaggttaaggaaccccaacttgggcaatcctaccttttacctaccctgcccccttgctataaattaataaat

SEQ ID NO: 11963 - DNA, 860 bp, Homo sapiens
  misc_feature 423, 477, 505: n = A,T,C or G
aggtacgtccatcttccagctgcttgccagcaaagatcagtctctgctgatcaggaggaattccttccttatcctggatcttggcctttacattttctatcgtatccgagggttcaacctcgagggtgatggtcttcccgtaagttttcacgaaaatctgcattttggtggcggctccaccgcagatggcggatcgaaaagccccgcgtacattgctttagtgccctgtggttggtttacagtagttcccagaattacctaggccctagacaatccaaagacactgccctagagaaatgaaggcagtgcagggcccatcaccacacattggcatttagagaatatgtgtttcaattactgaggaaaaatcacttcggttacctctatgagctgccataggagcaaataaagtatcactggttntggcactacaggggatacaggaagtacctgcccgggcggccgaggtactttttntttttttttttttttttgaatttttagnagagacagggtttcaccatgttggccaagaataacttgaactctttacctcatgaaccgccctctttggcccttcacagaggtggggataacaagggttagcacacacacctggtcctctttaattatcttttaagaaaaggaaaatatttaaggccgcaaaatttatataataaatttttccttacccgagggaaaaaaagggatttcctaaatttgtgggggaccctccccatggaatcaaccatcctctttaagaaaaggcaaaaatgtaactttaaccttatggaccttttgtggggaggagaaattggaaaaaaatttcctctttccggcgtaacattttaaaaaaattt

SEQ ID NO: 11964 - DNA, 384 bp, Homo sapiens
aggtacagatctcatcaggtatgagggcagtctctgacgcgaacgtctcttcctcgtggtttttattgtcagtattcacacgaagtttaagtctcctagtgggcacccagacgggattgacgatctcctggtaaaacacaagcataccctcttccccacgttataattgttccaggttcccaggtattggtttgggagtttttccatgacactggcttgccttcgtttaaggagaattttttgcctgtttaagggcatttagctgcagtcagagtattggtttttaggaccatttagaaagcttaaacattgctaaatttatttgggagtggggaggtgttaaaatttgctttttaaaccagccttgtcttcttttacagtaac

SEQ ID NO: 11965 - DNA, 411 bp, Homo sapiens
aggtacctgtcagtgttcaatatttaacaaactccagttaaacaggtaagaggtcagcagtagcttataggccttggttctattatccatgtgcccaactgcagccatcgtgggctggtgttaaaattttcctttcaattgtcatttttctaataattgcaatcagtgagaggagaagaaaaagttcaagggaatgacctgacctttcaccatcctacacaggagatgactgatgacatggattcatacactaatgtatatcggatattctccaaagaccctcaaaaatcacaagaagttttgaaaaattctgagatcataaactggaaacagaaactccaaatccaatgtaacaggtctgaagaaatgggcaagcagctgtgcttcttaaattgtgtcttcaactaacaa

SEQ ID NO: 11966 - DNA, 406 bp, Homo sapiens
ccgggcaggtactttttttttttttttttttttagcagtcaactcttgtttatcctgtcattttaattgtaatgatggccctgtgtgtttcggctaaaaatttgtggtatcagcatattaggatttgattatatatagttaaacttcaagtaaatactaaatttttatttaatagcatgaatcaaacttggatatcgcccaagccttatggtccagttggggccagctggtatggaaaatgcacaaacaaattaggcctagtatatagcctataaggtatggccaagttactctgccatattggaaatgttatgtgccagcgtcatgtgaacccaaactaagggatattagaatcagtacaaccagtccttttctgtcacccattgtgattggggatcctaaattt

SEQ ID NO: 11967 - DNA, 355 bp, Homo sapiens
aggacgcggggggcttggggaggagctaggtttgggcttggagttgggccctgaatggcgctttgctgtgaatctccgcggggaggctcttccaaccaggggctgagcttctgcgctgtggagaagccaggctcctgatgtcttattgggggccatatctagagtgatgccctagttcgcgtggctgaagatggcttgccaccctacctgctgattgcattctgactggatgggtcatcagttaaggaagttgaaacctaccaccggacacgtgctttaagatctttgagaaaagatgcacagaattcttcagattctagttttgagaagaatgtggaaaaaaaaaccagacatt

SEQ ID NO: 11968 - DNA, 359 bp, Homo sapiens
catcttgggtcatcgatgagcctcgccctgtgcctggtcccgcttgtgagggaaggacattagaaaatgaattgatgtgttccttaaaggatgggcaggaaaacagatcctgttgtggatatttatttgaacgggattacagatttgaaatgaagtcacaaagtgcactgtagcacagtggtcccaggcatgcatttggggccagagttcctggattgaaaggcgtctctattcaccagccatgtgcccttggggaaaagctcaatcctgctcatctgtaaaatgggggttgttgacaacaatgacagtgtgtggcaagtattgaataaatgcacaaagagcacttaaagcagtgcttg

SEQ ID NO: 11969 - DNA, 359 bp, Homo sapiens
ccgggcaggtactctttctctatcacaattcccctgtctcgatgaattgactctgtctaggcaggggcaaggtgaaccccttaggcggtaacagaacactgcagaagagtgcagtggggcgcctcagcaagaggactaagtgtgctgccatggatttttctttagaggtatttatggaccttaaggcaggagcttaggatagtaaaaagagtttcggcatggcatttcagagatgtatataaattttagttacttgtaaaagttgaaagaggcctggaaccagactttagatactaggaaagtttaattacttctgaattcccagaaaaggagtttcgcctccgtctggcccgtttggt

SEQ ID NO: 11970 - DNA, 356 bp, Homo sapiens
aggtacgcggggacatcaatgcagagtccctctgtgaatttacaacacccaacacccatgagttcagtccttaagaaggaaaattgagcaagtatttaattggttggacattgcataaaagaggtccatatccaggctaactctagaaattttattctcaaacttagttggcctctttttcttctgtcagaggaccattcttagtggcactggggaaatcttggcacccagaagaattcaactgcgctcactgcaaaaatacaatggcctacattggatttgtagaggcgaaaggagccctgtattgtgagctgtgctatgagaaattctttgcccctgaatgtggtcgatgccaa

SEQ ID NO: 11971 - DNA, 376 bp, Homo sapiens
aggtactttttttttttttttttttttttttggtggggggcaatatcaaatgaaagatgaggcaaataaaaatttcctcacttgtgatttcatgtcctgcaaaatgtcactgtttactttaacctaaagcccaaattactcatttcatatagtcatttttacttctatacattgcgtgttgactgacgtgcaatattagcttgctgaaaaagcctgcagaaaaagtattggcatgtgtgcgataactcctgtaatcattaaatactctgctcaagtcaaactcttaatttaacgcgtgtcggcctgatgagccatgctcacccaggtatatatgcctcagcaagtctgtacttttgtcttaatcccacttgcccta

SEQ ID NO: 11972 - DNA, 398 bp, Homo sapiens
ccgggcaggtacagagtgatgccaggcgttcatctcctcactgagctcctgctgagtgtttgcctggggccaggtcctccttccgggaagtcattttaactggaaagaacagggtgggggcggttggcaagggatcatagcatgagcgtttgagggctttattaggggcattgaggagcctctaaaggactctacatttaggaatgacagatttaaacaatttaacaaagccctaaaggtccctgccaggaaagaatgagccccatgtatcaccataagcaacttcttataaacataacccacccctgtcattccagcactttgggaggccaaggagggaggattgcttgaggccattagctcgggatcaacctggtcaacatggtgagaccccattt

SEQ ID NO: 11973 - DNA, 360 bp, Homo sapiens
aggtacgcggggacatcaatgcagagtccctctgtgaatttacaacacccaacacccatgagttcagtccttaagaaggaagattgagcaagtatttaattggttggacattgcataaaagaggtccatatccaggctaactctagaaattttattctcaaacttagttggcccctttttcttctgtcagaggaccattcttagtggcactggggaaatcttggcacccagaagaattcaactgcgctcactgcaaaaatacaatggcctacattggatttgtagaggagaaaggagccctgtattgtgagctgtgctatgagaaattctttgcccctgaatgtggtcgatgccaaagga

SEQ ID NO: 11974 - DNA, 402 bp, Homo sapiens
aggtacgcgggggagtgccctttcttgaaggaatcccttaagtgcacgtctcccgttttcttttcacatcaatgcagagtccctctgtgaatttacaacacccaacacccatgagttcagtccttaagaaggaaaattgagcaagtatttaattggttggacattgcataaaagaggtccatatccaggctaactctagaaattttattctcaaacttagttggcctcttttttttctgtcagaggaccattcttagtggcactggggaaatcttggcacccagaagaattcaactgcgctcactgcaaaaatacaatggcctacattggatttgtagaggagaaaggagccctgtattgtgagccgtgctatgagaaattctttgcccctgaatgtggtcc

SEQ ID NO: 11975 - DNA, 398 bp, Homo sapiens
aggtaccgcacacaattgtatgcgctgcactttcatctgactggaagcgcagtgggcttacaccagcatcaacacaaacacgtgagcagtgccttgcactacaacagacacgatatccctaggggacagcactgttttcagccccattataatctcatgggactactgttacagatgaggtccaccattgaccaaaacatgtggagcacggcaattaattctggatttggatggggacacaaaataagcacagctctggcaggtctaatcaagattaagagagaaaagcaactaaaacatctgagaaaacagatacagagggcataacaccacacagaaaatactacatacagctgagctataatttttaattgacttgctggaaattactaaattac

SEQ ID NO: 11976 - DNA, 400 bp, Homo sapiens
aggtaccagttgtaaaattaccaggaaccgccatgcctcaagatcgccctgttttctggcttcatcaatgactgcatgcagtgcaccaccctgtccactacgtgatgctgtaggattaagtctcacagtgggcggctgaggatacagcgccgcgtcctgtgttgctggtgaattagacgccatcgctgtgggttgctggtatggtgccgtgctatttggcacaggacacaccgcttgaggtctgtattgaacctctgaaggaggccgatactgaagctcggttggcagccggtattgataaactaccagcggttgggtcttattttctaccggctgatattgtggatactgtatctgagttggcattgccgggatagagactctgtccctttctacttga

SEQ ID NO: 11977 - DNA, 402 bp, Homo sapiens
aggtaccaaggcccaatcaccccaaacagtgacaggaacataatttcctgttgggaccagttctcggaattttgcaccaacatgatcccatagttccacatctaacgttcccttttcaggaaaccaaggacagtgttcttccactgccctgaatagggtgaccatattttccatgggaacccgaactcccccattttaacaggaatttaatatagcagagataagcataatgtttagactctgcgtgacccatagttaccccggagaatacacagacaactcaccaatcgttggggagccaaacaagcatttctgtggactggaccgatgaacatttctccgcacctaccaaagggaatcgggttcccacatgcacttaggaaaaagaaaaccacgttgggt

SEQ ID NO: 11978 - DNA, 887 bp, Homo sapiens
  misc_feature 145: n = A,T,C or G
aggtacttttttttttttttttttttgtaaatctggaaccaaggattttaataccaatgataatataatgtttgcccaacattaagagtcaaatcaaatcatagtttatctattacggctctaaaccaattacaaaatattacanaaaaataataaccgcttttctgtaaaatatctgtattggctgggcatggtggttcacgcctataatcctggcactttcagaggccaaggtgagtgaatcgcttgagtccaggagttcaagacaagcctacgcaacgtagcaaaactccacctctacaaaaaataccaaaattagccaggcatggtgatgtgcacctgtagtcccagctacttaagaggctgaggcgggaggatcgtttgagccctggaggcagaggctgcagtgagccaagatcataccagcctggcctcaaaaaaaaaaaaaatctttattagacactgggcatcacagggtagcagcatttgttttcttatgacccaaataatggtcaaattgttttttaccaaaagcaagtttctaccttatcaaaaggtagaagtaacacaaaagtttaagtaaaaatgacaacgtaaggatgcaaaatattctcggttaggtttaaaaaaatacacaccgaaatgtggataatatatatggggatagaaacctttgaaatctattcataatcaggtactaatttaaaaaatcttacggacctttactttaaaattattttggaaacctttggaaccccttcttttgagtaggcagaagtcttgcatggaaaaacaaattcctggcgggccggccggttaaaaataaggataccccggcctgaggaattgaattaaagctatgataccggaaccttaggggggcccgg

SEQ ID NO: 11979 - DNA, 927 bp, Homo sapiens
aggtacttccaaaccctcctgttctttcctttttgttttccccaattttaacataaggcaaaagcagtaattgagcaattctatcacctggattggcactccggggaacagtggagctgatcactaactgaatccccctttataatctgaataaattaccccagtatgaatttggactcccttcaaatttagacttgatctccctcaaaggcctaccctcccttctggcagcgggccatatacccctctaggaatcttttgtgggggctttccagggagtaaaaagaccatttgggtggaacataaatctactgcggtgctgcctgctgtggcgcgagacagctgttggattgttgtaattggctgactccctgaagtggtggtattttctgtaggggttgttgtccttgaaaaccctgaggaacaaacagtttaactgggaatgccccagtttggttggggggcctgaggcctgccccctcttcttgtttccagacaattgttggcccatcttttattaaaattaaaaatggacttggattggcccaaatggttttgctttttccaccattttggaacacaggcccagatagggtttttaattttttggctggaaataaccttggatttaataataatcccgggtaattttaagccttggggccaactcccttttaaaattgaccggattttaccaacaaattataacatttttttccccaaaatgtcttaaactttgcctctcttaagatgagaccccccctatttttttggaccctttaaactttgcccttttgataagcttcctccaatcccataacaaagcctggacatattatggaaaataacatcaaccccgggcgggaacctttctttttaaaggctttatgggccgcatggactttgtggattacatttataagaccg

SEQ ID NO: 11980 - DNA, 868 bp, Homo sapiens
  misc_feature 376, 471: n = A,T,C or G
ccgggcaggtaccctggtcattgactggcttgttcattctccccatggactctgacttcttgagggcagcgtgtttctgctacaatagggacaatgtaagggaccagagcacacagtaactaatgtcttacaggatctcccccaagctcatggctttgagcatcatccctattctgacaactttcaagtctgtcatttcagttcaggctctgccctgagctgtggcggtcgtaacacaaacatccacctttctcacccagcatctccacttggatgtttgacaggtcaaacttaatgtgcttctgaaccaaactcctggcttcctctccaccctccacccccacccaaatctgcttctcctatatctttcccattntggttagcagtaactccatccttcctgttgcttggaccaagccttgagtcatccttgactcctctctctttcacacttgacatgaaatcctttangaaatcttgccagcttctaaatatacccagaacctgcccccaccctagtgtctgcatcactaccaccatgctccaagccactcatccaatctaacctggattgttgcattggctggcaacttggcctcccagcccccctggagtctgttttccatactgcagtcagagggatcctattaaaacgtcagttaaatcaaggcactcctttgcttaaaacctacaggaaattcccgtttcactcaaaaggagtcttcttaagaaccacattaaggccgggcgcggtggctcacgcctgaaatctaaccacttgggaggccggggcaggggtatcacaggtcaggaattgaaacctcctgcttaattgggaaacccctttttctaaaaatccaaaaatgcg

SEQ ID NO: 11981 - DNA, 864 bp, Homo sapiens
  misc_feature 150, 227, 255, 472: n = A,T,C or G
aggtacgaaaaaatcaggctactaagcccactgttaatatagacgcagaccaattgttaggaacaggtccaaattggagcaccattaaccaacaatcagtgatgcagaatgaggctattgaacaagtaagggctatttgcctaggcctgnggaaaaattcaggacccaggaacagctttccctattaattcaattagacaaggctctaaagagccatatcctgactntgtggcaagattacaagatgctgctcanaagtctattacagatgacaatgcccgaaaagttattgtagaattaatggcctatgaaaatgcaaatccagaatgtcagtcggccataaagccattaaaaggaaaagttccagcaggagttgatgtaattacagaatatgtgaaggcttgtgatgggattggaggagctatgcataaggcaatgctaatggctcaagcaatgagggggctcactctangaggacaagttagaacatttgggaaaaaatgttataattgtggtcaaaatcgtcatctgaaaaggaagtgcccaggcttaaataaacagaatataataaatcaagctattaacagcaaaaaataaaagccatctgcctgtgttccaaatgtggaaaagcaaaacatgggcccatcaatgtcattcttaaattgataaagatgggcaaccattgtctggaaaaaggagaagggcaggcttaggcccccaacaaactgggcattccaggtaaactgttggttcctaagtttcaaagacaccaaccctcagaaaatccaaccactaaggagtaggcaatcacaaatccaaaattgtccccgcccagagggaaaaccgaataaatatgtcccccca

SEQ ID NO: 11982 - DNA, 873 bp, Homo sapiens
  misc_feature 11, 202, 212, 345, 517, 518: n = A,T,C or G
aggtacgcggngagaaatagcaagtgccgagaagctggcatcagaaaaacagaggggagatttgtgtggctgcagccgagggagaccaggaagatctgcatggtgggaaggacctgatgatacagaggtctgtaggccatggaatgggtttggaattttattcaaagagctatgggaagtgactagaaggtttaaagttggngaagaggttntgtgtttctgttatatttgtgttttatacaaattactctggttgctgtgttgataggacagcagaagggtaggagcagggacaccagttaagttattgcaatggttaaggtgagaggtggtggctgggcctangcctttttggagtgaacaagctatttgcttggcttccatgatccttctccctccactggaatggaaggtacctgcccgggcggccgaggtacttacaaagttacaaccatttgcttccttaacattttccatgttaagttcatacatgtagatatgatcaagattatcattnntagggggaagagggaaaaaaaggtgtatttatcatcagctagatgtgctcactgtatgctccgttatttatatgcaaggcccgggtgactggaaatgcagttgtcaagcattttaataaactggacaggcattttgttcttgacgaccaggcatctttaccaaggagccatttggagaaaacaggaaacaggccaagcctcttgactggaacacgccaccttaacacgttacaagcttacttaattgttcacaacttggcctgttgccaaaattccttatagaaggattttaatggttgaaaaacaatcttccaaaaataaagcttttaccttgaaagctttattcaatttgggt

SEQ ID NO: 11983 - DNA, 902 bp, Homo sapiens
  misc_feature 362, 394, 474: n = A,T,C or G
aggtacttcgaagtttatccagaagcaaatttaactatgtcttaaacttgtttcccacgctgatgaagctaagttttcctgctttttgtttagtatctttgttgttatttgtggatgattcaaataattcccgttaaacttatctctggattcacatattaaggattcaagagacatatgtaaagcatcattatttttctccacaaactgggtctgaaaaataaatcaaacaggaatgtttctgtccatcttgtgataacatcacttaacatggctctgtccaaaggaactttctgtgatgacagaaatgttctgtatctgcactgtccaacgccgtcaccactagtcagtgtggacactgngcacctgaagtgtccccgcgtacctgcccggncggccgaggtactatagattatttgtcttgaagaagagctttgatatgtttcaaaattcgacgtttggctttggaagganactgtaaatttacagaatctttgtttttccccacaaaaaagcctaatctaacaaggtggaataatgtgggacctaacttgctatttttcaatttcttcctttaagtgactaagggaccatcccaaatccttcccaaaaaaaaaaaaaggtctaaagtttttcactttggtcattggccctttaaattatcctcttgcataatttaaaaccatttcctttgaaccataatttgtgccccttccaaaaaatttgcgtcaactttgatttttatggtaaattagaacccgtgtcttcttaagtttctttatttaaatccattaccatagaacttttcaaaggtaaataaaaaaatccctggagaaaggttaacacttctttaatttaaaatacctgtggtaccatctaccaaccccaaaaaaccactgtag

SEQ ID NO: 11984 - DNA, 432 bp, Homo sapiens
ccggcaggtacaggttgctgtaggagcccttaatctatgagatcttgacagattgcttgctttcttctttccaccatgggagaatgcaacaaggtcttcaccagatggccgaacagatccaagtgtcatgaccttggactgtcatcctccagaaccataagccaaataaatttcttttcttcataaatttcccagtctgtggtatcttgaaatcaactgaaatcagtcactaaggaacaaaattctccagagaaactgtttcttccttgaatctgaatgcctgactgtcaatcatttagcactgaaacaaggagagcctctctgaatgttgagcagccaagagagctgcccacactggacatcaatcagcagcagggcctgtcctcagggtgactccgtttaccagttctggaatgactgaagggccttgca

SEQ ID NO: 11985 - DNA, 878 bp, Homo sapiens
  misc_feature 395, 468, 469, 480, 528: n = A,T,C or G
aggtacaaagtccctgaggcaaaagcatgcttgctgtgttctaggaaaagcaaggaagacagcatgtctatagcagtgggaggtggaaggataataaacagtaggtgaggttagaggggaccaaatcatgtattttcatccagaggttcccaaccttggctgcacattagatttattctaaggagcttttaaaaaataccaatgactgggtcccagcctagagtgattaaatcagaatctctggaggtagacttgagaatctgatgtttgcaagtttcctaggcaagtcaaggctgaggaagactgctgcaggccattgtaagagccaggcgttgatctcattcaacctttccctcagctcttctagagacagccagcattctcttatggcacanatacagcctttcaccctcacagaaagacacaggacaacaaattcaataaattaattcactggcatggatgatnntctcagactanttgtttcccagtttgataggaaacaattaaaagcttgaaagcacttgnatgccttgatgatgaaattggacctttaaactgggggccttacggaaacgatgggttggccaaagacacaggagatcattgggagcaagctcaataccaaattggttcaacaaggaccttgaaattgcctggagctggacctgaagtttaccccattggtttactattgaatgattgtggataattggataaacatttctatctttgaccctcaggtcccccatccttaaagggggtacaacatatgaactataaagggggaattggttagactactttcatgggttttttgaaggagaatggaaaatttatttagggggctataaaaatccccaattttttccttggct

SEQ ID NO: 11986 - DNA, 443 bp, Homo sapiens
ccgggcaggtactctttctcttcatttctcagccggctgacacttacagaaaatagaaagaacgtgcgttgaaatattaggggcaggttcccccaatatctggcgcccaacgtggttttctttttcctaagtgcatgtgggaacccgattccctttggtaggtgcggagaaatgttcatcggtccagtccacagaaatgcttgtttggctccccaacgattggtgagttgtctgtgtattctccggggtaactatgggtcacgcagagtctaaacattatgcttatctctgctatattaaattcctgttaaaatgggggagttcgggttcccatggaaaatatggtcaccctattcagggcagtggaagaacactgtccttggtttcctgaaaagggaacgttagatgtggaactatgggatcatgttggtgcaaaattccga

SEQ ID NO: 11987 - DNA, 440 bp, Homo sapiens
aggtactttttttttttttttttttttttgcaatggtcatgtttcatgttcttaatcaagaagatcaaaataaagcgattctttcagaatgacagataaaatgatagaggtttgaaggtaaatgtaacacagtaactttggaacccagagcccctaggaactcataggatatttggccactgttacacatgacaaacagaaacatgacccccttttaaatcacatgactgaaatttgaatttcagtcttggttttcattacagtttttaaaaagttgtcaaatactttaaatgttggttttgcagaaatatagggctaaacaaccagcatattttttgtgtgcttttgcaataatcagaaataaaattggttttcttaaggtaagtaacaggtcgtttttttggcttagccaaagttcccttagttagggtaagagaaat

SEQ ID NO: 11988 - DNA, 441 bp, Homo sapiens
aggtactattattcccatttacagataagaaaactaaaacacagcaattctcaaatgtttgtttccttactctctggtttcctttgcttgaacaaaaaagaaaaaagaaaaaggaaaaaaatccacttcatttaggaagtctttcccacgtaatacagacccaaattatttctttgagcttccctccaacattcctccactacaatgtatgattcagaaggggaaaagggctgtgatactacaaataaatttaaaaaagcatcaccaaagaaaactagacaaagaacacaaaaaggctccaacatttgaacgtgctcaaacaaataactggaaaagatttttctgaatggtgaatattgtgccaggtattgtcaagaggtcaggaaatggccactcccattcactattggaggaagtgaaaaattaacaccaactttctat

SEQ ID NO: 11989 - DNA, 409 bp, Homo sapiens
aggtaccgactcctcagaaactggcatgccaaatcaaaatgggtctggttcaatcctccctaatggcaatgtaaacccctctaactaatcccacttctcctaattatctttttctccttacgaacctaaaaatctcaccatttctattagcctgaaaataacatccctctgttcttctcttcctccttcagcactggatctcacttacaataggttttatttaataattatcttccttacactttctgtctcaccagtttccccttaaactgatttacctgctacacaaaattattcttattgggcttatgtgccttttcctccacttattcgacctctcacctggatggatgctcctgcagaaatctatactaacgatagtgtgtggatgcctggaactacagatgac

SEQ ID NO: 11990 - DNA, 409 bp, Homo sapiens
ccgggcaggtactatagattatttgtcttgaagaagagctttgatatgtttcaaaattcgacgttggctttggaaggaaactgtaaatttacagatctttgtccttccccacaaagagccttaatctcacaggttggattatgtggaactcactgctatttttcagttctcctttaagtgactaaggaacatccagatacttccaaaaaaaaaaaaagtctaagtttttcactttgtccattgccatttaattatcttctgcatattttaaagcatttcctgtgaacataagtattgcccatccagaaaatttgcgtctacattgactttatgtttaatgaaacctgttcttctcaagttctttatttaatcacataacatagtatcttcaaaggtgagataaaaaaat

SEQ ID NO: 11991 - DNA, 409 bp, Homo sapiens
aggtacatggtttgccaaccctgtattatgtttatagcatttgttttacaaaatatacctgattctgaaaaaatgaaaaatggttactataggctagatagtaggtagttaagtcctataactactagtaggtagttataggacttaattaacagatagatatgatgtgacaattcagtttaagtgcaactttcagtttctatcttaactataacttgagagattaatttagaattacaaatgtgtgtatatatatatatgagcatatgtatacataacatatttacacacaaggcacacatactatgagcaccctgcagtttgtaggcatttttacatgcgaatgttattggaacagataggcatcacgggaagaaattttgcctctacctgctctcaccatgtcagt

SEQ ID NO: 11992 - DNA, 408 bp, Homo sapiens
aggtacttaatcctggttggtttacccattctaaattatttatgtgagatagctatctatttggaaaaaagtaaagtgaaagtcttacctcaatccacactcaaaaatagtttactatatgacagatctatggcaggcagatttgatggctcaatgaactccaccctcccagtgttcacacctttatgtagttcccacttacagggagccaaaggtccgtgggacgtgaccaactcagcattccactggaggctatatgatcaaacagtaaactgtttatcatgaatgcaggatgtgagcaaactcaccattgctcctgccgacagaaggttttctggaggcaatcactccctggtgctgaggttatctactgcaacatttagagaatgtagtcttgcaagcctcctc

SEQ ID NO: 11993 - DNA, 402 bp, Homo sapiens
aggtacgcggggagtcacagaggaagccatttccagagaggaacaaccgtgtagactgctttcctgggagtcaagttaaaacttctctcctgtgaccttgtcacccggcagtggaaagttacccttggctgcagccacgacttccgcatactcttcagaacttgctctgcccttgagttttccagctttcctttaatgcactaaacctttaatattgtattctcctaaatgagacgtctcgcatttgagcaggtaacactcgggagagtcccgtattctcagagtaaaggttgtttctggaattgatctcgccaaaaaggacatctttggagccagattggataaccgagccgcgactccacttgaacatctgagcagttggcccgcgtgggaaacagcaat

SEQ ID NO: 11994 - DNA, 437 bp, Homo sapiens
ccgggcaggtaccagttgtaaaattaccaggaaccgccatgcctcaagatcgccctgttttctggcttcatcaatgactgcatgcagtgcaccaccctgtccactacgtgatgctgtaggattaagtctcacagtgggcggctgaggatacagcgccgcgtcctgtgttgctggtgaattagacgccatcgctgtgggttgctggtatggtgccgtgctatttggcacaggacacaccgcttgaggtctgtattgaacctctgaaggaggccgatactgaagctcggttggcagccggtattgataaactaccagcggttgggtcttattttctaccggctgatattgtggatactgtatctgagttggcattgccgggatagagactctgtccctttctacttgattttctcttggggtttgtgcttgtctaacct

SEQ ID NO: 11995 - DNA, 403 bp, Homo sapiens
  misc_feature 403: n = A,T,C or G
ccgggcaggtacctctccaattcgtcatctgggtggcctgtctcagcccagcttccaagcttgcttttattggtggcatagagcttcaggatatcttccgtaacaaagaggagtgctcccgaatgctctaccttcactgaatttgaaaatgcagctgctcttatcccctcacctaaactttcttgaaaacctgagagaaagccaagaaagcaatattgtcagacatgcagttctctacttacactgctcacacctgattaatgcctcagtgcctagtagttctcaaagttgagtttacaccacaatcagctatagtccttggcacaccacagattgctccacctctcccagctctgagaatttcaaggaatttacatttctaatgagctctcaagtgatgctn

SEQ ID NO: 11996 - DNA, 447 bp, Homo sapiens
ccgggcaggtactatagattatttgtcttgaagaagagctttgatatgtttcaaaattcgacgttggctttggaaggaaactgtaaatttacagatctttgtccttccccacaaagagccttaatctcacaggttggattatgtggaactcactgctatttttcagttctcctttaagtgactaaggaacatccagatacttccaaaaaaaaaaaaaaaaagtctaagtttttcactttgtccattgccatttaattatcttctgcatattttaaagcatttcctgtgaacataagtattgcccatccagaaaatttgcgtctacattgattttatgtttaatgaaacctgttcttctcaagttctttatttaatcacataacatagtattctttaaaggtgagataaaaaaatcactggagaaatgttaaaacttcatttatttaa

SEQ ID NO: 11997 - DNA, 403 bp, Homo sapiens
aggtacttttttttttttttttcgagtgtgtgtgagagacagacagggtcttatgttgtccaggctggctcagactcctaggattaaggatcttcccatctcagcttccctagtagctgtgattctttatctattctttaaacgcaacaaacgttggctgaacatctacaatgtggcaggagacatgggaaaaaacaaagatgagtaagataaggttccacacccaaggagcttacaatgcagaggaagaaacagacatgttatgtgatggtgctatttgttagagagcccctaatccagctccctcagtctgacttaggtgtccacttggaagctgaacatacgaatggataacagccagacactatataacagaaccatggcttaaacaaccgctgctgca

SEQ ID NO: 11998 - DNA, 443 bp, Homo sapiens
ccgggaggtacttccaaccctcctgttctttcctttttgttttccccaattttaacataaggcaaaagcggtaattgagcaattctatcacctggattggcactccggggaacagtggagctgatcactaactgaattccccctttataatctgaataaattaccccagtatgaatttggactcccttcaaatttagacttgatctccctcaaaggcctaccctcccttctggcagcgggccatatacccctctaggaatcttttgtgggggctttccagggagtaaaaagaccatttgggtggaacataaatctactgcggtgctgcctgctgtggcgcgggacagctgttggattgttgtaattggctgactccctgaagtggtggtattttctgtaggggttgttgtccttgaaaaccctgaggaacaaacagtttaact

SEQ ID NO: 11999 - DNA, 405 bp, Homo sapiens
aggtaccttccattccagtggagggagaaggatcatggaagccaagcaaatagcttgttcactccaaaaaggcctaggcccagccaccacctctcaccttaaccattgcaataacttaactggtgtccctgctcctacccttctgctgtcctatcaacacagcaaccagagtaatttgtataaaacacaaatataacagaaacacaaaacctcttccccaactttaaaccttctagtcacttcccatagctctttgaataaaattccaaacccattcccatggcctacagacctctgtatcatcaggtccttcccaccatgcagatcttcctggtctccctcggctgcagccacacaaatctcccctctgtttttctgatgccagcttctcggcacttgctattt

SEQ ID NO: 12000 - DNA, 409 bp, Homo sapiens
  misc_feature 159: n = A,T,C or G
aggtacatctctagatgatcacgaatgtcaaatatcacactacactgtgatatggggattccccttgggggttttcatgtgtatagggtgcctgcggctacactaaacatcttaaagctaccacaatgttcacttcatatttttgctttttataggctntcttggtctcctcctatgttcccatcattttcttgctttgaatctgtaagaatcgagttgaatcttctccattttaaattttccataggctgagaaactgtttagccaagtttggataaaattgtatccaaagtaagagtatacaagctatgggcaagtccaaaatcaagctgttcacaggaccatgttctctctaaaggttctaggagagaatccctcatttccttccagcttctgggtggctgctggc

SEQ ID NO: 12001 - DNA, 450 bp, Homo sapiens
aggtacgcggggggtgacacacacacacacacacagcacctgcacgcagatgcacacatctctagtcaaatgaggctctcagctttttgataggggctttttgatacgtgtataaccaatactttattctcactgtagtcaaggactcattgcaattcagaaatgagaagctgatccggaactccactacagctcaaagaaattctcgaatgttctcacctattaacagttattaaaatggaagaagctggggatgaaattgtgagcaatgccatctcctacgctctatacaaagccttcagcaccagtgagcaagacaaggataactggaatgggcagctgaagcttctgctggagtggaaccagctggacttagccaatgatgagattttcaccaatgaccgccgatgggaggtaagcacgaagctctcctgggttattccagtgttg

SEQ ID NO: 12002 - DNA, 409 bp, Homo sapiens
aggtacatttaatctatagccccacacagataaatagttagaaatggagattactcatcttgtcagataattatggatattattctttgatactaaatttgacaagggaatgcacaatatgggtttgaaatcaagtcaaagaacactttgtacgcggggattccaggctcttctgtgcctgtgggactacattctctgtgccgggcttagagaacacgaagagggagccatctgccacactctggaggctgaagcctgcaccagtgctgctcgcctcactgtggtaggtggtggtgatgggaactgcagatcggccagagtggtagaaaagttgctgcagggtttttctggctttgcctgcccagctgctccatgcctggctagaggagaaggaggagccacatgtgga

SEQ ID NO: 12003 - DNA, 405 bp, Homo sapiens
aggtactatagattatttgtcttgaagaagagctttgatatgtttcaaaattcgacgttggctttggaaggaaactgtaaatttacagatctttgtccttccccacaaagagccttaatctcacaggttggattatgtggaactcactgctatttttcagttctcctttaagtgactaaggaacatccagatacttccaaaaaaaaaaaagtctaagtttttcactttgtccattgccatttaattatcttctgcatattttaaagcatttcctgtgaacataagtattgcccatccagaaaatttgcgtctacattgattttatgtttaatgaaacctgttcttctcaagttctttatttaatcacataacatagtatcttcaaaggtgagataaaaaaatcac

SEQ ID NO: 12004 - DNA, 391 bp, Homo sapiens
  misc_feature 369, 377: n = A,T,C or G
ccgggcaggtacttcatcgcgtttggagcgatgtgtccattgataggcggttagtaaatgtttgaaaaattggtttatgttatttactcttctttcccttttttcattcttttcaatttctttgcaccctttccccttctttcctttttaatgaaagttttagtaagcaaaattattagcatacccaacaatggtttgctttccctccaacctgttggtagtgagtgagtagttaattcacattttattccataaaacgttttactttttctccagagtaattaagtagaaaatatggctcttggccaggcacggtggctcttgcctgtaatctctgcacgttgggaggctgaggtgggtggataattngaggccangcgttcgagaccaa

SEQ ID NO: 12005 - DNA, 394 bp, Homo sapiens
ccgggcaggtacgcggggacacatcaatgcagagtccctctgtgaatttacaacacccaacacccatgagttcagtccttaagaaggaaaattgagcaagtatttaattggttggacattgcataaaagaggtccatatccaggctaactctagaaattttattctcaaacttagttggcctctttttcttctgtcagaggaccattcttagtggcactggggaaatcttggcacccagaagaattcaactgcgctcactgcaaaaatacaatggcctacattggatttgtagaggagaaaggagccctgtattgtgagctgtgctatgagaaattctttgcccctgaatgtggtcgatgccaaaggaagatccttggagaagtcatcaatgcg

SEQ ID NO: 12006 - DNA, 874 bp, Homo sapiens
  misc_feature 496: n = A,T,C or G
aggtacgtttgaaggtgtctacaaggcaccaccttagacctttctgaattcttaaaaggttgtgcagtttcaccctgggtttgatttttgctctgaaaccatttcttggctcaagaattgtttgatgtgtggagagattgggaatgagaaacaggtttatatttaacagtttattctttagctcatctctctctgctcacatcttataggcagtgagcagaacccaggtgtcactttaagtggctgcctggaaatctctttagatagatcattgagttcattaggtgcatttccgcttcccactttactgtagatgtcagtgttgctaaactctctgtcactgcacaacagggtcctcctttcctctagcttccaggaacatttccctcacttttctttaagccctcactgacaaccttcttaaaacaacagtcatttcattatctcgcactgttgctatgtgtcaggcattaaaaagggcttgttctgactcggngtctctcgtgctggctgtcagccattttggaagcaagtctgattggcattagggctattgttggtttaagtcacttcattttaaggggaataaattacatgtcagtagtgactggagtgaataacattgctgatttatttcaagcctttggtatccttaggtcctagcacatacttctggttggctttcggaaatccagaattttctaattttcccttccccccaccatgccccacctgtaagctttcccttgtttgccattggctggaatcataacctctgggttgttgaccgacactatgttgttcaccttggtttgaataccgtttaccttcgacgtgttgttctccgaggatattcgcgtctataccgccgaaa

SEQ ID NO: 12007 - DNA, 403 bp, Homo sapiens
ccgggcaggcaccatatcagtggagagctgcagcaaggtggcccctacggccacgcaccagcctgcacattacctctccatactgcagccctttatatggaaaattcctacatcactttgctgtgtgtgtttacacaggtggattttgctttacttgcactgacagcacacaggagggcagcacacaccccaacccacatcaactgccattaaagaaaagaaatttcagcccataatttcatgtccagcaaaattaggcatcataagtgaaggagaaataagatccttttcagacaagcaaatgctgagggaattcaatatcaccagatctaccttacaagagctcctgaaggaagcactaaatatggaaagaaaaaaccatcaccagccactacaaaaatgc

SEQ ID NO: 12008 - DNA, 407 bp, Homo sapiens
ccgggcaggtacgaaaaaatcaggctactaagcccactgttaatatagacgcagaccaattgttaggaacaggtccaaattggagcaccattaaccaacaatcagtgatgcagaatgaggctattgaacaagtaagggctatttgcctcagggcctggggaaaaattcaggatccaggaacagctttccctattaattcaattagacaaggctctaaagagccatatcctgactttgtggcaagattacaagatgctgctcaaaagtctattacagatgacaatgcccgaaaagttattgtagaattaatggcctatgaaaatgcaaatccagaatgtcagtcggccataaagccattaaaaggaaaagttccagcaggagttgatgtaattacagaatatgtgaag

SEQ ID NO: 12009 - DNA, 853 bp, Homo sapiens
ccgggcaggtacaagttcagagacattcagttgcaaagacatttaagcatattccctctgcttatgggaacttttctaaaaggtttgtaagaggaaacggcaccgcggagggacaggagtggaaatgtatctgtctggttccctcctgactcttgcttcccattggtcaaattttattccacagagatctaatgcttctatacatttggcaacttggtagctactcaagaagccatttcccaagccctgttttgtggcatttcatctaagaccagaagtggaggggagattcagcaggtcagactaccaaccaagagagaaggaggcagctgagggaatgtagaaagcatacaaaaaaaaaaaaaaaaaaaaccttacattccataccacacagaaaaagcgttgcgtgcaacttaacacttttttgggggaaaaaattaattaaaagaaaaccttttaacccactaagaaagaaagggaaattaccttatattattaaattccttaccgtggaagaaggaattccaaacctttgacaaatttatttttgttaggctttaagaaatggtccttgggccgccgggcaggtcagtgtttaacctgataaagctttgccgcttggactttaaagcttaaaaaagaaaaccaatgaacctgcccgttgggtataaggggaataaagcctgggtttaagaattggaaaaaattaaaggaaggtttttggggaagggaagccttctggaaaattgtttttacccaaaactcttaaaattcttaaaaaaaatggaaaatgaacactttttgggtgaaaaacctgcttttaaggccgaaatgggaaaaaattcttgagtgg

SEQ ID NO: 12010 - DNA, 849 bp, Homo sapiens
  misc_feature 477, 547, 650: n = A,T,C or G
aggtactgggctctttctttattgctttctctagcattctgcattctggaactttccctacctagctttggcgaacatttgagttttcatgcccaactatgtcccccaggcaactgatatgcagtttagctcttcactgcctttcagcattcaggagggtaggctgaagctgtaggtaggttcagtctttctgccccggagctcagaggaatggggcgagtaaggccaccagcattccctggctccctggctcctttggcctggtcctcatggggctgcagtggcagcaggccagacactgatttgtgtccccactgttgaaaacagaatgtgtgacattcttctgaatgctcacaatagtggtaaatcttgatctttcaagatgtttaaaaaaaaaacaccggaaaccaccttgatccaaatgtgaatacatatcaacaagctggataataccacttgaggattaagaatgaagtnttttttgcaccaagttttatatatcatctttgaagccagccatatcaaaggagaccttctaaatatgctntaaagccctggcagccatcatgggaaaaacctgtatgtcttcccagatgattatgttaaaggatagcttttattgggatattaaagtttgatgcatttattcncggagaaagtgattaaaaaaatgtccctgcccggcggcccgtcataaacaagtggacccccggcttggggattcaattcaagcttattatcccgcaacctggggggggcccggacacattttgtccctttagaaggtaaatgccccctgggaaatagggtaaaatttgtcttagtaaatggtaacctccaaatccaaca

SEQ ID NO: 12011 - DNA, 839 bp, Homo sapiens
aggtacgaaaaaatcaggctactaagcccactgttaatatagacgcagaccaattgttaggaacaggtccaaattggagcaccattaaccaacaatcagtgatgcagaatgaggctattgaacaagtaagggctatttgcctcagggcctggggaaaaattcaggacccaggaacagctttccctattaattcaattagacaaggctctaaagagccatatcctgactttgtggcaagattacaagatgctgctcaaaagtctattacagatgacaatgcccgaaaagttattgtagaattaatggcctatgaaaatgcaaatccagaatgtcagtcggccataaagccattaaaaggaaaagttccagcaggagttgatgtaattacagaatatgtgaaggcttgtgatgggattggaggagctatgcataaggcaatgctaatggctcaagcaatgagggggctcactttaggggggcaagttagaacatttgggaaaaaatgttgtaatgtggtcaaatcggtaatatgaaaggagtttccccagcattaataaacagaatttaataagtcagcctttagcatcagacgtttaaggccatttgcctggtccagttggggataaacgaacaattgggcaatgatggtaaataagttgataaagatggctatccttgttttacgcagataaatggtaactttttgcctttaagtgattggtatggtaatgtatgttatttttatgttcataagaactcctcgataaaaaatgttctccgtaatatttcccattttaatatctcgttttatgattgtgtccatttgttgttttattcct

SEQ ID NO: 12012 - DNA, 853 bp, Homo sapiens
aggtacaggtgacccaagaagagtgattccctgttgcttaaagtgtgccacttttgctgaaatacttaccttactaacaagaatatctgtagcttcaaaatgtcttccaaacattttgggtgactcaccagggataggttctatttttacacaaacttcttgtccttttttgcaacatccacttgtttatggtttatttcaatacttgttactattccgatgtcaacaaactataaaataagaacaaattaaaatgcatgcagaagaattcatgccaatcacaggcgccatggctggatagctgaagtaagaactagagcaaaagcctgttttaaaagtcatggcagtgcgatcctttcatcactcacggtgtaacattttggtaaactaggctggcaccaccaacaccctattcccttcatgatggttgtaagaatgacaggagataatgtgctttgcaaaacattccaagtgccctgttgacccaatgtcatttcctatttttgctctaccatttcacgtgacaggtgccgtaataggagggatcaacatgcacaaagggtctgaattcagaatgaacttgaagtggcttgagggaatgaagtcagagtggggaccaatcctgaaattttaaaatgatggcctgtgaccagatgaatgagtgatctcaaagtttgggccaaaaacctgactctttttggagaaaagattcgggaagtaaaatgaaacacggaaactccggtggttttagaggcaaacccccttgaaaggccccaattatggccggcttagccactgaaaggtgaaaagcatgacacttttagggcctttgcataaagaacaggatggccct

SEQ ID NO: 12013 - DNA, 837 bp, Homo sapiens
  misc_feature 634: n = A,T,C or G
ccgggcaggtatcattagtctgctcaggctcggcagcagagaggtttatgagtgtcccaggaggcaagtcaccatgccagaaaccccccagcatccctcacagacaaagatctgaaactgctctcaagtcagattctagtcttgcctaccccttggtagaagcagagaacagacctgggcagtcacaggcaggcttgtgaaggaagaattaaagtgggctgggagtgagggtcctggttttgcctctagcttgctgtgtgacctagggaaaatcacagaacctctctggacctccacttactcctcccaaatgagcatgctgcaataaatgattccaagggcccttcagctctgactgtgattcttggacacattgagagcccacgcctgcaaagcaggtggagagtgccttcctcaacaggtggcaagaggaggaatggagacagggacacttagacaacctctctgtgctattcctcaactttccggaaataaacaaaccttagctagtgaataagccagtcccttttgttagccagaaccaccaagcatgatatgaatatggatctgaagtaaatagaagggagaaagcgaatcctgaaatggattttcaataaatactttccttaagtanacctgaattttttccacatatgtatgctttccagaaccagttgggagcattcaaatacacaacctggcctaaatactggccaaaccattgaagcatttggctttatttatgctcaagggttcaagggaaggatatcctcctcttaaccttggtctaatgggtactttaaaaagcaccaaagagaaagaagggcacccctatac

SEQ ID NO: 12014 - DNA, 838 bp, Homo sapiens
  misc_feature 335, 655: n = A,T,C or G
aggtacaaagtccctgaggcaaaagcatgcttgctgtgttctaggaaaagcaaggaagacagcatgtctatagcagtgggaggtggaaggataataaacagtaggtgaggttagaggggaccaaatcatgtattttccatccagaggttcccaaccttggctgcacattagatttattctaaggagcttttaaaaaataccaatgactgggtcccagcctagagtgattaaatcagaatctctggaggtagacttgagaatctgatgtttgcaagtttcctaggcaagtcaaggctgaggaagactgctgcaggccattgtaagagccaggcgtngatctcattcaacctttccctcagctcttctagagacagccagcattctcttatggcacaaatacagcctttcaccctcacagaaagacacaggacaacaaattcaataaattaattcactggcatggatgattttcttagactaattggtttcagtttgataggaaacaattaaaggctggaaggcactggatgccttatgatgaatgtgactttcaaactggggcactactgaaccaatgggatggccgagaccccggagatcaatttgggcaaactcaattaccaagtggttcaacgaagacttggaattccatggnacctgaacctaagtttaccccattgtttcttatttgatgaatttgatgaatggtgacattttttaatatgagctctggttcccatttctaatggggtaaccgagtagtttaaaagggggatttggtgaaactacttcttgtgattcaaaggatatataacttttttttcgtgcccaaccatcc

SEQ ID NO: 12015 - DNA, 401 bp, Homo sapiens
aggtacaaggttgcatggaaaagacacactagcgtaagacatggactgtggccctgagtgacgtgcagccggtttaggcgaattaagatttacatacttgaaaagggacaaacaagtctggacgtggtgacttatacctgtaattccaacactgtgggaggtggaggcaggaggatcccttgaggccaggagtttgcaaccagcctgggcaacatgggaaaacccctgtctttacaaaaattaaaaaaaaattagccatgtgtggctgaatgcccattgtcccagctactcacaagggctgaggtgggagaattgcttgagcccaggagatccaggcttcaaagattgtgccactgtagactggttggtaaaaccagacccttttttaaaaaaaaaaaaaa

SEQ ID NO: 12016 - DNA, 401 bp, Homo sapiens
ccgggcaggtaccatccacgtcactgggcacctggccgaacatggccaggtagggctcgtagatgaccgaacggaatatccacctccagcgctgctcattctgcctaaggatcccttgcctggccacgccaaaggccaccatccacaccgcaaagaggaacaggaagaagaacacatcgatcagcatcctctgcagcattataatcttgggtcctaagtttctgcttacagaaaaaatgtggatcaatcttagagtgaaaataatgtagtccagacagaaaatgactcgtccagaatacaaagagcttttattagaagagtggagccgaaatacaattcctgctatgaagtaaaaaagccccaacgtgtccatcacattccacaggtcagtaaaaaaattc

SEQ ID NO: 12017 - DNA, 399 bp, Homo sapiens
ccgggcaggacgcggggctttcttgaaggaatcccttaagtgcacgtctcccgttttcttttcacatcaatgcagagtccctctgtgaatttacaacacccaacacccatgagttcagtccttaagaaggaaaattgagcaagtatttaattggttggacattgcataaaagaggtccatatccaggctaactctagaaattttattctcaaacttagttggcctctttttcttctgtcagaagaccattcttagtggcactggggaaatcttggcacccagaagaattcaactgcgctcactgcaaaaatacaatggcctacattggatttgtagaggagaaaggagccctgtattgtgagctgtgctatgagaaattctttgcccctgaatgtggtc

SEQ ID NO: 12018 - DNA, 403 bp, Homo sapiens
aggtactccctaatgaatggttatgcaggcaggagaacttctcaggaagagaaaaggagaagactaactctacagagatttttgaaagactccgtgggatctcagcaatttgttaacactgctagggcccttcactgcatagggaggcatatggactgccatgggtctccaggctcatgttccaagcaagaatagggtaagtaactgtgaattaccctacaagcagtaataagtttattataataatatttttatacatttttggatgcacccaacccactctaaagaatgtcagtgactttatacaaaagaggaagcatctagattggcattgtgaacataatgcataggggcgcggcgggagctctagagcctagtggttaaaaccgtggcctctggaata

SEQ ID NO: 12019 - DNA, 399 bp, Homo sapiens
aggtacaatcacagcagagttaatggtaggttggttccacttcatcagaggttctggaggaggaaactaagatcttccctgaaaggcaagacctggcatcaggggctactgtgggcactttcctttgaattgcatttatctgccaggaagatgatatcctttattgttttacatgaaagcatttgaaaattctaaaaactgaccatgcctgccttggtcagttcaggttgtaataacaaagtgccatagactggatggctgacacatttatttttcacagttctggaggggagaagtctgagatcatggtgccagcatgggcaggttttggtgaggaacctcctccaactgtctactgctggctctcctatcctcacaaggtaggaagaaaagccagct

SEQ ID NO: 12020 - DNA, 398 bp, Homo sapiens
ccgggttggtaccagttgtattattaccaggatttgccatgcctcaagatcgccctgttttctggcttcatcaatgactgcatgcagtgcaccaccctgtccactacgtgatgctgtaggattaagtctcacagtgggcggctgaggatacagcgccgcgtcctgtgttgctggtgaattagacgccatcgctgtgggttgctggtatggtgccgtgctatttggcacaggacacaccgcttgaggtctgtattgaacctctgaaggaggccgatactgaagctcggttggcagccggtattgataaactaccagcggttgggtcttattttctaccggctgatattgtggatactgtatctgagttggcattgccgggatagagactctgtcccttt

SEQ ID NO: 12021 - DNA, 400 bp, Homo sapiens
ccgggctggtacactagtatttaacctagacgtgtggtaggagtaggaaattttctggtgaatacagaagagcaaagaacagcaggtcagcaggaatgactaatgtttttctatgcatgtttaatggaatattcgtgtaggatattttgagtaggtaattggataatcagcatttgtaacttgcatcctagtagtctgactctcactaataagactcgtcaaagttccaagaatctgaaagtggatgataaatgtccatgtgtatcaccatccatgaccgaaagtcagcatccacagaacacagaattgggacagatgaacttaatagataaagatgaatatcggagttgttcctcttagggaatgatactctccatgacctgtgtgagtcacagctgcc

SEQ ID NO: 12022 - DNA, 416 bp, Homo sapiens
ccgggcaggtacaagtatactccgactctataaacttactcttctttaaagcagatcatcctatttatcataagattattaaaaatgtatacctttgcttttatttgccataaaaaaagctttctttggaataaaatagatttttatccaaagatgcagaactgttttcaagataaatccaatctgatcaatttgacagattaagactctcttcaatagtaattcctcaaattatttaaataatttatgaaacagtaaaggcttaaaatatgaattacatagccttaaaagttctagatccttcatggattttatttttggtttattattgcaggaaaatacatacaaatcttttgagaaaaataacaaaaccaagactttttttcccagtttgctataagcgagctcaataaatg

SEQ ID NO: 12023 - DNA, 410 bp, Homo sapiens
ccgggcaggtactgaggctgtatacagccacagcctctccccatccctccagccttatctgtcatcaccatcaacccctcccatgcacctaaacaaaatctaacttgtaattccttgaacatgtcaggcatacattattccttctgcctgagaagctcttccttgtctcttaaatctagaatgatgtaaagttttgaataagttgactatcttacttcatgcaaagaagggacacatatgagattcatcatcacatgagacagcaaatactaaaagtgtaatttgattataagagtttagataaatatatgaaatgcaagagccacagagggaatgtttatggggcacgtttgtaagcctgggatgtgaagcaaaggcagggaacctcatagtatcttatataatatacg

SEQ ID NO: 12024 - DNA, 414 bp, Homo sapiens
ccgggcaggtactccaagccaaagatgatggagagtgaattaagttagtgcaatgggaccaagtctagagctatttagaagtgagaagtgacacggaaaaaaaaaagattgattggatgtagaacaagttggataagaatccaggacaaccccaggtgtcaggctggggcagctaggtaggtgctattgccatataaagtgttaaaaaagaatagagaaggggctagttgtcgggggaaggagttcagttttagacatgttgaactgcaaggagatttgatactataattaaggaatgtgttttaataaatttaataaacaatgaacacacattattcgcatttcccaaacaatttggatggtggatcaaaaagaatgagagtgaaaataagggggtttgtgaccactcaatta

SEQ ID NO: 12025 - DNA, 421 bp, Homo sapiens
aggtacgcggggacatcaatgcagagtccctctgtgaatttacaacacccaacacccatgagttcagtccttaagaaggaaaattgagcaagtatttaattggttggacattgcataaaagaggtccatatccaggctaactctagaaattttattctcaaacttagttggcctctttttcttctgtcagaggaccattcttagtggcactggggaaatcttggcacccagaagaattcaactgcgctcactgcaaaaatacaatggcctacattggatttgtagaggagaaaggagccctgtattgtgagctgtgctatgagaaattctttgcccctgaatgtggtcgatgccaaaggaagatccttggagaagtcatcaatgcgttgaaacaaacttggcatgtttcctgttttgtgtg

SEQ ID NO: 12026 - DNA, 382 bp, Homo sapiens
ccgggcaggtacgcggggggttttccggaagccgccagttcttttagaactcatcaaattgaagctgttccaaccagctctgcaagtgatggatttaaggtaaatcttgtttttaaggagattgagaagaaacttgaagaggaaggggaaacaattttgtgaaagaaaatcgggtggtatttttgcctttaaggttgaaagatggcccctgggggtaaagaggccacctgggtggtggatgtgaagaatgacaaaggatcagtgcttcctaactcagattagaaggctgactgcacaatcacaatggctgactcagacttcctggctttaatgactggtaaaaagaatcctcaatcggccttctttcaaggcaaattgaaat

SEQ ID NO: 12027 - DNA, 374 bp, Homo sapiens
ccgggcaggtactttttttttttttttttttttttttttcacaaaaaagtgttaagttgcacgcaatgctttttctggggtattgtatgtaaggttttttttttttgatgtttacttcctatgttttttttttgttttctttaatcctcatttttttaataatgccacaaataggtttgggaaatggttttttgagtatttacaatttgcaaaagttttgtaaacttttaatttttttttggatttaaaatttttttctcaaatggtgtaagttatgaattttctttgtatgggtaaatcccataaactggaatatcattttttccaatcttctttgttttcttttttttctatatttttcccttttttactct

SEQ ID NO: 12028 - DNA, 377 bp, Homo sapiens
aggtacatggggaaaaaatcagtttcaatagtcaagttagctttgggaatagaactgggttaaactgtgtttaaaaggtctctttaatgcagtaatcctaagtctttaacatgctaatacgcactgtggctttcaaggaaaggatctagtggttttcaaactttttgttttcaaatttttgattcccggctttaacttccttttttttttccccaatgtcctgtaaaaaacactgagagaactgacatttttaactttatatggaaagaatcgtaaatatggtgaatttggatgtcctcatcaaccaacttcaaagactatcacccatgcaatcttgtttcatctgcatagccactcatttcccacacacaccattt

SEQ ID NO: 12029 - DNA, 388 bp, Homo sapiens
aggtacttcagttgaaaagttgaccaaagccaaaaaatgtctatctggtggtcagtagtttgataggttcaaggagttgaaagaagcctaggatggctgggacatgtagatcatagtgctaagagatggaaagcacccttggctattttggccgttttaattgggaaggttttttaagtagagtgttgtgatcagaagggccctttagaaagattgtggctagaatatggagaacaaagaggagaccaccagagtggatgtgggaggccaatatgtaggttattctagtagctttgcagtgacttacacaaaggcagttttagcggacttgttcatgagtttacctaagaggataaaaattgacagggacttgaagaatgaagttaga

SEQ ID NO: 12030 - DNA, 437 bp, Homo sapiens
tgcagggtgaactccccttcctcctcaatcagccacttgttttgaacaaacttctgcagcacctgctccgcttccttcttcctcatcttcttgcctttaagttgatcaacccggttcaatatgtttggggaagaccccaaaccgggtttttgggtcaaaaaattaatttcccgggagcttttttaaacaaaatccagtttcatttttttgaaaaatatccgttggccatttttggaaaattgaaatttttgtggccaggaatttcacccaaccgctataaaatggggtttccaattaattttcccgggaactcctttttttatacctcaatttatcccggggcatctccaaagaacactgtaaaaggatgtgttggaataaaaattctcttccaaattttattttcacggggggggcattgtgcccgggggaaaata

SEQ ID NO: 12031 - DNA, 431 bp, Homo sapiens
ccgggcaggtacatctgggaatagcgaatgcatatcaaaaggcttcatttcttttgttctttcatgaggcttgtagcacatcaaattttgaatgtcttcttttaaagctatgtgcgcacacacgcacgcacacacatatgcgggcacacacacacatcctccctctgaactgatggtgtttagtatcgataacattttctttcttggtaatacgaggtaaatgaggggggcaaaaacttatgacttctgagtaaaatgccatgtctttatatcccggaactgcacaattttgcaggaaagctccattttaaaataaattttaaatggggttaaaaactcccaaaaaccccccttgaatgggggaataaaggtggcccctatattttcccaatttgttcaaaccccaaattggcccaacattttttaaaaaa

SEQ ID NO: 12032 - DNA, 446 bp, Homo sapiens
aggtacaattgaagtatgtgcagtttattgcatgtaaataaaccttttaaaaattaaccgatacaagttgacttacatgaccagaaagctcttgaaaaactttcctgttttctccccttattttaatcttgcatgccctttatagactgtgtttaaaacaattttttaaaatttaatgggttttttggggttatacatttttttcacagttaatttttaaatctattaaccatggattttcttggttttcttttttaagttaattcattaaattattgaagtaaatgtggttgaaatggttaatgaatttgtttaatggcttttaaaaaatcccttttggtttttccaaattttaccattattttaggtgaaattttaatggcttggtccaaacggatttcacccaaccagattatatttggggctttaattatttttttcccttt

SEQ ID NO: 12033 - DNA, 372 bp, Homo sapiens
aggtacatggaaggcactcaatacatgtctattaagtgtgaaagtaatgtcatcttcctctgtatttctaggatgctaagattatatatgtcacaaatgctttcacattttttaatactgtaaatattagagtaaatgtgtctttaacccccaggtgaaaagaatgccttgaaaaagaaaatcaaaatttacacaacttgaaatgctaagcacacaaaggagaaactcaagtttcatttcctctaagcacagcttttgtgctctgattcccgtgtgctacaaaacccacccaaggaaaaacagcccactaaaaggagcttctctctccaactatacgaaaagtgcaggtggctgacaaaggtaattcaaaac

SEQ ID NO: 12034 - DNA, 496 bp, Homo sapiens
  misc_feature 204, 205, 214, 215, 340: n = A,T,C or G
ccgggcaggtacgcggggaggctcctggggtggagtccaaatcactcattgtttgtgaaagctgagctcacagcaaaacaagccaccatgaagctgtcggtgtgtctcctgctggtcacgctggccctctgctgcctaccaggccaattgccggagttctggcccagcttctttgttttcttgagtctgtttagaaccttcttnncttcatttnnagtgaacctctctgtttcaaagtttaagttcttggccaaaaatttgatggccccttccggaaagactgtttgcagcccaagatttaggagttgaaagagattgccacggatcagaatggtccccntcagaaaaacggaagccctcatttgccggaaagtcccttggttgaaaaaatattttgtaagaaaatgttagtggttgtggaccatggtaaaaaaactttttcaatccttgggttttacacttggtcttttccaatggaccacccttgattctttag

SEQ ID NO: 12035 - DNA, 540 bp, Homo sapiens
ccgggcaggtacatgggactacaggcacgccccaccatgcccagctcatttttgtatttttagtagagacagggtttcaccatgttggccaggatgatcttgatctcttgacctcatgatccgcccgtcttggccttccaaagtggctgggaaacaccaaggcttaaaacccaacaaaacctgggcccccttaatttaaattcctcttttaaaagaagaagaagaaaaccctaatgaagaagggccaaaaaatttaattttaattttaaaattctttttaccctttaagccaacaaaggggggtaatatatccaattgggaaaatttttggcccccttaaataatttaagggttggaaatggaaaaggcccatttacccaccaaaatttggaaaatttagaaaaaaccaaaattcccacaattttttttaaagtttaaaaaaaaggggcccaaaaaaaaaatttttttggaaggaaccttttaaattaaaaggcccttaataaattggggttaaaggccttttaaatttttttttttggg

SEQ ID NO: 12036 - DNA, 416 bp, Homo sapiens
  misc_feature 313: n = A,T,C or G
aggtactatatggacaccaacatggagcagaaaatgagggcagcagtgtccaatctcattccaggtgagaagttgcacagtgtccaataggtgcatacatctccttagtaagtagttgtgattaacaatgaaatagaaaagaaaaaaaaaatttttttaaaataaaggggattaaatttttaaaggcgtttaataagttggtagggaacataatatttaaattcgttggggacctaattatttataaattgaatgggttagaatattttctttttgggcctaagcccacccatgaaaaaaaaataactttganggcgccttaagggaaaacattgaaacttaaataagccccctttcttgaagtcttttggtttttcttcaaacctgtaaagaatggaaagaaaaacctggtttcc

SEQ ID NO: 12037 - DNA, 408 bp, Homo sapiens
  misc_feature 408: n = A,T,C or G
aggtacgcgggatggatcctatgaataattactgaataattattgtaattgcttttattggcagtgctgaaaactcatccctttgtgacctcaagtaacccatgacactttgtgaacctgcagttttttcatttagaaacttgacagattttcattctgacacagaatgtcaggtctcccagaccctagaaaatacattgacttaaagcctttgatacatctcaaagcagtatccttacagtgtcactggaagatggtgcgggctgcagagagggatgctttcaaatgggattaaccagtcctccttccttcacttccacatgaatgctgggcagcccagggtcaacccactgcaccctcaactcaggcaagtccagcagccaatcttaggagacctgggctacagan

SEQ ID NO: 12038 - DNA, 378 bp, Homo sapiens
ccgggcaggtacaaaaatttgaaagtgtgacaatgacaattatgaaatcctgtgactgaaagtcccctcgagtgcactctgtggtgcacatgcgcccgcccacacaaactctggcatggaaacataaactaatgcaaaccaatggcttaccaaaaaccaccaacacgtgtgttctccattccaccaatcacagaccagtattctactccaaacattccagtaacgaaaactatggccatcttcccaggaacagcaaggcaggcttcttactcacgatgaaccagcacgaataaacccagcaaaaagagaactgcatacttaaatttaggatagtcattcatgaggaatcgtcacaatttccaatataaggaaacaaat

SEQ ID NO: 12039 - DNA, 373 bp, Homo sapiens
aggtaccgaggtcattttgcttcctatagactgccaccttttggcaaaagctgttctaactccatctcagcatttacaattccatacctggtggtcagaggaggcccgcctgcaggctcagctaaatcgggctggatgggcatttccatttccttagggctcacctcacaggctccataattactctgatactactgctcatttaagctttgatgctctcaccacggaacaagtaacaaaggtgtgtatgagagcttgggataaattacgcaccccaggccaagcttctgtttcttttactattgttaaacagggtcacaatgaattatatcttgattttttagctaaattacaagatgctgttgaaaaatct

SEQ ID NO: 12040 - DNA, 318 bp, Homo sapiens
aggtacgggacttgtctccaggagacatgtctgggaagaagagctagactggagaatcatgagcatgttcaggtgaaaacatgtgagtggataagagcaagagggtgagaacacagaccaaggggctaaggacagactggtcagatttgggtatggactgtttgctcttgctatttaaccgctcaattacttcttgatgggatatacgcctacctttgatacaaataaattatttaccctaccagtaatcataatgttgctgtatacttgctgggcgttagttgaaaccttgtaacgctattaaggaacaaaaaatgt

SEQ ID NO: 12041 - DNA, 399 bp, Homo sapiens
  misc_feature 265: n = A,T,C or G
ccgggcaggtacaagatgctgctggacatcaagacacgtctggagcaggagatcgccacctaccgcagcctgctcgagggccaggacgccaagatgattggtttcccttcctcagcaggaagcgtcagcccccgtagcacctttggtacccacgactttttgtgcctttgttaccaccacctctaatgcctctggtcgccgcacttctgatgtccgtaggccttaaatctgcctggcgtcccctccctctgtcttcagcacccanaggagggagagagccgggcagtttcccttgcaggagagagggagggggctgcttgggacccaagggctttcagtccccttttggctcttcagggacccccctggtcctgaacttttctcctggaagggtggggc

SEQ ID NO: 12042 - DNA, 407 bp, Homo sapiens
aggtacttttttttttttttttttttttttttttgaaaattctttattgccaggagtgaaccctaaagtggctcacaagagtgccctatttctttcaattaactacaaggacaaacacatctcaaagttgagataagtgaccagtatgatttgccaaaattctaaagcgcactcaccatgaaatggataaaggttacctttggggatttgcactgcatgaattctgtgaaaagcttgttggatattgtgatagagatagagaaatgaagtatattatataagatactatgaggttccctgcctttgcttcacatcccaggcttacaaacgtgccccataaacattccctctgtggctcttgcatttcatatatttatctaaactcttataatcaaattacactttta

SEQ ID NO: 12043 - DNA, 399 bp, Homo sapiens
ccgggcaggtacagcaaatgtgccacttgaatatctagtatgaagctggtaatgaagaaattgccatttctgaagcagatatgaaatatgatctgcttaattgttaaggcaactgacctttcaaaagtgcagagtcttattaaaagaaggggaagggggtgaaagccagaaataattagccattatgtctaaaacctgcccccaagttaaacttccttcttgtttaaatttataaaagcccagttatttttttttttagatagtatttttttgtcaacttggataatcacaggaaatatataagaaaagagcttggacttacttgagaagttggacatggaaagcaagaccaagttccagtgggtttaattttccctttggttattttcggacaacaag

SEQ ID NO: 12044 - DNA, 405 bp, Homo sapiens
ccgggcaggtacatccgctgaggcagagctttggagtagggagcagggcgcggcacagtggtgcgcaaaatgaattcccggccagcagggggtgggaagtctgacacggagttctgccttctttcctctggggagcccattctcttcaattcctcctctggtggagtcatagctgcagcctggaaaagaatcaaatgctaaagtcaaaagcaggtcaaatgctaaactcagatgcttttgaaggacagatgaattaacataataaagatatgaaaatgtcccacgttactcagtaatgcagtcagctatatgttaagattactcaaaaaccacataacacagcaaatgcaagaagcttgagacactgcatgagcagccgggctggagacagacaggagggatgaa

SEQ ID NO: 12045 - DNA, 530 bp, Homo sapiens
ccgggcaggtacattatatgacaatgcacattagccagcaagtcttttataggtggtttcagcagcaacgataaataatgcagaattcagctccagcactttatttcaaaagaaatttcctgcctaccttcaagaagcatggttaaggaaggtagcttggggtttgtattgggagaaatattccagtatggataattttgtgttcaccccatttggccatttcctttttaatcccccagtttaaaattatttaatcctggcattattaatttataaaaattcttggcttaggaacccattaaaaaatttaaaaccaagccttttttccagtggaaacaagtaattggcctcctttggaaaaaaagggtatacatttaagaggggaaaggggttttttaaaaaaaccaataaatttatttttgggtaaaggccccccttataaaaaaaccccccttacccctttctttattttcaaacccaaaataaccaattgggctcacccaatccaaaattggggggtaaaaggtttt

SEQ ID NO: 12046 - DNA, 376 bp, Homo sapiens
aggtaccagttgtaaaattaccaggaaccgccatgcctcaagatcgccctgttttctggcttcatcaatgactgcatgcagtgcaccaccctgtccactacgtgatgctgtaggattaagtctcacagtgggcggctgaggattccacggcctcgtcctgtgttgctggtgaattagacgccatcgctgtgggttgctggtatggtgccccgctatttggcacaggacacaccgcttgaggtctgtattgaacctctgaaggaggccgatactgaagctcggttggcagccggtattgataaactaccagcggttgggtcttattttctaccggctgatattgcggatactgtatctgatttggcattgccgggaa

SEQ ID NO: 12047 - DNA, 471 bp, Homo sapiens
gtggctggaagacatggccactccagtcggtgttgagcacggcgagcagtctcaggcctttagtgatgatgattaaaggtggtggctgtggccttgaaaacagtcatgtgaaaactcatcaccttaaggtgttaagtgtaaagaatcttttattgatgaaaattttctggaaaatgggtgccaggtcaggccctcagtttttccaaaaagccggaaaaaagggaatccctcttaggtagcccaccggttggtgggccaagctggcctcctgtaaacccagggacccttgggaaccccgggaacccccaaagatgacccattgttcctttttaaatggtttaggccttcccccagccggaatggcccagaatggggggaattcaagccaccaagccccctgcccttcttggcctggctaaatttggtttcccttcttaaaaggtaaattcggcccaatggccgtttcctttg

SEQ ID NO: 12048 - DNA, 394 bp, Homo sapiens
aggtacagactccctggttgctgaacatcctgtatcttggatcatccacaatagcaactttgtttttcatccaggttattttaggcttaggatttcctctcacactgcagtttagggtggcattgtaaccagctatggcataggtgttaaccaaaaggctgaattaaacatgggtgccttctgagaaaatcaaagttcttcatacacctggaatttttgtagaatttttaccattccctggccgatcactgccactctctttagtcatggtggcaatcctcactgaggccacacatgttttcagaaaagacccggaagtaatattcattccctatgaccaattcagtaatggtggcactgggttcgagataatgctcaatgacagtaaaccatt

SEQ ID NO: 12049 - DNA, 244 bp, Homo sapiens
aggtacttttttttttttttttttttttttttttacactttgatatttattaacaaaaatggtccaaaaaaggattgagtcaaaattacaaatgattaaataaaacaaaattgtttatgattttggactaatccaaatttatttaaagataaaactataaataaaatctcttttttaaaaaattaaatttttataaatttttaaattctcttaatatatataaaaaataaaataaaaaaacacc

SEQ ID NO: 12050 - DNA, 446 bp, Homo sapiens
aggtacagatctgggaactaaatattaaaaatgagtgtggctggatatatggagaatgttgggcccagaaggaaccgtagagatcagatattacaacagctttgttttgagggttagaaatatgaaatgaatttggtttatgaaacccccaagttttaagggcagccaggggccccggaaatccttgacccctcttgccccccgtggttttatctcccttccccagctttgggctggccttcatgtcaatcacaggtatttccatttttgttttgtttgcatggtcttggtggaaggcccatcaaagaatttttctcgccctgttttttccttcttaattgggtaatggcttcacttttgtggacctttcatttcaaaaatctggtaattcccgtttcaaaataaatttttcccacaacaagggatcctgttttttaccttgcccg

SEQ ID NO: 12051 - DNA, 405 bp, Homo sapiens
ccgggcaggtacgcgggggcatctgccatgtgccaggctttgtgacacacacacacacacacagcacctgcacgcagatgcacacatttctagtcaaatgaggctctcagctttttgataggggctttttgatacgtgtataaccaatactttattctcactgtagtcaaggactcattgcaattcagaaatgagaagctgatccggaactccactacagctcaaagaaattctcgaatgttctcacctattaacagttattaaaatggaagaagctggggatgaaattgtgagcaatgccatctcctacgctctatacaaagccttcagcaccagtgagcaagacaaggataactggaatgggcagctgaagcttctgctggagtggaaccagctggacttaga

SEQ ID NO: 12052 - DNA, 378 bp, Homo sapiens
ccgggcaggtactcttggcttgtccatattgtcggatgatctccagtggtggaggatgagtgtgctgattggattaattccgagttggaatataatgaatggttagtgtccttttactccgatgtgttttgagggtgttggccctgacagccattttggcaaataatctggttatccaaaaagatttttggttttttgatttaatgctttaaacttttcttatttttttttttacttataatattaaacatgtaaaagcgattttaatgacttttcattgaagatatacccttctgcctccatctccccaaatgggcatgcgagaaacattactactgaacagtctggaagtaagtttgcaccaccaaaggtcaatgt

SEQ ID NO: 12053 - DNA, 410 bp, Homo sapiens
aggtacgaaaaaatcaggctactaagcccactgttaatatagacgcagaccaattgttaggaacaggtccaaattggagcaccattaaccaacaatcagtgatgcagaatgaggctattgaacaagtaagggctatttgcctcagggcctggggaaaaattcaggacccaggaacagctttccctattaattcaattagacaaggctctaaagagccatatcctgactttgtggcaagattacaagatgctgctcaaaagtctattacagatgacaatgcccgaaaagttattgtagaattaatggcctatgaaaatgcaaatccagaatgtcagtcggccataaagccattaaaaggaagagttccagcaggagttgatgtaattacagaatatgtgaaggcttgtgat

SEQ ID NO: 12054 - DNA, 387 bp, Homo sapiens
aggtaccactatgcctggctaatatttttatttttttatttttgtagagacagggtcttgttatgttgcccaggctgttctcaaactcctatcctcaagccatcctcccatctcagccactcaacttgctggaattaccagcggaagccactgtgcccagcccagactcccttttacctatatatcatgtctaatttctaacaaaaataaaaaaacattgtagagaaaaaaaaaccctaaaacaaacaacaacaaaaacccaaacacaaaagtttaagaacagagctagctgacagactatattagatatgaggtatatagaatatcaattggtaattttaaacaactatgactatatggtagagtgatatggaaaaaatagacatt

SEQ ID NO: 12055 - DNA, 557 bp, Homo sapiens
ccgggcaggtacctgcaggatccaattgtgtccattgatctctcagagtggctgaggataatagagtttcttcttcaaggtctcaaggtgtatggctctgtgtatcacatcaatcacgggaaccccttcaacatggaagtgctggtggaatcctggcctgaatattcagatggtttattattcccggccttcaataaggcatggaacaatgacctgattggaccatgggtattttcaataagcaaccaaaaacgtttaattattcgattaatggtttttcgttcacaaaaaagtaagccttcttcaaaaaaaaaattccaaaggaaaaaataaaagctttttttttggaaaagaaaaaatttgggttggaaggcaaattccggtgaaaaaacccttgtggaaaaaaacccaagaagggaaaccttccccaaaaaattccccaaaaggagtttccttttccaaaaggtaaaaaaggtttttttaaaggattgggagtggggtgtattaaaaggaaagttggggccttaaaccatttttttttccaaaaggtttcaatg

SEQ ID NO: 12056 - DNA, 393 bp, Homo sapiens
aggtacatgggactacaggcacgccccaccatgcccagctcatttttgtatttttagtagagacagggtttcaccatgttggccaggatgatcttgatctcttgacctcatgatccgcccgtcttggcctcccaaagtgctgggatcacaggcgtgagccaccacacctggccctctatttattctctttaaagagagagaaaactatgagaggccaaaattatttaattaaatctttaccttagcacaagggaaaaaaatggaatttgcctaatataggtgatgaagcatacacaatgaatagaaacaatcacattttagtaaaaaggcaaaaaaatttgagactttataaagcttatatgggaaggctttattttttggggtgggggaaag

SEQ ID NO: 12057 - DNA, 378 bp, Homo sapiens
aggtacgtccacggtcagccttgcggtaagcttgtgtgcttagaggaacccagggtaacgatggggcaaactgaaagtaaatatgcctcttatctcagctttattaaaattcttttaagaagagggggaggttgagccttttacagaaaaatctaattacgctatttcaaacaatagaacaattctgcccatggtttccagaacagggaactttagatctaaaagattgggaaaaaattggcaaagaattaaaacaagcaaatagggaaggtaaaatcatcccacttacagtatgaaatgattgggccattattaaagcaactttagaaccatttcaaacaggagaagatattgtttcagtttctgatgcccctaaaa

SEQ ID NO: 12058 - DNA, 377 bp, Homo sapiens
ccgggcaggtacttttttttttttttttttttttttttttcttttttaaaaaaaagacatttattcagcgtcacgatcaaactgttacatttagcaatcaacagcatggggtgcaaaaaaaaaaatctacattaaaaccctttttttgaaaagcttttacactttccacagaacagaaactaaaataacctgttatacaattagtcacaaatacagtcctcgagttttttgcccatacacatgagtatttgtctaaaacatgtcttctttgtagcagctaggccctgccaccactgtgcttggctgagttcacaaatctgttgtaacctgtagcttccctgtcacttttttggctttcctctcctgctaagctttgt

SEQ ID NO: 12059 - DNA, 613 bp, Homo sapiens
  misc_feature 77, 78, 96, 128, 131, 133, 138, 146, 147, 156, 269, 272,296, 308, 320, 326, 334, 370: n = A,T,C or G
ccgggcaggtaccaggaacagctggtccaggagcaggagctagcaaaacatgcagatgtggctccgggacgagctgnngaggtgtcctgagggtanggcaccccgcttctttagaaaccttagttggnatncnccccntcgggccnnttgcaaggnaaattttccgaattattccaaaggcctttaatttccgaaatacccccgttcccgaacccctttcggaaggggggtgagagagacttcccggggttatcctctctaggacttanttntggattttcacacatatattaagnattgtaaggggnggttttaaattntggccngtccgccnttttgtgaccggttaaaattccaataggggttaccnttagaggccttgtttttttcacattggttgttggaaaaaatattggtctaattcccgccttctaacaaaatatcccaaccaccaaactcattaacggaagccccggggaaggcaattaaaaggttggttaaaaagcccctgggggggtggcccctaaattgaaggtggaaggccttaaacttccaaccattttaaatttgccggtttgccgcccttcaacttggcgccccgcctttttcccca

SEQ ID NO: 12060 - DNA, 378 bp, Homo sapiens
ccgggcaggtactctggcttcttctgaaatcagattccagctcctagtcaccataaagtatgcctgacccttactttatcattggaaactaggtattccagagcaagaaattcatgtattcattatttattatgcactgtatctgattcctaaattactccttttttgcaaaaaaaggaaaaaaaattatttttccatcacatgtgcactctcataaaactgaggttatatttttaaacactgtatgtattcaagaaaaatatatcatttataaacctcatgttttatatatttcatgaaatcagtgtcctgtgcttgaactctgacaagtagggaaatactgctcgtataaaagctatggaatttaatttaaaacag

SEQ ID NO: 12061 - DNA, 864 bp, Homo sapiens
  misc_feature 96, 110, 111, 112, 123, 124, 133, 134, 283, 305, 323, 325,328, 331, 334, 335, 344, 356, 357, 366, 379, 383, 389, 390,393, 394, 396, 399, 400, 402, 405, 406, 408, 414, 417, 418,424, 425, 430, 434, 436, 437, 440, 441, 442, 450, 454: n = A,T,C or G
  misc_feature 456, 457, 460, 463, 464, 466, 469, 470, 473, 480, 483, 489,490, 494, 497, 500, 503, 511, 514, 517, 518, 521, 524, 526,531, 532, 536, 540, 546, 547, 548, 553, 554, 561, 562, 565,566, 571, 575, 583, 586, 589, 590, 593, 599, 604, 605: n = A,T,C or G
  misc_feature 628, 629, 636, 642, 645, 646, 685, 688, 692, 698, 709, 715,719, 737, 740, 741, 748, 751, 752, 755, 770, 779, 817, 818,844, 852: n = A,T,C or G
aggtacaacattatgcttactgcatcccatggaaacttaattccctcctagcacatatttgcatactgaaaggtccgaaaagggcatccacggcangcttgagccccctnnntagcaccatgnntaagggagnncaacagccattcccaaaaacccggctttttctttttgaaagaaaacccccaattttgggggggggaaaaaattggttcccttttttttccctttttcccttttccaaaccaaatttcccccaaaaatttttgggtttttttttaaaggnttggttttcccttaaatttttnttaaattcttccccttcntnggnggnggnntttgggggncccaccaaaggnnttttttttnttggggaaaaaantaancctccnnttnnanaannanaannangggggnggnnaaaccnnaaaantttnannaannnaaggtccnaaanannaanaannanggnnttnaaatttnccnaaaggnntttnaanaanggngggggaanttnaannggnggngnttggnngggncctntttggnnnaaggnnaaaaccnnccnnccaanaacntttggaanccnccnnccntttggnaaagnnacccttaaaaaccctttaaaagnntttgggnttaggnggnnccctttggaatttgaaaccaccctttgggatttgagggnggnattncctttnccttttaaggnaaaaancccnccaaaatttcccttgggnccnnaattttnggnnggnaaaccggggttgggnaaaaggggncctcccaacctcaaggtttcaaaggtgggtttgggggnncctttggggggaaacctttggatccnttggaggncccacctttggg

SEQ ID NO: 12062 - DNA, 404 bp, Homo sapiens
ccgggcaggtaccttatggatgacttcacaagagatccactgtatatcctggacaacaaccacacacatttgctgctcgtggacaatggctgtcatggacatcccactgtcgaagcaaagctccggaatcagctagaaaaagattatctctgagcgcccctattcaagatttccaactatggtggccaaggatccccattggtgtgtttttggcccacgggagggtggaaaaagcagaacttttgaaaaagccattcaaataaccttccattcaaaaaataaaacattccttgtggtggtgggtggaagggctcgggcccagatcgctgatgtgatcgctagcctggtggaggtggaggatgccctgacatcttctgccgccaggagaagctggtgcgctttta

SEQ ID NO: 12063 - DNA, 624 bp, Homo sapiens
  misc_feature 111, 117, 118, 129, 136, 141, 144, 148, 154, 156, 157, 162,164, 284, 285, 293, 302, 308, 316, 318, 319, 329, 331, 335,338, 346, 351, 355, 357, 364, 366, 370, 374, 376, 378, 381,383, 389, 404, 423, 425, 429, 431, 433, 435, 437, 439: n = A,T,C or G
  misc_feature 448, 450, 452, 457, 476, 481, 498, 509, 526, 528, 530, 534,539, 572, 584, 601, 603, 604, 608: n = A,T,C or G
ccgggcaggtactttttttttttttttttttttttttttttatagttagaaacattttatttaaatgtggccaaaataaaaaccccactatttttcagaacacatttatgnagtgtnntaataccactntgcacanacaanaanttgntaatantnntaatncntttacccttgcgcttggggggaaaatttttttaacccaattaagggtaaaaattccccaaagaaattccccaattttttttggaattataagagagtggggttttggaaaaaatttattnnctttttcncttgagggngtatancaatcttntnntcacaaggancnattncancgagagantcggncgtntnatttaantnagantggntnanaancnacaganattataccctttttntctccctcttagagagggngngtgnanancntntnggagagagncntnttcangtcacacattattcttttntacangaggaacatgtgcgcancttttctctgngcgagaggggaactttncncntcgnagtgnggagagaaccagaatctttttctttttttttgnggagaaatgggnagaaattcgtgggcacntnnttgnattgcggcgctggctt

SEQ ID NO: 12064 - DNA, 388 bp, Homo sapiens
  misc_feature 13: n = A,T,C or G
aggtacgcggggngcgtgcgtgtgttgatgcgcgccgcttagtgttggtggacaaggcagagtgggaggcagctgagttagagtcccaactcttggactccatttgctattctcttctttctcccccacacctatctggtggtggtagtgggcgtttatatttgcgttccttttcattcatttctaaatctcttaaaaattttgggttgggggtattggggaaggcaggaaagggaaaaggagagtagtagctgaagagcaagaggaggacatggagatgaagaagaagattaacctggagttaaggaacagatccccggaggaggtgacagagttagtccttgataattgcctgtgtggtaatggggaaattgaaggcctgaatgag

SEQ ID NO: 12065 - DNA, 370 bp, Homo sapiens
aggtacagacgggatttcactatgttggccaggctgttctcaaactcctggccttgtgatctaccctcctcaatctcccaaagtgctgagattacaagcgtgatccactgcacccggccagttgttttttttggtttttttgtttttttaggttttttttacgaaaatgtttgggaacagaaatgttgtggatttgagattttgttggattttggaatatttgtattatacctactgtttgaacatcccaagtttgaaaatctgaaaccttaagtgttaacatgagcaccttaataaagtttggacagtatttcttttataaacaatattattgatattgctaactattaacattagaaatgaaagtcgc

SEQ ID NO: 12066 - DNA, 373 bp, Homo sapiens
aggtactttttttttttttttttttttttttgtttaagatgacaatatccataatgctaaaagtttactatatccatcactattcaccctcagaatgccaatattctagaattcctttgctctggctcaaggaaatattaatgcacgcagggatttgtataggattgacagagccaactcagcatgacaaatgggggaaattccatgcgcaacgtttatgggaaacatcaggttagtatgctgctaagaccagctgctccgtgtgctgcggctcccccgtgcagtcccccatgaatcatgcagacacacagttgccctaagcctgtggcatctactgtgtgacttgcttaagcaaagacaagacttttctttt

SEQ ID NO: 12067 - DNA, 367 bp, Homo sapiens
aggtacgcgggggtgacacacacacacacacacagcacctgcacgcagatgcacacatctctagtcaaatgaggctctcagctttttgataggggctttttgatacgtgtataaccaatactttattctcactgtagtcaaggactcattgcaattcagaaatgagaagctgatccggaactccactacagctcaaagaaattctcgaatgttctcacctattaacagttattaaaatggaagaagctggggatgaaattgtgagcaatgccatctcctacgctctatacaaagccttcagcaccagtgagcaagacaaggataactggaatgggcagctgaagcttctgctggagtggaaccagct

SEQ ID NO: 12068 - DNA, 365 bp, Homo sapiens
aggtacctatggaactatataatggaattactcctgtgccacttagtgggttgatacatattattggccatccatatggagaaaaaaagcagattgatgcttgtgctgtgatccctcagggtcagcgagcaaagaaatgtcaggaacgtgttcagtctaaaaaagcagaaagtccagagtatgtccatatgtatactcaaagaagtttccagaaaatagttcacaaccctgatgtgattacctatgacactgaatttttctttggggcttccggctcccctgtgtttgattcaaaaggttcattggtggccatgcatgctgctggctttgcttatacttaccaaaatgagactcgtagtatcatt

SEQ ID NO: 12069 - DNA, 365 bp, Homo sapiens
ccgggcaggtacgcggggagaaaaagggtggggagtgccctttcttgaaggaatccctgaagtgcacgtctcccgttttcttttcacatcaatgcagagtccctctgtgaatttacaacacccaacacccatgagttcagtccttaagaaggaaaattgagcaagtatttaattggttggacattgcataaaagaggtccatatccaggctaactctagaaattttattctcaaacttagttggcctctttttcttctgtcagaggaccattcttagtggcactggggaaatcttggcacccagaagaattcaactgcgctcactgcaaaaatacaatggcctacattggatttgtagaggagaa

SEQ ID NO: 12070 - DNA, 371 bp, Homo sapiens
aggtacacgactggtccaggttcctggaggtcacactctggggctgccagccaaagggtgcccttaagttggagtgtgggtgacttcctgaacagagctggcactggggagggggtgctcggggtcctttctcttctaacaggccccagttttgtctcaatgacagtgtttctacacctgtgggttatgacaaagacaactgccaaagaatcttcaagaaggaggactgcaagtatatcgtggtggagaagaaggacccaaaaaaagacctgttctgtcagtgaatggataatctaatgtgcttctagtaggcacagggctcccaggccaggcctgattctcctctggcctctaatagtcaatgattgtgt

SEQ ID NO: 12071 - DNA, 349 bp, Homo sapiens
ccgggcaggtacatggggaaaaaatcagtttcaatagtcaagttagctttgggaatagaactgggttaaactgtgtttaaaaggtctctttaatgcagtaatcctaagtctttaacatgctaatacgcactgtggctttcaaggaaaggatctagtgttttccaaactctgttttcaaaattttgattacagcattcacctccctctttttttccccaatgtcctgtagaaaacactgagagaactgacatttttaactttatatggaaagaatcgtaaatatggtgaatctggatgtcctcatcaaccaacttcaaagactatcacccatgcaatcttgtttcatctg

SEQ ID NO: 12072 - DNA, 356 bp, Homo sapiens
aggtacagatcaaaatggagtttcttatgtcttccttttctacatagacacagtgaaagtctgatctctcttttccttacatatcccccccttttctttttgacaaaaccaccatcgtcactatggcccattcttgctggttgctgtctctttggagctgctggatacacctgtagactggcgagtcgattggggtgtctccatctccacacttttctttgcatctccagtgagttcattgtagaactttaaatgtctagtgggtatccaaacaggaagctgattttctcctggtgaaacacaagcaaaacctctcccccacgttatcaccttccccatttcccatgttttatttt

SEQ ID NO: 12073 - DNA, 356 bp, Homo sapiens
aggtacgcggggcttttcttgaaggaatcccttaagtgcacgtctcccgttttcttttcacatcaatgcagagtccctctgtgaatttacaacacccaacacccatgagttcagtccttaagaaggaaaattgagcaagtatttaattggttggacattgcataaaagaggtccatatccaggctaactctagaaattttattctcaaacttagttggcctcttttttttctgtcagaggaccattcttagtggcactggggaaatcttggcacccagaagaattcaactgcgctcactgcaaaaatacaatggcctacattggatttgtagaggagaaaggagccctgtattgtg

SEQ ID NO: 12074 - DNA, 353 bp, Homo sapiens
ccgggcaggtacgcggggacatcaatgcagagtccctctgtgaatttacaacacccaacacccatgagttcagtccttaagaaggaaaattgagcaagtatttaattggttggacattgcataaaagaggtccatatccaggctaactctagaaattttattctcaaacttagttggcctcttttttttctgtcagaggaccattcttagtggcactggggaaatcttggcacccagaagaattcaactgcgctcactgcaaaaatacaatggcctacattggatttgtagaggagaaaggagccctgtattgtgagctgtgctatgagaaattctttgcccctgaatgtggt

SEQ ID NO: 12075 - DNA, 349 bp, Homo sapiens
ccgggcaggtaccagttgtaaaattaccaggaaccgccatgcctcaagatcgccctgttttctggcttcatcaatgactgcatgcagtgcaccaccctgtccactacgtgatgctgtaggattaagtctcacagtgggcggctgaggatacagcgccgcgtcctgtgttgctggtgaattagacgccatcgctgtgggttgctggtatggtgccgtgctatttggcacaggacacaccgcttgaggtctgtattgaacctctgaaggaggccgatactgaagctcggttggcagccggtattgataaactaccagcggttgggtcttattttctaccggctgatattgt

SEQ ID NO: 12076 - DNA, 342 bp, Homo sapiens
gagtgaggcgtcggctgtgtttctcaccgcggtcttttcctcccactcttggctggttggaccctgctatggaaaagttggcccctgagccagagctccagcagccttgttagggcgtggcctgaggcttggataagtgggatgtaaaacgaagatcaggagcagatttgaagaattacaaagtgaattggtgccagtcagcatgtcagagacagaccacatagcctctacttcctctgataaaaatgttgggaaaacacctgaattaaaggaagactcatgcaacttgttttctggcaatgaaagcagcaaattagaaaatgagtccaaactattgtcatt

SEQ ID NO: 12077 - DNA, 347 bp, Homo sapiens
aggtacttaatcctggttggtttacccattctaaattatttatgtgagatagctatctatttggaaaaaagtaaagtgaaagtcttacctcaatccacactcaaaaatagtttactatatgacagatctatggcaggcagatttgatggctcaatgaactccaccctcccagtgttcacacctttatgtagttcccacttacagggagccaaaggtccgtgggacgtgaccaactcagcattccactggaggctatatgatcaaacagcaaactgtttatcatgaatgcaggatgtgagcaaactcaccattgctcctgccgacagaaggttttctggaggcaatca

SEQ ID NO: 12078 - DNA, 500 bp, Homo sapiens
  misc_feature 39: n = A,T,C or G
gcccgcatgagacacttcgcaatacggcgaattggatcnccgccacggtcgcggccgcccgggcaggtactttttttttttgtttttttccccctctatgtcttttgctgtcacccctgtttgtttcgggtttttattaaaatacttcagctgggcccagagattctgcagcgggaaaatccaaggcttataatgccaggctgagtggattaggccaggcaggaagcttctgccggttagctggccacgatatccactatttggctttgacaggtgttctctcaaaaattggcagaagtggtgagaatccgaatgccccgctgaatctcctggctgactttgctggtggaggccttatgtgtgcactgggcattataatgggctatttttgaccgcacacgcactgacaagggtcagggccattgatgccaatatggtggaagggaacagcctaattaaagttctttccgggggaaaccctacaaaccaagaccgtggcg

SEQ ID NO: 12079 - DNA, 422 bp, Homo sapiens
  misc_feature 174, 175: n = A,T,C or G
aggtaccatgctgacttcttggtatcttttaaggcctaattttcccctccttgagattactgtagtgtgttccagctaatttctatttggaaacgagttggaacagctgaaaactaggtattattgaaggcaaagcagcctcacgtcatttttttatcagctcatttgggaagnnttttttttttttttttttttttttaattaattagaaagtaggctgggcacggtggctcatgcctataatcccagcacttggggaggccgaggatctcctctctggtggatcacttgagggcaggagttaagagaccatcctggccaacatgatgaaaccctgtctctactaaaaatacaaaaagtagctgggcgtggtggcatactcttacaatcccagctacttgggaggctgaggcaggagaatt

SEQ ID NO: 12080 - DNA, 522 bp, Homo sapiens
aggtacgcgggggggcaaaaaatcaaggtatttggtcccggaacaaagcttatcattacaggtaagttttctttaaattttgcaatgtaaagaagggatgggaggctggcaggcaggagctggctcagaattctaggaattcccatccttgggtcaactaatcaatggtggaaaatctccaaaagagggtcaaggttgaactttggttttcatggctctcttaggagttcaagaatcttttttccttggcccttatgcattggtgagtaacattaacttaagggaggctttatgacccccaacttgcataattcttcttaaagggattggaagggcctttaatgtttggtttccaatttgggtaatcttcttcctggttggaaaaggttttttgttgaaaccaagtttttaggttatttggaggattttttatttttctttcaagttttcttaaataaaattaaccccccgctaataacaaaatcaatataataggggaaaataaaagttactcttgccccc

SEQ ID NO: 12081 - DNA, 420 bp, Homo sapiens
gcggtggcggccgaggtacccttccactcctactccactttgagatatcccacctttttaggttaaaccaatatgtagcctcatgtattgatttatgactttgcctgtaacctctgccacgctgcctttaaaaacccttacctgtgtaagccatctgggagtttaaggtttaaccatgacctccctgatcctccttgcttggtgccctgcaacaaatgccccactttctctccctgcaatcccgatgtcagtgtgtggctttgctgctctgggtgggcagacccaagttcagcaagtaaccattctaaggagggtgtttacaccttcttcatgatcccttgtcactgtttcatcctaaatcctgattccaacccaattatctgttccttctcatcatctcccctctctttatttcactgg

SEQ ID NO: 12082 - DNA, 501 bp, Homo sapiens
ccgggcaggtacgttcacggtcagccttgcggtaagcttgtgtgcttagaggaacccagggtaacgatggggcaaactgaaagtaaatatgcctcttatctcagctttattaaaattcctttaagaagagggggagttagagcttttacagaaaaattttaattatcgctattttcaaaacaattgaaacaatttctgccccatggtttttccagaaacaggggaaacctttttagattctaaaaagaattggtgaaaaaaaattggtcaatagtaatttaaaaaccaaagccaaaataaggggaaagggtaaaaattcaattccccactttaaccagttatgaaaattgatttggggcccattttatttaaaaggcaaactttttagaaacccattttcaaaaccaggaagaaaggattattggtttttcacgttttcttggatggcccccttaataaggcctggttgtaaccagtaattggtggaaagtaaagaaggcc

SEQ ID NO: 12083 - DNA, 409 bp, Homo sapiens
ccgggcaggtacttgatggactcatcattacagaatactcctcgttggaagggggtatgccttgaagtaagaattgcaaaaggcaatccagctagcaaaagggaataaatgaaaatatcattaaaaaagaaatatcaaaactaattaatggccaataattatcccacagactctgtctaaaaatgcatttgccgtgaaaataaatgagagcacatgtaaaaaaggaaatgcagcaatgcatgcaacagaagttagaaagattacagttttaagataaagatgttttgtctacagcaaacaaagtgttcaaatcctctattaaccaatttaacaaagagttatctttcctttgtttctgtcccaacacactaaatggattttggaaaaatctcttctcacgttcttgttg

SEQ ID NO: 12084 - DNA, 501 bp, Homo sapiens
  misc_feature 319, 320: n = A,T,C or G
ccgggcaggtacgtgacaggagtgactatttctttctaactggagtcagccctccatatccttgggatccacatccaaggattcaaccaacctcagatgggaaatattcaaaagaacaaacaaacaatttaaaaaaaagaaaaacaataggaaccaatttaaaaaattaatacccattttaaaaaatacatgtataacaaactatctaacattggccattttaccattttatttggggtaattaataaagtgattctaagaagtaattctaaaagatgtaatagggggaaaaatgttgcaatacggcttattatattannaatacctattgtctattttttaccaggggtacctttgaagccattccttttcttgttggattttttgagtaattccaaaggggtttttcaagggaacacaaattcccccccatgggattaccaaagtagaatgaaactagtacttcattattcaaaaattattctttcttggacctttcaa

SEQ ID NO: 12085 - DNA, 447 bp, Homo sapiens
ggagctcaccgcggtggcggccgaggtaccttccattccagtggagggagaaggatcatggaagccaagcaaatagcttgttcactccaaaaaggcctaggcccagccaccacctctcaccttaaccattgcaataacttaactggtgtccctgctcctacccttctgctgtcctattaaaaaacagggaaaccagaggtaatttgtataaaacacaaatataacagaaacacaaaacctcttccccaactttaaaccttctagtcacttcccatagctctttgaataaaattccaaacccattcccatggcctacagacctctgtatcatcaggtccttcccaccatgcagatcttcctggtctccctcggctgcagccacacaaatctcccctctgtttttctgatgccagcttttcggcacttgctatttcttctccccgcgta

SEQ ID NO: 12086 - DNA, 414 bp, Homo sapiens
ccgggcaggtacttgtgcatgaataaatttattcttcttttctgttgcagatataaatatttctgattgtgccattttgattacccaactaggaaaagagagagagagacagagaataacataggcttttgaatgaacgcctgaaatatttaaagaatccattaaattctttttaaaagtttctcacataattttgaacaaagagaaaagcaatctcaatagctcagaggaaattgcagaagattgctggtaaccaggcatcttgtctacccagtctttgcctccgaggacaggccagaggcttcaggtcagtgtcaggtgtgtgtgattgttggtgttaggaaaggaggtaaatggttcaagcagggactgccattccatgccactcatgaagtttcagatatgtctggatag

SEQ ID NO: 12087 - DNA, 505 bp, Homo sapiens
aggtacattagtaattataacaatgcattaaaattttcatttcatgtcatagagaatcagttttcttcatgatgatacattatgttttactgagtgagtttgtccctccagagacctttctgggaacatgccttctccagggactgtcttccttagattgccccatgttgtctttaccacaaggtcatcttttggtcattttaaaaagcaagtcaagtcttgtcttggaactgcactcctcttcaaactgaatgtttgagccaaaatttccccttcttctacaaactcctaaacgcccgctcattcacttaaaaagaaatgggggcattcttcgggcttttgggtccagaagcaatttacttaaacaaggctaaaatgttggggaatttctcttctgggtttaatgaaattttttttatttttttaattttaaagaccataaccaaaaaaattaccagtcttagaaaagttagggcttccttgcaatttttaaaaaagcattttt

SEQ ID NO: 12088 - DNA, 431 bp, Homo sapiens
gctccaccgggtggcggccgcccgggcaggtacaaagtccctgaggcaaaagcatgcttgctgtgttctaggaaaagcaaggaagacagcatgtctatagcagtgggaggtggaaggataataaacagtaggtgaggttagaggggaccaaatcatgtattttccatccagaggttcccaaccttggctgcacattagatttattctaaggagcttttaaaaaataccaatgactgggtcccagcctagagtgattaaatcagaatctctggaggtagacttgagaatctgatgtttgcaagtttcctaggcaagtcaaggctgaggaagactgctgcaggccattgtaagagccaggcgtttgaatctcattcaaccttttccctcagctcttctagagacagccagcattctcttatggcgcaaataca

SEQ ID NO: 12089 - DNA, 420 bp, Homo sapiens
ccgggcaggcaccagttgtaaaattaccaggaaccgccatgcctcaagatcgccctgttttctggcttcatcaatgactgcatgcagtgcaccaccctgtccactacgtgatgctgtaggattaagtctcacagtgggcggctgaggatacagcgccgcgtcctggggtggttggtgaaattagacgccctcgctgcgggttgctggtatggtgccgggctatttggcacaggacacaccgcttgaggtctgtattgaacctctgaaggaggccgatactgaagctcggttggcagccggtattgataaactaccagcggttgggtcttattttctaccggctgatattgtggatactgtatctgagatggcattgctgggatagagacttctgaccctttctacttgattgacttccgg

SEQ ID NO: 12090 - DNA, 464 bp, Homo sapiens
  misc_feature 264: n = A,T,C or G
aggtaccatgttcaggaaaccaaggacaatattgctctactgttggaaacagagtaatcaaattttctgtgctagccttaattcctgccctctttaagaggagcttaataaaatgtaaatatgcagaatgtttactttggattgctcatggtgtctggaatgctccgagtgcacaagcttaccgcaaggccgaccacacgttctcgggagttcctggacagaccgttcttcacaacgaccacgctcaggtgtaacttcacctgngttcgaggagaccgtgttgggtgccaaagatgtaggggaacctgcctgatacaccacccgcaggctctccccttcccggtggagacgagggaatgagaaaagaaataaagacaaagacacaaagtttaagagttaacaaaagtgggttcaaggatccatcgcaacgttggagattgcaaaggcccccgcgtacctgcccg

SEQ ID NO: 12091 - DNA, 675 bp, Homo sapiens
  misc_feature 448: n = A,T,C or G
aggtaccgaggtcattttgcttcctatagactgcgaccttttggcaaaagctgttctaactccatctcagcatttacaattccatacctggtggtcagaggaggcccgcctgcaggctcagctaaatcgggctgatggcattccaattactcaggctcagcccacaggctccgataattactctgatactactgctcatttaggctttgatgctctcaccacggaacaagtaacaaaggtgtgtatgagagcttgggataaattacgcaccccaggccaagcttctgtttcttttactattgttaaacagggtcacaatgaattatatcttgattttttagctaaattacaagatgctgttgaaaaatctgtctctgatgagcacactcaaggtattcttcttcatatgttagcttttcaaaatgcgaacccatgagtgtaaaatggnccgtgcattccatcctacgtcaaaatttacctgatcatgaggtgttgcctgcatatattaaagcttgtgaaggcgttggatcggagacccacagagctattctgtgggcaccggccatgaagcacggcaaccaaactggctcgactgattcttttcttggagcctgctataaatgtggccaacttggtcatacccaaaaaaaaaaaaaaaaaaaaagtacctgcccc

SEQ ID NO: 12092 - DNA, 518 bp, Homo sapiens
  misc_feature 255: n = A,T,C or G
gcgagcgtggccgccgaggtacacacggcgtgcctggtacctcagggtgtgatgtcagagtcatataattcctttgcttgtaactgcccaataaatggatgaggactcacttcacccataaataagaaaggtgaacagcacatggggcctgtagatgccttttgcagggccgtctattctcttcctaaagttgcaatttgagtatttctctagatgggcacatcatagaaactgtcgtcctagatcagagcctgnggagagagatacaggtgtcatgcttacatctgcagagtgagaacaagcccagaaaaatcaagatgattaagcagagagcttccatactggagataaaccagctgtgtaaaaaatcattgcaccaaaaaagcattgtaccatcgacataactgctttaactaagaagtaaagggactgatgccccagcagagcacaaaaaggcccagagacaggagctgcatttaaacaaggtcattgcttgtgtccccaccctgagttaagta

SEQ ID NO: 12093 - DNA, 510 bp, Homo sapiens
aggtacttgagtcaaagacgacatttagattcttcagctttgaagcatttagtaacatcattgtctagtcaggcagaggaaagaaattcaaaagcactttctttttcttctgtcagttcctttgcagtaagatccatcttctcacgtgagaaatcattaatagggaggaccttcaacaaacctttccaggttcttatttctttgattacaaccagggaatgagtaagagcaagatcaatcagggaacactcataggaagtttgcccatcagaagattaacaactccatgggaccacaaaactcctccccttctggggtttccaaaaaccaagatgttcccttgactgtggtacacagaatgggctttttggcagccagaacaatggtcacctgtgataggtttttcgaggcctttgatgaacagctagcgtccaacgcctgcttggcacagttcgttgaacaaaattcttccctttgaagcccagcttggtcattctttttcagaagctt

SEQ ID NO: 12094 - DNA, 508 bp, Homo sapiens
ccgggcaggtactttgaacctgttgttcctttacctgatctagttgaagtatccagtggtgaggaaaatgaacaagttgtttttagtcacagggcaaaactctacagatacgataaagatgttggtcaatggaaagaaaggggcattggtgatataaagatttttacagaaattattaataattaagcaaggttcgtattaagcgattgagtaagggtacccaatttttaaaaacttttgtgcccaattcacaagaataaacttcccagacattgacttttgccaaaaatatggaaaagggtacaagaaagtagttatggtttggtggaactgtcattgtgaatttttgcagaattggagtaaaggaaaaatgtattagcaatttttagtcttgtttcgttattaaaacttaccaggaatggttggcagaacttccgttttaagaaataatttttttgatgaatagcaaaaaacaggctccaggtaaaaaagaattcttttggattaa

SEQ ID NO: 12095 - DNA, 437 bp, Homo sapiens
ccgggcaggtaccggggtcattttgcttcctatagactgccaccttttggcaaaagctgttctaactccatctcagcatttacaattccatacctggtggtcagaggaggcccgcctgcaggctcagctaaatcgggctgatggcattccaattactcaggctcagctcacaggcctccgatattactctgatactactgctcattaaggctttgatgctctcaccacggaacaagtaacaaaggtgtgtatgagagcttgggataaattacgcaccccaggccaagcttctgtttcttttactattgttaaacagggtcacaatgaattatatcttgattttttagctaaattacaagatgctgttgaaaaatctgtctctgatgagcacactcaaggtattcttcttcatatgttagcttttcaaaatgcgaacc

SEQ ID NO: 12096 - DNA, 534 bp, Homo sapiens
  misc_feature 334: n = A,T,C or G
ccgggcaggtacgcggggaggcattgaggcagccagcgcaggggcttctgctgagggggcaggcggagcttgaggaaaccgcagataagtttttttctctttgaaagatagagattaatacaactacttaaaaaatatagtcaataggttactaagatattgctttaacctttaagtttttttaaccgtaatttttaaataagctttaagaattttttaagtaagaaaattattgaaagaacttagaaagaagttagcattgtaggaaagggaaaaaagattaaaaaggtttttcttaaaaacaattgactggaagtgtttgaaaattgaaagnctttcttttcattggcagttaaataaaaattgttattttaaaaacgaaaaatttggagagtaaaaggtaactaacaggaggcccccgtaaattaaatacccaaattagaaaggggcaaatgtcttttttagaattttaaaatgaaagggtggactttaaaacaagctttaaaagttttagtttttaaaaaggttgttagg

SEQ ID NO: 12097 - DNA, 431 bp, Homo sapiens
aggtacgcgggggacatcaatgcagagtccctctgtgaatttacaacacccaacacccatgagttcagtccttaagaaggaaaattgagcaagtatttaattggttggacattgcataaaagaggtccatatccaggctaactctagaaattttattctcaaacttagttggcctcttttcttctgtcagaggaccattcttagtggcactggggaaatcttggcacccagaagaattcaactgcgctcactgcaaaaatacaatggcctacattggatttgtagaggagaaaggagccctgtattgtgagctgtgctatgagaaattctttgcccctgaatgtggtcgatgccaaaggaagatccttggagaagtcatcaatgcgttgaaacaaacttggcatgtttcctgttttgggtgtgtagcctgt

SEQ ID NO: 12098 - DNA, 523 bp, Homo sapiens
aggtactattctatcattattgtataacggttttcaaaccagtgggcacacagagaacctcactctgtaataacaatgaggaatagccacggcgatctccagcaccaatctctccatgttttccgcagctcctccagccaacccaaatagcgcctgctatagtgtagacatccttgcggcttcttacccttgtcccctcttcttagtggttcctttaaattcagataacctgccctgtgaagcccttttcattttttaccacgccccttgaagacaggttctttcttttggcttagtttggaatttattgtttggtgttgttttttttccggtaattaaagcataaaataatatttttaataaaaaatgtaaaaacgtttgacctttttgttccaattggtattttttaatttggaatggaccattcaaaatttgaattattccaatggttaaaggaaaacaagccattggcaaatttgggccttgtggaaaattcttgtatttgggttgaaaagaaatgggt

SEQ ID NO: 12099 - DNA, 431 bp, Homo sapiens
ccgggcaggtacagagaagcaggttgagtggatggcaaagtgaccggttgagggaccaaaatgataggagggtgaggggctgtggtggatgggggagggcctgcagaattacaggtaaattgtagtttggatggctccggaggcaaagactgtaaaggtttggagagggaagaattagcatagatatggtcctgggctgtctgagttggggccgcaggagctacaagtgtcggctcttcgtgaaaagaaataagatcatcagggggtgatgttaagccaaagtcactggagttagatattgaatcctcagtatcgtcaggtgggggaggagtaggcaaagggaggggctgagcatataatgaaggccgagtgggagaggaaagctgaggaagaggtagagggtggccagattcagaaaactgtggtaactg

SEQ ID NO: 12100 - DNA, 483 bp, Homo sapiens
catcttgggtcatcgatgagcctcgccctgtgcctggtcccgcttgtgagggaaggacattagaaaatgaattgatgtgttccttaaaggatgggcaggaaaacagatcctgttgtggatatttatttgaacgggattacagatttgaaatgaagtcacaaagtgaggcatttcccatgagaaggaaaacagaacgagaaaatctttggatggctttcaacaagacattgcagccaaacaaaaatggaaatacctgtgaatgacattgagtgcaggccaatgctggtggagggagattaaccaacggtggcaggagggttcagggatttctggccccttgctgcctaaaactggtgccgttcattaaccaaattcattttcatattttcttaaccctcaaaaacaaaagctggttgttaataatctgaatcttctacgggttccttttttgggccccaaacattcttccatatattacagccg

SEQ ID NO: 12101 - DNA, 511 bp, Homo sapiens
ccgggcaggtacttactttttaagaattagagacagtaactccaaaaataattgtccttttttctttctttttttttttacaataaggctcttgaaaattgtcattacttgtgttttcctatacattcatctgtgtgaaagccttatttcttttttgatttaaaaaaatttaactattacccagttaatgggtttataaacttataaacttacttaagaaattaaatgcttaaaggtggtcagtaaagaaaaattaattttaagcctttcaattaatttgttgacctggtccttcaaggaatatcttcctctttccacaaccctgtcccaacctctactctcaaccctcaacctttactcgcactcgtaaccgtcacccagtagctcaggagacagtcttgctttgtactgccagcaagggaccaccagtttcctaaccatacggttttcagtttctttccatgggtaaaggcttcaatgggacttttgaaaattgttttaacagaggctg

SEQ ID NO: 12102 - DNA, 525 bp, Homo sapiens
aggtacccctccaagccggacaacccgggcgaggacgcaccagcggaggacatggccagatactactcggcgctgcgacactacatcaacctcatcaccaggcagagatatggaaaacgatccagcccagagacactgatttcagacctcttgatgagagaaagcacaaaaaaatggttcccagaaacctcggctttgaagaacccttggcaatgtgtgtgaatgggaaaatgaagaactttgcttcttctgggccttttatcctaatttttcaagccccattatttttcattccgtgtgaaaaacggagtaattctcaacccattccctactcaaatgcaatgtcaggccaactggtgcttgaaatttcttgccaatggtttatcccttttgtcattcaattgtaattatattgttggtgttttaaaataaaaagtattcaatgcaattctttaaagataaaataataaatatatattattaataaataaaagttactctgctccggggtcgggccgtcccggt

SEQ ID NO: 12103 - DNA, 439 bp, Homo sapiens
ccgggcaggtacgaaaaaatcaggctactaagcccactgttaatatagacgcagaccaattgttaggaacaggtccaaattggagcaccattaaccaacaatcagtgatgcagaatgaggctattgaacaagtaagggctatttgcctcagggcctggggaaaaattcaggacccaggaacagcttttccctattaattcaattagacaaggctctaaagagccatatcctgactttgtggcaagattacaagatgctgctcaaaagtctattacagatgacaatgcccgaaaagttattgtagaattaatggcctatgaaaatgcaaatccagaatgtcagtcggccataaagccattaaaaggaaaagttccagcaggagttgatgtaattacagaatatgtgaaggcttgtgatgggattggaggagctatgcatg

SEQ ID NO: 12104 - DNA, 833 bp, Homo sapiens
  misc_feature 560: n = A,T,C or G
aggtacaaagtccctgaggcaaaagcatgcttgctgtgttctaggaaaagcaaggaagacagcatgtctatagcagtgggaggtggaaggataataaacagtaggtgaggttagaggggaccaaatcatgtattttccatccagaggttcccaaccttggctgcacattagatttattctaaggagcttttaaaaaataccaatgactgggtcccagcctagagtgattaaatcagaatctctggaggtagacttgagaatctgatgtttgcaagtttcctaggcaagtcaaggctgaggaagactgctgcaggccattgtaagagccaggcgttgatctcattcaacctttccctcagctcttctagagacagccagcattctcttatggcacaaatacagcctttcaccctcacagaaagacacaggacaacaaattcaataaattaattcactggcatggatgattttctcagactaattgtttccagtttgataggagacaattaaaggctggaaggcactggatgcctgatgatgaagtggactttcaaactggngcactactgaaacgatgggatggccaaagacacaagagatcagttggagcaagctcaataacaaaatggttcaaccaggacttggaattgcatggagctggagctgaagtttagcccaattgttactaattgagtgaatgtggatgattggatgatcatttctcatctctgagcctaggttccccattcataaaaggggattcacagtatgtactataaaggggggattaagatgatctactccactgggtatttgaaggagaattgaataat

SEQ ID NO: 12105 - DNA, 672 bp, Homo sapiens
aggtacattaacatagggacccctcccctggagcatagcagccgatgttttgtccaggcaattgattctggttagcctgttgttcacacaattcatcatattctgccctccagagggggtattgactcgcctcctaaagttgttttagctagcactgaccagtcccatggagtcatatggtagttatctgctattgcctcaattaatcctcttgtgaatgggctagtggccccattttctctaatgctttttcttatttccttagaagtgttcaatgtaatgggctcatgcacccaattgccttgttgatcttgcatcactgggcaggccaagagttccccttccaatgctgcttgcctaaggcagggtcccataactgtagtatatcgcttgtcttcttcccagttcattggggggagggggaggaaaacctccgtctcctctttggtatctttagccagtgacggcaaggctgagggaggctgaagcattaaagtgggtagtggttccccttcccttatctttttgggctcttctatgaagagcaaggccaaagcaaccctattaggaccataacattaagatgttactgggacctactgcccttgcgcacgtcgtttaagatttcttcccacttgttcccagagctctaggtctagtgtacctgccccg

SEQ ID NO: 12106 - DNA, 821 bp, Homo sapiens
  misc_feature 644: n = A,T,C or G
aggtaccagttgtaaaattaccaggaaccgccatgcctcaagatcgccctgttttctggcttcatcaatgactgcatgcagtgcaccaccctgtccactacgtgatgctgtaggattaagtctcacagtgggcggctgaggatacagcgccgcgtcctgtgttgctggtgaattagacgccatcgctgtgggttgctggtatggtgccgtgctatttggcacaggacacaccgcttgaggtctgtattgaacctctgaaggaggccgatactgaagctcggttggcagccggtattgataaactaccagcggttgggtcttattttctaccggctgatattgtggatactgtatctgagttggcattgccgggatagagactctgtccctttctacttgattttctcttggggtttgtgcttgtctaacctgcgtttgaggttgtaatgttacaggcatctgaaccacgggaggaggagttgatggcgatcgtggttaggctctgatggccccaatgattctggacctcctttccccaattttgatgattcagggtatattatcttctgtaatggactgtagtcaaacattttggcgtgactgagccattacagactttgctacatatttaccatgtgaacttntccgtccttgctgggaattttgtccctggcctttctttacaaatttggtacacagcttttaggggcatcagaaactgaaacaatttcttcttctggttgaaatgggtcttaaaggtgctttaataaatggcccaacaatttcatacgtaaggtggatgaattaccttccttattggt

SEQ ID NO: 12107 - DNA, 658 bp, Homo sapiens
ccgggcaggtacgaaaaaatcaggctactaagcccactgttaatatagacgcagaccaattgttaggaacaggtccaaattggagcaccattaaccaacaatcagtgatgcagaatgaggctattgaacaagtaagggctatttgcctcagggcctggggaaaaattcaggacccaggaacagctttccctattaattcaattagacaaggctctaaagagccatatcctgactttgtggcaagattacaagatgctgctcaaaagtctattacagatgacaatgcccgaaaagttattgtagaattaatggcctatgaaaatgcaaatccagaatgtcagtcggccataaagccattaaaaggaaaagttccagcaggagttgatgtaattacagaatatgtgaaggcttgtgatgggattggaggagctatgcataaggcaatgctaatggctcaagcaatgagggggctcactctaggaggacaagttagaacatttgggaaaaaatgttataattgtggtcaaattcggcatttgaaaaggagtggccaggcttaaataaacagaatattataaatcaagcttttaaccgcaaaaaaaaaaaagccatctggcctgtggtcaaaatgggaaaaaccaaacattgggcccatcaa

SEQ ID NO: 12108 - DNA, 616 bp, Homo sapiens
ccgggcaggtaccaggagggtattgatgtttgaggtccaaactgaaaacccatcacctccttcccactgctatagcagcgttagccctggggttcattatctagccagttcacaccttctaaagtggggctctgaaaatgtcttacttccctcacagacaaagcaattctcaagcctcctgagatcacccaccaaccagagcaactgctgtcacttggaggtgcagctgaattcttctaattgtgacacaaactcttgaaactgtaaatgctgaaagattaaatgaggttataacactcagaaggttttacaagtaaaagtaagtcaaatcaataggtctttatttcatatctgtaatggtttagctctgcgggaagtgttagcagctatatgaattaggaagaatttagaagacaatccctaaacacatgaaatgtccaagtaagaagataacatatttatccaaatatttaaagtgaaatgctccagatatgggaagcttacagttttcaagcaaagctttttagaaaaaattatggaactattttaaagagagctaaacatttctttgccttaggcagaatatacagaacacagattcaccttttctgtacct

SEQ ID NO: 12109 - DNA, 646 bp, Homo sapiens
  misc_feature 588, 589, 590, 593, 594, 595, 596, 601, 602, 603, 604, 632,640: n = A,T,C or G
aggtacgactgtaacaaggaccattctctgcttcccagatggacctctgtgtcctcccatcgtggaggaaacagaaggacaaaatgggcctggttagttccctccagccttctgtaaggacactaatccccttcaggagggctctgccgtagcgacctgatcacctcttagaggccccacctcttaacactgatgctggggtgaacttccaacctgtgaatttagaacaggcatgcccattcaaaccatagcatccactttacacaccatcaccttttcctaagtcgctgtcactcaattgccaggggcaaataatttatatcaccaaggtaaggtcctggcacataatgtatgctcaagtatttgtgtgtttatgaataagttgaaaattaaaataaattggctttgtgagagggcttggcaagaacttgactgtctaagcttttcaaaaatctgctttgttttattcctggttcttaatagagatggatgcccaaagacagactcgagtgaacttagctgacactggctgtgattatttttttatttttatttttttggtaggggaagagaatgggggtggttttnnnttnnnngcttnnnntttttttttttgtgtttttttttttttntggaggtntttttc

SEQ ID NO: 12110 - DNA, 811 bp, Homo sapiens
ccgggcaggtaccttctgctgttccctgggtcttcaatgactcaatttcccaccagcagtatcctttaaagccatcctgcatcctgagacaagagattgacaattcattgataagtagtcttaattgtcactattacagggctgtaggtcctttgccagccatgcctttcagtcctaaatggtcttcaaggttgggctgtgttgtccaagagctgaggaccttacatttattgttccaatatttattggctataatgatttctgtggagcagtcagctgtcagaaaattttgtctcctttgtaggtaacctgtcattggtctctggatttttttatagactccctatgtatctggtgtaaattagtttcaatctgttgtgcctacgtgtagacttcttgcttgaaaaggtgttggatttcttgagtttgaattttggagtgtttaatcagttctgaacaatttacagtgttagaacattaggatattggtgtctccattactagatattctccttcgtcttgagaaattatcaaaactcaaggagggtcataagaacccctagtttataattaagtcattagaaaaattaggaggcctggaatttgtgatatatggtttggccatactatccctgggcttccacttccatggatttaacatcttggggattgaaatttattattttaagcatcatgactgagactaccagacttttttattggcatgaatcctaaaaattttagtaacaactggtaactaccaattaaatggatagaaattatggttttctaaattgattaaggtatgggg

SEQ ID NO: 12111 - DNA, 812 bp, Homo sapiens
ccgggcaggtacttccaaaccctcctgttctttcctttttgttttccccaattttaacataaggcaaaagcagtaattgagcaattctatcacctggattggcactccggggaacagtggagctgatcactaactgaattccccctttataatctgaataaattaccccagtatgaatttggactcccttcaaatttagacttgatctccctcaaaggcctaccctcccttctggcagcgggccatatacccctctaggaatcttttgtgggggctttccagggagtaaaaagaccatttgggtggaacataaatctactgcggtgctgcctgctgtggcgcgggacagctgttggattgttgtaattggctgactccctgaagtggtggtattttctgtaggggttgttgtccttgaaaaccctgaggaacaaacagtttaactgggaatgccccaatttgttggggggcctgaggctggcccctctttcttgttccagacaatgggtgcccatctttatcaaatttagaatgacattgattggcccaatggtttgctttttcccattttggacacaggccaaaaggctttttatattttggcggtaaataggctgatttattatattccggttattaaagccgggcaactccttttagatgaccatttggccaccattattaccattttttccaaatgtctaacttggcctcctagagtaagcccctaaatgctggggcattaaccattgccttagccatagttcttcaatcccaataaagccttacaatatttgaaattccataactct

SEQ ID NO: 12112 - DNA, 647 bp, Homo sapiens
  misc_feature 562, 594: n = A,T,C or G
ccgggcaggtactatcaggacactttgagtttccctgcagaggggaaggtgattgagtagataggaaagatgacaaagctattctcttcaaccatggacacatctgcacatgtaatcccagggccaaggccacacttggcttgcttcgctgatctctcttttacataaattccatttagcattttggctaccagataaatttctttccatttaaatataaaaagtcctatcagaggaatgaaggattgcaattttataaaaggtcataaggagaggttataacaatctttaacaggaatatgaaaaagcctgagtttgggggaaattttctgaacctgaaaaaggaagaaacagtagccataaggggaaatggcttttgaattttaacaaaatgaacttcgtatgttgctaaaaaatatgagctgaaaatatactgctttttttccctgagttatacctatctcctgaaggaccaagagtggcccgtgtgatgtcacttggcaacactaatcgatgagatgtctcgatctaaagcatcttagcaccaataacaaaaacattntaaaatcaatgattatataacctattcctatnttctttgagagaagagctcttcctaaaataccaccaaccatattctctttcac

SEQ ID NO: 12113 - DNA, 829 bp, Homo sapiens
  misc_feature 361, 708: n = A,T,C or G
ccgggcaggtacgcggggaagaaatagcaagtgccgagaagctggcatcagaaaaacagaggggagatttgtgtggctgcagccgagggagaccaggaagatctgcatggtgggaaggacctgatgatacagaggtctgtaggccatgggaatgggtttggaattttattcaaagagctatgggaagtgactagaaggtttaaagttggggaagaggttttgtgtttctgttatatttgtgttttatacaaattactctggttgctgtgttgataggacagcagatgggtaggagcagggacaccagttaagttattgcaatggttaaagtgagaggtggtggctgggcctaagccttttnggagggaaacagctatttgcttggcttccatgatccttctccctccactggaatgggaagtacctcggccgaggtacctttatttctatcattacaatcatctctttttggggtgtttttagagggcttaatttctggcttaatacagtttaacttgaggtcaaagaagaaccaattgttattcttgggatttaaccccccaatgttccttggaaattatagggtgttccttggtttgcacgaaaaggcagcccactttttcttgatatttaatcttaaggtctttcaggattcaccatcataatgagtaattgatttcttggggacaatccttgtttgggaaacanggccctaatttctgaccctgtgaggcttgtttacttcagtctggcttttatatttacagtagggatgtcattggaaaccttttttacaaaggctattgggaaaacatgaaactggtcccct

SEQ ID NO: 12114 - DNA, 579 bp, Homo sapiens
aggtacttgtagtcttttaataaccatagaaagcactaaaagtaattttaaaagcctggaaagttaaatgaaaactgatattatatacaattaatttaaaattatagttttactctgtttatttacaaatttgctagataaaacataatctcagaaaaaaagtgtttctttttgttgcttctgcactatagtaaatatctagatatctataacaggcatataatatagtatatatatagggaatcctagtgaagagtatagcagttatagaaatatatatggagagaaatcttataaaatggttatgttctaagtatccataatgaaatcctataaattttattgcaggagagaacaatgaaaagtgtcagtgtgtgatgatactaaacttttatttccattttgtcacttctaaaacacatttttgaagcattttaaagacctctgaaatgacaatgcatcttataatcaatggtgtgtcaaaccatttggaacaattttttcattgcttagggatttataaagtgctggtgtatcttaataacagtggggtcttagacttgcagaaatacagtacct

SEQ ID NO: 12115 - DNA, 449 bp, Homo sapiens
cgggcaggtacatttttaccttaggggatatagcccagctgtgtccagccagggtggagaagcgcatcttccttctgattcagtccgtcctggcttcgtctgctgatgcttaccactcaccatcatctcaaggcagcagtgaggccccagcgtctcagccacccccccaggtcagaggttctgtcatgccctctgtgattagagcacatgccatcattaccttaggtaagaaaaacatgggagaatggggcttgacatcgttctgtgtgtagctgttgtcttaagtaagtccagccatgggactgtgtcaggggctgcggagcctgtctgtgtctgctctcagccatgtggttcctagaggtggctctgatctgagtgctgagctctgcataactgcgtgctggtcatgagagccctcaggctgataagtcctcaagactaaggtacct

SEQ ID NO: 12116 - DNA, 436 bp, Homo sapiens
  misc_feature 10: n = A,T,C or G
aggtactttntttttttttttttttttttttttttttggtttcaagaattcaggaatttcaaataacaaaaacaaagcatattataagtagatgtggggaggaatggctaaagaataggaatacctacccaaagggtagatgaggttgtcctgctggaggatgatcacattggagaaagaagctcagaggatcccaggagaagactaagtgcctttctagggagccctgttcatcaggatgtatggtgactgctttctttgggcggttgtctcatcaatagcagccatagagactcaatatatatcccaagacttttataatcccattggtattacactttattggcactacactttgaatatttcaaaagaatcttaagctccccatgaccaagagtggaccttatgaatgtaggagtggtaaggatgtaccttg

SEQ ID NO: 12117 - DNA, 771 bp, Homo sapiens
  misc_feature 557, 600: n = A,T,C or G
aggtactatgaataaggtattgaaatccttttatattttagagcatgacagtgataattttctgaggtaatattttctactttaaaatagtctctgttaaccattataaactatgtagtttaaaaatattctatgcttgttattgagttaaatccaaacaataactgataaacaaggtaagacagatattatcatcaccattggatataggaggatttctcatcctcagcagactcttgagactttgggccagataaatgtctgtcgtaagggctgtcctgcacatggtagggtattttgcagcatcactggcttctacttactgcatgcagtggcatccccattcctcagttgtgataacccaaaatgtttccagacactgccacatgttccctgagtgacaaaatcaccctctgttacctacttaatgtaatgtcagtaaatctacagtgattaatgttttataccttcaatcaatgaatgttaattgagcacatactatgtgtcatgtgttgttctaggcttttgccatataatactgtcttactatatggaanttacattcaagttggggagcggaaagcaatataggtatagatnttaggaaaggcctctctgaggagatgacatttaatcagaaaccttgaaaagatgtcgagagtaatccaaacaaagggcaatttcaatagaggacacagcagttaaaaacacccaacacaagaagaagattgtagaacagcagaaatgttggttggcctagaagtacctgct

SEQ ID NO: 12118 - DNA, 633 bp, Homo sapiens
ccgggcaggtaccttttctagaatgtggtcaaagagctgcctgcatccatcacattggggcttgttaccatagaagtgccctggactcccctccagaacctgcaacttgaatctctataacgtgaagtatggggatcttcatttgtagcagccttgtccaaaaattaatcttcacactaacgcataagaaccactgcatactctctgcagggactgccttaaatattaggttaaaatcctagtgttaaagttgtttgattaacaacattggcaatatcacacaatttgtttataaaatcctaatgaataggtctgtgttcaagttattatgatcgtatggaatattgccctttgcatgtttccatcccctacagaaactacagaaatggatctgctcgtgactcggcctttaaaataaattactatattgtttttaaacgtctccctcctgtcagctattaacgtatgttatgacctgaagaaaatatgtaaaacatcaaaagaaaagtcagcattgaaattggaatttcgtaattaaatgatatgtaaaatttgaatattatttgttcagtcttattcttccagaacctcagttactttcttttattaattcagacagttaccacaatacct

SEQ ID NO: 12119 - DNA, 756 bp, Homo sapiens
  misc_feature 315: n = A,T,C or G
ccgggcaggtacagtggtgcgatctcagctcactgcaagctccgcctcctgggttcacgccattctcctgcctcagcctcccgagtagctgggactacaggcatctgccaccacgcctggctaattttttttgtatttttagtagagacgggatttcactgtattagccaggatggtctcaatctcctgacctcatgatccacctgccttggcctcccaaagtgctgggattacaggcatgagccactgcgcccagccgagtcattttttaatactactgcatgtgagttaacacaatcattcccaaattgaagntttagatgggccctcaaaatttttaggatatggttttcctacaggtttatattgaaagtatggggtatctcctattactcctctttttatttgtcttaaaggaaaaagggagaggccagagaccaaatgtccccatttccctatagctaatctctttggaagaaaagcagcccagacttgagcttctagatgggtacaaccaggtgcatgttcaaaggacaaaagaaggtatttattacccctagtaacatttaatgcagtgcctttttctgcttaacggggcaacggtcatctgtatgtcccggcttcccacacttattgtgggatagatttttgcgggaccatccttccagtggagaaggccataaatggaggaaaaggccttaagccccataagaataatttgtgtagcaggtaaagagttaaaggtgaaccggggat

SEQ ID NO: 12120 - DNA, 765 bp, Homo sapiens
aggtacatctctagatgatcacgaatgtcaaatatcacactacactgtgatatggggattccccttgggggttttcatgtgtatagggtgcctgcagctacactaaacatcttaaagctaccacaatgttcacttcatatttttgctttttataggctttcttggtctcctcctatgttcccatcattttcttgctttgaatctgtaagaatcgagttgaatcttctccattttaaattttccataggctgagaaactgtttagccaagtttggataaaattgtatccaaagtaagagtatacaagctatgggcaagtccaaaatcaagctgttcacaggaccatgttctctctaaaagttctaggaaagaatccctcatttccttccagcttctgggtggctgctggcattcctgggccggtggctgcatcccttcaaatcttgcctccatcttcacatgaccttcttccttgggtttctattgggttctttcctggtgttctataaagaacattttcattggatatagaatcccattctaatccataatgaacttcatcttcagttttaccctaacttatatcccgaagggccctattttccagaagaacaaccgtggctgaagttttgttggatttaatccttggggtcacttagaactattccctagttgggaaagatcttcatccattgtataaagtaggagtgtagtaaaccattcccagtggataagataaagtagttatactttgactagtgtagta

SEQ ID NO: 12121 - DNA, 420 bp, Homo sapiens
ccgggcaggtacagcaatatcatgaggaccagaatctatctaaccatctcatcctttccatgtcaaatacatggcctttgccatgtattttcatcagtatcttcagggcagtgaccttggtaagtcattaaggtggtaagtggagcagcaaagccgatatgtcactaggtagtcagcagacccagactgaagcctgaagagtgaaacaactttcctgctgggtggccctctgttcgttctattcctattttatcctgatggggagaagtgctttttaaaaatgatctttaatatttccagagtggctaacttccaaaaaacataacctaaagagtaaaaacattcttttctaaagaatgagaatcatgatatgctcttgacaagtatattagccatcaactacagaagacttaaacaggt

SEQ ID NO: 12122 - DNA, 415 bp, Homo sapiens
ccgggcaggtacagaaacggtttcactatgttggccaggctggtctcgaactcctggccttcctcaagtgatccacatgtcttggcctcccaaggtgctgggattttcttttaacttttaataaatgtagcaggaacatctctcctcaattcaacatcaccataaaaagaaaataataataaaatggaagaaatcacctatcagagagagaaattatttttgtggtgggggctccccccaaatatcacaagtcacttcacttgtctccaaagacaacattgaatagtgctttgaaggtggtttcaatcatgagactaaagaggtggcatttacccctaccagatacctgttgctttcactccaaggccttctgaagctaaggggaaagcttatcccatggccatgagcatgagca

SEQ ID NO: 12123 - DNA, 414 bp, Homo sapiens
aggtacgcggggacatcaatgcagagtccctctgtgaatttacaacacccaacacccatgagttcagtccttaagaaggaaaattgagcaagtatttaattggttggacattgcataaaagaggtccatatccaggctaactctagaaattttattctcaaacttagttggcctctttttcttctgtcagaggaccattcttagtggcactggggaaatcttggcacccagaagaattcaactgcgctcactgcaaaaatacaatggcctacattggatttgtagaggataaaggagccccggtttggagaccctgcctttagaaaattttttgccccttaatgggggtcaacccaaagaagatacctggagaaatcatcaatgcgttggaacaaacttggcatgtttcctgtt

SEQ ID NO: 12124 - DNA, 396 bp, Homo sapiens
ccgggcaggtacctcagccagcagaacatcgctgggacgtgcctggcctaaggcatcctaccaacagcaccatcaaggcacgttggagctttcttgccagaactgatctcttttggtgtgggaggacatggggtacgcggggattccaggctcttctgtgcctgtgggactacattctctgtgccgggcttagagaacacgaagagggagccatctgccacactctggaggctgaagcctgcaccagtgctgctcgcctcactgtggtaggtggtggtgatggaaactgcagatcggccagagtggtagaaaagttgctgcagggtttttctggctttgcctgcccagccgctccatgcctggctagaggagaaggaggagccacatgcggtacct

SEQ ID NO: 12125 - DNA, 758 bp, Homo sapiens
ccgggcaggtactactggcttcccagtggttgggttgagtataagcccccaaatatgagtaaaagaagaaaaagttaattcaatcaccaagtcttgctcgcatattaaaaattggatagatgaatgttcaatcatatgttttggctttggccagccagacgaggtcaatttttagatttgaactgcttagaattcttcaggcaagtcttgatggagcacttcttggacagttagaactttaccaggttcacaggagagctcagatgaagcgaacacctcatccacactggtttcctttggagacctttactgttgagaggtggttttcatagccgcaaaatgacaagtgcaagttgagtagatcagtgtttatcaaccaggtgccacattgtgccccaggagacatttgacaatgatggggtgttactggcatctagtagacagaggtcaaggatgctgcttaacatcttacaatgcacaggacagttgccacagcaaagcattacccagactcaaatgccaatagtgccaaggttgagaagccctgcagtagagaatgctgaatgtcacaaccaaggaagcaaaatctgtcagtggtgaaagggatgtgtatggcacttagagtagaatcacagccagagtccagacacaagtggaatttggagaactggaaatgaggaccaaaaccaagggaaaagtgagagaacccagaaccgggctatgaaccaagttgaattccctgagcttttttggctgga

SEQ ID NO: 12126 - DNA, 405 bp, Homo sapiens
ccgggcaggtactgccaccatctccgtttccaggagtcttctgcttgctctttctggtcttcctcacggatcctgaaggggggttctctgcagagcgaccaccccatcttcctgggagagctggttcaagatttttctgctgtggaccagctgtcttgtttcctgaggaggcccctctcattttacttctctgcatgttgcttctagttggttttttgaagttctcttattctgcagattgctgtccacgaggttgagtaaccctgctttctggaactcattcaaccctgtttttatttccaaccaacaattcttccttctttccctttcaagaactcctaatgattttcccagatgaaatcttatagatcttctgggatggtctacaaaggtgaagtgggagat

SEQ ID NO: 12127 - DNA, 416 bp, Homo sapiens
aggtacgcggggagagtccctctgtgaatttacaacacccaacacccatgagttcagtccttaagaaggaaaattgagcaagtatttaattggttggacattgcataaaagaggtgcatatccaggctaactctagaaattttattctcaaacttagttggcctctttttcttctgtcagaggaccattcttagtggcactggggaaatcttggcacccagaagaattcaactgcgctcactgcaaaaatacaatggcctacattggatttgtagaggagaaaggagccctgtattgtgagctgtgctatgagaaattctttgcccctgaatgtggtcgatgccaaaggaagatccttggagaagtcatcaatgcgttgaaacaaacttggcatgtttcctgttttgtgtgtgtag

SEQ ID NO: 12128 - DNA, 416 bp, Homo sapiens
aggtaccaggagggtattgatgtttgaggtccaaactgaaaacccatcacctccttcccactgctatagcagcgttagccctggggttcattatctagccagttcacaccttctaaagtggggctctgaaaatgtcttacttccctcacagacaaagcaattctcaagcctcctgagatcacccaccaaccagagcaactgctgtcacttggaggtgcagctgaattcttctaattgtgacacaaactcttgaaactgtaaatgctgaaagattaaatgaggttataacactcagaaggttttacaagtaaaagtaagtcaaatcaataggtctttatttcatatctgtaatggtttagctctgcgggaagtgttagcagctatatgaaataggaagaatttagaagacaatccct

SEQ ID NO: 12129 - DNA, 759 bp, Homo sapiens
ccgggcaggtaccctggcaaggtttgtcctgtcttggtagcagaaagaacttctcaaagtaagggcttcacactaggggagagttcaatggcccaacccagccatggccaccctgacaccatgccctgatgctagtccctgtggcctggcccacactgaaaatactgtggggacaacagaatggatttgcaagttaccactatctctcaccagctgtaagaccctgggcacattgttgatcctaagcctcagtttcctaatctgtaaaagggtgatattaattgttcgtgctcacagaactgttatgagaattaacagaaatagcatattcagactatagcagagtgtctggcatgaaacagagactcaataaatacaggaacaatttggttattagaaacagtgaggcttggcatggtggctcacacctgtaatcccactatagcgcttctcatgtgaatgtttcattctcatagtgcccaactttagtttttaattttggaaacttcttatctatagaaaatttgaaagaataatgtaatgaatctcaatatatccttcttttagagccatgaattttaatatttttccatgcttcttcttgccataccttttcccaccccagttctttctttctctcataagggggttcacaataagcccttttactatcatgaatagaaatggtggcgaaatctggaccattttaaagccatcatgtgtaatcgacaataaattgatttgttatgatttcgcttt

SEQ ID NO: 12130 - DNA, 329 bp, Homo sapiens
  misc_feature 312: n = A,T,C or G
aggtacaagaccccaaatgtgagagggtgtttgtttcagtgttttatagagttcctaatatgccatcatatatacattcagttgttttcaaaatacagtttagtatttggctactcacaaagtaataaaacatttaaatcacttaaccatacaattcttggtaaccaaaaggcttttctttctattcagtagtttaacatccagctttcttttttagggcaaaggagatagaagtggatgaaatgagagagtatttttttaattgaactctgattaatgccaaaagtgttcaatcactatgtgtggcgaagnatcctggtacctgcccg

SEQ ID NO: 12131 - DNA, 418 bp, Homo sapiens
aggtacctatgctttcagagtaagagcttacaagggttcaatctgtagttcttgcagcagagaattgattcttcatactcctccagctccagttttcagcttcctctttgatgaaaaatgtggctataataatgaacacctcctgctgaacttgaagagagaccgtgtagagagtagagctggatttaatcttctgcttgctgcagaacgcatccaagtgggttattacacaagcttagactacatcattggagatactggcattacaaaaggaaaacacttctgggccttccgtgtggaaccatattcatacctggtaaaagtgggagttgcttctagcgataaactacaagaatggctccgttctccccgggatgcagttagtccaagatttgagcaagacattgggcatgacaag

SEQ ID NO: 12132 - DNA, 599 bp, Homo sapiens
  misc_feature 276, 279, 281, 283, 285, 287, 290, 291, 298, 299: n = A,T,C or G
ccgggcaggtacaacgatttcccaaatgttttcagggcaactaggctatttggatttccttggctgtcactactacctgccaccgatctttattctagggacaaagattagataagtgattccaaagtctcaagattctcccttttcaatcatctccactttttagagcaagcctcctctatttgtatatgctaatttattttctcagattaccctcaagcctctgtcctgggaaatcttcaccttattttgggctctggcccccgcgtactttanatnantncngngcnnatggttnngactccatgaagaagcttcatctcaacctccgtcatgttttagaaaccttttatcttttccttcctcatgctactcttctaagtcttcatattttctcttaaaatcttaagctattaaaattacgttaaaaacttaacgctaagcaatatcttagtaacctattgactatattttttaagtaggtgaattaatctctatctttcaaagagaaaaaaacttatctgcggtttcctcaaactccgcctgcccccttagcagaagcccctgccctggctgcctcaatgccttcccgcgtccct

SEQ ID NO: 12133 - DNA, 405 bp, Homo sapiens
ccgggcaggtacggatcctccgcatattatctcaacagaggacagtagctcaggaggcagcttcaaacggtgacctgtggcctgggccatctcttcgtcatgtgcttcacttttccctgtttccctgtgaactggcttccatggttctgtagggtagtgagtcggggttgtggctgcagcagagcaggagatgcttgcccgagtgggagcaacccacccccgtgtccccaatgcctcactcctggcttctagtgcagccctttgtagactcacctcgcaagaaggaagatctgcctggagacctgatcccagtccagctttttgaccataggtcatctttgtccccttgctcctttgcatcatgtcataaaatttgaggatatcagctgattatttttttcttcc

SEQ ID NO: 12134 - DNA, 430 bp, Homo sapiens
aggtacgcggggattctcaatcctacccatgatgcagacagattacctcatttcagctcaataaaacatcaccaaattcccttaggcagaaaaagggtggggagtgccctttcttgaaggaatcccttaagtgcacgtctcccgttttcttttcacatcaatgcagagtccctctgtgaatttacaacacccaacacccatgagttcagtccttaagaaggaaaattgagcaagtatttaattggttggacattgcataaaagaggtccatatccaggctaactctagaaattttattctcaaacttagttggcctcttttttttctgtcagaggaccattcttagtggcactggggaaatcttggcacccaaaagaattcaactgcgctcactgcaaaaatacaatggcctacattggatttgtagagg

SEQ ID NO: 12135 - DNA, 431 bp, Homo sapiens
aggtacgcggggacatcaatgcagagtccctctgtgaatttacaacacccaacacccatgagctcagtccttaagaaggaaaattgagcaagtatttaattggttggacattgcataaaagaggtccatatccaggctaactctagaaattttattctcaaacttagttggcctcttttttttctgtcagaggaccattcttagtggcactggggaaatcttggcacccagaagaattcaactgcgctcactgcaaaaatacaatggcctacattggatttgtagaggagaaaggagccctgtattgtgagctgtgctatgagaaattctttgcccctgaatgtggtcgatgccaaaggaagatccttggagaagtcatcaatgcgttgaaacaaacttggcatgtttcctgttttgtgtgtgtagcctgt

SEQ ID NO: 12136 - DNA, 418 bp, Homo sapiens
aggtactcagctgaaaacactgtttcagccccctctctggtgacctcagccttctccaggtgtatctcttgatgatcttggagaccagcagccacagctgctgctactcctgcaggagactgtcaggctgtggtggggggcaggggtgttggaaggagaaatttaaaaattccgagtgttcttctgcccctctgctcctccatcttagctttctggaggagttaaggcaccaagggcaccaagtcaggttggcagtttatgctgcctcttgcccaagccttcagcaaaaactaagctggtaccccttgcttttgcttgggatcctcagccagggtggtgattttttggtttgtttgaattatataactccacacatttgattttttcccccacccttattttattttagtgggaggga

SEQ ID NO: 12137 - DNA, 403 bp, Homo sapiens
aggtacttttttttttttttttttttttttttttagaggactctgtaactctgagtttattcgttttcattttgttattgtatcagcattaaagaaatgcctaagttgatgaccattgggggatatagtttggccattttcttataaatatttttaagaaggcaaaaaaccttgtttttgatcaccagttatcaaaattgcaacctttcacatgggaatataatttatatgatatttaaatcatgtctagtttctatgatcataatttatataatatttctttagaatcatttttgtggcggtttttttgttttgctaatctttttagatatctttagataattttttttgtcattttctcaaaaaagcattatttacttttaacttgctattttatgggaag

SEQ ID NO: 12138 - DNA, 372 bp, Homo sapiens
aggtactcccatcatagctgatttcaagctatcaaagtggtggaactccagaaaatggaacaactaggtcttatgagccagttccagcacactaagagactaaagccagcataacttataaggtgctatacaacgctggcatcccgtaggagatcttccatcattacatcacagtattttagaatctgcagttaaccaactactgtttccaaactgactcaccttgtaggggactgctgctctgtgtctgagctctgagatcgagcaggagggttagaacttcgcttcacccaagcattctcctttggtggaggggctggcattacctttaggggctgatcaggtttgggaggtttagaagttggagagtgg

SEQ ID NO: 12139 - DNA, 376 bp, Homo sapiens
aggtaccgactcctcagaaactggcatgccaaatcaaaatgggtctggttcaatcctccctaatggcaatgtaaacccctctaactaatcccacttctcctaattatctttttctccttacgaacctaaaaatctcaccatttctattagcctgaaaataacatccctctgttcttctcttcctccttcagcactggatctcacttacaataggttttatttaataattatcttccttacactttctgtctcaccagtttcccctgaaactgatttacctgctacacaaaattgttcttattgggcttatgtgccttttcctccacttattcgacctctcacctggatggatgctcctgcagaaatctatactaac

SEQ ID NO: 12140 - DNA, 369 bp, Homo sapiens
ccgggcaggtaccctccaacacctcttccataaaatcagcaaacaactgacagagatcatgcagcgggagcccacgatcggtttaatcatcactcacttccattggatcaactacaaatcaactcagatgagagtgctgagtctcagaggatggacatctcaccccttgccatacagataagtagaaaggatggtattcaaaattaatggccagactctaagtcccagatactatacttcatggtcttccaactctcaaaaagttgtgggagttttttttgtttttgtttttgtttttttgagacggagtctcattctgttgcccaggctggaagtgcggtggagtgatctcagctcattgcaacctcc

SEQ ID NO: 12141 - DNA, 382 bp, Homo sapiens
aggtaccttcttgttgtgttttcacatggctcagttgttccaaccacattaaaaaaactttccaatagctgaatcgagtgtcagtttttgagtttatttggcaaaaatgcattaaagcttgctgcatttaagagatgtcccattatgcaaaccgggttgaaagaatattacaaatacgttttggaaaaatacggagtgtcgcgcagctcagcaatccgcagtcttaatgcgcgcctctttccaggaatttgatccagcatcaaaacccacaggtgcactcaccacacgggagtaacaagtaaatgatgtgccagtattcaacctgcaagtgcgtcgtcagagcctacctcaccctcagcataactttcaccggtattcaccc

SEQ ID NO: 12142 - DNA, 409 bp, Homo sapiens
  misc_feature 255: n = A,T,C or G
aggtacatctctagatgatcacgaatgtcaaatatcacactacactgtgatatggggattccccttgggggttttcatgtgtatagggtgcctgcagctacactaaacatcttaaagctaccacaatgttcacttcatatttttgctttttattaggcttttttggtctccttcctatgttcccatcattttcttgctttgaatctgtaagaatcgagttgaatcttctccattttaaattttccataggctgtnaaactgtttagccaagtttggataaaattgtatccaaagtaagagtatacaagctatgggcaagtccaaaatcaagctgttcacaggaccatgttctctctaaaggttctaggagagaatccctcatttccttccagcttctgggtggctggct

SEQ ID NO: 12143 - DNA, 406 bp, Homo sapiens
ccgggcaggtaccccctgaccccttcctccgaatatacttttgtctcttgtcttttattcctgtgttcaccccactgtgttcagtccccctaggtctgtgcgggttacaagtggcgcccaaacagggacagaattgggtgctttacacccttttctttagcagggactggcctagtgacttacctctattcagaatatggcaaaggcgttggaatctcacctccttaattaagctatacatgtttaaaaaaattattcaatgagaattgttaaagcacagtaaggaagactttattcagggccattatgacaggtatatagacaaatgtaatgggattttgcagtggtagagggtgaatggacttaactccaaatatcagcataagtaagtgggaatttatagccc

SEQ ID NO: 12144 - DNA, 409 bp, Homo sapiens
aggtacagacaggaggctcagcacttgtgccaggttagctctgcatggtggtcccactaaggcagtgggaagccaggatccagggaaccctatagcagggggatggcagagcaaaattcatggcctacagctgcctcttgccaaactgcactggattttgtgtctcccattccccagagctgtctgaggtgctttggaccatggtgatccacatcggcctgattcgtgaagagacttggcgggaggtcttggatgatgtggcttcgttcttacactgccttttgccaaccctgaaccgtaggcccattcctaccgtgatcataggaaggggcactcttcggcactttttctccaacgcagctgcggctttaccacttgggttttgagttttcccagaatgaaatttctc

SEQ ID NO: 12145 - DNA, 372 bp, Homo sapiens
ccgggcaggtacccaacagccatggctcttgcgactcacctgggcagctgtgtggctgcgcacctgactcactctttctagagggtgccttgaacagcatcagcgtggcccggcgttccctacaaatagcccttgcaattgctgaccccaaacaatgttgggaataacagaagggacaagggaacaaagaaaaggccaggaaggtaataattaaccacttactgagttcaaagccatcttgctgttatcaacagcatcgagtaatgataggtatctggaatgttcaatatgacctagaagaaagaattacaggactgtaatatttccataccagttagtttttagaagataaatctggaaagaactagaaga

SEQ ID NO: 12146 - DNA, 382 bp, Homo sapiens
ccgggcaggtacagcccacagaactgtgagccaattcaatcctttttctttttcaattacccacactcatgtatatctttatagcagtgtgagaacagattaatacactcctcctcagaaagcattcaatttagctgtgtctaaagtatgcccgggtgttcttagggtgttatcttagccaataattcttcctcttcagcaagatctatttgcctatgacagcttgacctacatttcctaccatacttgtcagtaacaagtagcccataacatctgaatggacttcattgaaatcacagaggttctttagttctctactttattagcaggcattagggaaacacatcaactttctaatttaataaggtgcctgttgctttgc

SEQ ID NO: 12147 - DNA, 387 bp, Homo sapiens
ccgggcaggtacccccgaatctaaaataaaagcagaaattatatgaaaaaactggggtgggagttggaaggaactttagatatgtaataaatttgtttgaaaactgttaatttctcatgctttcattaaaaaataattttcctcaagaaacccccaaattctccaccttagtgaatgaaaagtgcatttgaatttcaagaaggtatgggcatgagaaccttgcagttttctaatttgtggagacaaaataatttttataacaccaaccagaggtttcctctacaaaccccttgtaattcctttctgagcttctcttccttctagaatcttggggcatcttaaaaaactcaaacctatgtaaaacacaaccatattggactgtcggac

SEQ ID NO: 12148 - DNA, 410 bp, Homo sapiens
aggacttccaaaccctcctgttctttcctttttgttttccccaattttaacataaggcaaaagcagtaattgagcaattctatcacctggattggcactccggggaacagtggagctgatcactaactgaattccccctttataatctgaataaaataaccccagtatgaatttggactcccttcaaatttagacttgatctccctcaaaggcctaccctcccttctggcagcgggccatatacccctctaggaatcttttgtgggggctttccagggagtaaaaagaccatttgggtggaacataaatctactgcggtgctgcctgcagtggcgcgggacagctgttggattgttgtaattggctgactccctgaagtggtggtattttctgagggggttgttgttcct

SEQ ID NO: 12149 - DNA, 389 bp, Homo sapiens
ccgggcaggtacctaaaaaagaggaaggttagggaaggctgttgtcctttgcttactccttcctttcccagactttgtgtaaaatacctcttacttcccaggctctttactctcccttccaacccagatcctgacgtgtgcatctctttcgtgcaagacaatgtgatccgagaatataacttgaatgagctataccagcgggccaagaaactatcaaaggctggagacaatatctcctgaggagcagacctgtggcttcagacccccaccacagtgttcagatgggggaaaacacagaaggatataataaggatcctcaactttggcagctgctattctactcctgttcaatttccagggctcttttccattaaccaccaaggcctgag

SEQ ID NO: 12150 - DNA, 416 bp, Homo sapiens
aggtacaaggtaatataaatgagttttatcaatattttgatcaataactatatcaatttattttttaattaagatggggctgaaaattttatcaactactagaaaaagaaaatgttgcttccaatataggagacaaaagcagaagaaggtatatctaactgagatagccttccttctgagaggggaaatgaaatattaatctgatcttggaactcgcttccaattaattatgcatgccccgagtcagcatacagtgttgccatcatcataatcaaatgcacattagcagctttttctacttggaataggctgccttgcagggtggcgtttccttgacattgcagtcattcagaaagaggctgatgagggcatcctggaggaggacatgtgggttattgggggggtcagccttggat

SEQ ID NO: 12151 - DNA, 391 bp, Homo sapiens
  misc_feature 376: n = A,T,C or G
ccgggcaggtacgcggggatcaatgcagagtccctctgtgaatttacaacacccaacacccatgagttcagtccttaagaaggaaaattgagcaagtatttaattggttggacattgcataaaagaggtccatatccaggctaactctaaaaaattttaattctcaaacttagttggcctcttttcttctgtcagaggaccattcttagtggcactggggaaatcttggcacccagaagaattcaactgcgctcactgcaaaaatacaatggcctacattggatttgtagaggagaaaggagccctgtattgtgagctgtgctatgagaaattctttgcccctgaatgtggttcgatgccaaaggaagatcctggnaagaagtcatcaatg

SEQ ID NO: 12152 - DNA, 372 bp, Homo sapiens
ccgggcaggtaccaacacttccagtgcttgatggtgaccatgataggcctagaaataaataaaaatgtaaatttaaaacatacatatttagactgacttcctaaatacttgaataaatgtaaataagcaaacttgacttcatattattatcctacttgagataatccaaacttctacatcgagaattcaggaagttaactacagatctttctaataatcaacatactacgctactgagttagggaacaggcattctaaaaataatacaagttcaaatgacaggtcatcttttcatgagtatacaatgcttggctcacggcagacattcaatggatgtgtgacacggattcatttaaagtcttgatttcaagt

SEQ ID NO: 12153 - DNA, 382 bp, Homo sapiens
ccgggcaggtaccctgcacacactaggttctcaagaaatattcatgtaataagtgaataattgaatgaatgaatgactaagtgaaacttctctttacaacaagcaaatgtaatagccctttctaagctctcatcatcctcattgtccttggggggattcccaccacactcagaattccttttcacctttccatgcatatgaggccccacctaatcaggtgctggtcttcttagctttctgtctcctaccactttttgtcttgcttcgggaactccactgtcttttctgttataggaacatgctaaggttattcttcatagtcaagagcacaagctttgaacccagccaaatctgttcttgaactcaagttccacttattgct

SEQ ID NO: 12154 - DNA, 410 bp, Homo sapiens
ccgggcaggtacgcggggcttgaaggaatcccttaagtgcacgtctcccgttttcttttcacatcaatgcagagtccctctgtgaatttacaacacccaacacccatgagttcagtccttaagaaggaaaattgagcaagtatttaattgggtgggacattgcataaaagaggtccatatccaggctaactctagaaattttattctcaaacttagttggcctctttttcttctgtcagaggaccattcttagtggcactggggaaatcttggcacccagaagaattcaactgcgctcactgcaaaaatacaatggcctacattggatttgtagaggagaaaggagccctgtattgtgagctgtgctatgagaaattctttgcccctgaatgtggtcgatgccaaaggga

SEQ ID NO: 12155 - DNA, 378 bp, Homo sapiens
aggtacttcactgatttttctactgcatctttaccacctgaactctacattattcctccacatgtctgtcccgtctgctccaagactgcagaggacagtcttgagcatcatcttactcacattttactcagaaatttcttattgagtcctgctaaatacatgctaggcattagggtttaaaaacaattaaaataaagcatgtcagggatggcttttctagaaaacatgcccaagcagagacttaaatattgagactagccagattaaaaggggtagagggcaggaaagggtgacggcatgccacgcagcagcaagagcgggagcgaggcctgaaagagtgaaagtatttgcctacaataggaggatgagtgagtaggg

SEQ ID NO: 12156 - DNA, 374 bp, Homo sapiens
aggtacgcggggagctcaataaaacatcaccaaattcccttaggcagaaaaagggtggggagtgtcctttcttgaaggaatcccttaagtgcacgtctcccgttttcttttcacatcaatgcagagtccctctgtgaatttacaacacccaacacccatgagttcagtccttaagaaggaaaattgagcaagtatttaattggttggacattgcataaaagaggtccatatccaggctaactctagaaattttattctcaaacttagttggcctctttttcttctgtcagaggaccattcttagtggcactggggaaatcttggcacccagaagaattcaactgcgctcactgcaaaaatacaatggcctacat

SEQ ID NO: 12157 - DNA, 385 bp, Homo sapiens
aggtaccaggagggtattgatgtttgaggtccaaactgaaaacccatcacctccttcccactgctatagcagcgttagccctggggttcattatctagccagttcacaccttctaaagtggggctctgaaaatgtcttacttccctcacagacaaagcaattctaaagcctcctgagatcacccaccaaccagagcaactgctgtcacttggaggtgcagctgaattcttctaattgtgacacaaactcttgaaactgtaaatgctgaaagattaaatgaggttataacactcagaaggttttacaagtaaaagtaagtcaaatcaataggtctttatttcatatctgtaatggtttagctctgcgggaaagtgttagcagcttt

SEQ ID NO: 12158 - DNA, 413 bp, Homo sapiens
aggtacaagttcagagacattcagttgcaaagacatttaagcatattccctctgcttatgggaacttttctaaaaggtttgtaagaggaaacggcactgcggagggacaggagtggaaatgtatctgtctggttccctcctgactcttgcttcccattgggtcaaattttattccacagagatctaatgcttctatacatttggcaacttggtagctactcaagaagccatttcccaagccctgttttgtggcatttcatctaagaccagaagtggaggggagattcagcaggtcagactaccaaccaagagagaaggaggcagctgagggaatgtagaaagcatacaaaaaaaaaaaacaaaaaaaacaaaaaaaagacaaaaaaaaaaccttacatacaataccacacagt

SEQ ID NO: 12159 - DNA, 380 bp, Homo sapiens
ccgggcaggtacttccaaaccctcctgttctttcctttttgttttccccaattttaacataaggcaaaagcagtaattgagcaattctatcacctggattggcactccggggaacagtggagctgatcactaactgaattccccctttataatctgaataaattaccccagtatgaatttggactcccttcaaatttagacttgatctccctcaaaggcctaccctcccttctggcagcgggccatatacccctctaggaatcttttgtgggggctttccagggagtaaaaagaccatttgggtggaacataaatctactgcggtgctgcctgctgtggcgcgagacagctgttggattgttgtaattggctgactccct

SEQ ID NO: 12160 - DNA, 531 bp, Homo sapiens
aggtacttttttttttttttttttttttgcagatcctttcctttttgtatttctagtctccctatcaaatttcagcctgccttaagtaaatggaagtttccttcagttgtgaactatctccaaagtttgtttgcctgggattcttctttaaaaactggattattaggtcattgacatttgacaaaagtgaaatcttcccctgaaaagtgattcaaagaaattagccaaattagcttattttgacattccctttaattggtgatagccttaagaagagttcttttatcctcgcgctctggtgattagttgaaatgttaccattaaccactattattgggaaggtggggcctccttaactggtttacctcccccacttttgtccaagaatagaagcggaaagttttttcttttagaagaaagggtccaatatcgcccgttaattctcaaaaagttcatggccccagtgaaattcaattgggcgagaacccttgggaaacattggaaattccttgggtccttgccaaaaaacag

SEQ ID NO: 12161 - DNA, 396 bp, Homo sapiens
aggtacgcggggagggtggaagaaagtcagagctcagcccaggctgccttttccctgcagcgagcctcagccctctccccagcacgcccagctctctcatcatggattattcttcagctcattgcttaagtcgtcctgtgacacctccgggaacggacgctgttcttccttttcagtggtcagcaagtccatctgggcagcgcagagggaccaaaggtgtccatcgttggcctggacgattctggcttcctccaggttcaccaggagggcggcgagggttgtgaactgtgcacccggacggcaactccttcgacatgctgagaaacctcatcctccccaaacggcggtaatgcggggcgtccccgagacgcggctgcctggtccgtgcccatgcat

SEQ ID NO: 12162 - DNA, 486 bp, Homo sapiens
  misc_feature 261, 272: n = A,T,C or G
aggtactggagggtagactgctataacaacttttggttttggatgggaataaacagaaaaagtctcatctccagttcatttctggggagggtcaggaggtggggggtgcttggctctactcccttcgtatgattttcccttctttatcttccagatctttcccctttttaccggagagacattggatgattaatgaaggctgcttgagtgggacgcgggcttattggggcccagtttttgaaagaggccctcatacccttntttggccaccnatttccattgtgcccagaaccttttgtcaatattgacctggcacccttaacttaccaagggaaagacttggggaaaatgttagttcaaagtttgccattgtctcggggtaggaaaaaggggacaccttttttcttgtgggaattagccttagcattgttttgttaaaccttcaattttttattaacaccctttttttgaaacctttttcccttt

SEQ ID NO: 12163 - DNA, 442 bp, Homo sapiens
ccgggcaggtacagctctctttgaactttactgcccaggtgaacgttctctgcatttagatcttcaggagttttacagactagtgtggagtggacatgtaaggacaagaggaagaggcaggtttcagctgagctcttctcctccttagagcaggacagtgttgggatgggctgattgtgagtatggagttctttctggaggagctccagcaggagctgggcaaatactgggagctttgactaaggggcatgcattgcagatgaggtttgaccagaggttttccaggatccctgaagaactctgcacttctaagcctgtaaggccacaacaggtgagatgaagggggagttgaacttccagctccttgtgtgtccccttaggtttcccttttgggtccccacaaaggctttttgagcccaatctgaaggtctaaagctatggg

SEQ ID NO: 12164 - DNA, 441 bp, Homo sapiens
aggtacgccaggcactgttcccacactgaacaatggatgaactcattgaattctcatagcaactaacaatgctatgaggtggatgtcattattatctccatttacaaaggaaactacagcacagagaggttaagtaacttgcccaagatcacagagctagtaaatggcagagctgggacggaggtagtcagctgccactctatgctctgaccactgtgttcagcagtcttccctcaagacactagcaggtcatctaagccagaaacctgggagccagcctcaacttctccctcttcgctccctgtcagtccattatcaattcccagcaattttattacctcaaatgtcccttcaatgcaaaccaactctaccactaactgctttagtacctgcccgggcggcccgctctaaaactagtggattcccccggctgcaagaatt

SEQ ID NO: 12165 - DNA, 438 bp, Homo sapiens
aggtacttttttttttttttttttttttttcctatgggtttaatgcttagctatctcaaattccgtatgggccaggagtccctgaaacatatacaaattaggtcccctttgtgaccaacgtgctgttaggcagctaatctatttatcatctatttaatgttcatctagatcaatcagtcttctcaatcttgacatgcattttgggctgcataattctttgttggtggggactgtcctattccctatagaattaacccctggattctacttatgtcagcagcactccctccaattgtgacaactacaatgtctttaaacattgccagaagtcccctgtggggcaaaactgtttgaaaaccgttaactgtagattcaggcaggcccacccctacccctattcaaaatttttgggaaaaggagggtttgggggattccggg

SEQ ID NO: 12166 - DNA, 438 bp, Homo sapiens
aggtaccatgttcaggaaaccaaggacaatattgctctactgttggaaacagagtaatcaaattttctgtgctagccttaattcctgccctctttaagaggagcttaataaaatgtaaatatgcagaatgtttacttttggattgtctcatggtgtccctggaatgctccgagtgcacaagcttaccgcaaggccgaccacacgttctcgggagttcctggacagaccgttcttcacaacgaccacgctcaggtgtaacttcacctgggttcgaggaaaccgtgttgggtgcaaaaaatgtagggaaccttccttgtacaccaacccgaggcttttcccctttccggtggagacgagggaatgagaaacgaaatttggacaaatcctcaaagtttaagagttaacaaaagggggtccaagggtccatctcaacgagga

SEQ ID NO: 12167 - DNA, 430 bp, Homo sapiens
ccgggcaggtactacaataatcctcaagatactgaaagtaatgccaagtgaaagaccaagggggtgggtggagggctaatgggctggacgaaatagccacttgattgctagttcatacaagatgtggcagcaactccttttctggctggagatcttggatgtcacatcttagaatcaggtggcaaagcatctgtgaagggcaatgtggcatcccagacagtgggtggtgagatcaggaagaaaaaatggaaatcaacagatggtggatcctacagctgagaactgattcttcaatttgacatggttggcataaacattttaaatggagcttggtaaagatcaggttattttaccattgaccaagctcttggcttctaaaaggtcctaaatttttgtttcctttgctttcacgagtgtttatttgctttcc

SEQ ID NO: 12168 - DNA, 448 bp, Homo sapiens
aggtactgaggctgtatacagccacagcctctccccatccctccagccttatctgtcatcaccatcaacccctcccatgcacctaaacaaaatctaacttgtaattccttgaacatgtcaggcatacattattccttctgcctgagaagctcttccttgtctcttaaatctagaatgatgtaaagttttgaataagttgactaccttacttcattgcaaagaagggacacatttgagattcatcatcacatgagacagcaaaaatgctaaaagtgtaatttgattataagaagtttagataaatatatgaaaatgcaagagccacaaaagggaatgtttaatggggcaccgttttaaaccctgggaatgttgaagcaaccggcagggaaccctattagtatctttatattaatatacttcaattactcttatctctatcacaatatcg

SEQ ID NO: 12169 - DNA, 288 bp, Homo sapiens
ccgggcaggtactccagcctggcaaacagaataagattctatcgccaaaaaaataaataagtaaaataatgttccaactaagtaaataccaatagttttaagttatcccctttcttgtgctttgatcactctccaggttaatgtcagcaaaaagggtggccgctctggtttcagaatccagaggatcagtcacaggcctaagcgcctgtccctggtccctccacggtctctcctgctggggacacgacgggctgtgaagagggtaaaaataatacacgcactgtacct

SEQ ID NO: 12170 - DNA, 436 bp, Homo sapiens
aggtaccaaatacattgacagtggatgctttcacggctcagccaacacagttcagaggaatcttttcggcttccagggcattgcttgttaccttttgtcaggatcaacccaaatcctcagggatgctgtttttccacactgtaagtcctaactcattagtgggtcatgaaatcaacttaacagctcaagaccagtatattttaaacgtgaaatacattaaaaaatagaggaacaatagagcatataaaatggttaagtattggttcctgaaatactgtttcagctaaatattctatttactgtgtatactgggtcacaatataaagtgtttcctgttatgaaatgcaatttaaaaaaagaaagcttgaaagactgctgcaggaagcaccggccatccagtgattgttggaagagtctggattgtgtggagcctgac

SEQ ID NO: 12171 - DNA, 448 bp, Homo sapiens
ccgggcaggtactgtttactaaattatagcactgcaataagacatttcaccaatatgatattgaagcataacaagttatttcataaggaatggtaattatctaacattctaagcaaatttggcagtgtgacttggtggggcgcagtgctgtccctgacacaatgacagccttactctctaaattagtaacttccgtaggagaccccagaagcacacctccctcccagcagtgaaagccgaggattcccgttttgattagcaggcgccttttgttcacaataaagggataaaattcaggcaatgattgccaccgggattcaatgcttaattaaaggcaagcatttgcaaacttattcaaaggaaagaaattccccattgaccgcacatttttgggccatggagaaacatttttaaaatcagcccttccatgggaggaaggacttaagag

SEQ ID NO: 12172 - DNA, 433 bp, Homo sapiens
aggtactgggagaaattacatcctgggaagaagccacacattccagaaatggtggcttcactctttgagtccttaactgctgtaaacatgccattagcctacagcaaatgttattaatattacttgcaatggtgctattttatgtttgtctcaaagaagggattatctccatcctcaattcatactctcttaagaagatcgttacttttctcttaaggtgtcatggagaaactccagctgggcccagagattctgcagcgggaaaatccaaggcttatttatgccaggctgagtggatttggccagtcaggaagcttctgccggttagctggccacgatatcaactatttggctttgtcaggtgttctctcaaaaattggcagaagtggtgagaatccgtatgccccgctgaatctcctggctgactttgctg

SEQ ID NO: 12173 - DNA, 439 bp, Homo sapiens
aggtacgaaaaaatcaggctactaagcccactgttaatatagacgcagaccaattgttaggaacaggtccaaattggagcaccattaaccaacaatcagtgatgcagaatgaggctattgaacaagtaagggctatttgcctcagggcctggggaaaaattcaggacccaggaacagctttccctattaattcaattagacaaggctctaaagagccatatcctgactttgtggcaagattacaagatgctgctcaaaagtctattacagatgacaatgcccgaaaagttattgtagaattaatggcctatgaaaatgcaaatccagaatgtcagtcggccataaagccattaaaaggaaaagttccagcaggagttgatgtaattacagaatatgtgaaggcttgtgatgggattggaggaactatgcataaagcaat

SEQ ID NO: 12174 - DNA, 438 bp, Homo sapiens
ccgggcaggtacagaagatgaaatagagtcttacagagcttaggtgagctccccagggtcatatagctagtaataataattgcccacattgattgagtgtttagaatatctgcgactctgttctaaaccatcttaagacatttaatcttctaaggtagttattgacatcatcaccattttacaaataagaaaaccaagtcacaagatttaagagacttgcctacagtcacatagctagaaagtggaaaaccaggatttccacccacacagtctgactttagcaggcagacactgatccactgcactaaattgccttgtctggttccccaaagagctggaactgacacacttggactctgattccaagttcagttctctttcaagtgaccctgctcattagcagatactgcatccaaatgagaagaaatggtcatgtgg

SEQ ID NO: 12175 - DNA, 437 bp, Homo sapiens
ccgggcaggtaccccagtgaatgttcacacgtccagagctagcacaccatctgcagggttgagcagcgagcgctgggacccccaaggattcagaatggacacagaatgcaggtgcaggaggaagcccagcacccaaggcagagcctcagtgaacagcaaagaccctaaaactgacttgcatcccccaatagataactctggaccgatgacaaagtttattcagagtgctgctccaaaatccctgctcttcatggtgacctatgacgacggaagcacaagactgaataacgatgccaagaatgccatagaagcacttggaagtaaagaaatcaggaacatgaaattcaggtctagctgggtatttattgcagcaaaaggctcggaactcccttccgaaattcagagagaaaagatcaaccactctgatgcttagaact

SEQ ID NO: 12176 - DNA, 439 bp, Homo sapiens
aggtactaacacaagccaaacaaaaatttctgctcctgttgcctggtttggaaactgttgaaatgatggaggaatccagtggaccatattctgatggaacagaaaattcacaactaaatgtgaagataagtggcatggagagaaaatcaaatggaaaaagagattcatttttggcacaaacaaagaataaaaaagaaaatatgaaaccagcagccaaactgaaacttgaatcttcgtctttaaaagtaaagggtgaaattcttttggaagaggaaaagtctactgactttgtgtttatacctccagaaggaaaagatgcaaaggaaagaatattaactgatcatcaaaaagaagttctcaaaacaaagcggtgtgatattcctgccatgtataataatctggatgtttcccaagataccttatttactcagtatagtcg

SEQ ID NO: 12177 - DNA, 430 bp, Homo sapiens
ccgggcaggtacgcggggtccgcttccttccagtaaggagtcggggtcttccccagttttctcagccaggcggcggcggcgactggcaatgtttggcctcaaaagaaacgcggtaatcggactcaaccccgccaagggtgggttggaaaccgaaacgagtcagtgttgaaacgtgtctcatcctattcctgaagccagaatattctggccatgagtcattgtttccgcccatcttgattcttttggaaatggcagctcttgttcaaagaccggaaagggtgggatgtcaatttcaagtggggtcaacctgagttctgtaaatcccagtagcgattttcccgccgcgggtgggcaggcgaatcttgcgctggtttagacaaaggaagccgagaggacctgcctgcttttcttttttaggcatgcttcggag

SEQ ID NO: 12178 - DNA, 438 bp, Homo sapiens
aggtacgcgggggaaataaggaatgaacgttatgtaaagaccataatgctagtcagagaatgttccaatggaaaactgatgtttccttctgccaccaggacaaaacttttgtgatctaaaggcaaaacaataacaaaaacagcaacagcaacaaaaaccagcctaacagtcccaagtggtcttcactgtcatgattattaagcattttctccaaagtctgaactacagtttgttgaggtttcattgaaaatgatactaaaacaaatttgcttaaaagtaaaatggagttattggcatcacaaagatcatagtcaccttcttaagaattgcataacctttaatgactgtaaaggatttttaaagacgatccttgcgactagttattaatacatttttttgaggctgtggaaatcagataatttgggccgggcacattgg

SEQ ID NO: 12179 - DNA, 181 bp, Homo sapiens
aggtacatggcagacatttaagtttccggccccagcatctttcttatatcagacctggaattgaatgatggtgcccagcagctggggaactagggtgcccagaccctcattttctccaaccccacttcttcctggatcaccaaaatgcttggtttggattgttaaagtttaggagaggcca

SEQ ID NO: 12180 - DNA, 432 bp, Homo sapiens
aggtacagagcaagcagttcagtccttcactccgatatgaaaggggtgatgtcaacctatccaggaaatattgaattgattttaaaactgctgtaagggtgaataaatcggtggtgctgtgcattagcatgagactgcctgcacccacccatgtctccccgtttatttgtcttaatgctaggattattagaaaccagctgaataggtgcccttcaaaatacagatcgagggatcagagaatgttgattttttttaagcctaaattttgtaacttggcattatcctagacatatttagctccctatttgcgtattttctttccaattctagtattcggttcatttatgaaaactggggaccgtgcttttccatcatctcttttgctcctctctcttcccatctccctctgacaagttttctgaagcatgtttg

SEQ ID NO: 12181 - DNA, 438 bp, Homo sapiens
aggtacctcctgctctagttttttggacttggcagtgctccactctactgctaggtcaaaagaacagccagagaaaccccacattcaggctaagttgcaaatggaaaggagctccctgctttcatcattaaaaagcactctgttcatcttaatgcagcccaatggagttgctttagtagcagtggctctccgggcctgtgtgttctcatagttaaaaaaataaaataaaaagcagatgggccggccagccagcctgcagactgtcagcgatgcagctttctgagaagtcagggtggggcaggggagaagggaagaacacaggcacacacacagagacagagaaggatgcacgcgaatgcacatgaacacacgtgcacacacacaccataacgagcatgcctgggcagttacatgtgccagaacacactggtatttatc

SEQ ID NO: 12182 - DNA, 433 bp, Homo sapiens
  misc_feature 433: n = A,T,C or G
ccgggcaggtaccgagttgtagaggtagaagggattcagagatcctgttttccgtcagggtggttgggtgaggctcccagacacagggctgaagtctgaaccttcatcctttcactcccagcccaatgatgtgccactgtgtcatagccacatggtggttatgaatgcatctggaactctacattttaatctgccaggcatccacccattcgttcacataattcacgtgtgtgtaatagtaaccttcagaaaggaatgtcacaatatttttctcattacaacatctttaggctttaagatgaaaagggtgaagaaagaaatcttctctaaatcttgtattcccgctattcatttttttattcaaggaaaaacaaagcctctgttaaagctctgcttacaatgaaatgtaactgaagttctatccaattctttn

SEQ ID NO: 12183 - DNA, 431 bp, Homo sapiens
aggtacgaaaaaatcaggctactaagcccactgttaatatagacgcagaccaattgttaggaacaggtccaaattggagcaccattaaccaacaatcagtgatgcagaatgaggctattgaacaagtaagggctatttgcctcagggcctggggaaaaattcgggacccaggaacagctttccctattaattcaattagacaaggctctaaagagccatatcctgactttgtggcaagattacaggatgctgctcaaaagtctattacagatgacaatgcccgaaaagttattgtagaattaatggcctatgaaaatgcaaatccagaatgtcagtcggccataaagccattaaaaggaaaagttccagcaggagttgatgtaattgcagaatatgtgaaggcttgtgatgggattggaggagctatgcat

SEQ ID NO: 12184 - DNA, 432 bp, Homo sapiens
ccgggcaggtacgcggggaaaaaagggtggggagtgccctttcttgaaggaatcccttaagtgcacgtctcccgttttcttttcacatcaatgcagagtccctctgtgaatttacaacacccaacacccatgagttcagtccttaagaaggaaaattgagcaagtatttaattggttggacattgcataaaagaggtccatatccaggctaactctagaaattttattctcaaacttagttggcctctttttcttctgtcagaggaccattcttagtggcactggggaaatcttggcacccagaagaattcaactgcgctcactgcaaaaatacaatggcctacattggatttgtagaggagaaaggagccctgtattgtgagctgtgctatgagaaattctttgcccctgaatgtggtcgatgccaaagga

SEQ ID NO: 12185 - DNA, 433 bp, Homo sapiens
aggtactacaataatcctcaagatactgaaagtaatgccaagtgaaagaccaagggggtgggtggagggctaatgggctggacgaaatagccacttgattgctagttcatacaagatgtggcagcaactccttttctggctggagatcttggatgtcacatcttagaatcaggtggcaaagcatctgtgaagggcaatgtggcatcccagacagtgggtggtgagatcaggaagaaaaaatggaaatcaacagatggtggatcctacagctgagaactgattcttcaatttgacatggttggcataaacattttaaatggagcttggtaaagatcaggttattttaccattgaccaagctcttggcttctaaaaggtcctaaatttttgtttcctttgctttcacgagtgtttatttgctttccaggaacttt

SEQ ID NO: 12186 - DNA, 434 bp, Homo sapiens
aggtactatagattatttgtcttgaagaagagctttgatatgtttcaaaattcgacgttggctttggaaggaaactgtaaatttacagatctttgtccttccccacaaagagccttaatctcacaggttggattatgtggaactcactgctatttttcagttctcctttaagtgactaaggaacatccagatacttccaaaaaaaaaaaaaagtctaagtttttcactttgtccattgccatttaattatcttctgcatattttaaagcatttcctgtgaacataagtattgcccatccagaaaatttgcgtctacattgattttatgtttaatgaaacctgttcttctcaagttctttatttaatcacataacatagtatcttcaaaggtgagataaaaaaatcactggagaaatgttaaaacttcatttatt

SEQ ID NO: 12187 - DNA, 424 bp, Homo sapiens
aggtaccttctgctgttccctgggtcttcaatgactcaatttcccaccagcagtatcctttaaagccatcctgcatcctgagacaagagattgacaattcattgataagtagtcttaattgtcactattacagggctgtaggtcctttgccagccatgcctttcagtcctaaatggtcttcaaggttgggctgtgttgtccaagagctgaggaccttacatttattgttccaatatttattggctataatgatttctgtggagcagtcagctgtcagaaaattttgtctcctttgtaggtaacctgtcattggtctttggatttttttatagtctccctttgtatctggtgtaatttagtttcaatctgttgtgcctacgtgtagacttcttgcttgaaaagttgttggatttcttgaatttgg

SEQ ID NO: 12188 - DNA, 430 bp, Homo sapiens
  misc_feature 430: n = A,T,C or G
aggtacgcggtacacacacacacagcacctgcacgcagatgcacacatctctagtcaaatgaggctctcagctttttgataggggctttttgatacgtgtataaccaatactttattctcactgtagtcaaggactcattgcaattcagaaatgagaagctgatccggaactccactacagctcaaagaaattctcgaatgttctcacctattaacagttattaaaatggaagaagctggggatgaaattgtgagcaatgccatctcctacgctctatacaaagccttcagcaccagtgagcaagacaaggataactggaatgggcagctgaagcttctgctggagtggaaccagctggacttagccaatgatgagattttcaccaatgaccgccgatgggagtctgctgaccttcaagaagtcatgttn

SEQ ID NO: 12189 - DNA, 491 bp, Homo sapiens
gagcggcttcgacccacctatagaagaccaggcgaatcgttgctgcgccggggcggcggccgaggacctggcatatactcaacatgtattttttcccctttctttacaatgttccttgccccgaacacttgaatagtggagagaggaatgtttgcttttcctctccattgaaccaacactcgcccatccactgagcccaagattcaccttaggattgtctgatggactcggctcttttgtgacctaacagtgcaggggccttgtgctgagctgcacatgctcgctctcgctggtgctccctctctctctctctctctgtctgcattatttatagtaaaccatattagaacagagtgttaaagaggaaggatgagtcattcccattgaaaccattgctgacataaataaaagcaaaatgcttactatgtgttgtgtgcagtatttaaagccaggttgtgctaaattctaatgctcccaaactggatctgtgg

SEQ ID NO: 12190 - DNA, 430 bp, Homo sapiens
aggtacacaattaccttaacttcaaataaagtgttcttttctccatactcttctattcccttaacaatccctgttctcaaaggcctttgtgttttattttctgctttataacaaaacaaaaaaacaaacacccaccgtcctatgacacaggtgttttgaatccatgtcaatttttgtagttagtatatgctggttaaaccacatagcatatcccccaaaaagccagaggcaagcaaaaacttaatttgatgcccttcaagtttcggaaggtcccatttctttttattaaccaaaagataagatgaagctcagcatggctatggctgtgattagataacttttgatattttcatttcccttaccgagctgctgcttctaggctgaactcattttattcacctgcccatttttaaagagagactgacaaagt

SEQ ID NO: 12191 - DNA, 429 bp, Homo sapiens
ccgggcaggtacgaaaaaatcaggctactaagcccactgctaatatagacgcagaccaattgttaggaacaggtccaaattggagcaccattaaccaacaatcagtgatgcagaatgaggctattgaacaagtaagggctatttgcctcagggcctgtggaaaaattcaggacccaggaacagctttccctattaattcaattagacaaggctctaaagagccatatcctgactttgtggcaagattacaagatgctgctcaaaagtctattacagatgacaatgcccgaaaagttattgtagaattaatggcctatgaaaatgcaaatccagaatgtcagtcggccataaagccattaaaagaaaaagttccagcaggagttgatgtaattacagaatatgtgaaggcttgtgatgggattggaggag

SEQ ID NO: 12192 - DNA, 305 bp, Homo sapiens
ccgggcaggtacgcgggagaaaaacaaaggggagattggggtggctgcagccgagggaaaccagaaagatctgcatggtgggaaggacctgatgaatacagaggtgaaaaataagaaaggctgctgactttaccatctgaggccacacatctgctgaaatggagataattaacatcactaggaaacaggcagatgacaatataatgtctaagtagtgacatgtttttgcacatttccagcccctttaaatatccacacacacaggaagcacaaaaggaagcacagagatccctgggagaaatgcc

SEQ ID NO: 12193 - DNA, 432 bp, Homo sapiens
aggtactatatgctagaaacttggctgaatgatttgacattatcctatttaatgttcatgacaatccaataacgtaaccactcatatctcccttttgtgcagataacaaactgaggcccagagaaatcaaatatgttgtcaaaatctacatcgttgaagagatgggtttcaaatccaggtcggcttggcccttgccacgacttcataatgaaattccatgggtgagtgttaccagtttctggtccatccttgcttatttcaagggtctcatcatcccatccactgtatcactttttttgttacaggctttactcttttctaccatggaaaagactaatgatatttttttctccataagcttggaaatattatcaatcaccataaaattcagccttcctctggtaactttggagacccttagagcttttctta

SEQ ID NO: 12194 - DNA, 425 bp, Homo sapiens
aggtacgcggggacatcaatgcagagtccctctgtgaatttacaacacccaacacccatgagttcagtccttaagaaggaaaattgagcaagtatttaattggttggacattgcataaaagaggcccatatccaggctaactctagaaattttattctcaaacttatgtggcctctttttcttctgtcagaggaccattcttagtggcactggggaaatcttggcacccagaagaattcaactgcgctcactgcagaaatacagtggcctacattggatttgtagaggagaaaggagccctgtgtcgtgagctgtgctatgagaaattcttggcccctgaatgtggtcgatgccaaaggaagatgcttggacaagtcatcaatgcgtcgaaacaaacttggcatgtctcctgctttgagtgcgta

SEQ ID NO: 12195 - DNA, 425 bp, Homo sapiens
aggtacgcgggacatcaatgcagagtccctctgtgaatttacaacacccaacacccatgagttcagtccttaagaaggaaaattgagcaagtatttaattggttggacattgcataaaagaggtccatatccaggctaactctagaaattttattctcaaacttagttggcctctttttttttctgtcagaggaccattcttagtggcactggggaaatcttggcacccagaagaattcaactgcgctcactgcagaaatacaatggcctacattggatttgtagaggagaaaggagccctgtattgtgagctgtgctatgagaaattctgtgcccctgaatgtggtcgatgccaaaggaagatccttggagaagtcatcaatgcgttgaaacaaacttggcatgactcctgcctagagtgtgta

SEQ ID NO: 12196 - DNA, 429 bp, Homo sapiens
ccgggcaggtacgaaaaaatcaggctactaagcccactgttaatatagacgcagaccaattgttaggaacaggtccaaattggagcaccattaaccaacaatcagtgatgcagaatgaggctattgaacaagtaagggctatttgcctcagggcctggggaaaaattcaggacccaggaacagctttccctattaattcaattagacaaggctctaaagagccatatcctgactttgtggcaagattacaagatgctgctcaaaagtctattacagatgacaatgcccgaaaagttattgtagaattaatggcctatgaaaatgcaaatccagaatgtcagtcggccataaagccattaaaaggaaaagttccagcaggagttgatgtaattacagaatatgtgaaggcttgtgatgggattggaggaa

SEQ ID NO: 12197 - DNA, 432 bp, Homo sapiens
  misc_feature 432: n = A,T,C or G
aggtaccttgctctaaaggaactaatgatatatgctactattattaaccaagataagattttcccattccagttggccaatattccattttaagtgatcagtccagattctagattatgacctttcctgtctctcaatcgtatgctcttttcaacatactacttgacttcctcttccgaaaaagagaacagatgtaaaatgctaaaataagaacaataaatgtattgaaacatattactctatcccatccattactgtgatgaaaaattacaaacgaaaaattatttgacctgagaaatgagaacacaaagaagatttgaattatatgagattaagaaagttaaagtaaaaaataatcaactagtccttccttattatatggtttcataatacaattatgaagggtcattcaatgatttaaatggcaggtan

SEQ ID NO: 12198 - DNA, 437 bp, Homo sapiens
aggtacgcggggacatcaatgcagagtccctctgtgaatttacaacacccaacacccatgagttcagtccttaagaaggaaaattgagcaagtatttaattggttggacattgcataaaagaggtccatatccaggctaactctagaaattttattctcaaacttagttggcctctttttcttctgtcagaggaccattcttagtggcactggggaaatcttggcacccagaagaattcaactgcgctcactgcaaaaatacaatggcctacattggatttgtagaggagaaaggacccctgtattgtgagctgtgctatgagaaaatctttgcccctgaatgtggtccaatgcccaaaggaagatccttggagaagtcatcaatgcgttgaaacaaacttggcatgtttcctgttttgcgggggtagcccgtggaa

SEQ ID NO: 12199 - DNA, 434 bp, Homo sapiens
ccgggcaggtactatactgaggtgacgtttccaccaccaaccatctgcttgggcccctcttaattctccaccggagactggggctgccttcctcagggatcccagctatctctcaacacctcgtcttcctccaagactggagtcttcgtggagttctgaggaattcactttccaagcaagaaggttttgggtcctcatgtcatcttcctccaagactggagtctttgtggagttctgaggaattcactttccaagcaagaaggttttgggtcctcatgtcatctttctccaagactggcatcatctcggaattctcaggaattcactttccaagcaagaaggttttgggtcctcatgtcatcttcctccaagactggcatcatctcggaattctgaggaattcactttccaagcaagaaggtcttgggtccttg

SEQ ID NO: 12200 - DNA, 361 bp, Homo sapiens
aggtacgcggggacacacacacacagcacctgcacgcagatgcacacatctctagtcaaatgaggctctcagctttttgataggggctttttgatacgtgtataaccaatactttattctcactgtagtcaaggactcattgcaattcagaaatgagaagctgatccggaactccactacagctcaaagaaattctcgaatgttctcacctattaacagttattaaaatggaagaagctggggatgaaattgtgagcaatgccatctcctacgctctatacaaagccttcagcaccagtgagcaagacaaggataactggaatgggcagctgaagcttctgctggagtggaaccagctgga

SEQ ID NO: 12201 - DNA, 361 bp, Homo sapiens
ccgggcaggtacgcgggcattttctaaatcaattatgacagtgttaacaatcaaccttttatttttctctactgaataacggcgtattaaatggtttgaagactttttcttcctctacctctctcctaaattcctcatttacaaaagaaaacccaaaacaaaacaaacaaccccaacaataccaattgtaactccccagaccagttagatcatagatccagatctcattgaaaattatccttttggctaggcatggtggctcatgcccgtaatcccagcactttgggagaccaaggtgggcagatggcttgagcccaagagtttgagactagcctgggctacctggtgacaccccgtgcct

SEQ ID NO: 12202 - DNA, 358 bp, Homo sapiens
ccgggcaggtacgcggggactcaagctcgggttcttctcctaggcggaagccagaccagagagcgtgcgtgtttttcccagggtgccccgcgctgctgttatggccgcctccttgaggtagtatccgcacatggaattctagggccgcaggtgtatttacggtaactgtcgccactagatttcagcgcctttggactctcctgttttcactttcttttgttgactcccgtgtggccctcgtgggagcctgttttggctgcagcggtgtctggggtgatgtggaccccggagctggcaattctgaggggattccccactgaggctgagcggcagcaatggaaacaggagggggtcgtcg

SEQ ID NO: 12203 - DNA, 360 bp, Homo sapiens
  misc_feature 360: n = A,T,C or G
ccgggcaggtacaagaaaggcgagaacccagtatcttatgctggaatgttaggaaccgaagatctcctaaaatttatccagctcaacaggatttcatatccagtgaatataacatcgatccaagaagcagaagaatatttaagtggggaattatataaagacctcatcttgtattctagtgtgtcagtattgggactatttagtccaaccatgaaaacagcaaaagaagattttagtgaagcaggaaactacctaaaaggatatgttatcactggaatttattctgaagaagatgttttgctactgtcaaccaaatatgctgcaagtcttccagccctgctgcttgccagacacacagan

SEQ ID NO: 12204 - DNA, 356 bp, Homo sapiens
ccgggcaggtactcgggaaactgaggtgggcaaatctgttgagtccaggagttcgagacaagcctgggcaacatagcaagaccatatcaaaaatataaataaataaataaaaaataaaagataaaagttgggtccacaaaaaattgctaaaacaaaaaataaaaggactggtccttaagtaagaaaagagattttcattgctacctatacaaattataagatataaggaaggaagtcaatatagttacatgtagatatagctctggagggactgagaagtttagggagatgcagcctgatgaatctttcatgtggttttagcaactttatctaaagaaggaaagataagtccaagt

SEQ ID NO: 12205 - DNA, 350 bp, Homo sapiens
  misc_feature 78: n = A,T,C or G
aggtacgcggggactgtagtcaaggactcattgcaattcagaaatgagaagctgatccgggactccactacggctcanagaaattctcgaatgttctcacctattaacagttattaaattggaagaaagctggggatgaattgggagcatgccatctcctacgctctatacaaagccttcagcaccagtgagcaagacagggataactggattgggcagctgaagcttctgctggagtggaaccagctggacttagccaatgatgagattttcaccaatgaccgccgatgggagtctgctgaccttcaagaagtcatgtttacggctctcataaaggacagacccaagtt

SEQ ID NO: 12206 - DNA, 361 bp, Homo sapiens
ccgggcaggtaccaaacacaattcctgctctcagggaaacatggataagacttaaacaagtgaaatgttaaatagccctgtgagacaggagggaatgcatatcaagcaagacagtgtggtcattgggttttgagggggaaaatgagggaaaggcctttgtgtgtgaggtagggtaaagtggatgaatttgaatcacattttgaaaggcattgcaggtgggatggatgagcagatgttcccaataggaacgcctgtagactgttcagaagaaattgcccaaatgagctagatgagaaggctgagggcagggctgcttttggctctgaggactatagatttatcctctaggtgatgaggggct

SEQ ID NO: 12207 - DNA, 484 bp, Homo sapiens
ccgggcaggtacagatctgggaactaaatattaaaaatgagtgtggctggatatatggagaatgttgggcccagaaggaaccgtacagatcagatattacaacagctttgttttgagggttagaaatatgaaatgatttggttatgaaaccgcacaagtttagggcagcagggccccagaaatccctgacccttctgcccccgtggtttatgctccttccccaggcttggcttgccctcatgtcatcaaccagtaattccatttttgttttgttggcatgtccttggtgaaggccattcaagaatttttcttcgtgctggttttaccatcttcattgggtaaatgcctcaactttgttgaactttcattatcaaattctgtaaatctccgtctcaaaataaaatattccacaaacaaggaatctggtttttcctggcccaatcctttaaagggaaacacaatcaatttccattttttctaaatg

SEQ ID NO: 12208 - DNA, 415 bp, Homo sapiens
ccgggcaggtaccagttgtaaaattaccaggaaccgccatgcctcaagatcgccctgttttctggcttcatcaatgactgcatgcagtgcaccaccctgtccactacgtgatgctgtaggattaagtctcacagtgggcggctgaggatacagcgccgcgtcctgtgttgctggtgaattagacgccatcgctgtgggttgctggtatggtgccgtgctatttggcacaggacacaccgcttgaggtctgtattgaacctctgaaggaggccgatactgaagctcggttggcagccggtattgataaactaccagcggttgggtcttattttctaccggctgatattgtggatactgtatctgagttggcattgccgggatagagactctgtccctttctacttgattttctctg

SEQ ID NO: 12209 - DNA, 472 bp, Homo sapiens
ccgggcaggtactgaggctgtatacagccacagcctctccccatccctccagccttatctgtcatcaccatcaacccctcccatgcacctaaacaaaatctaacttgtaattccttgaacatgtcaggcatacattattccttttgcctgagaagctctttcctttgtcttctttaaattctagaatgatgtaaaagctttgaataaagttgacttatcttactttcatgcaaaggaaggggacacataatgacgattcatcaatcacaatgtagacagccaaattaactaaaagttgtaattttgatttataagcaggtttagataaaatatatggaaaatgcaaggaggccacaagagggaaatggtttaatgggggccacgtattgttaaggccatggtgattgtgaagccaaaggccaggtgaaccctcattagtatccttaattataaatataactttcattttttc

SEQ ID NO: 12210 - DNA, 416 bp, Homo sapiens
aggtacgcggggagtcacagaggaagccatttccagagaggaacaaccgtgtagactgctttcctgggagtcaagttaaaacttctctcctgtgaccttgtcacccggcagtggaaagttacccttggctgcagccacgacttccgcatactcttcagaacttgctctgcccttgagttttccagctttcctttaatgcactaaacctttaatattgtattctcctaaatgagacgtctcgcatttgagcaagtaacactcggatcttccccatttcacggagagacatggatgagaatgaaggctgctgagtgggaggggcttatggggccagttttgaagaggcctcataccttttggccacattccattggccagaactttgtcatatgactgcacctaactacaaggaagag

SEQ ID NO: 12211 - DNA, 424 bp, Homo sapiens
  misc_feature 424: n = A,T,C or G
ccgggcaggtaccatgatcataatattgctcattccttaacaagtattatgattctgatgttagcacaatgtctgtaatatttcactgtgggtgtcctttcctttctctaataccttggcagctctgtagaaaaaaacctcatgctccctttacgttcgcttctgctttgattttcctactctaggtttatattcgaagcacagacgttgaccggactttgatgagtgctatgacaaacctggcagccctgtttcccccagaaggtgtcagcatctggaatcctatcctactctggcagcccatcccggtgcacacagttcctctttctgaagatcaggtcagtatactgggaaaacccacagatttcagatggacctagaatgaggaaggcaggctactcaacagttgtggatttgggagtcn

SEQ ID NO: 12212 - DNA, 575 bp, Homo sapiens
gggatatcgctcgtatgcgcgaaggggtacacgttaagttcgacgcccgggcaggtacaattttagaagaaaatctgaagatcgaaacattatagaaactgaaaatattgtcaagagtttcagatagaatatgaaaaacaagctaagacaagtattggagaagtatagaagaatgaaaaaatttaagcccaaaattgggataaaatagcacctgaaaaaatggggggaatttattgggtaaccaatttatatttaaaaaggccaataaatttaaattttctgggtgggggaagaaagttaaaaaggtgaaaggcttggaaaagaatgaaggggtgtgttaacctatgacaccaaaaaccccaattttagaaagaaaatacctttgaaaggcttagaaaggggggaaaggttgggtttaaaaaaaattcaccattcaaaaaaaggctttcttaaaaagggaactggggtggtaaaattttaaaaaaaaaaacctaaagggccaaaaaatgccttttttgggaaggaagttaaggaatgaaatttgggaaaagggcctttaaaattatttggttgcg

SEQ ID NO: 12213 - DNA, 489 bp, Homo sapiens
ccgggcagttacaaccaatctttagcttacttaggtttttctagtgcagtagttctaaaatatggtccctggatcattagtgttagcatcccctgggattttgtgttttaacaagttctctatatgattctgatgcacactaaagcttcagaaatactgctgtagttataaacctgggatgggttctcaggccttccccgcttgctggcttaagtgtttgcatttcttgggtctactaaagtcagtttagttcttttatcctgttgtccttttccaggttttccaaaaattttttggttgcatatctctattccttcttccagttttttccttcattatgtggtggaattttataatctttttttttaaaaaaaaatctctttttatttgttataaagaagggccagggtattggtgggctttaacgccctgttaattccccagcaacttttggggaaggccccaaggttggggccgggataaactttt

SEQ ID NO: 12214 - DNA, 573 bp, Homo sapiens
gagactgagacaccttagtatagcgcgaattggagtaccagggaagtggcggccgcccgggcaggtaccgttcctgagaccttcgtcaggcaatctcgtttgcccgctgtgtttttgacatgggggtgagtatacgtgaccctgttagggaagggcgggacacaactgacaataactagtcttaattctagagttaactttttatggcagttggttctgtaattaacatgggttttaagcctatctgcttgcatacattatttgttatatagcatgtgtgatactggcttgacattatttttacttggattcttagtgcatgtatgattggttttcaggcattgtaatcttgctttgaatattgggcggtaggctttttcctttgatccttaagggattgtgaaaaacttaaaatttttgaaagaagggtaatttttaaaaacaaaaaactggtaattatcctccattttacccccgtatttcaaaaaaaaattccctttttttggggaaatatttttcaaaaaatgttttaaaggtgtgtttattaaaccctaaatactcccacaatgtggg

SEQ ID NO: 12215 - DNA, 422 bp, Homo sapiens
aggtacatctctagatgatcacgaatgtcaaatatcacactacactgtgatatggggattccccttgggggttttcatgtgtatagggtgcctgcagctacactaaacatcttaaagctaccacaatgttcacttcatatttttgctttttataggctttcttggtcctcttctattgttcccatcattttcttgctttgaatctgtaagaatcgagttgaatcttctccattttaaattttccataggctgagaaactgtttagccaagtttggataaaattgtatccaaagtaagagtatacaagctatgggcaagtccaaaatcaagctgttcacaggaccatgttctctctaaaggttctaggagagaatccctcattttcttccagcttctgggtggctgctggcatttctgggccg

SEQ ID NO: 12216 - DNA, 426 bp, Homo sapiens
ccgggcaggtacttccaaaccctcctgttctttcctttttgttttccccaattttaacataaggcaaaagcagtaattgagcaattctatcacctggattggcactccggggaacagtggagctgatcactaactgaattccccctttataatcttaataaattacccccagtttgaatttggactcccttcaaatttagacttgatctccctcaaaggcctaccctcccttctggcagcgggccatatacccctctaggaatcttttgtgggggctttccagggagtaaaaagaccatttgggtggaacataaatctactgcggtgctgcctgctgtggcgcgggacaactgttggattggtgtaattggctgactccctgaagtggtggtattttctgtaggggttggttgtccttgaaaaccc

SEQ ID NO: 12217 - DNA, 511 bp, Homo sapiens
aggtacacactgccatttttgtattttaaaggaaaaatgactttcattcccaactgattatgacctttcaggatgtcgtcaagtgatgctttcagttgtaacacgtgacttggtgctgtccctgctggtctaagtagaactgtatgattcatatgggcctggttggttccggtccacttttgtgttttggtgatttaatctctggcattttctaccataaagttttttggtactggcttgaattttgctgccccctgacttattctttactttttacttttattcaatatccttggccaaaacttgaccaggaaatttacccttcccttaatggccaaaaggggggaatttatgggtgaaatatgtttgtttctttataagattctggttttttcatgaaagccacctaagtttggtatatttttaatttcccattaaaaagaagaaaaaaatttttctttaagttttgccttaaccaatccaattctcagtcaattggaaaaatttgtta

SEQ ID NO: 12218 - DNA, 437 bp, Homo sapiens
aggtactcctactcatatgcttcagttaattatatatgttgaacaggtaggaagcagtgctgtttttatttattttaatatgttattcatacatttgaagaattatgttctttctgtaggcagctgaattttttttttttgagacgaagtcttggtattgtcccccttgcttggatggcaatggcaatgacctcggctcactgcaacctttgcctcctgggttcaggcaattctcctgcctcagactcctgagtagctgggattacaggcgcctgccaccacgcccggataatttttgtatttttagtagagacagtgtttcacctatgttggctgggctggtctcgaactcctgccctcaggtgaaccgcctgccttagccttccaaagtgctgggattactggcgtgagccactgctgccagccggcagttgaat

SEQ ID NO: 12219 - DNA, 441 bp, Homo sapiens
gccgaggtacctcagttggaaatgcagaaatcacctgcctactgcattgatctcgctgggagctgcagaccggagctgttcctattcagccatcttgccagcaggtatttctttatagcaacacaagaacagcctaatacaatttccagtatcaacgggctggtacaaagtccccctaccccttcccagtgggatggagacagtggagtgtctaaactttcaacatcgtccagaagtaaagaggccactcgctccctcttccctccggtgtcaatggaggccatgtggagaacagtaatgagacactcctattctttccaactaggatgggatcagcagaggcctagtggggagccaaaactcctagtcccaccatgcagtaacaaggaggcccccatccctggtgccagtaaaggctgagtgggaacctagacttctacc

SEQ ID NO: 12220 - DNA, 523 bp, Homo sapiens
ccggccgggtccccgggaggctttgaggcagccagcccaggggcttctgctgagggggcaggcggagcttgaggaaaccgcagataagtttttttctctttgaaagatagagattaatacaactacttaaaaaatatagtcaaaaaggttactaaaaaattggcttaagcgttaaagttttttaaccgtcaattttaattagcttaaagatttttaatgagaaaaaataatgaagactcttagaagacgtagctatggagggaagggaaaaagaataaaaaaggttttccttaaaaaccatgaactggaggtttggagatagagagctttctttcattgggaggctaccaaaaaataaagcataatagaaaacaaaaaagagtggctctcagtgcctgtttcttagaaacctaggtggggattccccccggggcttgcaaggaaattttgaattatgcagagcctaaattcgataacccgttcgaaccttcaaagggggggggcccccgggaaccccaagctg

SEQ ID NO: 12221 - DNA, 427 bp, Homo sapiens
ccgggcaggtaccagttgtaaaattaccaggaaccgccatgcctcaagatcgccctgttttctggcttcatcaatgactgcatgcagtgcaccaccctgtccactacgtgatgctgtaggattaagtctcacagtgggcggctgaagatacaacgcccgcgtcctgtgttgctggtgaattagacgccatcgctgtgggttgctggtatggtgccgtgctatttggcacaggacacaccgcttgaggtctgtattgaacctctgaaggaggccgatactgaagctcggttggcagccggtattgataaactaccagcggttgggtcttattttctaccggctgatattgtggatactgtatctgagttggcattgccgggatagagactctgtccctttctacttgattttctcttggggtttgtgc

SEQ ID NO: 12222 - DNA, 425 bp, Homo sapiens
  misc_feature 425: n = A,T,C or G
ccgggcaggtaccaggagggtattgatgtttgaggtccaaactgaaaacccatcacctccttcccactgctatagcagcgttagccctggggttcattatctagccagttcacaccttctaaagtggggctctgaaaatgtcttacttccctcacagacaaagcaattctcgagcctcctgagatcacccaccaaccagagcaactgctgtcacttggaggtgcagctgaattcttctaattgtgacacaaactcttgaaactgtaaatgctgaaagattaaatgaggttataacactcagaaggttttacaagtaaaagtaagtcaaatcaataggtctttatttcatatctgtaatggtttagctctgcgggaagtgttagcagctatatgaattaggaagaatttagaagacaatccctaan

SEQ ID NO: 12223 - DNA, 431 bp, Homo sapiens
cggcccggccgggtccccggggccagaaaatgaaagtttcagatactgagaatagaaccactaagaagcagaaaagagaagatattctcgcgggggagaacaacggctgggaggggaggaagcatggccaaggcaaagaggtgggcattaataagaactgcttcttgctgccgccatatgaagaaggacgtgttcgcttccccttcctccatgattgtaagtttcctgagacctcgccagccatgctgaactagtgaacaggaaacctacagaataggagaaaatttttgcaatctactcatctgacaaaaggctaatatccagaatctacaaagaactcaaacaaatttacaagcacaaaacgaacaaccccatcaacaagtgggcgaaggacatgaacagacacttctcaaaagaagacatttatgcag

SEQ ID NO: 12224 - DNA, 427 bp, Homo sapiens
  misc_feature 427: n = A,T,C or G
agggaccccgggacataaatgcaaagtccttctgggaatttacaacccccaacacccatgagttcagtccttaagaaggaaaattgagtaagtatttaattggttggacattgcataaaagaggtccatatccaggctaactctagaaattttattctcaaacttagttggcctcttttttttctgtcagaggaccattcttagtggcactggggaaatcttggcacccagaagaattcaactgcgctcactgcaaaaatacaatggcctacattggatttgtagaggagaaaggagccctgtattgtgagctgtgctatgagaaattctttgcccctgaatgtggtcgatgccaaaggaagatccttggagaagtcatcaatgcgttgaaacaaacttggcatgtttcctgttttgtgtgtgtagn

SEQ ID NO: 12225 - DNA, 427 bp, Homo sapiens
gcccggccgggtccttcttggttatgaggactgaagttggattaaaatccttttcaatgaagatcagatgtcctgagtagaattcttactattgggtcctgaatcttacattaaatattctctcaaattccttgaggcatagcaacgtgagccaccgtgcccggcctgtcctctgtggttttctgggcttatgttaaaattataactcaatcaccagtctttataaatttgcttttttatatttaaaccaaacctaatgctaattgtgatatgttatttattctcacctgatttgaatcattggattcaattaaatgagtttaattatcattaaataattctaagagaaataatgtctattcggatggtgggaattttctttctacatgcagccccattctgaatgaaatcaaatcacgtgaagatc

SEQ ID NO: 12226 - DNA, 424 bp, Homo sapiens
aggtacgcgggtagtggaaacaaataactgtttcactcttgagtgttagcatggaagagattctggttgaaatcctagtcctgccactttctggttacagaaacttacattacttttcttttgatgtttcaaggaggtaggagttaaagaaaaatgaacaccagattactagaacattcttatagagttgcccaaagatggaatggacaccttccagagtggaggggagggagtaggattggacagtagtcctcaactgggagcacttcttccccctgaccccacacctgcctcccagggacgtttgacagttttggattgcacaaaactgaggggtgagagttgctgctatatctagtgagcagaagccagagatgcttccaaataccttacgaagcataggacagccctcacggaaagaatt

SEQ ID NO: 12227 - DNA, 483 bp, Homo sapiens
taagccgctatacactactatagggcaattgagctccccgcggggccggccgaggtccttggttttttcttgactgaaatttcttactgaattctctggctgatatttttcattgtgagttgcttatctcgatgtcctgctttgaaaagtatgtgtttagggaatgtttttatttgcatacttactatgtttgctatggaaaatttagaaagttatgttaagtaaaatgaagaaaataaaaaccatctgtactcatttgtattcactgtcactttttctcatgttctaattataaatgaccaaaatcaagattgctcaaaagggtaaatgatagccacagtattgctccctaaaatatgcataaagtagaaattcactgccttcccctcctgtccatgaccttgggcacagggaagttctggtgtcatagacatcccgttttgtgaggtagagctgtgcattaaacttgcacatgactggaac

SEQ ID NO: 12228 - DNA, 434 bp, Homo sapiens
aggtacaaaaaaatcaggctactaagcccactgttaatatagacgcagaccaattgttaggaacaggtccaaattggagcaccattaaccaacaatcagtgatgcagaatgaggctattgaacaagtaagggctatttgcctcagggcctggggaaaaaaattaaggacccaggaacagctttccctattaattcaattagacaaggctctaaagagccatatcctgactttgtggcaagattacaagatactgctcaaaagtctattacagatgacaatgcccgaaaagttattgtagaattaatggcctatgaaaatgcaaatccagaatgtcagtcggccataaagccattaaaaggaaaagttccagcaggagttgatgtaattacagaatatgtgaaggcttgtgatgggattggaggagctatgcata

SEQ ID NO: 12229 - DNA, 454 bp, Homo sapiens
aggtacttcccattgtaaatcacatttttagatagtccagtggccaaagcccccagacgaacaaaaacactcgtatcagccaagacatgccagaggcctagtgattgtttcccagtagctgagggcagaagccagacctctttcaataaggttgatctttcactgtattaacactgtatataaaggacttttataaaagcttgtagttatggtgtcattgtcatcatccagtttaatgccctcttttttccagtaagaaaagaaaggtctgggataatcatgttaattgatttgtttacatttttattttaattagtagcacaactgagagtgaaaatggaacccaaatagtccatctttagcataatacttttttttctcctctagtggagcttataccttgccaattattgaatcttgaactcctgacctcgtgatccacctgcctcagcct

SEQ ID NO: 12230 - DNA, 455 bp, Homo sapiens
aggtaccaggagggtattgatgtttgaggtccaaactgaaaacccatcacctccttcccactgctatagcagcgttagccctggggttcattatctagccagttcacaccttctaaagtggggctctgaaaatgtcttacttccctcacagaccaaagcaattctcaagcctcctgagatcacccaccaaccagagcaactgctgtcacttggaggtgcggctgaattcttctaattgtgacacaaactcttgaaactgtaaatgctgaaagattaaatgaggttataacactcagaaggttttacaagtaaaagtaagtcaaatcaataggtctttatttcatatctgtaatggtttagctctgcgggaagtgttagcagctatatgaatcaggaagaatttataagacaatccctaaacacatgaaatgtccaagtaagaagattacatattg

SEQ ID NO: 12231 - DNA, 450 bp, Homo sapiens
ccgggcaggtaccaaggcccaatcaccccaaacagtgacaggaacataatttcctgttgggaccagttctcggaattttgcaccaacatgatcccatagttccacatctaacgttcccttttcaggaaaccaaggacagtgttcttccactgccctgaatagggtgaccatattttccatgggaacccgaactcccccattttaacaggaatttaatatagcagagataagcataatgtttagactctgcgtgacccatagttaccccggacaatacacagacaactcaccaatcgtcggggagccgaacaagcattttctgtggactggaccgatgaacatttctccgcacccaccaaagggaatcgggttcccacatgcacttaggaaaaagaaaaccacgttgggcgccagatattgggggaacctgcccctaatatttcaacgtac

SEQ ID NO: 12232 - DNA, 444 bp, Homo sapiens
aggtacttgcccaatgtttacccttacgacaacgcaggcaaacagtagcaggagcatttggcagtgtttgttgagccggcttggccgcttttaagtttttaacagtgtagtttttttgggtatgaccaagttggccacaattatagcgggctccaagaaaagaatcagtcgagccagtttggttgccgtgcttcatggccggtgcccacagaatagctctgtgggtctccgatccaacgccttcacaagctttaatatatgcaggcaacacctcatgatcaggtaaattttgacgtaggatggaatgcacggccattttacactcatggttcgcattttgaaaagctaacatatgaagaagaataccttgagtgtgctcatcagagacagatttttcaacagcatcttggaatttatctaaaaaatcaagatataattcattgg

SEQ ID NO: 12233 - DNA, 393 bp, Homo sapiens
aggtacgcggggacacttcaggtgcccagtgtccacactgactagtggtgacggcgttggacagtgcagatacagaacatttctgtcatcacagaaagttcctttggacagagccatgttaagtgatgttatcacaagatggacagaaacattcctgtttgatttatttttcagacccagtttgtggagaaaaataatgatgctttacatatgtctcttgaatccttaatatgtgaatccagagataagtttatacgggaattatttgaatcatccacaaataacaacaaagatactaaacaaaaagcaggaaaacttagcttcatcagcgtgggaaacaagtttaagacacagttaaatttgcttctggataaacttcgaagtacctgcccg

SEQ ID NO: 12234 - DNA, 450 bp, Homo sapiens
ccgggcaggtacttgcccaatgtttacccttacgacaacgcaggcaaacagtagcaggagcatttggcagtgtttgttgagccggcttggccgcttttaagtttttaacagtgtagtttttttgggtatgaccaagttggccacaattatagcaggctccaagaaaagaatcagtcgagccagtttggttgccgtgcttcatggccggtgcccacagaatagctctgtgggtctccgatccaacgccttcacaagctttaatatatgcaggcaacacctcatgatcaggtaaattttgacgtaggatggaatgcacggccattttacactcatggttcgcattttgaaaagctaacatatgaagaagaataccttgagtgtgctcattagagacagatttttcaacagcatcttgttatttagctaaaaatcaaagatataattcattgt

SEQ ID NO: 12235 - DNA, 449 bp, Homo sapiens
ccgggcaggtaccgcctgcagagccataatccaaatatatcttttttctttgtaaattactgtctcaggtattcctttatataatgcaaaaatagcctaacataacacgcatctcaataattgccccattgtcacattgcaaaaatacctgtgaggttgttatagagatattggctttctgggttgttttgttttgagaggacaataacatttgattattaaaaaaaaatcctagcacaatgtggcttgtcattgtttattgttttctatacaagtcataaaccattattatatgtgctcatgttcctttatatagaaatcatataaaaaaaggattttgttttactctttaaaaagttttcatggctgggcgtgattggctcacttttgtaattccagcacattgggaggccgaggtgggcagaacatctgaggtcaggagttcaaga

SEQ ID NO: 12236 - DNA, 451 bp, Homo sapiens
ccgggcaggtacacagttaatagtagtattgtataagtctcatgacagtgtagctccctttcattgttttaaacatgtctgtcttacttgagatcttcctatttaaagtgaaaaaagaaatttttttaatttccaaggataaaagctggggtgataatttttaaaaaactgaccattatttttgcgtattattttcaggaaacgaaagccagcattgtaataaattccgttcatgaagataatttaggctttcaaatatggaagcaaagttctaactaataacctttaataaaaaatattcatggtagcacattaaaacatttgttttaggatatattattgaaaatggcttttaacttttcttgcctcactgggggaagaggaaaatggaagttgaaagcacattatcctgtaaaaacagctaagcattcaattgtttgtctgttttcca

SEQ ID NO: 12237 - DNA, 441 bp, Homo sapiens
ccgggcaggtaccagttgtaaaattaccaggaaccgccatgcctcaagatcgccctgttttctggcttcatcaatgactgcatgcagtgcaccaccctgtccactacgtgatgctgtaggattaagtctcacagtgggcggctgaggatacagcgccgcgtcctgtgttgctggtgaatagacgccatcgctgtgggttgctggtatggtgccgtgctatttggcacaggacacaccgcttgaggtctgtattgaacctctgaaggaggccgatactgaagctcggttggcagccggtattgataaactaccagcggttgggtcttattttctaccggctgatattgtggatactgtatctgagttggcattgccgggatagagactctgtccctttctacttgattttctcttggggtttgtgcttgtctaacctgcgtt

SEQ ID NO: 12238 - DNA, 437 bp, Homo sapiens
aggtacagaaagcccaaacattaacctagtgaaaataaccctcattttatttaaaagaaatagtcagaaaataaatcaaaaggaccagaaaataagggagaaaatggttaaagaagtaaacatttcatttgggaaagatttcaactgctataggatatcttaatgactttaaaagatttattcagaaatgaccatatgcttatgcacataattgcaatatttatcttcacagtcaacttacctataaaaggatacaaaaactgaagaacagagaggagcagataccctggaaagccgaaagttttattgaccaaagactggtaggtatctgttccagagagggcccctccttttatcaataaaacaagggaaaagtctgtggcaagaacatcaattaaatgtcagattacatgtaatacaaatatttttcatgtttt

SEQ ID NO: 12239 - DNA, 448 bp, Homo sapiens
aggtacatctacctaaaggactattatgtggaataatacatactaatgaagtattacatgatttaaagactacaataaaaccaaacatgcttataacattaagaaaaacaataaagatacatgattgaaaccaagttgaaaaatagcatatgccttggaggaaatgggcttcaaattactaatgatttagggttggccctaacttctctctctttttttctttcttttttttattatggttagctgtctaaaagcataaaaatggaataacatatcaaatgaaacaggggaaaatgaaagctgacaatttatggaagccagggcttgtcacagtctctactgttattatgcattacctgggaatttatataagcccttaataataatgccaatgaacatctcatgtgtgctcacaatgttctggcactattataagtgcttcaaggtt

SEQ ID NO: 12240 - DNA, 444 bp, Homo sapiens
aggtaccagttgtaaaattaccaggaaccgccatgcctcaagatcgccctgttttctggcttcatcaatgactgcatgcagtgcaccaccctgtccactacgtgatgctgtaggattaagtctcacagtgggcggctgaggatacagcgccgcgtcctgtgttgctggggaattagacgcccatcgctgtgggttgctggtatggtgccgtgctatttggcacaggacacaccgcttgaggactgtattgaacctctgaaggaggccgatactgaagctcggttggcagccggtattgataaactaccagcggttgggtcttattttctaccggctgatattgcggatactgtatctgagttggcattgccgggatagagactctgaccctttgtacttgattttctcttgaggtttgtgcttgtttaacctgggtttgaggtt

SEQ ID NO: 12241 - DNA, 436 bp, Homo sapiens
aggtacgcgggataccaaaacacaaagaaacaacaggaagtaagaacaaaactcaagaggtctgagtgacatcttgccttgcttcacaacttcagagtttgcattgctttaaaaacattggttataagtgagtgtggaaacagtgtgttcactatttttatgctgtggctgtgctgtgcaggagctgggcttttcgtgcattttagacagaattgaccttggttaatgcttgacttgggaactatgcagaaacatccaggaagtggtggtggctgatcctgaccgtcctcagttttgtgaagcaacagcccttgtgcccttttctctgaatgctctggtgacggtctagtcttggaagaaaacctgctgcttgcccgtctggtcctaaccctcctagcaacttttaaggcctgcatgctgtggtttcatggaactc

SEQ ID NO: 12242 - DNA, 492 bp, Homo sapiens
tgcatgttgccttacattcctatagggcgtttggatctccaccccggtggcggccgcccgggcaggtacagcccacagaactgtgagccaattctttcccttttctttttcaattacccactctcatgtatatctttatagcagcgtgagaacagattaatacactcctcctcacaaagcattcaatttagctgtgtctaaagtatgccaggtgttctagggttgtattctacccaataattctacctcttcagcaagatctatatgcctatgacagcttgacctacatttcctaccatacttgtcagtaacaagtagcccataacatctgaatggactccattgaaatcacagaggccctttagttctctactttattagcacgcattcgggaaacacatcaactttctaatttaataaggtgcctgttgctctgaaaaactgctcaaaagaagataggagaggcttacttaaagatatcactataggcat

SEQ ID NO: 12243 - DNA, 449 bp, Homo sapiens
ccgggcaggtacttccaaaccctcctgttctttcctttttgttttccccaattttaacataaggcaaaagcagtaattgagcaattctatcacctggattggcactccggggaacagtggagctgatcactaactgaattccccctttataatctgaataaattaccccaatattgaattgggactcccttcaaatttagacttgatctccctcaaaggcctaccctcccttctggcagcgggccatatacccctctaggaatcttttgtgggggctttccagggagtaaaaagaccatttgggtggaacataaatctactgcggtgctgcctgctgtggcgcgggacagctgttggattgttgtaattggctgactccctgaagtggtggtattttctgtagggttgttgtccttgaaaaccctgaggaacaaacagtttaactgggg

SEQ ID NO: 12244 - DNA, 453 bp, Homo sapiens
aggtacttgcccaatgtttacccttacgacaacgcaggcaaacagtagcaggagcatttggccgtgtttgttgagccggcttggccgcttttaagtttttaacagtgtagtttttttgggtatgaccaagttggccacaattatagcaggctccaagaaaagaatcagtcgagcccagtttggttgccgtgcttcatggccggtgcccacagaatagctctgtgggtctccgatccaacgccttcacaagctttaatatatgcaggcaacacctcatgatcaggtaaattttgacgtaggatggaatgcacggccattttacactcatggttcgcattttgaaaagctaacatatgaagaagaataccttgagtgtgctcatcagagacagatttttcaacagcatcttgtaatttagctaaaaaatcaagatataattcattgtgaccctgg

SEQ ID NO: 12245 - DNA, 446 bp, Homo sapiens
ccgggcaggtacgaaaaaatcaggctactaagcccactgttaatatagacgcagaccaattgttaggaacaggtccaaattggagcaccattaaccaacaatcagtgatgcagaatgaggctattgaacaagtaagggctatttgcctcagggcctggggaaaaatttaagacccaggaacagctttccctattaattcaattagacagggctctaaagagccatatcctgactttgtggcaagattacaagatgctgctcaaaagtctattacagatgacaatgcccgaaaagttattgtagaattaatggcctatgaaaatgcaaatccagaatgtcagtcggccataaagccattaaaaggaaaagttccagcaggagttgatgtaattacagaatatgtgaaggcttgtgatgggattggaggagctatgcataaggcaatg

SEQ ID NO: 12246 - DNA, 454 bp, Homo sapiens
ccgggcaggtacttccaaaccctcctgttctttcctttttgttttccccaattttaacataaggcaaaagcagtaattgagcaattctatcacctggattggcactccggggaacagtggagctgatcactaactgaattccccctttataatctgaataaattaccccaagatgaatttggactcccttcaaatttagacttgatctccctcaaaggcctaccctcccttctggcagcgggccatatacccctctaggaatcttttgtgggggctttccagggagtaaaaagaccatttgggtggaacataaatctactgcggtgctgcctgctgtggcgcgggacagctgttggattgttgtaattggctgactccctgaagtggtggtattttctgtagggtttgatggccttgaaagaccattggggaacactcagcttaaactggggac

SEQ ID NO: 12247 - DNA, 415 bp, Homo sapiens
ccgggcaggtacatctctagatgatcacgaatgtcaaatatcacactacactgtgatatggggattccccttgggggttttcatgtgtatagggtgcctgcagctacactaaacatcttaaagctaccacaatgttcacttcatatttttgctttttataggctttcttggtctcctcctatgttcccatcattttcttgctttgaatctgtaagaatcgagttgaatcttctccattttaaattttccataggctgagaaactgtttagccaagtttggataaaattgtatccaaagtaagagtatacaagctatgggcaagtccaaaatcaagctgttcacaggaccatgttctctctaaaggttctaggagagaatccctcatttccttccagcttctgggtggctgctggc

SEQ ID NO: 12248 - DNA, 418 bp, Homo sapiens
ccgggcaggtacatggggaaaaaatcagtttcaatagtcaagttagctttgggaatagaactgggttaaactgtgtttaaaaggtctctttaatgcagtaatcctaagtctttaacatgctaatacgcactgtggctttcaaggaaaggatctagtgttttccaaactctgttttcaaaattttgattacagcattcacctccctctttttttccccaatgtcctgtagaaaacactgagagaactgacatttttaactttatatggaaagaatcgtaaatatggtgaatctggatgtcctcatcaaccagcttcaaagactatcacccatgcaatcttgtttcatctgcatagccactcatttcccacacacacccacttgagttttttaagttatttcatgcaccatatcatccag

SEQ ID NO: 12249 - DNA, 440 bp, Homo sapiens
aggtacacacttgcatgagggatggggctggtttacaggaatggaaccagcttggaaagaagacagaaggtgagaagtgaatacttgttggtatcatgtaagaacagagtgaagaaaaaggacaggccggcccttggtttatttttaaatttcaggaaaatggattggccaaataatggggatcaaaaataaagggtgtttttattatgagccaagtgaaaattaaatttaagatatgtatgttgttatggtttgattgtgtcctccaaagttcatgtgttggaaactgaagcgccagtgcaacagtattgagaggtagaaactttaagaggtgatcagtgctgggtgcagtggctcacgcctgtaatcccagcactttgggaggccaaggcgggcagatcacctgaggtcgggagtttgagatcagcctgatcaacatg

SEQ ID NO: 12250 - DNA, 445 bp, Homo sapiens
aggtaccatgttcaggaaaccaaggacaatattgctctactgttggaaacagagtaatcaaattttctgtgctagccttaattcctgccctctttaagaggagcttaataaaatgtaaatatgcagaatgtttacttttggattgtctcatggtgtccctggaatgctccgagtgcacaagcttaccgcaaggccgaccacacgttctcgggagttcctggacagaccgttcttcacaacgaccacgctcaggtgtaacttcacctgggttcgaggagaccgtgttgggtgccaaagatgtaggggaacctgcctgatacaccacccgcaggctctccccttcccggtggagacgagggaatgagaaaagaaataaagacaaagacacaaagtttaagagttaacaaaagtgggttcaaggatccatcgcaacgtggagattgca

SEQ ID NO: 12251 - DNA, 442 bp, Homo sapiens
ccgggcaggtaccagttgtaaaattaccaggaaccgccatgcctcaagatcgccctgttttctggcttcatcaatgactgcatgcagtgcgccaccctgtccactacgtgatgctgtaggattaagtctcacagtgggcggctgaggatacagcgccgcgtcctgtgttgctggtgaattagacgccatcgctgtgggttgctggtatggtgccgtgctatttggcacaggacacaccgcttgaggtctgtattgaacctctgaaggaggccgatactgaagctcggttggcagccggtattgataaactaccagcggttgggtcttattttctaccggctgatattgtggatactgtatctgagttggcattgccgggatagagactctgtccctttctacttgattttctcttggggtttgtgcttgtctaacctacgtt

SEQ ID NO: 12252 - DNA, 437 bp, Homo sapiens
  misc_feature 437: n = A,T,C or G
ccgggcaggtaccagttgtaaaattaccaggaaccgccatgcctcaagatcgccctgttttctggcttcatcaatgactgcatgcagtgcaccaccctgtccactacgtgatgctgtaggattaagtctcacagtgggcggctgaggatacagcgccgcgtcctgtgttgctagtgaattagacgccatcgctgtgggttgctggtatggtgccgtgctatttggcacaggacacaccgcttgaggtctgtattgaacctctgaaggaggccgatactgaagctcggttggcagccggtattgataaactaccagcggttgggtcttattttctaccggctgatattgtggatactgtatctgagttggcattgccgggatagagactcttgtcctttctacttgattttctcttggggtttgtgcttgcctaaccn

SEQ ID NO: 12253 - DNA, 408 bp, Homo sapiens
  misc_feature 408: n = A,T,C or G
ccgggcaggtacgcgggtccttccaccatgggaggacacagcgtttgtctcttctgccatgtgaaggctgagcaacaaggtgctatcttgaaagcacaaactgggtcctcaggatatagtaaatcttttgaggtcttccagcccctaaaactggcaatgagggcttccattctggctcttcaccatgataaccttgggggcttcctggatttaaaacccaggaaagcaggggttgagaagggagagcctttgaccatggtctctagcagtttttcactctcctaaatgtccacgttcagcctccagcaagttgtcgaagtcaccagacaaggttttgctgtattgcctactacactggagtgcagtagtgccatcatagcttactgcaacctcgagcttccgggctcn

SEQ ID NO: 12254 - DNA, 412 bp, Homo sapiens
aggtacaccaccacaccccactaattttgatttttagtaaagacggggtttctccgtgttggtcaggctgtctccaacaccctaactcaggtgatctacctgcctcggcctcccaaagtgctgggattgcgagcgtgagccactgcacctgcccttgtttttaactcctcttactataattcccagtcacgcagtttgtttttgactgtgatttagcctccataggttggggtgaaacacggcactctgtctgcaaactggcagcagagttttttttgtttttgtttttgtttttttttttattcaggaaaatcccttagttgctgctgggattgaagacctgtatcttacttattaggacctattttgatttttagagaagtaggcacaatatattgcaaatgactagggg

SEQ ID NO: 12255 - DNA, 411 bp, Homo sapiens
  misc_feature 156, 157: n = A,T,C or G
aggtacatctctagatgatcacgaatgtcaaatatcacactacactgtgatatggggattccccttgggggttttcatgtgtatagggtgcctgcagctacactaaacatcttaaagctaccacaatgttcacttcatatttttgcttttttatannggctttcttggtctcctcctatgttcccatcaattttcttgcttttgaatctgtaagaatcgagttgaatcttctccattttaaattttccataggctgagaaactgtttagccaagtttggataaaattgtatccaaagtaagagtatacaagctatgggcaagtccaaaatcaagctgttaacaggaccatgttctttttaaaggttttaggaaagaatccctcatttccttcaccttttggggggttgctg

SEQ ID NO: 12256 - DNA, 428 bp, Homo sapiens
  misc_feature 428: n = A,T,C or G
aggtacctttcattggattgtccatggtgcatcgctttagcaagcggcgtgactctccactgcccgtcatcttggccaatatctatctgctggttcctcctgtgctcaacccaattgtctaaggagtgaagacaaaggagattcgacagcgcatccttcgacttttccatgtggccacacacgcttcagagccctaggtgtcagtgatcaaacttcttttccattcagagtcctctgattcagattttaatgttaacattttggaagacagtattcagaaaaaaaatttccttaataaaaatacaactcagatccttcaaatatgaaactggttggggaatctccattttttcaatattattttcttctttggtttcttgctacatataattattaataccctgactaggttgtggttggagggttan

SEQ ID NO: 12257 - DNA, 431 bp, Homo sapiens
ccgggcaggtaccgactcctcagaaactggcatgccaaatcaaaatgggtctggttcaatcctccttaatggcaatgtaaacccctctaactaatcccacttctcctaattatctttttctccttacgaacctaaaaatctcaccatttctattagcctgaaaataacatccctctgttcttctcttcctccttcagcactggatctcacttacaataggttttatttaataattatcttccttacactttctgtctcaccagtttccccttaaactgatttacctgctacacaaaattattcttattgggcttatgtgccttttcctccacttattcgacctctcacctggatggatgctcctgcagaaatctatactaacgatagtgtgtggatgcctggaactacagatgaccgttgccccgctcagc

SEQ ID NO: 12258 - DNA, 411 bp, Homo sapiens
  misc_feature 258, 386: n = A,T,C or G
aggtacttgatctatatttagacttcgtaaaatttataggtgaaaaagtagattcataccctaactgttccaaacatacttgaaagttttcaaaaaactaaattatcagcttttaagtttaactggattaaacttaataaatggattaaatagtaaaatgaaaaatgcagtttctcgatgatactagtcacatttcaagtgttcatgtgcacagtgtgcctggtggctacctcagtggacagttttagcaatgggggngagggtctctccaatagctccttgccttttgtgacacctgcagaaagcagggccaaaggaatttggctttgctagttaaaccagcctcacttttttgtgctagaagtttgtggggaaagagagtgacnaggtgattcagcacagtctccccat

SEQ ID NO: 12259 - DNA, 413 bp, Homo sapiens
aggtacgcggggattctcaatcctacccatgatgcagacagattacctcatttcagctcaataaaacatcaccaaattcccttaggcagaaaaagggtggggagcgccctttcttgaaggaatcccttaagtgcacgtcttcccgttttcttttcacatcaatgcagagtccctctgtgaatttacaacacccaacacccatgagttcagtccttaagaaggaaaattgagcaagtatttaattggttggacattgcataaaagaggtccatatccagactaactctagaaattttattctcaaacttagttggcctctttttcttctgtcagaggaccattcttagtggcactggggaaatcttggcgcccagaaaaattcaactgcgctcactgcaaaaatgcaatggcct

SEQ ID NO: 12260 - DNA, 417 bp, Homo sapiens
aggtacttccaaaccctcctgttctttcctttttgttttccccaattttaacataaggcaaaagcagtaattgagcaattctatcacctggattggcactccggggaacagtggagctgatcactaactgaattccccctttataatctgaataaattaccccagtatgaatttggactcccttcaaatttagacttgatctccctcaaaggcctaccctcccttctggcagcgggccatatacccctctaggaatcttttgtgggggctttccagggagtaaaaagaccatttgggtggaacataaatctactgcggtgctgcctgctgtggcgcgggacagctgttggattgttgtaattggctgactccctgaagtggtggtattttctgaggggtttgttgtccttgaaaacc

SEQ ID NO: 12261 - DNA, 417 bp, Homo sapiens
ccgggcaggtaccagttgtaaaattaccaggaaccgccatgcctcaagatcgccctgttttctggcttcatcaatgactgcatgcagtgcaccaccctgtccactacgtgatgctgtaggattaagtctcacagtgggcgggtgaagatacagcgccgcgtcctgtgttgctggtgaattagacgccatcgctgtgggttgctggtatggtgccgtgctatttggcacaggacacaccgcttgaggtctgtattgaacctctgaaggaggccgatactgaagctcggttggcagccggtattgataaactaccagcggttgggtcttattttctaccggctgatattgtggatactgtatctgagttggcattgccgggatagagactctggccctttctacttgattttctcttgg

SEQ ID NO: 12262 - DNA, 415 bp, Homo sapiens
ccgggcaggtactctaggggaattgagaaaaacgaaggcattatctttgtaagaagaaaaaatcaagatgatctggcacacctggaggggtagtggaatgggagttgatcactgaacatgtatgcaatgtgcataggcacagggggattgggaaagacatcccaggcgagaagtaagagtaatcacaaaggtgggaataaatatggcatgctacagtgtggcatgggctttgtgttcctattatttgcagaatgttcgcatagctgggtgtcttagtctgggatgctataccaaaataccatagattggtttataagcagttctagaagctgggaagtccaagatcaaggcaccagcagattccatgtctggtgattctgtttcctggttcatagacagtgcctttttgctgtgt

SEQ ID NO: 12263 - DNA, 415 bp, Homo sapiens
ccgggcaggacgcgggggagtgccctttcttgaaggaatcccttaagtgcacgtctcccgttttcttttcacatcaatgcagagtccctctgtgaatttacaacacccaacacccatgagttcagtccttaagaaggaaaattgagcaggtatttaattggttggacattgcataaaagaggtccatatccaggctaactctagaaattttattctcaaacttagttggcctctttttcttctgtcagaggaccattcttagtggcactggggaaatcttggcacccagaagaattcaactgcgctcactgcaaaaatacaatggcctacattggatttgtagaggagaaaggagccctgtattgtgagctgtgctatgagaaattctttgccctgaatgtggtcgatgccaaag

SEQ ID NO: 12264 - DNA, 413 bp, Homo sapiens
ccgggcaggtactctccttcattttgccttttgtttcctgattttccaactcttgaatatttcccattctgttttgcatgtatttatttcttcttgcatatttattgttttttcctcttctagttttccttactaatacctactctagtaaacctggcctccaataattcctgccgtcgtgggtccaggctatgcaattcttccatcatttctggctggcagagcgtctcccgagactaaaggtgctctgggatcccaaagacctacataattttaatcagttatgctcacttcactgagaagtaggtctacagaggtcctcatgctgccattgtggaagtcatggtaactttttatatttattgccccactagaaaataagttctataaaagcacagagttttgtctgtttc

SEQ ID NO: 12265 - DNA, 430 bp, Homo sapiens
aggtacgcggggacatcaatgcagagtccctctgtgaatttacaacacccaacacccatgagttcagtccttaagaaggaaaattgagcaagtatttaattggttggacattgcataaaagaggtccatatccaggctaactctagaaattttattctcaaacttagttggccttctttttcttctgtcataggaccattcttagtggcactggggaaatcttggcacccagaagaattcaactgcgctcactgcaaaaatacaatggcctacattggatttgtagaggagaaaggagccctgtattgtgagctgtgctatgagaaattctttgcccctgaatgtggtcgatgccaaaggaagatccttggagaagtcatcaatgcgttgaaacaaacttggcatgtttcctgttttgtgtgtgtagcct

SEQ ID NO: 12266 - DNA, 438 bp, Homo sapiens
aggtacggggaggaacagagtccctcctttacttctccattagaaagaatgagatggcaagacaatgaaacaggcaaagtgaacagagatgcaagacaaaattcaggtgagagagccggagcatcactcagccattcctgacatgtaaaacaggcaactagaaatttgcagaaagggaagcgaagtctccttaaagatgtttttaaagtgagcttgaagtatttggagacaattcagtgttacataaaatctgcaaatctctggataaagaagcagagatcccagcatgggacaaatggagcctcaaaagtgggaagaagacagagaagaccagggcagaatgcatctcttcctttctcttggctttcctggataaggactgcatcattcctgtggaaggacaggccatcagctccgaaacactgtatgtattttcca

SEQ ID NO: 12267 - DNA, 429 bp, Homo sapiens
ccgggcaggtacgcggggacatcaatgcagagtccctctgtgaatttacaacacccaacacccatgagttcagtccttaagaaggaaaattgagcaagtatttaattggttggacattgcataaaagaggtccatatccaggctaactctagaaattttattctcaaacttagttggcctctttttcttctgtcagaggaccattcttagtggcactggggaaatcttggcacccagaagaattcaactgcgctcactgcaaaaatacaatggcctacattggatttgtagaggagaaaggagccctgtattgtgagctgtgctatgagaaattctttgcccctgaatgtggtcgatgccaaaggaagatccttggagaagtcatcaatgcgttgaaacaaacttggcatgtttcctgttttgtgtgtg

SEQ ID NO: 12268 - DNA, 429 bp, Homo sapiens
aggtaccatgttcaggaaaccaaggacaatattgctttactgttggaaacagagtaatcaaattttctgtgctagccttaattcctgccctctttaagaggagcttaataaaatgtaaatatgcagaatgtttacttttggattgtctcatggtgtccctggaatgctccgagtgcacaagcttaccgcaaggccgaccacacgttctcgggagttcctggacagaccgttcttcacaacgaccacgctcaggtgtaacttcacctgggttcgaggagaccgtgttgggtgccaaagatgtaggggaacctgcctgatacaccacccgcaggctctccccttcccggtggagacgagggaatgagaaaagaaataaagacaaagacacaaagtttaagagttaacaaaagtgggtccaaggatccatcg

SEQ ID NO: 12269 - DNA, 405 bp, Homo sapiens
  misc_feature 142: n = A,T,C or G
aggtacgcggggtagccacacttcaggtgcccagtgtccacactgactagtggtgactgcgttggacagtgcagatacagaacatttctgtcatcacagaaagttcctttggacagagccatgttaagtgatgttatcacanagaatggacccagaaaccattccttgttttgatttattttttcagacccagtttgtggagaaaaataatgatgctttacatatgtctcttgaatccttaatatgtgaatccagagataagtttatacgggaattatttgaatcatccacaaataacaacaaagatactaaacaaaaagcaggaaaacttagcttcatcagcgtgggaaacaagtttaagacacagttaaatttgcttctggataaacttcgaagtcctgcccg

SEQ ID NO: 12270 - DNA, 425 bp, Homo sapiens
aggtacgcggggacatcaatgcagagtccctctgtgaatttacaacacccaacacccatgagttcagtccttaagaaggaaaattgagcaagtatttaattggttggacattgcataaaagaggtccatatccaggctaactctagaaattttattctcaaacttaggtgggcctcctttttcttctgtcagaggaccattcttagtggcactggggaaatcttggcacccagaagaattcaactgcgctcactgcaaaaatacaatggcctacattggatttgtagaggagaaaggagccctgtattgtgagctgtgctatgagaaattctttgcccctgaatgtggtcgatgccaaaggaagatccttggagaagtcatcaatgcgttgaaacaaacttggcatgtttcctgttttgtgtgtg

SEQ ID NO: 12271 - DNA, 401 bp, Homo sapiens
aggtacttccaaaccctcctgttctttcctttttgttttccccaattttaacataaggcaaaagcagtaattgagcaattctatcacctggattggcactccggggaacagtggagctgatcactaactgaattccccctttataatctgaataaattaccccagtatgaatttggactcccttcaaatttagacttgatctccctcaaaggcctaccctcccttctggcagcgggccatatacccctctaggaatcttttgtgggggctttccagggagtaaaaagaccatttgggtggaacataaatctactgcggtgctgcctgctgtggcgcgggacagctgttggattgttgtaattggctgactccctgaagtgggggtattttctgaagggttg

SEQ ID NO: 12272 - DNA, 429 bp, Homo sapiens
ccgggcaggtactaacaaatgcagtagccaacaagattaccatgcaatcattaaggagaaccaaagtaagagagccactcaaaccagattttgaacgctactaaaattaaagtagttctttgatgaatatgaatgagtagggaaaggattctttgtaatagtgatacctctgtggtaagagaagggtggtatgtgagttttagtctacagattatggcaaattcagtgacaacaatcaaatggtctaagattgacagtagcacagttttactctgtgaaggtaatgttcaggacaaatttcaagaaaactagaaaaccattctttacagctgaaatctttccctaaccattgttatttccacttttaagtcctcaagagatgagaaaagggaggtaaggcttccttatacatttcctgcacaatgaaac

SEQ ID NO: 12273 - DNA, 422 bp, Homo sapiens
ccgggcaggtacgcgggctttcttgaaggaatcccttaagtgcacgtctcccgttttcttttcacatcaatgcagagtccctctgtgaatttacaacacccaacacccatgagttcagtccttaagaaggaaaattgagcaagtatttaattggttggacattgcataaaagaggtccatatccaggctaactctagaaattttattctcaaacttagttggcctctttttttctgtcagaggaccattcttagtggcactggggaaatcttggcacccagaagaattcaactgcgcttcactgcaaaaatacaatggcctacattggatttgtagaggagaaaggagccctgtattgtgagctgtgctatgagaaattctttgcccctgaatgtggtcgatgccaaaggaagatccttgga

SEQ ID NO: 12274 - DNA, 486 bp, Homo sapiens
aggtacggttcagcctgtgatcacttcattccaatcaatttatggggccgagacttgttacaacaatggcatgcagagattactatcccagcctccctatacagccccaggaataaaaaaatcatgactaaaatgggatagctccctaaaaagggacttggaaagaaggtcccattgggggcggaaaaaattaaaaaaggaaaaggaatggggcttccctttttaggagcgggtcacttgtagagcccttcaaaacccattcccattaactttggggaaaaaaaaaaaacaacttgtatgggtaaaataagccagcgcctttccaaaaacaaaaaaactgggagggcttttacaccttaatttagccaaaagaaaaccaatttaagaaaaaaagggaccatttgaagcccttttctttttttcgccccttggggaaatttcttggttttgttaaattttcaaaaaaaaaaaattcccgggccggag

SEQ ID NO: 12275 - DNA, 507 bp, Homo sapiens
  misc_feature 340: n = A,T,C or G
aggtacgctgggacatcaatgcttagtccctctgtgaatttacaacacccaacacccatgagttcagtccttaagaaggaaaattgagcaagtatttaattggttggacattgcataaaagaggtccatatccaggctaactctagaaattttattcttaaacttaattggccctctttttctttctgtcagaaggaccatttcttagtgggcacttggggaaaatcttgggcaccccagaagaaattcaacttgcgcctcacttgccaaaaaataccaattggccctacaattgggattttgttagaagggagaaaagggaagccccttgtattttgtngagccttgttgcttatgaaggaaaatttccttttgccccccttgaattgttgggttcgaattggcccaaaaggaaaagaatcccttgggaagaaaagttcaatcaaattgccgttttgaaaaacaaaaaactttgggcattggttttccctgtttttggtggggggg

SEQ ID NO: 12276 - DNA, 503 bp, Homo sapiens
  misc_feature 353, 355, 503: n = A,T,C or G
ccgggctggtacagagacagttgaaggggggctcctttgccaagagagggaaccccacctgccacagataccagctaggtatatatacagaggctggaggaggcagtgtctgatttgcacaggcccaggggattggtttgactaggcatgtcattcacgtagcccggaaggaaaagcttgcttctccaaccctagccctttaaatatgcaaaatgcaggggcaaccattgatctttctacacagggtgggggaatacttcgggggtgttccatgtaattccaaggaattgtgggggaaaggggcaaagaaagttccaacaaggaaatccgcccatggttttggggttgggacncncaactttttcttaaatgggcttgggccattttggggattattccggggtaaaacttgggcccttgggcttttaaaagaagcctgggaaggctttttacaaaggaaaactttttttcccaggaccgtggccttttaaaaaaaaacaaan

SEQ ID NO: 12277 - DNA, 456 bp, Homo sapiens
gtttagcacatactatagggcaattggagctttccgcggtggcggccgaggtacgcgggggacatcaatgcagagtccctctgtgaatttacaatacccaacacccatgagttcagtccttaagaaggaaaattgagcaagtatttaattggttggacattgcataaaagaggtccatatccaggctaactctagaaattttattctcaaacttagttggcctctttttcttctgtcagaggaccattcttagtggcactggggaaatcttggcacccagaagaattcaactgcgctcactgcaaaaatacaatggcctacattggatttgtagaggagaaaggagccctgtattgtgagctgtgctatgagaaattctttgcccctgaatgtggtcgatgccaaaggaagatccttggagaagtcatcaatgcgttgaaacaaacttggcatgtt

SEQ ID NO: 12278 - DNA, 409 bp, Homo sapiens
ccgggcaaattcccatgatgtcagaccactggagtttccaggggcaacaccccataaccgtcccgctgcagaagagcatcagaagttcagaagaatgcaaaggatctcagtgggaacgcggacaggagagccccaaaccaacacatgctagggctctctaggccctttcaggctagatcttgacgagagaagagtaaagatctttctgaggttggtgcaactgaggaaacgaaagtttcggcctctgctgtcagatctatgaaaggaaagaactgtgaacttgtccccttttgttttctttgacttaaaacaaaagaaaatcactggaacaaagtcttaaagtaataacagaaatgtcagaaaagttgaacatcttatgggcacatgcggtgagttacgctaacttata

SEQ ID NO: 12279 - DNA, 432 bp, Homo sapiens
ccgggcaggtactaatttcctgaaaagtatgttccgatagatgaacagatcattaatgcagaatgagaatcactcctaaaataggtaatggtaaaaattaaattgacaattacctctctctatgcagaaggaaatatcacctatatgacatcatcatcatctattgatacctggctggcagtgctaatattgtttttaatgccaatttgtaagaagttttatctctctgtcactgacatcctacagagtcacttccccaggcctcccatagaagttgggtgccatcaacatagggaaataagaaaagcttaaatgtaaggaagggttcttgtcttttttctgtgccagaaaaaacaagaatggccaacacaggatgcagaaaaaaatagaagcccagagcactttttaggggaaaatgggggggattacagc

SEQ ID NO: 12280 - DNA, 422 bp, Homo sapiens
aggtacagatgtccagtagacctactggatatgcaggcctgcagctcaggggagagctgggttaagaaccgtcaaggcagtaatcatctgcatttagatggcgagtgaagccatgacaggggctgaaatggcccagcaagaataaatcaaaccatgagaaacacataccattaaaaaataaggagatgtggtcaggcgcggtggctcacacctgtaatcccagcactttgggaggccgaggcgggtggatcacttgaggtcagtagtttgagaccagcctgggcaacctagtgaaatcccgtctctgctaaaaatacagaacttacctgggtgtggtggttgcgtgcctatagtcccagctgcttgggaggctgaggcacaagaatcgcttgaacccgggaggtggaagctgcagtgagccc

SEQ ID NO: 12281 - DNA, 664 bp, Homo sapiens
  misc_feature 142, 428: n = A,T,C or G
tagcatataattttgtaaatattatattacacttttaatattctactaaatcctacgggttcatatttattttaaaataacatacattttctttatatttagccacatttactgctatttaggtttgctagcagtctcctanaggcgaatggggctacggcaccaccgaccgcggtggcggccgcccgggcaggtacgcggggtctctcttcctcggcgctgcctacggaggtggcagccatctccttctcggcatcatggccgccctcagaccccttgtgaagcccaagatcgtcaaaaagagaaccaagaagttcatccggcaccagtcagaccgatatgtcaaaattaaaccctaacctgggggaaacccaaaggcaattgacaacagggtttcgtagaaaattcaagggcccagatcttgatgncccaacattgtgttatgggaagccaacaaaaaaacaaaagcaccatgccttgcccacgttggcttccgggaagtttcctgggtccaccaaccgtcaaagggaagctgtgaaagtgcctgcctgatggtgccaaacaaaattctttacctgttgcccaaggatccggcttcaacaatggttttccctcccaaggaacccgccaaatagcccattcgttgggaaaggagccttgcccg

SEQ ID NO: 12282 - DNA, 851 bp, Homo sapiens
  misc_feature 507: n = A,T,C or G
agatggaattaatactaccagttaaggcgatgagtaactccaccgcggtggcggccgaggtactggtttcaacaagataaggtttctatggagctgccataatttttctataacgctgcccctaggccagaattggttggtctacaggtagatacctgatccaaactatgacaaccacaatattccagcccttgacaatgattgactcttccaggacgggcacttaactcaagctaggccaatcatagtcatttctcaactagatcctgccccactggtcatagctaattggtgcaggactggaactggatgcaagctgactctctggattgagaactagaggtcagaccattccctgtcccatgtctgaaactgaaatatgcagcactggaaaactgctcatgctcatggccatgggatcagccttccccttagcctcaaaaagccttggagtggaagcaacaggtatctggtaggggtaaatgccacctctttagtctcatgatngaaaccaacttcaaaagcactattcaatgttgtctttggagaccagggaaatgacttgggatatttgggggggaagccccaccacaaaaaataatttctctctttgcttagtggatttcttcccatttaataataaatttccttttaaaggggaggttggattgaacgagaagatgttcccgcctcattttataaaaggtaaaaagaaattcccagcccccttgggaggcccagaaatgtggatccctttgaggaaggcccgaagttcaaaacaagcttgtgccaaatattggaaaccgttttttacctttccgggccgggcggtttaaaactatggttcccct

SEQ ID NO: 12283 - DNA, 833 bp, Homo sapiens
atatgcgaactggaactacaactatagggcgactggaaacttgtcccggccgcccgggcaggtacatttttagatgatcacgaatgtcttatatcacacttttctgtgatatggggattccccttgggggttttcatgtgtatagggtgcctgcagctacactaaacatcttaaagctacacaatgttcacttcatatttttgctttttataggctttcttggtctcctcctatgttcccatcattttcttgctttgaatctgtaagaatcgagttgaatcttctccattttaaattttccatacgctgagaaactgtttagccaagtttggataaaattgtatccaaagtaagagtatacaagctatgggcaagtccaaaatcaagctgttcacaggaccatgttctctctaaaggttctaggagagaatccctcatttacttccagcttctgggtggctgctggcattcctgggccggtggctgcatccctccaatctctgcctccatcttcacatgaccttcttccttgtgtttctatgggtactttcctgttttttatgaagacattttcattggatttagatcccatcctaatccaatatgatctcatcttcaattttacctaacttatatccgcaaaggcactatttccagatgaaattacgtgcttgagctctaaattgattaaacctgggggccatgaacaactctttcacttactgaaaaatccattaccctaaatagctaaaacaagagaatgttgaataaaatctcagctccccagaagacgttccggggacttctatttcacccttaaccctatttttgct

SEQ ID NO: 12284 - DNA, 396 bp, Homo sapiens
cgggcaggtaccctggaatatgacggtgatcacaagcctgcaacaggaactctgccccagtttcctcctcccctctgctccagctctgggacgctgctttccgtggaccaacattactccaccggcgctcccagggatcaccaatgacaccaccatacagcaggggatcagcggtcttattgacagcctcaatgcccgagacatcagtgttaagatctttgaagattttgcccagtcctggtattggattcttgttgccctgggggtggctctggtcttgagcctactgtttatcttgcttctgcgcctggtggctgggcccctggtgctggtgctgatcctgggagtgctgggcgtgctggcatatggcatctactactgctgggaggagtacct

SEQ ID NO: 12285 - DNA, 836 bp, Homo sapiens
  misc_feature 576, 649: n = A,T,C or G
tatgtcaactgactactatcactataaggcgagttgcaccgcggtggcggccgaggtactgggagagaccacatttggggtcataaaacaagaagcaacatatatgaaaggaatgaaataatacagagtatgttctctgaccacagtggaattaaatgacaataacaataagataactaggaaacaccaactatctggaaattaatgcatgtccaaataatcattgggtcaaagaagaagtcacaagaaaaactagataacattttgaactaaatgttaatgaaaatacaacatatcaaaattttgtgagatgcaacttaagctgcactttgagaaaacgatataattttacaatcttagctcttacatgtagaaaccaaatgctttattcaaccaattttgaatgtgcacaaatatggggtatatttttcacgagcctttctgaataaactagaagacaagctccagccaaccaagagatggggaaatttttggtaaaaggaccagagataaacaattattaataacatacttaactggagatataagccagtaacaaagctgcggatatgagtngtaaagtgttatatgttctgacagtgtagaaacaatataaccaacaaaaactgggaaaggaatgaggaggaanaaggagaaaagtagaacaagcttgttgacttgtttagtagctggcaatcaaagataatacttacagctgacatatcaagttgtagaagaatattcataggaacaaaggtaaccttaaaaaaaaccactggtcagtgcaggggctcatgcttgtaacttaaccctttgggaggtgaactggatcattt

SEQ ID NO: 12286 - DNA, 822 bp, Homo sapiens
ttatccccttactactatcaggcgaataggagttgcaactccttcccggtggcggccgaggtacctgattcatatcccatcaaggactgtttctcagtctttataggcagcacagtaaaggggaaagatcatgatttttggggccaggttcccttgaatattgtggggtccccacacttctggatgatgttggataactctttgagacttaagcttcacatctgtaaaatggaaatacttatttttcagagttgtcataaacactaaatgatttgacttatatcaacctaattcctactggctcattgaactcagctcagctgtcccctctgttcggatgccttccccagtggggcttagttaggtatccctgctggataccctgccaagctcttacacattccctctgccataacactcattctttgttactgaattataatttcatgttcatttgtttatctctcatactaggctgtgagttccctgatgacagagaatgtcttgttggttttggaattcccagtgcccaacttaattcctggcacagctgagtaagcaaatgaatgaacgccatctagttgagtaaaaataagtctcgttaggcccgatgggtggctcacgcctgtaaatccagcacttttggaaggccaagtgggcggatcaagaagtcaagagaacgagaccatcctggcttacaccgtgaaaccctgtctctacttaaatgcaaaaaaaaaaaaaaaaaaaaagttcttcccggcgggccttttaaactatggttccccgggccgcagaattcatataaacctattattccgtgct

SEQ ID NO: 12287 - DNA, 766 bp, Homo sapiens
  misc_feature 428, 459: n = A,T,C or G
ccgggcaggtacttgcccaatgtttacccttacgacaacgcatgcaaacagtagcaggagcatttggccgtgtttgttgagccggcttggccgcttttaagtttttaacagtgtagtttttttgggtatgaccaagttggccacaattatagcaggctccaagaaaagaatcagtcgagccagtttggttgccgtgcttcatggccggtgcccacagaatagctctgtgggtctccgatccaacgccttcacaagctttaatatatacaggcaacacctcatgatcaggtaaattttgacgtaggatggaatgcacggccattttacactcatggttcgcattttgaaaagctaacatatgaagaagaataccttgagtgtgctcatcagagacagatttttcaacagcatcttgtaatttagctaanaaatcaagatataattcattgtgaccctgtntaacaatagtaaaagaaacagaagcttggcctggggtgcgtaatttatcccaagctctcatacacacctttggtacttgttccgtggtgagagcatcaaagcctaatgaggcagtatttcagagtaattatcggaccttgtagctgaccttgagtaatgggatgccatcagcccgatttagcttgacctacagggggccctctttggaccacaggtttggattggaaatggctaaatggagtaggaccagtttggcaaaaggtgccgtctttaggagccaaatggacttggcccttggcgttttaaa

SEQ ID NO: 12288 - DNA, 663 bp, Homo sapiens
  misc_feature 383: n = A,T,C or G
aggtacatatatatgtctgtgtgtgtgtgtgtgtgtatatatatggccatataaagtgtgaaaaagcatgtttgagagagaataccaagggtgtggtcaagtgaccatttgctaaagagattaccctggatagaagggaaccagatgctattcaagataatgggagaaagatcctgaatacattccagagatctttgagtcttccccacccatcacagccccagagatctaggagggcagaatgatttcagaggatgggcctggggtgccctccagaggcttgctgcctagagctgccttggtccctgtttcccacattctgccaaagtgcctgtggattgccccagctatggctcagctattaataagactcagatgtgggntcattctgccactcaggagggtgcaagtggtaagctttggtacatccgtgtggtgtaaatcttgcaccccccagattgcaagagctatgggggcatgcctacctcaacctggatttcaattaatttttcaaatatttcttggcgcccaagcagaaccctgccacgggggtggacctgtaacaaaaggtctctactaaagtaatgcccagggaaagccttgggagtgggaaccaccaccaatacccccgaagtggtgaagccaccaagggaccttgcccgg

SEQ ID NO: 12289 - DNA, 689 bp, Homo sapiens
  misc_feature 1: n = A,T,C or G
ntatgcaattgaaactacgggcgaattggatcgccaacgcggtcgcggccgcccgggcaggtacgcgtgagattacctcatttcagctcaataaaacatttctcaaattcccttaggcagaaaaagggtggggagtgccctttcttgaaggaatcccttaagtgcacgtctcccgttttcttttcacatcaatgcagagtccctctgtgaatttacaacacccaacacccatgagttcagtccttaagaaggaaaattgagcaagtatttaattggttggacattgcataaaagaggtccatatccaggctaactctagaaattttattctcaaacttagttggcctctttttcttctgtcagaggaccattcttagtggcactggggaaatcttggcacccagaagaattcaactgcgctcactgcaaaaatacaatggcctacattggatttgtagaggagaaaggagccctgtattgtgagctgtgctatgaaaaattctttgcccctgaatgtggtcgatgccaaaggaagatccttggagaagtcatcaatgcgttgaaacaaacttggcatgtttcctggtttgtgtgtggagcctggggaaaagccattcggaacaaatgttttcacttggaggatggtgaaccctactgtgagactgattattatgccctctttgtacctg

SEQ ID NO: 12290 - DNA, 694 bp, Homo sapiens
  misc_feature 607: n = A,T,C or G
aggtactagagtaggtgagtgttaatgaccagaaaaaaatagtaattatccatgacactgtatacaatgttacagtgtaaaaatcacacccagaaccactgccctctgaagcaactgtattatacccatggtcagaaaagttaatcaagtcactcttcacaaatgccccattgctggagcatagaggctgttcaaagtggagcatggaggctcctgctgattgggagcctgataagtgttgcctggcagaggcagatacaaggaaagccagcacttggggctgggaagcactgggcattttctacccaggcccatgggatctgttgcctcagagactgactcgcctttcctgagcattagacatccatcacctgggattagtctgagtagttgagcaatttgttaacagattagagatatacatcttttctccagtggacttggaatctgatggccctggaattgaatcctaatgtggctttaacactctcttggtatgtgatccaagtctcgtaatctctctggatcataatttgtctataaaagatgcaacccagaatgtggttaagaacacagaccttggagcctactggctggatgggaaatncaactttaccacttacttattatgtgactttaaaagtgcaacttgaacctttttggacctgtccgggccggcggtttaaaactaatg

SEQ ID NO: 12291 - DNA, 427 bp, Homo sapiens
  misc_feature 16: n = A,T,C or G
ccgggcaggtactgtnttattttttttattgtttgttggctacaagtgtttgtgctgttcagaaggggttctgttgctcaaatgctgtcaaagtaatcccccttcatttattttctgcccttgaagttcatccccaagaatataggaacactcaaaaattcattttttgaggaaaggattctgtctttggaatggctatgagcctaaagagaaaaaacaataatttgacctagtttcacaataacccatctccccaagaggcaaaatgcatagctatcctgtgaagtcaggggagcagaggaaagctgaccccacttccttaaaatactttctcttggtattaaaaaataggttgcaatggctcacagatgagaatcatgccaaatgtgcatttgatccatgcttacggataaatttaggcaagatt

SEQ ID NO: 12292 - DNA, 201 bp, Homo sapiens; identical to SEQ ID NO: 1534

SEQ ID NO: 12293 - DNA, 421 bp, Homo sapiens
  misc_feature 421: n = A,T,C or G
ccgggcaggtacaatcctctttagcttttttgttttatagacagtgtggacgtgcatatattgcaagcatcactttgttaaactatgcttaaccctgcaaatgattttaagagctctgtgtgggtggctttcttgggtttactattaaatatctgtgtttatcatagttctataacatttcaactttgtaaatatgtagtttgttgataaagaggatagagacatttttcttttgttgatagattgttctttcccctttgcttagtcttcattgtgttgctgggattgtaaaagacaaattacttgcacatatttaagcttatatattaaatgtatatatgctgtcatgttagagagggagagtggttccctcccccacattttgatttaaaagtaaaaattaatttttattaaattgttn

SEQ ID NO: 12294 - DNA, 417 bp, Homo sapiens
aggtacttctgctccacgaggaaggggatcgccaggcactaccgcatcaagcacaataatgtccgagcccagccagaaggcaagaacaacctcttcaagtgtgccctgtgtgcctacaccaaccccatccgcaaaggtctggcagcccactaccagaagcgccacgacattgatgcgtattacactcactgcttggcagcctccaggaccatcagcgacaagcccaacaaagtgatcatcccatccccgcccaaggacgactcccctcagctgagcgaggaactccggcgggcagtggagaagaaaaagtgctccttgtgctctttccagtcgttcagcaagaagggcatcgtgtcccattacatgaaacgccacccagggggtgttcccaaagaagcagcacgccagcaagttggg

SEQ ID NO: 12295 - DNA, 401 bp, Homo sapiens
ccgggcaggtacaggcccacgccagacacgacgtctggcaggaacctcggcctcagaggtgggtcacttatatctctcacgcagatttactatcatgggtcacttaacccgtggatcacacgggttcctcattcttgagttttgggctagtgaggtgccgacttcggggtctaggaggggagacctgatgtggctgtgtgtgcgcacgcgggggtgttgagagtggatgagtgggaggagttggcgaatagaatagagactaggactgaagtaggaaagactccccggtgtttaggaggtttagagagatccaaaactgaggcgggaagacaaactgagctgataaaatgagggcatggaaagaacggcagtggcaggactagtgggaaacgtcggattta

SEQ ID NO: 12296 - DNA, 388 bp, Homo sapiens
ccgggcaggtacaaaaattagctgggcatagtggcacatgcctgtagtcccagctactcgggaggctgatgaacaagaatcacttgaacctgggaggaggaggttgcagtgagctgagatcgtgccactgcactccagcctgagcgacagagcaagactgtctcaaaaaaataaaaaagaaaaaaataataaaaaggaaaacaaagcctttagaaaaacaaagcctttgaaaaaggatgtaaaattgaatatatagatacaattatttttaaaaagttttatagaaaaatatcctggattgttgatgttgttttaatatattttaatcatttttgtataatgtcatgtataatatgttataatgaaagtaaaaaaaaaaaaagtacct

SEQ ID NO: 12297 - DNA, 460 bp, Homo sapiens
ttagggccctatcactacttagggcgattgagctcaccgcggtgggcggccgcccgggcaggtacagcatggctcaaggcctcaggcaaacaaaagcactcttaccagatagaacattatgagagctcagttcccagagctgcccaaaggctagtcaggaaaacaggaccttctggggaacttacagagtttgagcaataggcctgttatgtcaaccccaagcagagtggatgaagacaaggcaagggacaggctgacagctgattcctgggttcctctgatgtttacaggagagatcaagcaaaggagacaaaaaaaggactgttaacacagggggaaaccaacactgaaaactcctggaaatgaagagttttcagaatgggttgttgctatccttggagctgaatggctatcataatgatgataacattaattcagattttaaaaattaatcattaga

SEQ ID NO: 12298 - DNA, 427 bp, Homo sapiens
aggtactctgcgtggggctccacctcacacccacccctgggcatcttaggactggaggggctccttggaaaactggaagaagtctcaacactgtttctttttcagaagttttgtttttgatatttatattacttggtatggatttccttaggtcagaggagagcatcgcatctcacgtttttaggtttatcactgccatcccacttctgggatgggaggtagcaagggcttctgtattttcttgtgttcattctagcaacccagacatttccggatcagatcctgctggtctccactcactggaaagtctgccagatgccgatttgagagctgcctgtccctgctttcaggaggaaccgggagaaaaactccaatggtctttaatgggttctggaacttggcattggccattcatatgacattgtga

SEQ ID NO: 12299 - DNA, 413 bp, Homo sapiens
ccgggcaggtacttttttttttttttttttttttttgcaaataagaaagttgaagagcaaaacgacgtgtctaacgtcacacattgagctttaaagacagatgggatctggcatgcgtttgtcagttaacagtgctagcacaaatacaacttttgttaaaatcgtaaggattttatgtcgtgagacactcaggactcacctgatctcggtgttcagttgtgcgtagtttttgatttgcgcctcgcccttgggcaagtgcagaatcctggggttatacaaagctcatcacagttaacccctttgtcccagtccgcaaaatgagagctcatagcccggccatgggaggctcggttatataggcaggaaaatcaaggaacccaggtatgagcaggggcctttgtggcgcggagagg

SEQ ID NO: 12300 - DNA, 410 bp, Homo sapiens
ccgggcaggtaccgggaaccaaactctcattccccaggggcctaagccccccgtggccaggcccttctcaagtcagggttcctgcacattcacagttacgggtggccctgggagtaacacctggcacccaaacaggtcaccagagtccacacatagtccacctgccctccctgcgtaagatcagctcttcctcctcccgacgaatagatcagggtcaatgatccctgccaagatggcgactgctccagcctgctggtccaacctgtccagccaccagctgttgctcgaaggcttgaagttcaatgggaccctctcccgctttctacaaactagttcctttatttttatgtttatttatttgggaccgggtctgccttttgtacccaacctggattgcagctaaatgctaa

SEQ ID NO: 12301 - DNA, 483 bp, Homo sapiens
cgcccgggcaggtacacccttctcaacaacttccttcacatctgcaggctgcacaccaggagaatgctcagttcctgtttctctccaatcccaagtccgactaccccctggccatactttgcagtccttataggttgtattagagcccttttactttcatttgcccccatgataaggaagcaatttcagggggaaagtcataaggaacttcactggaagtcagatgcggagccaacctggtcttggaacttcccaagccttccaagaacccaaccgcactgtcctccctcaaaagttggcgttccccaaaccggcgcagaggctcctggccccgcactttacggctccccaagcgcttgctttcggggaatctggcggctcacccaaacctggccccccgccgtacccttcggcccggctttaagaacttaagtgggatcccccccggggctggcaaggaaaattcgaatattcaaaggcttg

SEQ ID NO: 12302 - DNA, 420 bp, Homo sapiens
ccgggcaggtacgcggggaagcttccaagatgccgcccaaaggaaaaagtggttctggaaaagcggggaaagggggagcagcctctgggagtgacagtgctgacaagaaggctcaaggtcccaaaggtggtggcaatgcagtaaaggtcagacacattctatgtgaaaaacatggcaaaatcatggaagccatggaaaagttaaagtctgggatgagattcaatgaagtggccgcacagtatagtgaagataaagccaggcaagggggtgacttgggttggatgaccagagggtccatggtgggaccatttcaagaagcagcatttgccttgcctgtaagtgggatggataagcctgtgtttacagacccaccggttaagaaaaaatttggatatcatattattatggtcgaaggaagaa

SEQ ID NO: 12303 - DNA, 420 bp, Homo sapiens
aggtacttctcatctttcaggaagacgacagtgatcttagttctgtggttctctgcattcagtccctcatatagagatttgttgaaagatatttcaccaaggatctgcagttcagttacatcttttagtaactgaaccgaactgtacgcgggtattgtttacatataatgccgtcttgccaagaggggtgttctcatggaagtgaggcacagaaagtcaaaatgacttgcttaaagttcagagtctcacaaatcctgatcagttgtaggcttttcttggaagggagtgagggggactcagccgaggcacacttgacccaggtctcctggatgtagaggcatcagggaactccaagggtccctccggggaccttctggagcccagcttcatggtggaatagcagtgtctgccgaaagctgg

SEQ ID NO: 12304 - DNA, 420 bp, Homo sapiens
ccgggcaggtacgcggggaggtaagaaatgaattttgttgttttggtttcaaattgtggaaaaataccaagagattgatgtattgtctggatatgtgtgcagcagaggagacaacatttgcttctttacagctttgcaagtgcattaaacaaaaattgtagaagagggtgtccttgtcctctcctagtcaccacttgtgcaaacagcgaaagtttagaaaggaaaatcagcaagtcttgcatagagtgtaaggacattcagattgagaatgaagaacttgtcctttcagtctcttcttccctattaatatgagataaaaacataataaaatcacttgtaaatctagagaaatagaaagtgatttttttttccacataccaattttgacagtgctgggcctaaaggagataacatttatgg

SEQ ID NO: 12305 - DNA, 411 bp, Homo sapiens
ccgggcaggtacgcgggggctgatgccattttcagcctcagcacgcctgcacccaggcgctcattaaaacagcatgttgctccccactgcctcgtgttgtctgttggcgcgctgtcggggttcgaaccgatacaagaaccttccacctacctggtgctttggcctcatctataagcagcttttccactgtcctgaaacaagatagagaatctgagcggccagtcatctgccctaagtgctgccgccgaagactgaatgtcctggaaagtttgctgtcacatctccattatgacaaaagcattgtgccgaacagatgaaaaaatgcattgtcaacggaatcttttatgtttgtttgtcttcctttaagcaacattgccttacttgttattaaagataaataaatatttgttc

SEQ ID NO: 12306 - DNA, 413 bp, Homo sapiens
ccgggcaggtacagcagacatcttgtgaccatgaggtgacaaaccagcatgctgtagaggacagagtggaaagagaaaaagtctacgtccttgatagcaccaatgagccactgtcccaaccctatactgcctaattctaggctataaataggataggccttttttttttttgcttaagctaatattaaatatttgtttaactagtttactgtcacctgcaagcagaacatattctgaaatgagagacagcaagattgacagtgagcaaattagcctgaaggctattacagtaacccagaaaagtgatgatgatgacttgagggagagtaattataggattagagaagacagaatagatttgaaggagcgggaggtagagacaattttgttttaggcacattgacattggcata

SEQ ID NO: 12307 - DNA, 412 bp, Homo sapiens
aggtactttttttttttttttttttttttttttgcttttttattttcttccatcagtgggacaaagttgacatcattgcctaaaagtaatttctgtgattatctgtgtatttcagttaaccatgttctttggactcactgtggtcttcagcagggatggtggccaaactatgtttagaaagataaaaattaaaatgacatctgcatccttcatgtaaacccataaaaaatagcacgtgaccctgaagatcctctgcctctcattccaggcattacaattgaaaatgctatctgggatgttaaaaactaaaactattctaggacttagtggaattttgatagttagggaaagctgtttgctttcttgaattttgaacctgttattgagaaggtagatgcccctttttacccca

SEQ ID NO: 12308 - DNA, 414 bp, Homo sapiens
ccgggcaggtacgggggagatgaagttggagcccttgtttttgacattggatcctatgctgtgagagctggttatgctggtgaggactgccccaaggtggattttcctacagctgttggtatggtggtagaaagagatgacggaagcacatttatggaaatagatggcgataaaggcaaacaaggcggtcccacctactacatatgatactaatgctctgcgtgttccgagggagaatatggaggccattttacctctaaaaaatgggaatggttgaagactgggatagtttccaagctattttggatcatacctacaaaatgcatgtcaaatcagaagccagtctccatcctggtctcatgtcaaaggcaccgtggaatactagagcaaagagagagaaactgaccgaatttg

SEQ ID NO: 12309 - DNA, 414 bp, Homo sapiens
aggtactgatcgtcttgttatcactccattaacagatagatgctatatcacgttagctcaggccttgggcatgaacatgggaggtgctcccgcaggacctgctggcactggcaaaacagaaaccacaaaagacatgggaaggtgtttgggaaaatatgtggtcgtgttcaattgctcagatcaaatggatttcagaggcctaggaaggattttcaaagcaagaaaagaaagaaagaaacagttcattttttctgatggtgattgtgttgatttaaatccagaatttggaatcttcttaacgatgaaccctggatatgctgggcgccaggaactaccagaaaacctaaaaatccagtttagaactgttgctatgatggttcctgatagacagatcattatgagagttaaacttgc

SEQ ID NO: 12310 - DNA, 334 bp, Homo sapiens
ccgggcaggacgcgggggcgcagctcttagtcgcgggctgactggtgtttatccgtcactcgccgaggttccttgggtcatggtgccagcctgactgagaagaggacgctcccgggagacgaatgaggaaccacctcctcctattgttcaagtacctaaatctttgtctgagattctatttcctctagacagatgcctagaagtaaaattaatgggtcagaggacatatttttaaagcaaggttctggataacataatgctacattactttgcagaattttgtgtcaatatatagatatccactatcactatgagtgtctatttcactgtacct

SEQ ID NO: 12311 - DNA, 412 bp, Homo sapiens
tcgctcccctgctcctccttggtggctctctcaaggactccagagttgtatccccaggccgtcttccccgcgtacctcggccgaggtacgcgggggagaacaaagaggaagcagccatgttagcattactgaaggcagagccagccttgcatttaactgcatggtggtagagggcagtgtaattccctggttattctgtaaactatatcaaatcctttttgtctcttctcatttcactaacagaattcacaaggagctagctgaaataacccttgatcctcctcctaattgcagtgctgggccttaaggagataacatttatgaatggagatcaactatactttggtccaccgggtatctgtttatgaaggtggatgtggttttttatggaaattgacattttagaatacag

SEQ ID NO: 12312 - DNA, 429 bp, Homo sapiens
ccgggcaggtacatttttgttgtagattattttaaacataatgctatagtaatattttgaagatttgagctgttatttccatttgtttttacactgtgactaaatgattaggttttagttttagactctaaacggaacctgaattaataggaaataaacacggtacgggggattattatctgcttccatggataaaaccatgattctctgggctccagatgaagagtcaggagtttggctagaacaggttcgagtaggtgaagtaggtgggaatactttgggattttatgattgccagttcaatgaagatggctccatgatcattgctcatgctttccacggagcgttgcacctttggaaacagaattcagtttacccaagagagtggactccagagattgtcatttcaggacactttgatggtgtcca

SEQ ID NO: 12313 - DNA, 413 bp, Homo sapiens
aggtacttagtctctcaaggacgattccccttggtgaacctgaccgatatgctgagcgttgctgtgcagcaccgtgagaaagaggtgttggcctggatgattctgcacagcttataccaggcacggattgtgagccatgccaatacgggtgaggacaccctggggtgaacatcagaaacaggaatagatctgcctgctgttgcttttaagttgcacttgagttctcaacttaaaaattagtttagtgcttattgacacaggttaggccttctggtgccaaatgaggagtaacttggatagaaattaacagttatagctcacaacatccactttttggaaatgaggatggattctttcgaggggtttttgttttctatttggctctgtagaccctcacagttacaaacaagtta

SEQ ID NO: 12314 - DNA, 434 bp, Homo sapiens
ccgggcaggtacgcgggagaggagggggaggaagccggcggccagaaacggcagtggcagcagcgtccggagcagccgcagccttctggaagctccaggcggtctttctgccgagcctcggtcccggcccccatcctccccgccccatcggttgttgtctgggcggatttaaacagtcaagttaaatcaagctgggtaatcatggcagaaggtggatttgatccctgtgaatgtgtttgctctcatgaacatgcaatgagaagactgatcaatctgttacggcagtcccagtcctactgcacagacacagagtggtttcaggaattaccgggaccctctggtgataatggcattagtgttacaatgatcttggtagcctggatgggtattgcattgatcttgttcttactgagaccttctaatctaagaagatc

SEQ ID NO: 12315 - DNA, 355 bp, Homo sapiens
aggtacaaagctgaaacgcagagattttcatattatttgggagactcagaaatgagcttttaaggttgttccttgacttgcgggtcaataagcgcacaatggtgaagaaaaggctgccttctagtgacacggtgttccggtttgagactccgggcagcccaaggaaggccaacgtggaggcctcacgcagctccacagacagccccagaccagaagaaaatcattagcctatggtcaaaatccagttttgatggtgcctctttagcaagtgataagaacgactgtaaaacagaaagcaaaaatgaccctaagactgaaagaaaaaagtcttcatcttccagccagtacctgcccg

SEQ ID NO: 12316 - DNA, 433 bp, Homo sapiens
aggtacgcgggggctgatgccattttcagcctcagcacgcctgcacccaggcgctcattaaaacagcatgttgctccccactgcctcgtgttgtctgttggcgcgctgtcggggttcgaaccgatacaagaaccttccacctacctggtgctttggcctcatctataagcttttccactgtcccgaaacaagatagagaatctgagcggccagtcatctgccctaagtgctgccgccgaagactgaatgtcctggaaagtttgctgtcacatctccattatgacaaaagcattgtgccgaacagatgaaaaaatgcattgtcaacggaatcttttatgtttgtttgtcttcctttaagcaacattgccttacttgttataaaagataaataaatatttgttcatttcacaaaataaaacactaaaattatccg

SEQ ID NO: 12317 - DNA, 474 bp, Homo sapiens
  misc_feature 395: n = A,T,C or G
gtttgtgcgccgtctcactattagactgactattgggagctccccgctgcggcggccgaggtacgcggggattcattcgttgcgcacctactcttgcacaaagccctgcttttccctctggaatgtgctgaccctggccccgagatggttccactgtttcttctgtgggcttgtctcactcgtgaaagagtgtcccaaatagtgactactgaagctgcaccaagtaataggaacaaatctcgttctgtctcctaatctttcttcctctctccctccttttgttttttacaactccacctcccaggccatgtggaagcctgcgtatgacttcttactcacctggagccatcagatcggggacagctaccgggatgtcatccaggagctgcacctgngcctggacaagatgaaaaaccccatcaccaaacgctggaagcaacctactgggactctgatcttggtgaaactcctgga

SEQ ID NO: 12318 - DNA, 399 bp, Homo sapiens
ccgggcaggtacgcgggggctgatgccattttcagcctcagcacgcctgcacccaggcgctcattaaaacagcatgttgctccccactgcctcgtgttgtctgttggcgcgctgtcggggttcgaaccgatacaagaaccttccacctacctggtgctttggcctcatctataagcttttccactgtcctgaaacaagatagagaatctgagcggccagtcatctgccctaagtgctgccgccgaagactgaatgtcctggaaagtttgctgtcacatctccattatgacaaaagcattgtgccgaacagatgaaaaaatgcattgtcaacggaatcttttatgtttgtttgtcttcctttaagcaacattgccttacttgttataaaagataaataaa

SEQ ID NO: 12319 - DNA, 395 bp, Homo sapiens
aggtactttttttttttttttttttttgcgttgggggcttcactatgttgcctaggctggtcttgaactcctaggctcaagtgaccctcccaccttggcctcctagtagctggcactacaggtatgcgccagcacacctagctgtatcttattatctattcctatcttctttagagttctacttcttactagccaatccttcattactccaattccactatggttaataatttcttatattgaactttagttattcaaattactacgtgatttctgtctcctggttacagatacagattgatagagcaagtgtgagatccaacagcacagctatcacaaaaagcagaaactgcccgaaaccttgtatcgatacaatataaggaagaagtgtcaga

SEQ ID NO: 12320 - DNA, 492 bp, Homo sapiens
  misc_feature 10: n = A,T,C or G
aggtacttgnctcactatgtttctattctattatttaaaggatatgtttttagatcaatgccttttgttggggagggttatggagtgagaggttcaatgtggaaacttccagcctggctgattgtatgggctgtctatgaccgtggctttctgtggccagcacagtggtgccacctgtgagctggaagtcatcacctgttccactgtggcagttggcctggtcgtcatcacattcatccaccaagttcccgttgggagtggtcggtccagctgtaggggcttccacttcacagcccagcagctccattctgagccccagtccgccatgagtggctctctcggggtagatcctgatgaatcgcgtggagagagctggaaaagtccgcaactcaggtgtatcataattgttgttgccctcaaaagacttcgccttgcgtttggtgtcatccatgatcatcttccaatccgagccgttgttgctgtacctgcccg

SEQ ID NO: 12321 - DNA, 1042 bp, Homo sapiens
  misc_feature 482: n = A,T,C or G
ccgggcaggtacgcggggagagaagtttccgggactggtgagtagtgggcgatttaaaaacccgcgagtgtagttgtgaccttcgcggtatgtgccggttggggccggctgtgattgttatcttggtgctgcacaggacagcagaagaggtagattgggtcagaaaaactgcctctgccgcagccatagcacgagcgcactagttgggacacggggtcctagactcattacttaacgtggctgtgtcatcgtggctatttcacctgtccgtggaaaaagcgctgaatgtggcatctgataatgaggcattatatgaggtaaccgtctagggagcggtttgcaggttgcaaaaggggcgcctacttgatgctcgcttaataagtaaacaagcgctgtacatctagagaccgggaagtttgtttctcagcttttaccgtgtaacatcatggcggatatttggcgtgcctgtggcacgtatattncatttaacggtaggaaacttgcacagggattaagtcattttaccttgcgtgttgcaccagctcttggcctctaaggattcaaggctgggctttaaaaagttgggcgcttcttaaaccgccaatacttttgttcgccctttctagtgtggcgttgagtggaacttggtgggccatgttacctttcaccagttctccctttttcgtggtaacaagagaaaataaccttgagaaactctttgcttgaatagggccccacttggggttttcacctgttcagagcgttgcccataatttaaaaaaaatgccttggaaaagtgtggatcccctttggtcgcgcttttataacacttgggagatctccgccggcgtggcgaggaatatatatatttaagcttattgtgtgtccccttcccttctataggggggggccgcgttactccacttttgtttcctcttttataggggtaaatctgcactctggataaaacatgtaatagacgggtgtttctgtgcaaaaattataagccccacaattctcggaaataatagatggggagttg

SEQ ID NO: 12322 - DNA, 907 bp, Homo sapiens
  misc_feature 393: n = A,T,C or G
ccgggcaggtacccagggacacaaacactctgcctaggaaaaccagagacctttgttcacttgtttgtctgctgaccttccctccactagtgtcctatgaccctgccaaatccccctctgtgagaaacacccaagaatgatcaataaaaaaaaataaaattaaaaagaaaacaacaacaacaacaaaaaaaagtcctcccataaggaaagatgatcaattcttatgtatcgttctagggatataaatattcaggaggcttttcagaataaaagttaaatcatttatgtcgcacaaacaaatttactattcggacaaatacgatgacaaggagtttgagtatcgacatgtcatgctgcccaaggacatagccaagctggtccctaaaacccatntggtgtctgaatctgaatggaggaatcttggcattcagcagagtcagggatgggtccattatatgatccatgaaccagaacctcacatcttgctgttccggcacccactacccgagaaaacaaagaaatgaagctggcaagctgcttttcagcctcaagctttacacagctgtccttacttcctaacatctttcagataacattattatggtgccttcttgcttctcactttgatatttaaaagatgttcaatacactgtttgaatgtgctggtaactgctttggttcttgagttgagccaccccaccataacccagccagatgaatgctctgtggcccacaaccctagctgagtgtgaccccagaagccacgatccttctggatccagaaaccacttggcagattgagggaacattttgagtttgaaaccatggctgttacagggatcattgaaacctgctgttttggttttttttgcccggtgtgtatgtatggtgacttgccgatttaatt

SEQ ID NO: 12323 - DNA, 497 bp, Homo sapiens
aggtacaaccacttgacttgctctttaacatagtcctgtgagatgccagctgccatgaccaagcagtattcccactcctcctctacactctggcaaggctttcctggaacatccccatgcccacatctttacccagtaactcactaaagccactcttgactcaagcaggtgccgttccttgatcacggaatctacctttgatttcatcacgccagattcacaaacagaatgggagtgctttatctatacctttgagaggatggagagtgaaataactggaaacactgggttatcacagcttaatttcatccaggcttggtgtctataccaaagatggctggggaaaggaagggagattcatcttgttcaggcagtgatttgctcagaattttacaagacgtaccctatacagacctatttgaattctactgtgggtttattgaaccagtgttggaacaacttcgcaaaacaaaccaggccagttaggtacctgcccg

SEQ ID NO: 12324 - DNA, 763 bp, Homo sapiens
  misc_feature 120, 390: n = A,T,C or G
aggtacctgcctagacaatcacagtgctgggacccctgcctggcaccctctggctctgagcctcgcactcctgaccgcagctcagtcccacccacctgctcagcaagggcgtccccagcnaagggcacccagaacccgcatgtgtagagagactctggcagggctgatggagcgacaggtcggggtttctctaacaagcactttcctggaaacttcattttaacatgttcccatctccctcagaaaaagggcatcgagaagaacctgggcatcggcaaagtctcctcttttgaggagaagatgatctcggatgccatccccgagctgaaggcctccatcaagaagggggaagatttcgtgaagacccctgaagtgagccggtgtgacggntggccagtttccttaatttatgaaggcatcatgtcactgcaaaagccgtacagataaactttgtattttaatttgctttggtgatgattactgtattgacatcatcatgccttccaaattgtgggtggctctgtgggcgcatcaataaaagccgtccttgattttatttttcaaggtcccttctgtaaatgctgtgctttctttcctgtgagagccaactttaaagtgtctgctacctcttcattaccaatcagaattagatgatgtttaactgttagactgaagcgtgacgctttcatcaatagctttaaaaaagtctaaattgttaatttatggaattggacacagtattcagtttacccgtaccttgccc

SEQ ID NO: 12325 - DNA, 476 bp, Homo sapiens
ccgggcaggtacgcggggggggctgggcttcgtgtcctgcgttccgggagcgccaacccctccagcagaggggacgtggctggtggctggagaagctggatttgccctttgatggtggccctcttgatccccggcttgctgaagtcaaaggagaggctgtcgatgctgaggcacgagagaatttgctcctgctcctccagagaaaatggctgggacaggctgttgaggaataattctgcagggaaaagtggaagatggctgtgaaagactgggaggaggctggctgtgttttcaggggttcttcctgcacagtcggtagaagctgagctgctggggaaggggctggaagaaagcccacaccgcaggtatcagtagcaaattcaaaaactacagaatcagctccagaggactttgttaacaagaaagagaagattgaaaacagccctggggctacaccaactcaagagctcccaggc

SEQ ID NO: 12326 - DNA, 544 bp, Homo sapiens
aagtaccattgatggaagtccagtagtcttgccacattggtttatgagggcttcttggagtggaaaagaccgattatcgggggctttgaaaacagctgcaaaccagggaggaaaatcatctggcccctgctctgaggacagacatgtgctaccaggcccactggcctggaccctgaaagggccagccacgctccccgcttggcccctgaagtgcatgggggtgtggcacacaccctaacctgtgcctattcacccttggccacacaggccagaaccccccagccttacaaacccccaaaccatacctgaaaggcttggggaaccaaaaccccggctttttgggggcccccgtttaaaccccaaaaattttcctttggggaaaaccccagagcccaacgggggtttgttttttcccctttttttggggggttttaaagacacaaacccccgggggggggctccttttttttttttttcggggggtttagggtggtttttgggtggtcaaattaatgggggggggtttagtttgtgggttttaacc

SEQ ID NO: 12327 - DNA, 104 bp, Homo sapiens
aggtacgcggggagacgccgcgccgcgctgcgacgctgtagtggcttcgtcttcggtttttctcttccttcgctaacgcctcccggctctcgtcagcctcccgc

SEQ ID NO: 12328 - DNA, 469 bp, Homo sapiens
aggtactctcttaatggcatttttatggtaagttgagttacctcagaacctgccgtgcccctcctggatgcaccaggaaagtcacagatgggaaaggacactctctcacagcagctttgctccagtcaccaagcccaacactgcgaaccataaagcagcacacagggacttctttacaccaaaggggcccgatccagcccttccttctgtgcctgccacttccgggttggtgctttacagcgcttgaagggagaacaatgttctgtagtctgcaacacactccagaccatgttgacgctatgatcactatgtttgcatgattgcatagagcttaaaagaagaaacagaacaccaagtttcttgcactgaattcacatatgaaaactggaagagcacaactgttagttttcaaggtctttggctaaagcttcacgaatgaattgtaaagtacctgcccgggcggccgctc

SEQ ID NO: 12329 - DNA, 447 bp, Homo sapiens
ccgggcaggtacccccagcatctagcagtgttggcatgtagtaggcactcaagaaatgtgtgttgaatgaacgatgcctgtgacaagcaagcggactttattctttcctgacccttgctcctatgacacacctcctcctgactaccactgtcactccttcagagcagaactcctctagggaacctggatggggaacaacccatgccaaggacatccctgggtgaagcagggctacacttttgatgaactggaacaagctgaagggtgtttggacccaaaaggtttaccccagcagaaccatagaacctgaaaggaaaaagttgcaaagacttttgtgggaccaaaatttggcccaagtttcagaaaaataattgggtgggttttaaattggagctttgtttgaatcaaactttgccaaaagaaagccagaaaaaattgaaaaagatt

SEQ ID NO: 12330 - DNA, 263 bp, Homo sapiens
aggtactttttgtggtgcatcatcataaccaagccgtcccttaccagcatgagccctggggcacccagcgcctctggcatgattcgcatgactagtggggacatgccgctcactgtagggaatcccacactgattagcattgaccagctgaggcaatgttggtcccaatagccaccgcctgtggaagccccgaacgtcatattgatggcacagaagtctattctgggacccaaagaaggctcggacaatgggtgactggaaga

SEQ ID NO: 12331 - DNA, 457 bp, Homo sapiens
aggtacgcgggggagcgcagagcggtttggtcgttcgttgggcggtgttggtttttcgctcgtcgactgcggctcttcctcgggcagcggaagcggcgcggcggtcggagaagtggcctaaaacttcggcgttgggtgaaagaaaatggccagaaccaagcagactgctcgtaagtccaccggggggaaaacccccccgcaaacagcttggccacgaaagcccgccaggaaaagcgctcccctctaccgggcgggggtggaaagaagccttcatcgcttacaggccccgggaaccggtggcgctttcgaagagaattccgtccgtttttcaagaagttcgacccgaagcttgcttcatcccgggaaggctgcccctttccaaaaagtttgggtgagggggagatccgcggcagggattttcaaaaacccgacctgagggttttaagagccgcaagct

SEQ ID NO: 12332 - DNA, 413 bp, Homo sapiens
  misc_feature 260: n = A,T,C or G
aggtacctgaaggttttgtctcttaattttctttgaaccacacctcttctccttattataagaaaaaccctcttagggtaagggaagcccaaattaactgtcctgaaattttgcattatatttaaaccataatatttgatttacttctgtcaaacaaaacactaccatttgggttctcatttgtagattatttaaaaacatgtttttcctgttaattatcaatgcatttactatcacaaggattaaaaagatcacttcangtggtggggatgtttcatgaaacaccatggtggggagtaggtagtgggcaggcagagtgacaatcagcttaacctcctttcacctagctgttctttagaaaaacaaaaataaaagtcaaattgctttcagttttcaagagtgaaaatggagac

SEQ ID NO: 12333 - DNA, 143 bp, Homo sapiens
ccgggcaggtacgcgggaaaactgaaccaacccacccgggaccgaaatgaagatgccggtggccgtgggtccctacggacagtcccagccaagctgcttcgaccgtgtcaaaatgggcttcgtgatgggttgcgccgtgggca

SEQ ID NO: 12334 - DNA, 413 bp, Homo sapiens
ccgggcaggtacagatatttttgacctataggtgcctttatgagaattgagggtctgacatcctgccccaaggagtagctaaagtaattgctagtgttttcagggattttaacatcagactggaatgaatgaatgaaactttttgtcctttttttttctgttttttttttctaatgtagtaaggactaaggaaaacctttggtgaagacaatcatttctctctgttgatgtggatacttttcacaccgtttatttaaatgctttctcaataggtccagagccagtgttcttgttcaacctgaaagtaatggctctgggttgggccagacagttgcactctctagtttgccctctgccacaaatttgatgtgtgacctttgggcaagtcatttatcttctctgggccttagttg

SEQ ID NO: 12335 - DNA, 402 bp, Homo sapiens
ccgggcaggtactgtgtttagaagggattaccaaaggctggagcgatttaagctatgcactagccttgccctcttaggttgcattctctttaggccactggttctcaaacattagggtgcactgtaaccattacagagcttgtgaaaagtgcagaaacctgagcctcaccttatgagattcagccagggggaggacaggaatctgtatttttcatagcaacctcaagtaatctttattctgagggtctcgggattgcaggttgaaaaacacaaccttaatcagcagtaaattcttctctactcggccaggcgcagtggctcatgcctgtaatcccagcactttgggaggccgaggtgggtggatcacaaggtcaggagttcgagaccagcctgaccaacatg

SEQ ID NO: 12336 - DNA, 403 bp, Homo sapiens
aggtactcttaaaaatctgttaagagagtggatctcattttaagggttcttaccacaataaaattaaatttttgaaataaatcagtcatatttgagtgaaatgaaacctttccgagtagtttcagacaattgataatacctagtttacagttcctgtagtcattttggagggtgaggacttgatgtgtttagtaaagttgagaaataaatacatgaaagaatgtgtggggaagagaaattgtggggaagagaaattgtctcagaggaccattcttagtggcactggggaaatcttggcacccagaagaattcaactgcgctcactgcaaaaatacaatggcctacattggatttgtagaggagaaaggagccctgtattgtgagctgtgctatgagaaattcc

SEQ ID NO: 12337 - DNA, 354 bp, Homo sapiens
gaagagcaaccgagatgaaggtgaagatgctgagccggaatccggacaattatgtccgcgaaaccaagttggacttacagagagttccaagaaactatgatcctgctttacatccttttgaggtcccacgagaatatataagagctttaaatgctaccaaactggaacgagtatttgcaaaaccattccttgcttcgctggatggtcaccgtgatggagtcaattgcttggcaaagcatccagagaagctggctactgtcctttctggggcgtgtgatggagaggttagaatttggaatctaactcagcggaattgtatccgttcaatacaagcacatgaaggctttgtacctt

SEQ ID NO: 12338 - DNA, 378 bp, Homo sapiens
gagctcaccgcggtggcggccgaggtacgcgggggcttgaaacggcagtagcgcagcgagaaggatcgccatcacacggcgcactggtgcggcttctcccccgagtggatgaacatgtgcttggtgtcgtttttccttgagctgaacgtcttgcaacagtggccgcacgcataggtcatcactgatcagaggcctaacccaaggagggggtcatgtgcagacccagctgtggggaggaaagatgctgcagaggagacggatgcccacagaggcccctgagtggatacaatgctcactaagtgggctgaccccacattggacaccgctgcatccatgtccatcacacaacacagctgccgtttcttctgcctgcttatg

SEQ ID NO: 12339 - DNA, 343 bp, Homo sapiens
aggtacagatctcgcccacccagagaagacctggagtcgtaagactcataaggtccaaacctgctacccccaccaccaccactgtgattgtccatgccatatgactggtttaggtaggaatccatggatctctgacccccataggatccatggccatagtcacgatccatccctccataagatccagggccataatcacgatccattccattaaagccctgataagtattcctgcaggcggagtgtgtgtaatcgtcctcgaagtccatggcagaggctgagggccgtcggccttggcggcgctaggctgagctatggccggcggcgagcgtccgcgacccgc

SEQ ID NO: 12340 - DNA, 256 bp, Homo sapiens
ccgggcaggtacgcggggctaaacctagccccaaacccactccaccttactaccagacgaccttagccaaaccatttacccaaataaagtataggcgatagaaattgaaacctggcgcaatagatatagtactgatcatggaataaacacatctctctttttttaatgctggcgtctccctgacatttctttgtgaaccaactgttgcctaggctaggcccaggggacccctggaccccagaccacctctgtacct

SEQ ID NO: 12341 - DNA, 349 bp, Homo sapiens
aggtacaatccatcctgaggcaaaattcctctccagctgtgaatctgtgaaaccagatgagttacgtgcttccaaaatctaagggtagggcaggtatagaagagacatccccactccaataggagaaacaggaaaaaaagggtgatgatcccaaggaagtcaaaacctagcaaggtcgagcggccgcccgggcaggtaccagggaaacaaacatgaataaaatactggctctttgctgagcaagcttggagatcagtttcagggaaagccaaaatggtcttaataacaacagagaataatagtgctgcaataaagtaagtgaggggagacaaataattgtcctccagtg

SEQ ID NO: 12342 - DNA, 115 bp, Homo sapiens
aggtacgcgggggtcggcgccattttgtctcggcagcggtggccgtagctccatcgcattttatgtttctggcgagaagggaacggagttttcatcagggtagattggttttggt

SEQ ID NO: 12343 - DNA, 448 bp, Homo sapiens
aggtactttttttttttttttttttttggtattaagcctttagttttgacttaaactcgaaggatgctcttagattggtaactactctgagatactaagagtgtttccactctcctcccagttagagtggggggtttcctcctcagtgctgcccctgcatggctggttcatttctctgtgccttctctgacccctcgttaggacctgtcttccagaccttcttaccagggtggaaagaatagggttcatgtagagaatggatctgaaggttaaacacatggagttctagtctcaaagagacacaacagacagtgtcctccttgttgaggtcagagaataggaacatcaagaaatgagagatatcagagagccagaggggtttggacaaatgcattgcctggaacaatgaataaatggcaatgtggtccctgcttcacagcaggacatc

SEQ ID NO: 12344 - DNA, 439 bp, Homo sapiens
ccgggcaggtacttttttttttttttttttttttttttttattaacaacaaaattttttagaggggcttcaacttaactgaataggattaaaggtggattctttggtcagtgttcaagaagagaccctatagctacttacaaaggagtccacacctcaaagtaagccactcagtaaagcttatctattttcactggaacgaaaaggagctaaacaaatgacaaattccactaaactacaaggaagacaatcagcatcagttgtgcaactttggttaaaatgtcccagccaaaaaacattctctatcatttcatcattttaatcagggagcttctcattcctatttgctctggggtttctctgctaaaatgtccacatgttgattaaatagcaaactgagacaagccctacattttacagcctggccgccaaaaccaacg

SEQ ID NO: 12345 - DNA, 306 bp, Homo sapiens
acgtacaggctcatggttgggagctgagggaaggctgagaatcctcccggaacctctggattctgacgccccaggggttcttcacacaggctggccggtctcgggattgaagccggagacgtcagacgctaaggttgcttaaactgcggcccacgtggaaggctcttagccaccctgcctggcccgaggtaatcgcgctagggacgctttttctgcagcaatgatataccccgccgaactgtcccacgtcctggttgggacctcttggtttcgcttggctgggctcaatccatccgtacctgcccg

SEQ ID NO: 12346 - DNA, 430 bp, Homo sapiens
aggtactttttttttttttttttttttggtattaagcctatagttttgacttaaactcgaaggatgctcttagattggtaactactctgagatactaagagtgtttccactctcctcccagttagagtggggggtttcctcctcagtgctgcccctgcatggctggttcatttctctgtgccttctctgacccctcgttaggacctgtcttccagaccttcttaccagggtggaaagaatagggttcatgtagagaatggatctgaaggttaaacacatggagttctagtctcaaagagacacaacagacagtgtcctccttgttgaggtcagagaataggaacatcaagaaatgagagatatcagagagcccgaggggtttggacaaatgcattgcctggaacaatgaataaatggcaatgtggtccct

SEQ ID NO: 12347 - DNA, 473 bp, Homo sapiens
ggagatgccgatctctactactgtagggcgaatggtagctccaccggggtggcggccgaggtacagctgccagtattgctcgtttggttctgctttcaggcacaatttggatcgccatatgcaaacccaccacggacaccataaaccattccgatgcaaactctgctccttcaagtcctcctataacagccggctgaaaacacatatactcaaagctcatgctggtgagcatgcctacaagtgtgcttggtgctcattctccaccatgacaatcagccagctgaaggaacactccctcaaggtccacggaaaagccctgaccctccccaggccacggatcgtcagtctcctcttctaacactcccaccactccttccaaaaagctaccccggctgaagaagtggaagactccaatgactcatcatattcagagcccccagatgttcagcaacagttgaaccactatcagtcag

SEQ ID NO: 12348 - DNA, 418 bp, Homo sapiens
aggtaccagtggccagaggacctgctcaaacctgaccttattctgctgctcactgtgagtcctgaggagaggttgcagaggctgcagggccggggcatggagaagaccaggaaagaagcagaacttgaggccaacagtgtgtttcgtcaaaaggtagaaatgtcctaccagcggatggagaatcctggctgccatgtggttgatgccagcccctccagagaaaaggtcctgcagacggtattaagcctaatccagaatagttttagtgaaccgtagttactctggccaggtgccacgtctaactagattagatgttgtttgaaacatctacatccaccatttgttatgcagtgttcccaaatttctgttctacaagcatgttgtgtggcagaaaactggagaccaggcatcttaattt

SEQ ID NO: 12349 - DNA, 459 bp, Homo sapiens
  misc_feature 19, 82, 118, 137: n = A,T,C or G
ggcggcaccggaccgcaangctcagcacagccgcggcgccggcggacttccacccgggctgaacagagggctggaacgaggnagggggcagaaagaagggcagaggcccggaacaganacagcaggaggcagagagngaggaggaaaaacccgacaggacggacagtgacagtgaagacacagatgcaaacacaactgtgcaaacaagggcgagagaaaagaggaagccccagctggagaaggacacaaagccgaaagagcccagggagacgcccgggagcaaccacgaggaaaagcagccgcccaagaggctggaagcacgtcccggagccgcagccaagacgccggaagctcggagacagaaacgcaaacagagtgtcagacaagcgaaaagggaaaggggattacccccttacggacagggagcaagcagggaaagccgcacacaggcaggcgacg

SEQ ID NO: 12350 - DNA, 440 bp, Homo sapiens
gccgtgaccactctacttacggcgaatggagctccccgcggtggcggccgcccgggcaggtacaatgaaaggtaaaagtaatgctctcagaggaaatgtttccattctagttctatttggaagtccttgggacaatttgtgttttgattatatttagaaatcttcagtattttgtcttggccaggtgtagttgctcaagcttgtaatcgcaacactttgggaggctaaggcgggtggattacctgaggtcaggagtttgaatcaccctggccaaaatggtgaaaccctgtctctactaaaaatacaggaaatttagctggaatgttggtgggtggggtgccctgtagttccaaagctactttacgaagcctgaagccaaggagaaatcggctttggaccttaaggagggcgaaaggtttgcagatggagtctttgattgg

SEQ ID NO: 12351 - DNA, 472 bp, Homo sapiens
  misc_feature 72, 84, 103, 110, 133, 136, 162, 163, 164, 165, 183, 184,186, 213, 214, 226, 227, 231, 233, 243, 245, 252, 266, 273,327, 374, 425, 447: n = A,T,C or G
gatctgaccttcttgttatcgggcaatttttgctaccacggcggcggccgcccgggcagttatttttttttnttttttttcccntttttttttacaagcgcgnagagccngaacgccggcggaatagggggcngcncggaggcccacaaaaggggggaaaannnncaccccccccacaagggnngncccaaggggccaaagagcggagccccnngggacaaacagnnaaancnacaaggggancnagagggnccagcgggcaaaancaaaggngaaccaagaacccaacggggacaaccagcgaacaccaggcccggaagggaaggngccccaacccaaaaaaacgcccacaaagaagccacaaaaacgggggngccccacaagccggaccaaagaagcccgaccgggcccggggggccaaaccngggcccacccggcaaaggaaanaccaggaaacacaagacgccaaaag

SEQ ID NO: 12352 - DNA, 743 bp, Homo sapiens
  misc_feature 143, 182, 183, 743: n = A,T,C or G
ttgcacatctaaattacatactagaagataaaaatgagagtagataaaggaatagtacgtacataagttatatttgtaagtgatgatgatatgtaagtagtactatacagaaatgtattatatgttaattatgaagtaatttntataaagcaggtctaaggagtcgacgcgtaagaccgctnngatgtttctccaccgcggcggcggccgcccgggcaggtacactcacacacacacacacacacagagctcttagcaactggtcctgagtagctctttgtaaattctttattgccaggagtgaaccctaaagtggctcacaagagtgccctatttctttcaattaactacaaggacaaacacaatctaaaaggttgaagataaagggacccagtatgattttgccaaaaaattctaaaagcgccactctaccatgaaaatgggataaaagggttcaccatttggggggattttggcacttgggcatgaaatttcctgtggaaaaaggctttggttgggataatttgtggaatagcagcattaggaggaaaatgaaaagtattattaataattaaagaatacttatggaggggtttcccctgcccttttggctttcaacaattcccaagggcttaacaaaaacaggtggcccccaataaaaacaatttccccctccgtgtggggcttctttggcattttgcggaataatttaattcctaaaacttctttaataaaacaaaaan

SEQ ID NO: 12353 - DNA, 548 bp, Homo sapiens
aggtacgcgggggattttttgatttttcaatttccacaatgtgacggtgttttcgacagagttcctcattggtccctggataagaatgttaaggaaattggtgtatgaactttggtgctatctgtagcattctgtacaactcaggcattgaagcaaccatgcacatgggtctttttgctttaatgggaccaagctggagctttgaggaaaaactcgtaaaataagtttttttttctctttttgaaaagattatgagattttattacaaacctactttaaaaaaaaatattaattccactttagggtttacttaagaattattttggctttactccgtttaaaatttttttttaaacggttaaattttttaaattaaaccttttaaaggatttttttaaaggagaaaaaaaattttggaaagaaacctttaagaaaaggaagttaaatcatttgaatggtatagtattaaatatcttcttttctcaattatttgaaactctaagtttttaacctcttggtctctggggggccgggggcccttatttttt

SEQ ID NO: 12354 - DNA, 98 bp, Homo sapiens
tggagcttaacttcacaattaaattggcgtttggcgctcaacttgccccgcttttccaagtcggggaaaaccttgtcgtggcccagcctgcattaaat

SEQ ID NO: 12355 - DNA, 496 bp, Homo sapiens
aggtacacgactcccatctaggctgaaaacctagaagtggaccttgtgtgtgtgcatggtgtcagcccaaagccaggctgagacagttctcatatactgttgagccaaactgtttgggtctcgttgctttatggtatggtctggatttgtgcggatcggcttcccgtgaaacttgggaagaattgtggtttatcagattgtcgaccgattctgtttcattccggaagctgctccttctcaagaggtttggttgagtggaagattcgctgcatggattttcataaactcgactcttgtagggttgtctagagccgcaagcccaatcgtgtgcggcttgccatgtagggcttagccgaaagccgttactcttgggcgccgcttcttaggaaacttaggttggaattcccccccgtgggcttgccagtgaaaatttcgattattctaaggcttttattcgaattacccgtttcgaacccttcggatgtggcggggcccc

SEQ ID NO: 12356 - DNA, 420 bp, Homo sapiens
ccgggcaggtacagggcacaatgtgctgggctcgggctcttgatttcttttcggcttgagaaggtgcgggcgatccaaagccccccggggactgcgtgtagccgccggctcccccgtatgaggagctgccatagctttcgaatccactgttccacatcttggtcacgattctccgcaaagaggccgagaaggtgcgggtctgggggaaatagcggaaaaccacagaacgcggccgaggtacgcggggggggtttctgggaaaaggcttgtgaacggcgtttatgcgtctgccgtggacagcgaagctgctgcggttcctgagccggaagagtgcctgtgaagaaaacgggggattgccctgaggcttatattctgcctcagttgtcttttcttgaaatatttataaatcagaatgtctgc

SEQ ID NO: 12357 - DNA, 426 bp, Homo sapiens
aggtacgcgggggtggcgcattctcagtgaggagggccgccctgcatccgtcgccggccccggtctccaggggcctcacccgagtcatgccccgctattgcgcagcgatttgttgtaagaaccgccggggacgaaacaataaagaccggaagctgagtttttattccggaaaggacccttctaaaaaaaaaatcccagaagaaaaacttggaagatgagaaagaagtatgcccaaaagccaagtcagaagaatcatttgtattaaatgagacaaagaaaaatatagttaacacagatgtgccccatcaacatccagaattacttcattcatcttccttggtaaagccaccagctcccaaaacaggaagtatacaaaataacatgttaacttttaatctagttaaacaacatactgggaaaccagaa

SEQ ID NO: 12358 - DNA, 642 bp, Homo sapiens
  misc_feature 549, 599: n = A,T,C or G
tatgacgactactatctgactatattggagctccaccgctgcggcggccggccgggcaggtacacatatggcatatgctatattacatcttataactgtcatgatgcatgtcttgagcatctggatgagatatcacatcagttgaacgcatattcttatgctcagcgacacacacaaaaacatggcgctttgataggacactactggccagtcgtgctatagcaaaggtctatactatgcccaagatcctgtgtcaacgtggcgtctacatagttgcgcgaactgctgtgtggagccagggactgaattcactgagccttccccgtacgtcacctgtgtagaagctggaattcttatgattagtttcttgctcgaagatgctgttggtctgagagtcgaatcggaccatagtcaatggctggacagcaatcccggcaagccagaagatgaagttaaatccgaacagcaggtatttgatgcacttggtgcctcctttgaccggcatggtgagggctaacttagcctgggccgaacgggtgcgggactggngggcgcgcgcagctgggactggcgggacctggcgctggatacagatgcangcggctgtgggctggtctccggctccccgcgtaccttgggcgt

SEQ ID NO: 12359 - DNA, 879 bp, Homo sapiens
ccggcaggtactaaaatcacgagaacacctaaacaacaaccaaaaatctattgtggtatgcacttgattaacttataaaatgttagaggaaactttcacatgaataatttttgtcaaattttatcatggtataatttgtaaaaaaaaaaaaaaaaaaagtacgcgggggcaggcgccgtgtggcactcggcggtcgaaaggggagttcaaggagacgggggcgacgcggctgagggcttctcgtcggggtcggggctgcagccgtcatgccggggatagtggagctgcccactctagaggagctgaaagtagatgaggtgaaaattagttctgctgtgcttaaagctgcggcccatcactatggagctcaatgcgataagcccaacaaggaatttatgctctgccgctgggaagagaaagatccgaggcggtgtttagaggaaggcaaactgatcaacaagtgtgctttggacttgtttaggcagataaaacgttctttgcaataccttttacaaaatattggactagcattgaatatacaggcccgcagttattttcgtatctgtattatacagcaagaaatgtttgacaattttgtctctggtaaaactgggcttggtgctgccttgtcctgagaaaactggcaaatgtccccaagagataaaccgatcgcactttatcgggaaatatttttgctttaaactatacccgaacccaaccccgataatatcggtagtccgcaatcttgctactgtgatatgcgcttgttttttacccacggaaaattgttgctggacattattcgctggtaatatattctctcgataagataattctcatacattgtgtattcaaagattatgtgctcgtcactattct

SEQ ID NO: 12360 - DNA, 866 bp, Homo sapiens
  misc_feature 14, 15, 38: n = A,T,C or G
ccggcaggtacttnnttttttttttttttttttttttnaatgtagtccacccatttaattgttttggagttataggccaatggaaaaaaaaaacaattctccatcttattaaaattaagaactctttgggcagtaagtaaaaacagtaacaaaaacccttcgaacttggcaggtggctaggactcctgaggaatcatgtcacagctatgtctccaaaaaatatttgaaattaaggtttagagatttcaaaggtctcttctgagtccaaacttttggcagatgtcaaaattttaggaaatcattttggaagagaggaaactagcccaaactttttttttgtccccccttccacagacagattgaagcaaggactaaatcatcaatggagtttgaaagagaggaatcctaccataataacatagaaagatcttcatttctgtggcctgataattgaggtgtaagaggtgacctggtgcaattggaatcatgttggcaagaattctagtcttaactatttgaatcactatttgtatacctttagcaaactcccttatcttctttgggcttcagtttctccatgtgtctgatatagatcacagcaataaaaattgggttttacctgaaatatttttgacgatacttacaaaagataaaggaaggtaaaattattttgcgttttccccataacccccaggcttccctacttaattaaaagtttgttcaaattgctaactgggtttggttggagaaacctgtttaagtggaaaaagagctggactcaaatagttcccaaaatccacatgtgggatattgtatttaagccgggaaggtcaacctgcattccaaactgtgttataatatgggat

SEQ ID NO: 12361 - DNA, 422 bp, Homo sapiens
ccgggcaggtaccctgcacacactaggttctcaagaaatattcatgtaataagtgaataattgaatgaatgaatgactaagtgaaacttctctttacaacaagcaaatgtaatagccctttctaagctctcatcatcctcattgtccttggtggattcccaccacactcagaattccttttcacctttccatgcatatgaggccccacctaatcaggtgctggtcttcttagctttctgtctcctaccactttttgtcttgcttcgggaactccactgtcttttctgttataggaacatgctaaggttattcttcatagtcaagagcacaagctctgaacccagccaaatctgtttttgaactcaagttccacttattgctagctgtgtgatattgggaaattctttatgttctgtaaccct

SEQ ID NO: 12362 - DNA, 291 bp, Homo sapiens
actttatgatatatttttaatttttaactttgttatatataatttattttatatttattttatataatattttatatgtttttctgttttttattattttaaattatttgttgttgacgcctatacactatatgggcgattggagctcccgcgggcggccgaggtccccggttttttttttggcctacttttgtctttccgtggagctgtcgccatgaaggtcgagctgtgcagttttagcgggtacgcgggtgaagatcctcaccgagcgcggctacagcttcaccacca

SEQ ID NO: 12363 - DNA, 426 bp, Homo sapiens
gcccggccggtaccttttcagggcctgccttttctaaagttaaatgttcagggtgaaaggtccttccttttcaagccctacatttgcatctttcaagcttctaagaaaactccctcaataagaattggaatgtaaatatgcctacgttcctcttatccacatcctttaaactaattatagaacctatgacaataagatgggctccttagttaactaatgtttccaggtatagtccatggtttaactatgtggcaaaaagttgacactcttcttattaagaaggagggtctatgtccttaccctgagattgccatgtaggtaagttcacttgtaggtgctccaactggaagtcctagcctaacacttgggtgaagatgccttcacacgatctgaaactctggccaataaattatccccagccttctg

SEQ ID NO: 12364 - DNA, 383 bp, Homo sapiens
aggtacaccgattggaaaaaggataagtgtgagccactggagaagcagcacgagaaggagaggaaacaggaggagggggaatcctagcaggacacagccttggatcaggacagagacttgggggccatcctgcccctccaacccgacatgtgtacgcggggctctttttccggctggaaccatggagggtgtagaagagaagaagaaggaggttcctgctgtgccagaaacccttaagaaaaagcgaaggaatttcgcagagctgaagatcaagcgcctgagaaagaagtttgcccaaaagatgcttcgaaaggcaaggaggaagcttatctatgaaaaagcaaagcactatcacaaggaatataggcagatgtacctgcccg

SEQ ID NO: 12365 - DNA, 244 bp, Homo sapiens
tgtgcgtaaatacatggttcataggcttgtttccctgtcgttgaaaattgtatattccggcttcaacaaatttccaacacaaacaattacgaatgctcgggaagcattaaaatgtgtaaaagaccctgtgggttgcccttaaatggagtgaagcctaaccttcaacaattaaatttgcggtttgccgcttcacttgggcccgctttttcaggttcggggaaaaccctgttcgttgcccagcttg

SEQ ID NO: 12366 - DNA, 412 bp, Homo sapiens
ccgggcaggacaaggctcagaagattgaagtatcaaagtcacgtcctctgtttctaacactgtttgatagacagctttctggaaatctgtcaaagaacaatacaccatccggtcttccttcttaggcaactgatccttgataagagtcttggtgcgcctgagaaaccagccagacatctttttggcaagtctttgcatggcctttcggccagtggctagttctctctttgttgccgtgtgtctctgaccatgttctactgggtcagaaaactgcttcttgaagtaggtcccactccctaaaaggcctggcacagcccagtccataacacaccacagttccttcatgttgttctgaaggatggttccagtgaggccaatgcggacattacatttcaaagctttcataacttct

SEQ ID NO: 12367 - DNA, 517 bp, Homo sapiens
ccggccgggtacgcgggggtggaagcccggccctgcaggctggagaggatttgattagactacgcgtttcgacttgcagggtgtttaatcgtcgccaagcgggacttactgcaagctatcaaatctgaggtcttattttgttgagtcgaaaagtgaaattttcctttggccaacgtgacagcattttgacatttgtgccagcaaagaaaatggttaatggaagaaagacccagtcccgcttgctttgtaagggctgggaagttttgtggagggccaaatattaattacttttggcttggaaaataaaaggcttccgggaaataattttaaccacagggttttttaattgggcagggaatttcctttccctaatgttttacatgggttgggagttagaattgcttagatgggaaaagacccccaaggaaagcctgttttaatgggccaaaaaatgaatattaccacccaccaaaggtatttaattctcctgaaaactttcaagttggaattgttcaag

SEQ ID NO: 12368 - DNA, 413 bp, Homo sapiens
aggtactttttttttttttttttttttttttgcaattgcttttggcatcttcctcatgaaatctttgccttacactttttgatagtgtctccctctttggaatttcttttgctgtctctcctttgggtgacttcagaaaaaaataaaaataaaaaataagcctttccagctctctgttctcagcatgtttaaaaactgggaatagcttttgagcactcaggtgcctaggagtgaatttaggaactgaggtgttgtcttagtccatttgttctgcaaagacaaaatacctgagactgggtcatttataaagaacagaaatttatttctcacagttttggaaatccaagatcaaggaactggcaggttcaatgtcttgtgagggtctagtctctgcttccaaggtgacaccttgg

SEQ ID NO: 12369 - DNA, 414 bp, Homo sapiens
ccgggcaggtactttttttttttttttttttttttttgtaattttgattaaattctttatatcattcttgcaacttttccatgcttttgaaattatttaagaaagttaacaaataagcaaacaaactacaaatcaggaatggaaagtgaattttacaaaatgccattttcagattcacaagacgcttgcattcaccttccttcgacgattactacttcttacacgctatgatttctctcctttttccaccacaccggctccaggtctacttgtctttactctccccgcttcatcgctgtctgcccccttccaaaacctgttctttggtttcattctctctttttcttagttgattcatttctgcttttgtctttaaagaacacagtaattcttcaacttactttggttctttgc

SEQ ID NO: 12370 - DNA, 354 bp, Homo sapiens
aggtacaaaagccttcatgtgcttgtattgaacggatacaattccgctgagttagattccaaattctaacctctccatcacacgccccagaaaggacagtagccagcttctctggatgctttgccaagcaattgactccatcacggtgaccatccagcgaagcaaggaatggttttgcaaatactcgttccagtttggtagcatttaaagctcttatatattctcgtgggacctcaaaaggatgtaaagcaggatcatagtttcttggaactctctgtaagtccaacttggtttcgcggacataattgtccggattccggctcagcatcttcaccttcatctcggttgctcttc

SEQ ID NO: 12371 - DNA, 406 bp, Homo sapiens
aggtacatctggcgcagaccagcagtggcacgattccaaacaaatgtcagacgagagcgcttcatggggagaaactgaaaattatcccgcgtacctgcaggcctcctacacctacctctctctgggcttctatttcgaccgcgatgatgtggctctggaaggcgtgagccacttcttccgcgaactggccgaggagaagcgcgagggctacgagcgtctcctgaagatgcaaaaccagcgtggcggccgggggcagctggaggtgcctcagaaggtgcattctgcttcctgcaggggcttgaaacaccaaggcactccagggatcctggagtcaaagcagcagccccggttgttgcactccttgggggtgacatgggggtagccgcagtccaccctgtccttggct

SEQ ID NO: 12372 - DNA, 422 bp, Homo sapiens
aggtacgcgggatcctcattactattctgcctagcaaactcaaactacgaacgcactcacagtcgcatcataatcctctctcaagcaattctcctgtctcagcctcctgagtagctgggattataggcatgtcccactattcctggccaatttttgtagttttagtagggacggggtttcgccatgttggccaggctggtctcgaactcctgacctcaggtaatccgtccgcctcagcctcccaaagtgctgtgattacaggcatgagccaccgcgccaggcctcaataaaatattttataaatacctttaaggaataatacaaacacaaccagagcttaaataaataaatgtaaatcagtctgcttgctggttaagtaatgagttcagtgtttctctccgcacagaaagtgggagagatag

SEQ ID NO: 12373 - DNA, 370 bp, Homo sapiens
cacgctggttttgcatcttcaggagacgctcgtagccctcgcgcttctcctcggccagtccgcgatgatgtggctctggaaggcgtgagccacttcatcgcggtcgaaatagaagcccagagagaggtaggtgtaggaggcctgcaggtacgcgggtatattcaggtgaatgagccctggaagcggattaaaggcagtgagactgacaggcaacgggcaggaacagtgactggcttggcagtgaatatagctgccttgctctctgtcatgcttcagccttacatgcccacggttagtgccacaatccaggcccagctgcagctcccacctccagcctgcagtatcctgctgacaaacttcctgtgtacct

SEQ ID NO: 12374 - DNA, 425 bp, Homo sapiens
  misc_feature 178, 179, 180: n = A,T,C or G
tggctgcccagacgtatttggcgtcgcagtagccgacaatggcggcctcctggcagcagccatcgcacatcaggttatccacgtagctctgccaaccggccatcttcgagcccttcgcactgcagcgcggacggcgaggagcccccgcgtaccttcggccgcccgggcaggtaccctnnntttttttttttttttgtgtgatttttttttttttgccttaagaaataaaagaatctttattgttttagaagcaattttgagcaaacagacaggcaaatatctaaagataccatacatcaactagggggttaaacatttgaagaaaaaacatggaaagtattttacatgggccagtttatatactgctatttacactattatttcctatagctacatgttctttgtacaataggcactttattagt

SEQ ID NO: 12375 - DNA, 397 bp, Homo sapiens
aggtacgcagggagccacacttcaggtgcccagtgtccacactgactagtggtgactgcgttggacagtgcacatacagaacatttctgtcatcacagaaagttcctttggacagagccatgttaagtgatgttatcacaagatggacagaaacattcctgtttgatttatttttcagacccagtttgtggagaaaaataatgatgctttacatatgtctcttgaatccttaatatgtgaatccagagataagtttatacgggaattatttgaatcatccacaaataacaactaagatactaaacaaaaagcaggaaaacttagcttcatcagcgtgggaaacaagtttaagacacagttaaatttgcttctggataaacttcgaagtacctgcccg

SEQ ID NO: 12376 - DNA, 613 bp, Homo sapiens
aggtacagactacaatgccagtgtttcagtcccagacagcagtggccccgagcgcatattgagtatcagtgctgatatttgaaacaatatggtagaacatttctgaatgataaattcaatctctctactcattggtaagtatgggtcacttgctatgtttgtctcaattctactccaacttggcaaaccccaggcccaagtcttcccggcttcgaaatcctggatgctttgtggaaatggctttaaaattaactcaaccacttattaatagggaatagttgtacttttttgaaccttgtctgaagtttttgtaagggcctggttttgtattttcaattcaagtaaggttcctaggcctagtgtatgtgtaaattttatttcgtgtgtgttaccaaaaagtgttggccttataaagattccaaataagaaaccttttttcgaagtaagtaaactatcttctaaaacctcaaacccaattcaaaagacttttttttctcagagtaaaattggcttggtccccttacaattttctcaacattgtaacaaggaaggtttggttttcctttaattttggtgagtgcaaaaaaaacccctcgattatgggggtttatga

SEQ ID NO: 12377 - DNA, 498 bp, Homo sapiens
aggtacaaacattttacaaaaaagaacattaccaatatcagtggcagtaagggcaagctgaagaataaatagactgagtttccgggcaatgtctgacctcaaagacatccaaactgcgttcaggcagctgaaacaggcttctattcccagtgacaagcatattgtggtcagtaattacaaaactgatggtaaaatgaagggctacttacattaggtcccagtttaaacaaaaacttcctctttcttccttcgggttagggccaatgtataacatagttggtaaacttcattcaaaataaattttaaaaccccaaagtgcgaataatcaaactgcttatttttccccattcttaaatcttcaatttttaagcccctttcaccaattgttcgtcaaatggaatttcaaggtttacttttggccaaaacgtattcccccggtgttttgttcaataacaagaattacttttgtttttttttaaccaccattaaatcgtttgg

SEQ ID NO: 12378 - DNA, 405 bp, Homo sapiens
catcttgggtcatcgatgagcctcgccctgtgcctggtcccgcttgtgagggaaggacattagaaaatgaattgatgtgttccttaaaggatgggcaggaaaacagatcctgttgtggatatttatttgaacgggattacagatttgaaatgaagtcacaaagtgagcattaccaatgagaggaaaacagacgagaaaatcttgatggcttcacaagacatgcaacaaacaaaatggaatactgtgatgacatgaggcagccaagctggggaggagataaccacggggcagagggtcaggattctggccctgcttgcctaaactgtgcgttcataaccaaatcatttcatatttctaacccttaaaacaaagctggtggaatatctgatctctacggttccttct

SEQ ID NO: 12379 - DNA, 330 bp, Homo sapiens
atttccactacaaacaatacgaagcccggggagccataaaagtgtaaaaggccctgggggttgcacttaaatggagttgatgcctaaactcaacatttaaatttggcggtttgcaggcttcacttgcaccggctttttcacaagttcagggtatatacccctgtactgtggcccatgcttgacaatttaaattgaaattcgggcacaaacgcacgccggggggagaaggccgggtttttgacgttatttgggggcggccttctttccggcattttccttcgtcttcaacttggacatctgcttggccgcttcgggatcggtatcggtctt

SEQ ID NO: 12380 - DNA, 413 bp, Homo sapiens
ccgggcaggtactctcaagacttagaagccatatggatagaatgaaataggaattggtggtgtcttggaatatctgcttcaggacgataatgaaactaatgatttagggcagtagaagaagccgtgggaggaactttcacatttggcgagcatggaatcccctttgcagttatgtttgcctgtgcatctccggcagctggaggacgaatcacatcaggctgatgagtgtgtcacgctctttatcccccaagagctgtgatgaagaccaagactaacagttgattaacagtgctaccttttataaggctgatttagttcctaaaatatgctgaaaggaaacaaaaccaaaaagaaaaaagagtggaaaggggggtgagacagaaacctttgtcgagttcttattccatcaccca

SEQ ID NO: 12381 - DNA, 533 bp, Homo sapiens
aggtaccttctggacaatttccagaacattgaattttcctatcactaagatgtcaaataccgcatttaaacccagcacagtgatcccttgctctttgcacagcatggccactgctcccagaaagatactcagcagcacccagaaggtggaaagaatggcgcctccttccttggtaacctttctcttaaatggcttttacagttagcccaaaggaaaaagaataaccaagaaagaaacaggggccaacaccagggagggttcttgcaacgggcccgcttcttagaaaacctaagtgggattctccacccggggcctggcagggaaaatttcggaataattcaaagcctttaatcggattaacccgttcgaacacttctgaagggggggggggcccccgggtaccccccaagcttttttggttccccctttttaagatggagggggttaaaaatgtgcgccgcctttggggcggtaaaattcaaaggggtccaataaggcatggtttttccccgggggtgggaaaaattgtttta

SEQ ID NO: 12382 - DNA, 427 bp, Homo sapiens
aggtacttctgctccacgaggaaggggatcgccaggcactaccgcatcaagcacaataatgtccgagcccagccagaaggcaagaacaacctcttcaagtgtgccctgtgtgcctacaccaaccccatccgcaaaggtctggcagcccactaccagaagcgccacgacattgatgcgtattacactcactgcttggcagcctccaggaccatcagcgacaagcccagcatagtgatcatcccatccccgcccaaggacgactcccctcagctgagcgaggaactccggtgggcagtggagaagaaaaagtgctccttgtgctctttccagtcgttcagcaagaagggcatcgtgtcccattacatgaaacgccacccaggggtgttcccaaagaagcagcacgccagcaagttggggggctacttca

SEQ ID NO: 12383 - DNA, 483 bp, Homo sapiens
ccgggcaggtaccccagctgttccggaggctgaggccaggaggatgggtggacgctgggaggtggatgctgcagtgagcagtgattgcaccactgcactccagcctgggtgacagagccagaccccgtcccaaataaataaacataaaaataaaggaaccagtttgtagaaagcgggagagggtcccattgaacttcaagccttcgagcagcagctgtggctggacaggttggaccagcaggctggagcagtcgccatcttggcagggatcattgaccctgatctatcgtcgggaggaggaagagcttatcttacgcagggagggcaggtggactatgtgtggactctggtgacctgtttgggtgccaggtgttactcccagggccacccgtaactgtgaatgtgcaggaaccctgacttgagaagggcctggccacggggggcttaggcccctggggaatgagagtttggttcccggtacct

SEQ ID NO: 12384 - DNA, 411 bp, Homo sapiens
aggtactttgttctttttcttcttgttctttgttttgaaatgaacaaatatttatttatcttttataacaagtaaggcaatgttgcttaaaggaagacaaacaaacataaaagattccgttgacaatgcattttttcatctgttcggcacaatgcttttgtcataatggagatgtgacagcaaactttccaggacattcagtcttcggcggcagcacttagggcagatgactggccgcttatagatgaggccaaagcaccaggtaggtggaaggttcttgtatcggttcgaaccccgacagcgcgccaacagacaacacgaggcagtggggagcaacatgctgttttaatgagcgcctgggtgcaggcgtgctgaggctgaaaatggcatcagcccccgcgtacctgcccg

SEQ ID NO: 12385 - DNA, 349 bp, Homo sapiens
ccgggcaggtacttttttttttttttttttttttttttggaatgaacaaatatttatttatcttttataacaagtaaggcaatgttgcttaaaggaagacaaacaaacataaaagattccgttgacaatgcattttttcatctgttcggcacaatgcttttgtcataatggagatgtgacagcaaactttccaggacattcagtcttcggcggcagcacttagggcagatgactggccgctcagattctctatcttgtttcaggacagtggaaaagcttatagatgaggccaaagcaccaggtaggtggaaggttcttgtatcggttcgaaccccgacagcgcgccaac

SEQ ID NO: 12386 - DNA, 347 bp, Homo sapiens
ccgggcaggtacaatgaaagtttcacatacggatcactggctccaaagatgtcctttttggcgagatcaattccagaaacaacttttactctgagaatacgggactctcccgagtgttacttgctcaaatgcgagacgtctcatttaggagaatacaatattaaaggtttagtgcattaaaggaaagctggaaaactcaagggcagagcaagttctgaagagtatgcggaagtcgtggctgcagccaagggtaactttccactgccgggtgacaaggtcacaggagagaagttttaacttgactcccaggaaagcagtctacacggttgttcctctctggaaatggc

SEQ ID NO: 12387 - DNA, 350 bp, Homo sapiens
aggtactccattctccagcattttctacatctggcaagctcgaaagtgaaaccctagtgggccatcatgcaggttttgagttatttactgttacagatgaggaaactgcgaagctacatggccacagtcaacaacgacaacagaaggcaacatagtatggtggttaagagcaccgactctgaagccagcctgaatcctagagccagagctgtgcaacagcaggtaaatgacttatcctgtgcagtttcctccttaatggaaatagtgcccaggccacaatatcgcgagatttacacgtaaagctggaaacaactcccgtcctagagtaagcactgtttactattaagcag

SEQ ID NO: 12388 - DNA, 66 bp, Homo sapiens
aggtacgcggggatcttattctggccttggcggagttggggatggtgtcgcctagcagccgctgcc

SEQ ID NO: 12389 - DNA, 593 bp, Homo sapiens
ccgggctggtacaatcggtgccatcagtcatctccaggtctccatttatcttcctgctgatctgccgtttctgaatgagtctcatcctgcacttgcagaatggtgcagacttgggcagatatagtacttccccattcctttccaaaagtccttccttcgaagccttaataaattgccccacacattttttcattgaaaccccatttttttcacaagcggtttcacagccaaaaatcattaaaactcttgttggtatgtgaagggccttggccggcaaaaatggctaataactaagggccgtttgtggggttcgataaacacccttcaacaatttacagtgcctttacgggttcgggtctcccaaaagttcttcccagtgactttcacttcaatccttttttgattgttcccttgaaagcccctgccctttttctctctttcaaaactttaaccttcttattacttggacaattcttttttccccaagacccctgtggtgaaccacaaaccccccccctggaattcgttaactccgggggccttccctggcttttaacatgggggctattgtaacctcaccctttccaccaagg

SEQ ID NO: 12390 - DNA, 241 bp, Homo sapiens
tgcagacctcctgtgtgccctgttcttcttgttatctttccttggctactgtaaagcatttagagaaagtaacaaggagggagcgcattcttccaccttctgggtgctgctgagtatctttctgggagcagtggccatgctgtgcaaagagcaagggatcactgtgctgggtttaaatgcggtatttgacatcttggcgataggcaaattcaatgttctggaaattgtccagaaggtacct

SEQ ID NO: 12391 - DNA, 427 bp, Homo sapiens
ccgggcaggtacatgcccatttatgggtctggttggtctctacaggggcagcaaagggaaaggaggaagactttttcccagatctctctaccttaaagcatggagccaagtagcttgtattagtcctaggattccttttctcctgcaaaactggtggtagaaacagtggcatgcgggggatggtacatcacaaaatacattttgatatcccaaagaagcaagacttgcaagtaggcgttttaaacataactaatctacagctacaaagttctactcttgatagcatttacctttttggggagtctcccaggctccaaaggataaaagcagagtagaatcagtataacatatacacagaagtccgtattgtaaaggctataaagatttgcagcacagtgagaagatgccttctgctccttcacactgc

SEQ ID NO: 12392 - DNA, 429 bp, Homo sapiens
aggtacgcggggagtgataacattagaaactcattggagcacgaaccctgttgtgaactgcctatccgaaggatctaggttgtgtgcttcgtatgagaatctaatgccagatgatctatcattgtctcactttgcccccagataagaccatctagttgcagaaaaataagctcagagcttccactgattctacattatggatatgtgccgccgaagcaagcacatagccctacttttacacatgcctagtgatgcttcatggacaaggcttggctctgttgagtccaactaacctacctgagattctgagatttctcttcaatggcttcctgtgagctagagtttgaaaatatcttaaaatcttgagctagagatggaagtagcttggacgattttcattatcatgtaaatcgggtcactcaaggggcc

SEQ ID NO: 12393 - DNA, 510 bp, Homo sapiens
aggtactttttttttttttttttttttttttttgctgtcttcaggtttccctaagggactcctaaacaatctgagccttacagttattttagttgtgattccctgttattatttatgagccatgttgatgtggcagtaaggtgtgggacagggaggaatcattctttcatcctgtaattagggtttaatgggtttagggggcctgtgccttttgggttgaaatctttgggtgctttttcaaggtcaacccctttccttaggttgagacaaagaaaaaccagggaggggttctaaatttgggtatttttccattcttccctacttttgggttaaaacctcttgattaaaaaccccccccggggttactctgtccccggggcgggcccgtcttctaaaaaacttggtgggaatccccccccggggccttgcaaaggaaattttcgtatttattaaaagcctttaattcgattaccccgtctcaacccttttaaggggggggggggcccccgg

SEQ ID NO: 12394 - DNA, 120 bp, Homo sapiens
agccctgcaggcctctgccctgaaggcctggggcgggaagaaggagaacctgaaggctgcgcaggaggagtatgtcaagcgagccctggccaacagccttgcctgtcaaggaaagtacct

SEQ ID NO: 12395 - DNA, 82 bp, Homo sapiens
aggtacgcgggagaagagtcaggccggagagccagccggtaggtgaggttggcggcgaaccgagccggcagcgaactgctct

SEQ ID NO: 12396 - DNA, 513 bp, Homo sapiens
aggtacctattctttgcagtctcaggaattgttgacatgctcacctatctggtcagccacgttcccttgggggtggacagactggttatggctgtggcagtattcatggaaggtttcctcttctactaccacgtccacaaccggcctccgctggaccagcacatccactcactcctgcttgatgccttggtccggaagggtgtggttaatttttttcctagaggtgattctttcggggacccacattgtgtcttggaaccttttttcgaaaccagttcttcatcaatttctttcaagggaactctgggttcttggccagaatttggggtttggtggctgtttcccaacccttttttggaaacacaccgaaatgggtgacccagaaaagtgattgaattgccaaacccttattgtttcaattcacccaatgtggctttcttgcttgggcacttacccctgggccttgccccttcaaacaatttgttggtcccgttccaaccttattttcttctt

SEQ ID NO: 12397 - DNA, 467 bp, Homo sapiens
aggtacatggctgtatttatagctctttgcaggtaaagcattatatctcttgcctctattttatttacaaaggctattttcttgcccattttaagtgcccctagtctgtggttctataccatcctatgtatagctttatcatagcactttctatacctgcttcctttactgaactctaagttctttaaaagtaggtatcacaaattaatctcatatttacactgaaaaagggagggaggatggaaggaagaaaaagtagcaccatgcccggtgcagtggctcacacctataaattctagcatttttgggaggcccaaagcaggtgggatcactttaaagtcagggagttaaagacccagccttggctgtctttgaaattccctgtcttctcctaaaaaattacacaaattttggccaaggtgcgaatgggtgtaaagccctgtaaatccccagctttcaagggggag

SEQ ID NO: 12398 - DNA, 352 bp, Homo sapiens
ccgggcaggtactctctggggcaagcaataagtaggaccttgtgtgcagtttcattgtagagacatgtatatctgaggaataaaacagcttgttctgtgtcagtctgagatatgtggagattttgttcctatcctatagctcttttgtattctttggcatattttatatcctggtagaagaaaacaagtgcttgtttccaattttcttttttcttatttgctctcaggtagttcttactccatacaacaaagactttttgtttgttgggctttttttttttttttgctctgtttcattttgttttagagacggggtttcaccatgttgtccaggctggtctcaaactcctga

SEQ ID NO: 12399 - DNA, 348 bp, Homo sapiens
ccgggcaggtactatatctattgcgccaggtttcaatttctatcgcctatactttatttgggtaaatggtttggctaaggttgcccgcgtacgcggggtgagctccgagtcctctgctgctttgccttcagcctctcccaggactgggagctccctgcgaagagagagctggggctgcagagctgtattcaggtccaaggttctgcccttccttgagtggtctagaaggcactgcgtggcccctcagatgctgggacacaacagacccgggacccagctgagctacccaccccttccatggactgaataagatggactaacaggcctagaaaatacatcaaacaaaaa

SEQ ID NO: 12400 - DNA, 346 bp, Homo sapiens
  misc_feature 207: n = A,T,C or G
aggtacaggtggtagatgaagaaggggaccaacaacatcaagaaggaaaaagacttcggagggtagcttgcacctgtcccaactgtaaagaaggtggtggaagaggtactgccttctgtgactgggtggcacctccagggcacatttacacaaggccctgaatctgcagaggctgtttctcaagatgcccgtcatggtgtggcctgngccagctctggcttccacaggtccctgactgtcctcagagtggaacatgctcaacctcccgcccactgctctctctctgcccagatttcaggggtgccggtccccaaggcctgcccccttctttaagactgaactcaag

SEQ ID NO: 12401 - DNA, 473 bp, Homo sapiens
ccgggcaggtaccccagctgttccggaggctgaggccaggaggatgggtggacgctgggaggtggatgctgcagtgagcagtgattgcaccactgcactccagcctgggtgacagagccagaccccgtcccaaataaataaacataaaaataaaggaaccagtttgtagaaagcgggagaagggtcccattgaacttcaagccttctagcaacagctgtggctggacaggttggaccagcaggctggagcagtcgccatcttggcagggatcattgatcctgatctattcgtcgggaggaggaagagctgatcttacgcagggagggcaggtggactatgtgtggactctggtgacctgtttgggtgccaggtgttactcccagggccacccgtaactgtgaatgtgcaggaaccctgacttgagaagggcctggccacggggggcttaggcccctggggaatgagagtttgg

SEQ ID NO: 12402 - DNA, 545 bp, Homo sapiens
aggtacgcggggccctttcatcagtcttcccgcgtccgccgattcctacttcttggtcgccgcgtccttggctggcgtcaagccttgggatgatgagacggacatggctcagctggaggcctgtgtgcgctctatccagctggacgggctggtctggggggctttcatgcttgtgccccgttggctaccggttttccgtaagctacatatttcacttttttgggttgtaggaacaacaatgggttggtgacaagactttgcttggatggagggaaatatcacccaagttttggagggagcaccgttgcaataggtgtttgaatatttggcagtcttttcaatcaagaatcttgaagcccttgagttgttgttgtaaccctgccccggtgcgggcctatgttacaccacctttagaaaaacccagatttaccaggtattttcatgtttccaaattcctttcatttaattttccaattcaatccaaaagtttggtttcaattagccttaatcttcagtttattgaagttattaaatacattttcatt

SEQ ID NO: 12403 - DNA, 470 bp, Homo sapiens
aggtacgtcatgtcttggtttagactacactttagaggggatatgacggtaggaaaacctggttggatgtattacagagacataaacatataaatgagtaagacccgagaccagaatgagggtaatggagatggaaacaaaaatcaaacagaaagagcttttaagtgaaaaattagatcttttaaaaggaccatgtaattttaaatgactctaaagaattgtattccagacacctgaatgattgatgggattaatacacgagatgggtattgggatatggcttatgacagaagatgatgcatttaattttagaaccatagagacaaggtaacaagatttaaatcaggaagaatttaattgtaaaatcttatagaaaaatatggaagaagtcagctacacagagacagcagttgaaaatgaatcattcggctgggcatggtggctcacgcctgtaatcccagcacttcggg

SEQ ID NO: 12404 - DNA, 467 bp, Homo sapiens
aaaccagcttttaagtgagctcagcatattataaaggaatgaaagcaattagagcgtggactctaaaggtaggtgagacttgctgttccacttagaaacatagaaacataggaaactaaggactcgatggggacatcaatagtaggatggcttttaagagggctgaagtgtgtaaatttcccataaggtttgcagcaactctgtgccaaatcgaagttgttgcagacctggaattttagtttggtaaaggataactgtagttattttttaaataaaatgattcattagaattctttggttctctcatgataatttagcaagtttgtctctttcagaaagaaaagtttaagtggggttaatgggtactactcgattgtcaacgtcaaggagtcgcaggtcgcctggttctaggaataatgggggaagtatgttcgaattgaaaattagtcccgccgtgtcggtgtacc

SEQ ID NO: 12405 - DNA, 439 bp, Homo sapiens
aggtacttctgctccacgaggaaggggatcgccaggcactaccgcatcaagcacaataatgtccgagcccagccagaaggcaagaacaacctcttcaagtgtgccctgtgtgcctacaccaaccccatccgcaaaggcctggcagcccactaccagaagcgccacgacattgatgcgtattacactcactgcttggcagcctccaggaccatcagcgacaagcccaacaaagtgatcatcccatccccgcccaaggacgactcccctcagctgagcgaggaactccggcgggcagtggagaagaaaaagtgctccttgtgctctttccagtcgttcagcaagaagggcatcgtgtcccattacatgaaacgccacccaggggtgttcccaaagaagcagcacgccagcaagttggggggctacttcacggccgctctag

SEQ ID NO: 12406 - DNA, 430 bp, Homo sapiens
ccgggcaggtacaatatttttttggcaacatgctcgcattacaatgaaaacttctccacacagccacttcccaaatgccccttggtagcataaatttcttttgaaaagtaattcactgtaagaacctcacatttaccttggatttttcccttctccccaaaatatcctgactactgataggcattgcaaaattggaaagaggcatcacattttgaaaccccatctttctgctaaagagagatgcagtacacctgtaaactcaaccactcttacgtattctggcaacaaaaagaacttaggaatgcttctgatgggtgcaaaggatggtcctgctccctccccaaggcatggctaaggacgacaaagcttctacagactaaagcagtgattctttctcatgccatgacatatttaccaaaaagtaaccatt

SEQ ID NO: 12407 - DNA, 422 bp, Homo sapiens
ccgggcaggtacttttttttttttttttttttttttttttggaatgaacaaatatttatttatcttttataacaagtaaggcaatgttgcttaaaggaagacaaacaaacataaaagattccgtcgacaatgcattttttcatctgttcggcacaatgctttttgtcataatggagatgtgacagcaaactttccaggacattcagtcttcggcggcagcacttagggcagatgactggccgctcaaattctctatcttgtttcaggacagtggaaaagcttatagatgaggccaaagcaccaggtaggtggaaggttcttgtatcggttcaaaccccgacagcgcgccaacagacaacacgaggcagtggggagcaacatgcttgtttaatgagcgcctgggtgcaagccttgtctaggct

SEQ ID NO: 12408 - DNA, 421 bp, Homo sapiens
  misc_feature 110: n = A,T,C or G
aggtacgcgggggctgatgccattttcagcctcagcacgcctgcacccaggcgctcattaaaacagcatgttgctccccactgcctcgtgttgtctgttggcgcgctgtngggttcgaaccgatcaagaaccttcacctacctggtgcttggcctattatagcggccagtcatctgccctaagtgctgccgccgaaggctgaatgtcctggaaagtttgctgtcacatctccattatgacaaaagcattgtgccgaacagatgaaaaaatgcattgtcaacggaatcttttatgtttgtttgtcttcctttaagcaacattgccttacttgttataaaagataaataaatttttgttcattttaaaaggaaaaaaatttatttgttttatcgtactcctggggggttttataaataaagag

SEQ ID NO: 12409 - DNA, 419 bp, Homo sapiens
ccgggcaggtacttttttttttttttttttttttgcttatcttttctcatgtaatgtaaaaagtagcctcctcttctcagagggtaaatacaagggtcaatccctgatttactctaggttcttggtggagaacatacatactggatagagaagaaaccccttctcaccttcttgccctcaataaccatgaagatgcatcctaccaccgtcagggcaatcattagatagctgatcttcactcgcatcttgttctttgcagcatcaagcatctccaacgagacagtctctgggatttcatcttcctttttgaagcgacctgaccatatgaggatctttttctgccaatccgtaggtttgtgtaaaggcactctgttgtaagtgcgggatggagctccgggactttcctgtggttttgtgca

SEQ ID NO: 12410 - DNA, 427 bp, Homo sapiens
aggtacgcgggagtgacgtctgccaggagccagaagacagaacctctaagtggctctggggaccagccactcttccgtggagctgatcgatatgactttgccatcatgatacctccaggaggcacggaatgcttttggcaatttgcccaccagactggatacttctatttcagttacgaggacggcacacaaaaggtgcagaacaatatctttcacatgtggcgatactacaactttgcccggatgaggaaaatggctgactttttccttatccaatcaaactataactacgtgaactggtggtcgacagcccagagccttgttattattctttctgggatcctgcaactgtatttcttgaagcgtctcttcaatgttccaacaactacagatacaaagaagccaagatgctaagctaaggtgacta

SEQ ID NO: 12411 - DNA, 454 bp, Homo sapiens
ggagctccatcgcggtggcggccgaggtacaatattatcatccttggctagagaattgtaattaaaataatttgttgtttctcctaaccttgttgctactgttaaagattgttcatgattataaaatataataacatttcaagatacctaaaattcttctactactgtaggagcatgatgctattttaaaattatgttatgtcaaaagaaagaactttaatgtgtgtgtgtatatatatatatccaaaatggattctacagtgaaataaaacaatgagtaccttttttctgagctctggtttgcctttcttgactgtggccatcaccatgtcacccacaccagcagcgggaagtctgttcagccgtcccttgatccccttcacggagatgatatacaggtttttggctcctgtgttgtcagcacaattgattacagctcctaccggaagaccca

SEQ ID NO: 12412 - DNA, 395 bp, Homo sapiens
agaagcgagatgacgaagggaacgtcatcgtttggaaagcgtcgcaataagacgcacacgttgtgccgccgctgtggctctaaggcctaccaccttcagaagccgacctgtggcaaaagtggctaccctgccaagcgcaagagaaagtataactggagtgccagggctaaaagacgaaataccaccggaactggtcgaatgaggcccctaaaaaaatggataccgcagattcaggcatggaattccgtgaaggaacaaccacctaaacccaagagggcagcctgttgcagcaatccaagttcatacttaagaatgtcaacgattagtccatgcaataaacgtgtctggggtttaaacaataacataataaaaaaaaaaaaagaaggtacctcggc

SEQ ID NO: 12413 - DNA, 430 bp, Homo sapiens
ccgggcaggtactccaaagattcaggtttactcacgtcatccagcagagaatggaaagtcaaatttcctgaattgctatgtgtctgggtttcatccatccgacattgaagttgacttactgaagaatggagagagaattgaaaaagtggagcattcagacttggtctttcagcaaggactggtctttctatctcttgtacgcgggatatcataaatctcaagaggacctgggagaagcttctgctggcagctcgtgcaattgttgccattgaaaaccctgctgatgtcagtgttatatcctccaggaatactggccagagggctgtgctgaagtttgctgctgccactggagccactccaattgctggccgcttcactcctggaaccttcactaaccagatccaggcagccttccgggagccacggcttt

SEQ ID NO: 12414 - DNA, 220 bp, Homo sapiens
aggtacgcgggtggaatgaatgaacgaaagggagagttggagttaataacaccttgcatagaataaaccccgtcggttcttaacccgaagagagtcgagacccagagcccttttccttccctgccacctatcacaccccatcctaaagtaaggtcagctaaataagctatcgagcccattcccccgaaaatgttggttatccccttcccgtacctgcccg

SEQ ID NO: 12415 - DNA, 352 bp, Homo sapiens
aggtacaaagagaagcagcaaaatatgaaaaaaggccagagctgtattctccccagtggctagcctaaccaaccccggagtgtccagacctagaaaagaaaaggctaacggtcctgggctcacccagcacaagtgcgagcctcaagggcacgaaacagcttacaaaaggccatttggtactatgtctggtgctggtattcttgtagactcattcttgatcatataattgaaaaaagacctctgcaagtgatgggggagaaaaaacaaacccacattctagggaaaggtgagttggtgactcagcagctcccgtctagtgtgacacttctggagaagagtagggggccatggt

SEQ ID NO: 12416 - DNA, 353 bp, Homo sapiens
  misc_feature 353: n = A,T,C or G
ccgggcaggtacgcgggggagtcaggactgagcagagaatcctccaccacacacagcaggcactatctgccacagttcctttccccgatagcttcaaattctctgccttttgaaataagtctacttttaactggaataaataattggtcaatctctacctcaggtgaagaggaaccaagcctctggaaacacttaggaacaaactgtaaaaaccaaaggcaattgtgtaaccggttaaataagcttgctggactttgtccctgtgtatgagttagacaattctttcagctagtttgagtgacgcactgaccagtgaagcgcagtgaagcagtgggaaccggaatatccaaagn

SEQ ID NO: 12417 - DNA, 348 bp, Homo sapiens
ccgggcaggtacagctaaggaagaaaataaactggaaggacccagagaaaaacactgaataacaatggatatgtgcaaagcactaaaatgggattaataagtatacaacactagggctgagttccacccaactagaaactaaaaacaatgaggctgcctctcactgttagctactaacctcttaaaaaaaaaaaaatcataaattctaggacctgggaaattgaaatacagattagcaaaaatccctcaaggaaacagatcatagattcaaatagttaatataatcaagtcttttttttttttgagaaacgtaacatctgatggctctcaaaatgtcacacgattata

SEQ ID NO: 12418 - DNA, 552 bp, Homo sapiens
  misc_feature 496: n = A,T,C or G
ccgggcaggtactttgttcttgctaggtatttcaaaactcattctaagaggaagactaagaggacaatgacacactgtagtgctgtcccaaataagcagagagagagtagaaaagcaagcagtgttgggaagggacagcagggagcagtggccaagtggagaaactgccaggatagaggaaaggagaattacctggaatggggaggagatggggaagacttccagaagagcagaagctaggaagcccctggggtggtgcaggcccacagtgggaaatggttcacggtgtgtctacatagcgatcttgtctctagacttcaaagagatgctgtagaggattggactgcagtttttcctcatagccaaacagctggaagccagttcccagaagaccaaactgcatgccccaatcgccaaggtaatttattcttattacttgatgtcctaaagcttctttgagatttgctataaaatttcctatgatggtagaacgcanatgtccaacatgaaattttttggcaacattaggtgaacattaagagatgtaccttg

SEQ ID NO: 12419 - DNA, 809 bp, Homo sapiens
ccgggcaggtacatctctagatgatcacgaatgtcaaatatcacactacactgtgatatggggattccccttgggggttttcatgtgtatagggtgcctgcagctacactaaacatcttaaagctaccacaatgttcacttcatatttttgctttttataggctttcttggtctcctcctatgttcccatcattttcttgctttgaatctgtaagaatcgagttgaatcttctccattttaaattttccataggctgagaaactgtttagccaagtttggataaaattgtatccaaagtaagagtatacaagctatgggcaagtccaaaatcaagctgttcacaggaccatgttctctctaaaggttctaggagagaatccctcatttccttccagcttctgggtggctgctggcattcctgggccggtggctgcatccctccaatctctgcctccatcttcacatgaccttcttccttgggtttctatgggttctttcctgttttttatgaaaacattttcattggattaagatcccatcctaatccaatatgatctcattttccagtttacctaacttatattccgaaaggcactattttcaaatgaaaatacctgctgaagttctagattgatataacccttggggccatgaagaactcttccacttactgcagagaaccatccccctgattgaatgtgaggttaatgggaacgagttcaatggaccaagtctatggagttccttattttcgctcaggaaaaaccatgggaaccacccctgaaaccaaacccaagtaattggtttt

SEQ ID NO: 12420 - DNA, 288 bp, Homo sapiens
aggtaccttgcttggtcactcagtgctcatggggattgttagaagctttactttagatcccacttctgatgccatctttcagtccagaggaaataagcatccttccatgcaaggggttcttaaattttgtgttacttttatttgtttgctttcttgcttgtttttatcttttggccttttggtgacttggtgctccttggagtcactggagttctactttgaatcccactctgacatcaatcgactgccttaattcctggtccagctgcccgaccctgactctctccc

SEQ ID NO: 12421 - DNA, 352 bp, Homo sapiens
ccgggcaggtacggtccactagcacagaaactatggtatgggcatctgagagtgccctgtaagcaggtgtggccaggctggggccctgggagaggcaagcagactaaggagtgctgagacaaagtgtctacaagggcaagtggagcctagagagatagctgtccctgccctctgggctccacatcacctgacttgctgctccaccactttgcttgtctcctgggtgctccatcccagagacatgtgagttagcaatcacttagtgtaatcagcccaggatggagggtctgtgctgtgggcccaagccagggttccctgtctggtgatgagtagtggagggtgtgtggtacct

SEQ ID NO: 12422 - DNA, 407 bp, Homo sapiens
ccgggcaggtactttttttttttttttttttgagaccaggtctcactatgttgcccaggatggtctcaaactcctgagctcaagtgatcctcccgccttggcctcccaaagtgctaggattacaggcgtgagccaccacacccagccaagttccatccacttttgaaaacaagacatttatgtataggaagagaattatggaaacactttgtaaaacatccatttattatatccaatgctaaacactaccacttggactctaagatatgtttatgcctctctgtttattctagttttttaaaaatcaaatatatatacctacgggcataaaacctctatcgttattacttttatgtgtttaaacaaacccctacactttgagtctaactttctactcatctgagctg

SEQ ID NO: 12423 - DNA, 458 bp, Homo sapiens
aggtacagcatggctcaaggcctcaggcaaacaaaagcactcttaccagatagaacattatgagagctcagttcccagagctgcccaaaggctagtcaggaaaacaggaccttctggggaacttacagagtttgagcaataggcctgttatgtcaaccccaagcagagtggatgaagacaaggcaagggacaggctgacagctgattcctgggttcctctgatgtttacaggagagatcaagcaaaggagacaaaaaaggactgtttacacagggggaaaccaacactgaaaactcctggaaatgaagagttttcagaatgcgttgttgctatccttggagctgaatggctatcataatgatgaatacattaattcagattttaaaaattaatcattagatgtgatacaagagaccggaattaggatcttaagggttgcactcagtattacctgcccg

SEQ ID NO: 12424 - DNA, 508 bp, Homo sapiens
ccgggcaggtactttttttttttttatcttagagcactataactgaatgtctttgttgtatcattgtaaacacagcaataaatatgcagttcttccctccctttttctccaccagatgttaacagggaacgacatgaagacttttacgcagagcttaaaacagtcaaccctctctgttcttacaagtttttgccccatcaatggctaaataaaagatgttgaaaactgtggaaaaaagtagaatgtatttaattagcaaacatttgatgagtggtatcatgctatcgagttggaatttaaggaagggaaattgaagatgtgttagatgtggtggtttcttcctcaagaagctcatggtctaatggtcatgctaaaaatgtgtatcactgagtaatgtggtagctatcagacttaaagcactgtaggcttggcatggcggctcatgcctataatctcagcacttcgagaggctgaggtgggagaaaagctttaggccaggagtttgaga

SEQ ID NO: 12425 - DNA, 749 bp, Homo sapiens
gagtgaggcgtcggctgtgtttctcaccgcggtcttttcctcccactcttggctggttggaccccgctatggaaaagttggcccctgagccagagctccagcagccttgttagggcgtggcctgaggcttggataagtgggatgtaaaacgaagatcaggagcagatttgaagaattacaaagtgaattggtgccagtcagcatgtcagagacagaccacatagcctctacttcctctgataaaaatgttgggaaaacacctgaattaaaggaagactcatgcaacttgttttctggcaatgaaagcagcaaattagaaaatgagtccaaactattgtcattaaacactgataaaactttatgtcaacctaatgagcataataatcgaattgaagcccaggaaaattatattccagatcatggtggaggtgaggattcttgtgccaaaacagacacaggctcagaaaattctgaacaaatagctaattttcctagtggaaattttgctaaacatatttcaaaaacaaatgaaacaaaacagaaagtaacacaaatattggtggaattaaggtcatctacatttccagaatcagctaatgaaaagacttattcagaaagcccctatgatacagactgcaccaagaaatttatttcaaaaataaagagcgtttcagcatcaagagatttgttggaagaaatagaatctgagctcttatctacggagtttgcagaacatcgaataccctcgc

SEQ ID NO: 12426 - DNA, 133 bp, Homo sapiens
tggtggtgaagctgtagccgcgctcggtgaggatcttcacccgcgtacccgctaaaactgcacagctcgaccttcatggtgacagctccacggaaagacaaaagatggcgaaaaaaaaaagccccgcgtacct

SEQ ID NO: 12427 - DNA, 640 bp, Homo sapiens
ccgggcaggtacccctctccccttaacgcatacacacactctccctcacacacacacacaccccacatggaaaggtgctgtgctacaggcgggccatggccaccttgaagcataaccacacatttgcactgcatatcactttgggatggggtccccccccagaaggagaagtgggcatctccccttgcccagcctgcacactgggctggcagcaggggatgagaagcccaggtcagctcccagggtgcccacggtcaactgcttctgggtcctgggtaaatccagcccggcccgggttccctgtggggatgtgaggcggccacggctctctcggcccaaatgtggatccgtggtggatgaagtccgttcttcttcaagtgctatcttgatttcttcccaggccgggttccctccaggagtggtgaacattgtgccaggattcgggcccacagtgggagcagcaatttcttctcaccctcagatcaacaagatcgccttcaccggctccacagaagtaaccctccccacagggtgctggggaaagtgaaaggggcgtgttatttgacacccgtgagcttttcctttgacaggctttaatatgatttgtttttcttctaaatttgaccatgttttagtacct

SEQ ID NO: 12428 - DNA, 473 bp, Homo sapiens
aggtactttaaagtttttggttagcaactgtttttgtctgttgtgggtagatccattctaccttcagccttcgggtcctacagttaggctctacttccctgtcagctcgcctcaggtggggatagtcagtgggacagcaggtgcacatcctggccaggcctcctgcactgccctgaagggccaccctggtggcactgaccgtggatggcctgtggtcgtggccctttctcctttctctgtctcatgtcttgtctgtatgctgcatgttccttgaagattgcctctttttaataaacttatttttttaatgataaacacttatttaacagtttaatgtttatgtttcctttttactcattagggtgaaaatgggatggaggattgtgtcatggccctagaaaccttgtttagtgttctgctttctctttgcagacttatggtaagatgattggcttctttctagtacctgcccg

SEQ ID NO: 12429 - DNA, 804 bp, Homo sapiens
ccgggcaggtacctgcacgatactattcatttcagtttcacacaaaccaacggataggtttgaacactatttttatccgcatttcattcacccggaaacttgcttcatgaatttaagaaatttggcaaagtcatgcactactgagtggcaaagtagggaacagaaaccaagtttttgggctcaaagccacactcatgaccactgaccccgactatgtctctgcctcccctgctatcctacccaaaacctgcctgatgatgcccttaagtccaagcagaagaagttctaattcattccttttcttcttggttttttttttttttttttgagacggaatcttgctctgtcacccaggctggagtgcaatggtgcggtctcagctgactgtaacctacgcctcctgggttcgagattctcctgcctcagccttccaagtagctgggactacaggcacccaccaccacacctggctaattttttttgtatttttagtaaagacggggttttactatgttggccaggctggtctcgaactcctgacctcgggaaccacccaccttggcctcccaatttatttgctttacaagtcctgctttagggttaccttcctgaccactgttgcttccctccaacatttgccagggacggtaattgccttaagtaattttttctgtttggtttatttttgggcgattatggtttttttgaaacaagcgtttaatctgttgccaaggtggaatgccgtggccaatcaaagcttgctgaagcttgacttctggggtaaaaaaatcttttacctaaaag

SEQ ID NO: 12430 - DNA, 809 bp, Homo sapiens
aggtacttccagggagacaccgattataagaagagaaactcagcgctggggaagaagacaaataaaaagaagtgttaagaattgcctttgggactctgaaggctgaagaattgatgaattgcaagtttgtgccccatagctgcacagaatgtttcatcattactaacaggatattcctcatgacattgctgtctgatctttgaccatcagtctgtgacctgccccttctctttacgtaagtaaaagtgatttctttacctttaaaaaaaaaaagtaccaacgcagggctgagccccagctgtccttgacagggtgtctctgccagcctctgcagggaagcaggactgaccaaaatcagccccggggcccccctctggctgccctgcagtcctggtgtcactgccgagtgctccggggaaaggactgtcaggcacaatgtcactgacagagtctgtggagttctgggggctgttacaagtcctgggcgtaagtggcggaggcatgtcacccataaattctgcatcctctgcactgacactgttccggactgctgaattggcatggccaatgaccagggcttctgtggagatactatcatcggccccatcttttaaatactgaaattatccaggtgcccgtttttcttttttttacccttcctttgtccaaaaccacctgagaccccttatttttcaaaacttccgctctcaatttaaaacttcattcaaagcagggcgaaaacttggtacttgcccggccggccgtttttaaattagtatacccccgggttgcggaaatttatatttaat

SEQ ID NO: 12431 - DNA, 369 bp, Homo sapiens
ccgggcaggtacgcgggggaagtggttggtgccttagcaactaaagctggcaactgggacatcgtccggtgctgcaggtctcagccgaagggcgtcggaaactgcgctcgcatcgagcagtttccagcctcctgggtaaaggagcagtctcctcccttgcttgggactctggacgcatctcattccggtgaaagtaagggacagcttaggaccagaagcctttcgcggagaaaaggctgacatgcccgtcctatatgacaggttactgaagctaaaggagatgtttaactccaagtttggatctattcccaagttttatgttcgagcaccaggaagagtcaacataataggagagcatatagattattg

SEQ ID NO: 12432 - DNA, 587 bp, Homo sapiens
aggtactgctgattggttggggatgcaaccatcggggtgtggaagctggtcctggtgcactcagttggcttctgggtgggagccacggaagagttgctggtcccggtgggtccatctgactttgaagcatcttttgcagtttgaatgtttccagtgatgtctgagcagctcacagcaacaggcacaaaagttgtccatacgtaagctgtggtggtgagttctctttaagtctagattaagttgtccagcttcagcttgcagggcttccggaaaagggcagtttttgttctgtaatgccaataggtttggatgaattcttctcttcttcagatctttaaaatatatctaaagtttctgggcctttttttcataaggctaaaaaacccagtagtctatgcacatttttaaatatgatgctccagccaaagccttggtaaaataaccaatgtttccaattgtattcaatgacaccctccaaatgtgcaaagagaagcagtgagcacaagtaactcaacagagataccagtctgtttgcttgttaaatctggagttcatcaatgtccccggggtcctgcccgggcgggtcg

SEQ ID NO: 12433 - DNA, 464 bp, Homo sapiens
  misc_feature 259, 340: n = A,T,C or G
aggtacagggctgggtcctggggacaaagcagtgggcaaggcagagtgccatgttatagctggcgcaacagccaagggcagcagatgactgggagaacaaggtgatttcagagagtggtctatgctaggaagaaaaaacaggtttgtccttaggagtgagggttactttagatagggtgaccagtgagggcttcttggagacggtggcgtttgaactgagaccttaatgccaagaaacaacccccatagcaagacctgngcacagaggggcctacaaaggcaacggcccagtgccagggactgagcttgggagctgaggaaataaaagccagcccttccncagctgtccattgcttgatctcatgcttttttctctccacttgagccagcctgagatagctttcgccactagccctggagaaggcaaggttttctgtccacaccctctctctgcttgcacactc

SEQ ID NO: 12434 - DNA, 803 bp, Homo sapiens
  misc_feature 259, 540, 552, 556, 557, 558, 559, 560, 561, 562, 563, 564,565, 566, 567, 569, 571, 578: n = A,T,C or G
aggtacagggctgggtcctggggacaaagcagtgggcaaggcagagtgccatgttatagctggcgcaacagccaagggcagcagatgactgggagaacaaggtgatttcagagagtggtctatgctaggaagaaaaaacaggtttgtccttaggagtgagggttactttagatagggtgaccagtgagggcttcttggagacggtggcgtttgaactgagaccttaatgccaagaaacaacccccatagcaagacctgngcacagagggacctacaaaggcaacggcccagtgccagggactgagcttgggagctgaggaaataaaagccagcccttccccagctgtccattgcttgatctcatgcttttttctctccacttgagccagcctgagatagctttcgccactagccctggagaaggcaaggttttctgtccacaccctctctctgcttgcacactctgggccttcttagcttgatcctctttcctgtccagcagctgagggtccatcgtaactgcagacatttggggacggncgccgggcaggnaccnnnnnnnnnnnntntnttttttncggcactaccttcccgggttcggagggggtaatttgcgcccctggtggcctccttggatgtggtagcccgttcttaaggttcctttccggaatcgaaccctgattccccgtcacccgggtcaccatggtagggaccgggaattccattcaaagttgattgggcaacctttcaatgggtgttccccccccccgggtgtgcaaaggccccgggtttttagaccccca

SEQ ID NO: 12435 - DNA, 476 bp, Homo sapiens
ccgggcaggtacaccgactacggcggactaatcttcaactcctacatacttcccccattattcctagaaccaggcgacctgcgactccttgacgttgacaatcgagtagtacccattaaccccacttaaacttttctttctgaaagagacaaacttgctaaattatcatgagagaaccaaagaattctaatgaatcattttatttaaaaaataactacagttatcctttaccaaactaaaattccaggtctgcaacaacttcgatttggcacagagttgctgcaaagcttaatgtgtatatttacacacttcagccctcttaaaagccatcctactattgatgtccccatcgagtccttagtttcctatgtttctatgtttctaagtggaacagcaagtctcacctacctttagagtccacgctctaattgctttcattcctttataatatgctgagctcacttaaaagctggttt

SEQ ID NO: 12436 - DNA, 622 bp, Homo sapiens
ccgggccaaacccacagcgcagggccagggacacagggagtcagccgggcaggagctcgtcctcaccctgtccgggcggctgtgagacagcatgtcaggggatgaggagtaaccaggcctagtgtcaaggcaaactgtgtcccccaaaatgcataaagtcctaacccccaggacctcgggatgtgactaattgaaaacagggtctttacagaggcaattaagttaaaatgaggccatcggggtgggcactaatccaatctgcctggtgtccttataagaagggagatgaggacacagacacagtcagcgggaagactctgtgagggcacagggggaaggcggctgtctgtagcccaggaacgaggtctcaagagagcccagccctgcccacagcttgatattggacttctggcctccagactgtgagattctccatttctgttgattaaggtgcccagtctgtggtgctttgttatagcagcttcagaaaaccaagacccctggagaatacatatgtgtagagtggctgttcccacaaagcctgcacaaactcttctggaaagattcaagaaaggtgggttcacctatggaaaaaaaaaactaataggttccttggcccgtt

SEQ ID NO: 12437 - DNA, 372 bp, Homo sapiens
ccgggcaggtacgcggggaggtcccggaagagccgcttggagcgcggcacgttcagccctgagagcgcagcggggacggaggaagtgctgtggaacatcagatagaatggatagcacagcccaaattttacaaaaaggattttaaaggaagatctcaatggtggaacactagaggctttcctgctaaagttaagaacaagcaaaggctgacgcagttttggcatacaggaagtgttggagctgagactcgaaactgtcccccaggccttggccatgctgataaatatctaggccctacaggagttcgtgtccatgaacccagtaaacgcaattcctcagccaaaaaaaaaaaacaaaaaaaaaaaggtccct

SEQ ID NO: 12438 - DNA, 479 bp, Homo sapiens
aggtacccccattctctgattataaacagataaacccaaatgtggatcatccttggaatacccccattctccttgcctcttagcatgtttgatttaagaaaagcctccaggaaatcttgagagcctgtcttggcataatgcagtgtcacctgtgccaaccatggggtgtcccgtgagtgtgagtgtggcagtgagaagaagcatcgagggcgaggggaatatgaaagttggtcttcacctaattacctgtttggtttggattttcaagagatgattgggcttcttagcttttctgaattctgcagtattttctaaacaggatagattatgatctcggtccccatccatcctaacttctgagttcatctctgtctctgctttacagtctttaattttttgttgttccttcatttttttctttttaataagacatagcagaattccttaggtatgggatttatgagaccagtacctgcccg

SEQ ID NO: 12439 - DNA, 419 bp, Homo sapiens
aggtacacagcagtgctgtatcaaagaaaaaccaacacacacaccagcattctcaaatccagttcagaaaaataaggaagagtgacggtaaaatgaggcctatgattaacggtaagtttgtgagtaaataatctcaaggaggcaagtctttgcaaatgaagaacaggggaaaaaaaactgtgaaccaatcaagcctcttttcttaaaaattacccagtctcaggtatttctttatagcaatgcaagaatggcctaataccactgtcctatggggaactccagcgggaggcctgggacacagagctgccaatcagagtcccagggatttgactggttcaggaatgggcaggtgacccaacttgggaatggtgaaactctggaagaggctcggctgtaaggcagctcagctaatggcaatg

SEQ ID NO: 12440 - DNA, 615 bp, Homo sapiens
aggtacagatggctggttaggattctcggcaccattttccgtttctgcgaccggtcggtgccccctgcccgggccctcctgaagaggcggcgctcagacagcactctgttttctacagtggacactgatgaaataccagccaaaagaccaagattagattgctttattcaccaagtgaaaaacagtctctacaatgctgccagcttatttggattcccattccagctgaccacaaagcccatggtaacttctgcttgtaatggaacacggaatgtggccccttcaggagaggtattttcgaactcttcatcttgtgaactgacaggttctggatcctggaacaacatgctgaaactgggtaataaatctcctaatggaataagtgactatccaaagatcagagtgacagttacccgagatcagccacgcagagtcctgccttcctttggttttactttgaactcagaaggctgtaatagaagaccaggtggccgccgccatagcaaaggtaatccagagagttctttaatgtggaaacctcaggaacaggctgtaacagagatgatttctgaagagagtggcaagggtctgaggcgtccccattgtacctgcccg

SEQ ID NO: 12441 - DNA, 708 bp, Homo sapiens
  misc_feature 632, 670: n = A,T,C or G
aggtactgtaggggatcgcacaccttggggtggaaacagcagctctccggagttgcatgggagccatgggcagtggtcctggctggtgaaatgattctagccacgtggcccacccagggggcaaaacaatagaaaccttcagaaatgaaacgtcacctggctgcaagaagatagtcccacaggcgccctaaagatggggatgccaagtggcttctcgggaagctgtaagaatccacagggcattgtaagatggagggaaatattaagttttcttcgtaaagaggtgaggggggcgagagcagcaaaggacactggaaaatgagaagcatggatgggaagtgtcgcattgagtataatttggaggtaaaatctccaacaccgtaactgagtggcctggggacctgatagaaagccttgctcaggactaaagcagaattcccagttatatcgcagatacaaagagaccaagaacacgcttgtaatcacaacacttaaggaagcttacgcgggtggatgacctgaggtcaggagttcaagaccagcctagccaacatggtgagacccccatctctactaaaaatacaaaaattagccaggcgtggtggcacatgcctgttattccaactactcangatgcttaagtgggagaatcgcttgagcccgggagcanggggtgcaccgagctgataacgtaactgcccgggccgg

SEQ ID NO: 12442 - DNA, 676 bp, Homo sapiens
aggtacagaggccggtgggctccctgacatcccttccaggcaacctgaaagcactgaaatagcttatggccctgtgccagggaccttggcccaagctgctgacctccagggtggggagggagctacccccaggagaagagtcactcagacagcagtatgagcaagccagccagcagctccgtgcctgcacccagctcaggggaatcccagggggttcagatgcccaggaaggaaaaggggacagcgctactgctatggaatgagaccaccacttctcctgttgtccttcccagcttctccccaacctccccttttccctagtttataagacaggagaaaagggagaaagcaaaaagctggaaagaaacagaagtaagataaatagctagacgaccttggcgccaccacctggccctggtggttaaaatgataataatattaacccctgaccaaaacgactggtgttatctgtaaatcccagacattgtgtgagaaagcaccgtaaaactttttgtcctattagctgatgtgtgtagcccccagtcacgttcctcacgcttacttgatctattatgaccctttcacgtggaccccttagagttgtaagctcttaaaaaggctaggaatttctttttcggggagctcggctcttaagacgcgagtcttccgacgctcc

SEQ ID NO: 12443 - DNA, 592 bp, Homo sapiens
aggtacgtcatgtcttggtttagactacactttagaggggatatgacggtaggaaaacctggttggatgtattacagagacataaacatataaatgagtaagacccgagaccagaatgagggtaatggagatggaaacaaaaatcaaacagaaagagcttttaagtgaaaaattagatcttataaaaggaccatgtaattttaaatgactctaaagaattgtattccagacacctgaatgattgatgggattaatacacgagatgggtattgggatatggcttatgacagaagatgatgcatttaattttagaaccatagagacaaggtaacaagatttaaatcaggaagaatttaattgtaaaatcttatagaaaaatatggaagaagtcagctacacagagacagcagttgaaaatgaatcattcggctgggcatggtggctcacgcctgtaatcccagcacttcgggaggccaaggcaagtggatcacttgagctcaggagttcaagaccagcctgggcaacatggtgaaaccccacctctactaagaatacagaaaatcagccaggtgtggtggcatgtacctggccc

SEQ ID NO: 12444 - DNA, 536 bp, Homo sapiens
tccacaaatgtctgcagctacgatggaccctcagctgctggacaggaaagaggatcaagctaagaaggcccagagtgtgcaagcagagagagggtgtggacagaaaaccttgccttctccagggctagtggcgaaagctatctcaggctggctcaagtggagagaaaaaagcatgagatcaagcaatggacagctggggaagggctggcttttatttcctcagctcccaagctcagtccctggcactgggccgttgcctttgtaggtccctctgtgcccaggtcttgctatgggggttgtttcttggcattaaggtctcagttcaaacgccaccgtctccaagaagccctcactggtcaccctatctaaagtaaccctcactcctaaggacaaacctgttttttcttcctagcatagaccactctctgaaatcaccttgttctcccagtcatctgctgcccttggctgttgcgccagctataacatggcactctgccttgcccactgctttgtccccaagacccagccctgtacct

SEQ ID NO: 12445 - DNA, 522 bp, Homo sapiens
  misc_feature 494, 496, 497, 507: n = A,T,C or G
ccgggcaggtacctaagtagacactttttgtctatcttttcgtctgctaaagagagagcattgtgtaggagctctttagagttgctcttagaagcatacttttgtggaagagtgggaagaaataatcataaatttatttcacagttgatgtgtgactactttttcaagtgtatgacttgtaaaagtgggattggtgtatttgagttagtggatgaccattttgtagagttgaatgttggtgtcactggccttcctgtttcagattccaggatcatagctggtcttgtgcttcagaaagatttttctgtgtacgcggggagccaaggagggagggtcttcctttggcatgggatggggatgaagtaaggagagggactggaccccctggaagctgattcactatggggggaggtgtattgaagtcctccagacaaccctcagatttggtgatttcctagtagaactcacagaaataaagagctgttatactgtgnanntactaaaaanacaaaaaaagtacct

SEQ ID NO: 12446 - DNA, 533 bp, Homo sapiens
ccgggcaggtacctggccgtggtggcctcctcccacaagggcaagaaagacacaagtatcacgggagagctggaaaagcagcttctacaagcaaacccgattctggaggctttcggcaacgccaaaacagtgaagaacgacaacttcctcacgattcgggaaaattaattcgcattaaatcttcgactgtcacgggtttacaatcggtgggaagccaaccattggagaccctattctgctacgaaaatatcacggggcaaattcggcccaagtccagaggacgaagaaggacatttccaccatgctttttacttacatggatttgccttggagtccaaagggaagaagaatggagaaaggtggactttgtcttttttggaaggggcctttcaaacaaacttaccacccttttcctttttccaaatggggctttttgtggccccaatccccaagtctagctccaaggtattgattgaagaatgtttcccagggaaaacccggtgggaaggcccattggccaatttcatgggggt

SEQ ID NO: 12447 - DNA, 505 bp, Homo sapiens
aggtactgtgggtgatatttgcctttagtgcactcttctccttcagagtaaagtggttggcggtggttatcatgggtgtggtgctacaaggtgccaacctgtatggttacatcaggtgtaaggtgcgcagcagaaagcatttaaccagcatggctacttcatattttgggaagccagtttttaagaacaaaaacactgggaaatgatcaatactttcctggaatagaagaaagctttattgtgcttttggttacattgggtggaacaaaactgaaggagaattcctttgacttcaaaccttttttagagacttaagtcccatggtttgcaaccgagggagttggttggcttttgttttttttccactttaataaaacttttattttattaaaaaaagaacaaaaaataattaaataataaaaaaaggttacccttgccccgtggcggtccgccttctagaaaactagttgtgattccccccggggcttgcaggaaaatttcgata

SEQ ID NO: 12448 - DNA, 509 bp, Homo sapiens
ccgggcaggtacttataccagctaagcagcagtaaactgaaagtaaaaagcatagctagctagagagatgaatagacagcaatgtttatgtcctgcagccagatgacaatgcactgttgcagaagaatgagtttcagacctttgcagctttggtcttctctaagctgcttgaaaatttgttccagggccggggcccgggtgttcgtggtggttcataaggaaagatccccatacaactaaccaccttttccaaaactggtaagaccaacaaaaagtaaacaacctgagtgaaatgactagaggctttacaacaccattgtgtggacattattccggtaggcaaatcattgaaataaaggcttgcttccccttgttgccctaaaatgaagcttccaaccaataccacattcttgtttttgcccttcttgaaaaaggacttggaactggccatattggacctctaggttttctgtggaaattattctttcaaacaacattctaagaaatgt

SEQ ID NO: 12449 - DNA, 435 bp, Homo sapiens
ccgggcaggtactttttttttttttttttttttttttttttggaatgaacaaatatttatttatcttttataacaagtaaggcaatgttgcttaaaggaagacaaacaaacataaaagattccgttgacaatgcattttttcatctgttcggcacaatgcttttggcataattggaaatgtgacaggcaaactttccaggacattcattcttcggcggcagcacttagggcagatgactggccgctcagattctctatcttgtttcaggacagtggaaaagctgcttatagatgaggccaaagcaccaggtaggtggaaggttcttgtatcggttcgaaccccgacagcgcgccaacagacaacacgaggcagtggggagcaacatgctgttttaatgagcgcctgggtgcaggcgtgctgaggctgaaaatggg

SEQ ID NO: 12450 - DNA, 467 bp, Homo sapiens
aggtacgtttgggagcctgagctggaactgaagctggggctgcagcctgggccttggtttgatccttggccttggccttggccttggcctttggccggcacagcctgagccccttggcaatacgggcacgagcacgcttcccaagcttggggtgggcaatgtagggcaattcgattcgaaccttgcggctgacaccctttgggatctttgggccttaaccctccttgggcctttacgaggtgccttgataagcctcggcaacgttgcacttcatgtgcctttggcattgtttgagacctgcatctttctttaggggccctttttgttgtgctttctttggcaaaagcgcatgtttcctcaggaaacttttggggtccactcccctttaagtagaattcgtatcttttgtgaatcgggtgtttcttggataccattttctgtgcccatttttcggggactggtttgtg

SEQ ID NO: 12451 - DNA, 499 bp, Homo sapiens
ccgggcaggtactgaaattagtagaagctaggccaatgatccatgaattgttaactgaagggcggagatcgaagactaacaaagcaaaaacccttgctacatgggcaacaaaagaactgaggaaactgaagaaccaagcttgatctgttaccattgggaagataaccctggtggaccctggcttggaaatcttccccatctttttgaaaaaaccctggaagtgaggaagtggtgcaacggaatgcctgaatgttttgggtaatggagagagatgatgtgagttgatggctttggaaaaccacacccacatttggaaaaatccttgccacaagcagccagcccgtcaagccggccaaacagtcagtcgccttgttaagtgagacttaagttggagcacctgacctttcggtaggaaaaacccattaacaatctggcccattcttgggaaaaagaggaaaaaatcaaatgggaagttaccttattttgaaaaataataaaa

SEQ ID NO: 12452 - DNA, 456 bp, Homo sapiens
  misc_feature 289: n = A,T,C or G
ccgggcaggtacgcgggggaggaagagtgggggttccaacttttctgcttatctgggaggtgttgggcgcggacagtcgagatgtcagagaaaaagcagccggtagacttaggtctgttagaggaagacgacgagtttgaagagttccctgccgaaaactgggcttgctttaaatgaagatgaaagatgcccatgtctgggaggataattgggaagatgacaatgtaagaggatgacttttctaatcagttacgagctgaactagagaaacatggttataaggatggangacttcattagcattccagaagaaagtgttgaagtaaacctaaactttgacctgcttaaatacatttctagggcaggagaaccccaggtatggtgacacttaaaaaatgtgttttatttcattaatctgcttggatttatttgtgttttttgtaacacaaaaaataa

SEQ ID NO: 12453 - DNA, 507 bp, Homo sapiens
aggtacttattacatataggaaaagattttccatgacatagtggtaatccgcccgactgctgtctggcagaaaacaggcggcaaacacaatgatggcatttagaccgtccccatagtatcctgaatctcctccgtgagaaatgactctcctgtagggctcgatgacctttaattgtaatggcgcctgctctttgttcttccaattgacccactgttcctcccaaaagccgagttgttccttcccgtttcctctttcgggcccgctctaagaaactagttggtattcccctcgggtcttgccaggaaatttcggatattcaaagccttaatcgaataaccgctcgaacccctcgagggggtgggcccccggttaccccatgctttttggtttcccttttagttgagggggtttaatttgctgcggctttggcgttaattcattggttcataggcttgttttccctgtgtgaaaaattgtttattctcgcttcacaaattctcacaccg

SEQ ID NO: 12454 - DNA, 263 bp, Homo sapiens
aggtactcttctatttcttcagaagccttcctcctaaacttcgaagccttcacggaatcacctgcccagcctccctgtcggcagcgaggtaatttagcagaggaagtctctccagtcagagtcaaagaggaattcttgccattgaggtgattctcggcctgcgcctgccttctggttggagctcgggcgaccccatctgggccctggaggtagccaagcttgagcgaagctcctcgtccaagtcgagcaaatcctccatctcc

SEQ ID NO: 12455 - DNA, 518 bp, Homo sapiens
ccgggcaggtacttttttaataaaaccagcaagctcagtgctgttgtaacatgggaataccactgacaggtgctcaataatactattgaacggcttttttggagactggcttgaacgcgcagcacgtcctggaggaacaggctgcttccgatcagccacaaggctttgtttctgaccaaaactggcctgggccagccccgtttttgggcccttgtcaagctgaggtggccttcaggcctgaaccaggggggttggctccttgtgcaaacagctgcaagaagggaagcctcccccttgggtgaaatcaaccagtcagtagaaacacacttttaggatccctttgtgaagttgccttgcttgggttttccaagtcaccgtcggctttggcagaaaggtcaacaaagcccctttgtgccattcctccgccgttacctcttcggccggcttctagtaaacttagtgggaaaatcccccccgggctgccaaggaatttccgattattcaaggctttaatcggg

SEQ ID NO: 12456 - DNA, 535 bp, Homo sapiens
ccgggcaggtacgcgggggcttctttcccgagcttggaacttcgttatccgcgatgcgtttcctggcagctacattcctgctcctggcgctcagcaccgctgcccaggccgaaccggtgcagttcaaggactgcggttctgtggatggagttataaagggaagtggaattgtaagccccatgcctccaaccaaaccctggccaagctgagcaaaaggaccagtttttacaagagtcaaatgttcacccttcaaccagccaattatttcaagttcctaaaaagcaagcaagggcccgtgggtgccatgtgcattcctgaatggggccgtccccaagttttcccttttcctcatttccttgaggcccttgattgggtttgtatagtagttggaaatttaaactggcaccttattcccaaaaaagtactaagtaccctattaggctaaccctggaattaaaacctaccaagttggataaatgctgaaataatcccctcttatacaaaacttggttgggtggaagtgggcaaaccttct

SEQ ID NO: 12457 - DNA, 503 bp, Homo sapiens
aggtacctggatcctgctcctctgggttgaaacccgggcgccgccaagatgccggcttaccactcttctctcatggatcctgataccaaactcatcggaaacatggcactgttgcctatcagaagtcaattcaaaggacctgcccccagagagacaaaagataccaattttggtggattgaagccatctaattactttcaagggccaatgtctttcttttaaaaaactatgaaaattaatgaattgaaggctgataggtacccttgatattatattaactctcttacatttccttgaatggttctgaagaaaaactgcaaaaagatgccatattcccaaaaagccaaaggtggaggaaaagaaattgttattaccgcctgggaaatcacctaaatttttcccatttcctttggagaagcctggttttttcccacttaaaccgcaatttaattgccaaaacctggcaaaaccataacagtgaaggatgtaagttgattgaagag

SEQ ID NO: 12458 - DNA, 346 bp, Homo sapiens
aggtacctggattggagttctcactctgttcatgtagcagatgaaaaaaatcaaagcacagagaggctaagtgacttgcccaaggccacacagccaggaagcaatcagctgggatttgaacccacacaacccgactcccgagcccacgatgatcacccgtgtgttccactgcctcacccctgagtgaacctcactgaccatgaaagatggggtaggaagagggctcacacctgctggatatcctcacccacctgggcaggtaactcgccgagcctctctctcctgcctcagctcttccccccgatccacacggtagatcacgtcggatttggacccaggcagccct

SEQ ID NO: 12459 - DNA, 343 bp, Homo sapiens
ccgggcaggtacgcgggggatgccattttcagcctcagcacgcctgcacccaggcgctcattaaaacagcatgttgctccccactgcctcgtgttgtctgttggcgcgctgtcggggttcgaaccgatacaagaaccttccacctacctggtgctttggcctcatctataagcagcttttccactgtcctgaaacaagatagagaatctgagcggccagtcatctgccctaagtgctgccgccgaagactgaatgtcctggaaagtttgctgtcacatctccattatgacaaaagcattgtgccgaacagatgaaaaaatgcattgtcaacggaatcttttat

SEQ ID NO: 12460 - DNA, 342 bp, Homo sapiens
ccgggcaggtactttttagcagagacatggtttcaccactgattcacttcttgccttagtctcagagatctcagacagaagctgtgaccttcttggctaaccatgatgacagtcgggccctctatgccatcccaggtgagtagttagcatttgaatggtgcccgtcaagaaggagtctggtgtgtctcagggagaggattctgatgtcctgtcatccactgggagggattatgatgctgagaggtatgatatcagggttatcccatactggaacaaggccagttaatgtttcttctcaaccccatctctctcctctcctgtgagtttcaccactgtcttttg

SEQ ID NO: 12461 - DNA, 343 bp, Homo sapiens
ccgggcaggtaccattatgtgcccgaattccgaaaagtgtccatagcagctaccatcatctatgcctatgcctggctggttcctcttgcactctggggtttcctcatgtggagaaacagcaaagttatgaacatcgtctcctattcatttctggagattgtgtgtgtctatggatattccctcttcatttatatccccaccgcaatactgtggattatcccccagaaagctgttcgttggattctagtcatgattgccctgggcatctcaggatctctcttggcaatgacattttggccagctgttcgtgaggataaccgacgcgttgcattggccacaattg

SEQ ID NO: 12462 - DNA, 192 bp, Homo sapiens; identical to SEQ ID NO: 3293

SEQ ID NO: 12463 - DNA, 411 bp, Homo sapiens
  misc_feature 38, 227: n = A,T,C or G
ggactccggttactactactataggtcgatgggaaccncccgcggtggcggccgaggtacttttttttttttttttttttttttttttgggagtagtcctttgaaacgacagtcatattgaaacaggaagtcagtaagctgttgcaacatccttagggcaaatgctgtgaattcacctgctggtaactttgattaaggactgagaatggtgtgggtatcgctgtctnctcataagtaattatttaaaaggactaattgctcctttggcttcagaggtaaaaatgcccacatggcagccagttctgtggcagtttggggataatgtggttggatgaataagggagctaggaagaaggctgatggcggccttgactctcaatcccctggggctggggacagggaatgcaggtg

SEQ ID NO: 12464 - DNA, 353 bp, Homo sapiens
aggtactttttttttttttttttttttttcccccgccccctatctgtcttcctctccctctttctcgctggtggcgtctgcagctgtgctagacccggctttaacagggagcgagagagcggaaaaagtctctctcctttaaaaaaaaaaaatctgatttaaacccccttctaccagcgctatcaaaacttgaattgcaaactggcttccgttcgccgccctcctcctccttcctctgctccgagcctccggagggtgtctcggtttcaatccaaatcttgctgggctcttctcccgtgcctctctctcttccttgtcctaaaacgtgagcgaattcgcttcctaaatctgtg

SEQ ID NO: 12465 - DNA, 331 bp, Homo sapiens
aggtacttctgtggttaatgtatatttttattatggtttttaaaatgggaatcatttttatgtatctgtgcaaataataaatgcccatttggaaaaagagtaagctcttacataaaatggaccaaaaaatcccccttaattgaaaccaaaattttttctttctagttaggtttttttcccaactccttttaacttttggaatttattaataatttttttcttttttaatgatatgcccataggttcataaattgcttttgttcttttaaaattcatccatttggtttaacttaaaggaaccttttaaatgcctcacccttgaccctcagag

SEQ ID NO: 12466 - DNA, 349 bp, Homo sapiens; identical to SEQ ID NO: 12385

SEQ ID NO: 12467 - DNA, 347 bp, Homo sapiens; identical to SEQ ID NO: 12386

SEQ ID NO: 12468 - DNA, 350 bp, Homo sapiens; identical to SEQ ID NO: 12387

SEQ ID NO: 12469 - DNA, 66 bp, Homo sapiens; identical to SEQ ID NO: 12388

SEQ ID NO: 12470 - DNA, 434 bp, Homo sapiens
ccgggcaggtacgcggggagtgggaggtggttgaatcatgggggcagtttcccccatgctattctcatgagagtgagtgagttctcatgagatctgatggttttataagcatctggcatttcccctgctcactctcactccatcctgctgccctgtgaagaaggtgcctgcactcccgcctgggtgacagagcaagactctgtctcaaaaaaaaaaagggacctggaatgcttcgtgggggtgtcgcaaggtctcggagcctatggaatctggttctggagctgggcagggcttccactgggctctgcaggcctgggccgggagctggctcatttgtttatgggacatttgcttcctgggagtctacagtgtggtggtccctgccctgggtgctggacacagcatcaaacaaggcagacacagcccgcccttgt

SEQ ID NO: 12471 - DNA, 433 bp, Homo sapiens
aggtactcggaggatttctgtcaacctccggactttccctgcctcaagcagctggtggcctacgtgcagctcaacatgccaggctcagacctggagtgccgtgcccaccttctcctggcccagctggagcactcggaacccattgaggcagagcctgaggctctgtcaccagtgccagctctaaaaccaactccagagctcgagctagctctaacaccagctcgagcacccagcccagtgccggctccagccccggagccagagccagctccaacaccagctccaggttcagagctagaagtagctccagcaccagctccggagctccagcaggctccagaaccagctgtgggactagaatcggctccagcgccagctctggaactagagccagctccagaacaggatccagctccctcacaaactctagagc

SEQ ID NO: 12472 - DNA, 407 bp, Homo sapiens
aggtacctgggtgacgtttacgttctgggatttcgggagatgcggttttctgcacgccaggggccaagcctgagacgtagatggacggcagggataggagctctctccgcgccacaaacgcccctgctcatacctgggttccttgattttcctgcctatataaccgaacccttccatgcccgggctctgagctctcattctgcggactgggacaaaggggttaactgtgatgagctttgtataaccccaggattctgcacttgcccaagggcgaggcgcaaatcaaaaactacgcacaactgaacaccgagatcaggtgagtcctgagtgtctcacgacataaaatccttacgattttaacaagagttgtatttgtgctagcactgttaactgacaaacgcatgtca

SEQ ID NO: 12473 - DNA, 453 bp, Homo sapiens
ccgggcaggtacaaaaagtctaagccaaaggttctcaggggagaaagcacatgtgcagttttaaaacaaagcagtgctttgtcccattgctgtgatttttagtcagactttactcagtctgaaatgcaattaacattaaaggattaagtgtgagatttcgatttatgctaattggtgtatcccatactcctcccttttaataatcagtttccactgatgatatgaagggccggtataaagaagtctttaaatgagtaagctttcttggtaagattaaatcttacaaattatttttaaaaccttgtgatatatacaatgtttagctgagttttctaattttctggatgtaaaacaaaaggtttaacctatacattccttgagctgttagtgctatttaaatcttttgccctgtttaggtcctaaacacttttagttgagtaggatatgagcttg

SEQ ID NO: 12474 - DNA, 400 bp, Homo sapiens
gagtgaggcgtcggctgtgtttctcaccgcggtcttttcctcccactcttggctggttggaccccgctatggaaaagttggcccctgagccagagctccagcagccttgttagggcgtggcctgaggcttggataagtgggatgtaaaacgaagatcaggagcagatttgaagaattacaaagtgcattggtaccagtcagcatgtcagagacagaccacatagcctctacttcctctgataaaaatgttgggaaaacacctgaattaaaggaagactcatgcaacttgttttctggcaatgaaagcagcaaattagaaaatgagtccaaactattgtcattaaacactgataaaactttatgtcaacctaatgagcataataatcgaattgaagcccag

SEQ ID NO: 12475 - DNA, 461 bp, Homo sapiens
ggtacgcgactcactcactatactgcgagtcgaatcggcactgcaccgccgtggcgggcaccggactgacttgtactgttctgtgatttcgggagatgcggttttctgcacgccaggggccaagcctgagacgtagatggacggcagggataggagctctctccgcgccacaaacgcccctgctcatacctgggttccttgattttcctgcctatataaccgaaccctcccatggccgggctctgagctctcattctgcggactgggacaaaggggttaactgtgatgagctttgtataaccccaggattctgcacttgcccaagggcgaggcgcaaatcaaaaactacgcacaactgaacaccgagatcaggtgagtcctgagtgtctcacgacataaaatccttacgattttaacaagagttgtatttgtgctagcactgttaactgacaaacgcatgc

SEQ ID NO: 12476 - DNA, 407 bp, Homo sapiens
ccgggcaggtacaaagaagagattctacagcacttagaggctgtatagcttccagaaaaagtagctataatgcattgcagaggccaccaaaaggcaaggatgccacaagccaaaggaaacagaaaagcagacagggaggcaaagcaggcagcaatgatcagcccgattttaagaggaagcttagctatgcctctcctcccagaacctcctctccaagacgacccaagttatactccaaatcaaagatcctggtgtgccaagaagatataaaatgtatgaaaagaaagtaaaagaagttcttctataggagactagccattccaaagatgttagctcctaagtttgtgaagcaaatccatcaagaaaatcatataagaaaaacagcattagaaacattatgtagtgcc

SEQ ID NO: 12477 - DNA, 480 bp, Homo sapiens
  misc_feature 184, 241, 242, 299, 324, 326, 327, 360, 361, 368, 379, 403,404, 413, 414, 423, 443, 471, 472: n = A,T,C or G
aggtacgcgggtgaggagtgccagcagtgtgataatttaaacatatttaaacaaaaacaaaaaaaatgaatgcacaaacttgctgctgcttagatcactgcagcttctaggacccggtttcttttactgatttaaaaacaaaacaaaaaaaataaaaaagttgtgcctggtaaaaaataaaatnaataaaaaaatttggttccgcggggagcccgccctggatacccgcaagcttaggaanntaatggaataggaaaccgcggtctctaatttgtgttggggttttcggaaaactgagncggccatagtattaagaaggggacngnngccgctttctagaaaactagttgtgactccccnnccgggcnttgcaggaatnatttcgattatcaaaggcttaatnncgtataccnncgttcgacncctcggaggggggggggccncccggtaacccccagcttttttgggttnnccctttta

SEQ ID NO: 12478 - DNA, 709 bp, Homo sapiens
  misc_feature 129: n = A,T,C or G
tacatcaatcgtatcgtatttagtactcaactattcctgttgtgtaactctaaatatactcatattttattatatatactactctatactatctaatatatattaaatgtattatatatatatatatcnttctttagagtataacctatactatgatatatggcaacttgaacctccagcccgccgacgtacaaagagcggattctccaggacaaacctgagttcatggaggagccagatagaaaagatgttgcccaataagatgctgaaaaattaggattttccgagactgatagcaaggaggcctcatctgaaagttctggtcataaacgaatcttccagttggggaacgcaccatacttcctttaacaaagtccaattgagcagtaggggtgtggttgacaggagggaggaaaaattacaaaattgttgaaaagccccggcggtcccaacggcttttagttctgcaaggttaatttttttgaactgaaactttctgccaaaaaccaatcctttttttggttaggaacccaatggtggccttgaaaggttacccttgttgcctccttttggaaaagtaaaccaaggttttgaatgccttttgttaaaaggcatgttcttttgaaattaattttttgtagaggccgctattgtaataaatgggaaaccctttaaccaaatggatattataaaaaagaaaccatggggg

SEQ ID NO: 12479 - DNA, 172 bp, Homo sapiens
gagctccccgcggtggcggccgaggtacctgcaggcctcctacacctacctctctctgggcttctatttcgaccgcgatgatgtggctctggaaggcgtgagccacttcttccgcgaactggccgaggagaagcgcgagggctacgagcgtctcctgaagatgcaaaaccag

SEQ ID NO: 12480 - DNA, 403 bp, Homo sapiens
aggtacatcttgacccgtggtcttgagcatatggaagaacatcttacccagcacctgtgtaaacatcccaggagtttagttcccagagactggccaagggtcattgccatatgggctccggtaatgggcagctccagcctgcggcgtagacagttgccatggagaaagacaggcgtatccagagttgacggttgccgtggagacaaaagccgtccgcacgcagtgggggcggggcttacagaacgtattttgcgattgatccacaggaaatagacgcagctgcgtggatcgccttctccaccccacatactgaagccagaataagccacgactttcgtgtgctccacgcgagggctcgcctgacgccagaggtttctcccgcatctgccatcacaggaccgtt

SEQ ID NO: 12481 - DNA, 401 bp, Homo sapiens
ccgggcaggtacccagggacacaaacactctgcctaggaaaaccagagacctttgttcacttgtttgtctgctgaccttccctccactagtgtcctatgaccctgccaaatccccctctgtgagaaacacccaagaatgatcaattaaaaaaaaaattaaatttaaaaggaaaacaccaacaacaacagaaaaaagtcctcccataaggaaagatgatcaattcttatgtatcgttctagggatataaatattcaggaggcttttcagaataaaagttaaatcatttatgtcgcacaaacaaatttactattcggacaaatacgatgacaaggagtttgagtatcgacatgtcatgctgcccaaggacatagccaagctggtccctaaaacccatttgatg

SEQ ID NO: 12482 - DNA, 403 bp, Homo sapiens
aggtacgcggggggcagtgagcatgcgctccggctccaccacgaacatgtagtagaggttccacatcagcatcgacagcagtggcagaaacgtcaggccgtagccgaagcctcggaaggagcggcccacggcaaagagacatggtcttgctatgttgccagtctgggcctcaaacttctggccttgagtgattctctcacctcagactcctgagtagctgggattacagatgcgggccaccacacctggctgtacttcataaaatcctcttatagagttactcttgccctagattgtaaattaagtttggcattattgtcagactggatggagggtgaagtaaaatagtatgaacaattaagaggctctccccctcttgtctttaagccatattctcctacat

SEQ ID NO: 12483 - DNA, 406 bp, Homo sapiens
ccgggcaggtactccctaatgaatggttatgcaggcaggagaacttctcaggaagagaaaaggagaagactaactctacagagatttttgaaagactccgtgggatctcagcaatttgttaacactgctagggcccttcactgcatagggaggcatatggactggcctggggtctcccggctcatgttccaagcaagaatagggtaagtaactgtgaattaccctacaagcagtaataagtttattataataatatttttatacatttttggatgcacccaacccactctaaagaatgtcagtgactttatacaaaagaggaagcatctagattggcattgtgaacataatgcatacgggcgcggcgggagctctagagcctagtggttaaaaccgtggcctctgg

SEQ ID NO: 12484 - DNA, 355 bp, Homo sapiens
ttgtgcgccctctacactaggtatatggcagctcgcccgtggtggcggccgaggtactgcgcagcaaaacaattctatcttcttaatagttcttctatgtctttcccagcgtaaagcacagctcatggaacagacggcagtgacaggcgggcagtgggaggcgggagaacggcttgagcccaggagttcgagaccagcctggggcaatatagcaagaaccgcctctcgcgccggtcctggccgaggctccagctcgagttgtttgcaggccctcagacccccgcccgcagtaaacgtgttttcttcatccccgtggcaggccgtctactttttaaaaatcccgcgtacctgcccg

SEQ ID NO: 12485 - DNA, 315 bp, Homo sapiens
aggtactctgtgatttcacctagatttggagaaggtgagggaggaaaggctgtcctctttgatcccataccatgcaggggcaaatggctgccagcataacaaaataagaaggaaagaaagaaaagtgggccaggcgcagtggctcactcctgtaatccccctgattaatctgcgcgaacagtgctgagcgggaagcagactcatctgagcctgaactggtagagactgggggaggaggggggcctggtggagggggaggaggacctgatccggcagagggtccagatggcagtccgctccccgcgtacctgcccg

SEQ ID NO: 12486 - DNA, 510 bp, Homo sapiens
ccgggcaggtactattttacctatgacccgtggattggcaagttattgtatcttgaggacttcttcgtgatgagtgattatagaggctttggcataggatcagaaattctgaagaatctaagccaggttgcaatgaggtgtcgctgcatgcagccatgcacctttttggtagccagaatgggaatgaaaccattccaatcaactgtctataaaaagaaaggagggtgctttctgattctgttccagttgaagtagggtttggaagacctgtttcaaggattcgtacataggtagttacacttctggccgctttctaagaaactatgtgtgattccccccggggcttgccagggaattttcgattattcaaggctttatccgaataccccgtccgaacctttgaaggggggggggcaccgggttacccccaagcttttttggttcccccttttaagtgaaggggtttaaatattggcgcgcctttgggcgttaattcattgggttcattag

SEQ ID NO: 12487 - DNA, 547 bp, Homo sapiens
tccgggcaggtacgcggggcgtcgggaccctacctgacccatcagcaaaaggtgttgcggctttataagcgggcgctacgccacctcgagtcgtggtgcgtccagagagacaaataccgatactttgcttgtttgatgagagcccggtttgatagaaccttaagaaatgaaaaagggatattggtcgataggcccaccctagctgcttgaaaggaggctctgaggaaaggaatttcttggatacactcagacccgacttctagaaaacgtagatgggattctcctccgtggtcttgtccaggtaaatttctgattattcaaaggctttaattcgaattacccgttcgtaccctccgaaggagtgggggctcccggttatccccagccttttttggtttcccctttttagatgtaggggttttaattttggcgtccgccttttggccgttattttcaattgggttcaataagacttgtgttttcacttgttgatggaaaaatttggttttattcccggcgttcaacaaaaattgtgcaacaacaaaat

SEQ ID NO: 12488 - DNA, 176 bp, Homo sapiens
aggtaccactggcatcgtgatggactccggtgacggggtcacccacactgtgcccatctacgaggggtatgccctcccccatgccatcctgcgtctggacctggctggccgggacctgaccgactacctcatgaagatcctcactgagcgagggctccagcttttaccaccacggt

SEQ ID NO: 12489 - DNA, 502 bp, Homo sapiens
aggtactgtgctgagaaatgggccccttgccagatgctcccctctccttcctctctgcgaggcagaagtcagaaggtagagattgctggcaaaactgtgaagtcccaccctggggtctcaaccccaactccactgagggcagtctccctgacctggtgtgacctaggcagttaaagggtgtgcggttgatggctggcccgctcttagaaactagttggattccccccgggctgcagtgaatttctatattcaaggcttattcgattacccgtcgtacacttcgaggtggggggctccggttacaccaagctttttgtttccctttttagtgaaggggtttaaattgccgccgctttgtgcggtaattcaatgggtcaatagtctggttttcctggttgtgaaaatttgttaattcccgcttcaaccaatttcccacaacatacaataaccgaagcccgggtaggcattaaaagttggttaaaggcctggtgggttgccctag

SEQ ID NO: 12490 - DNA, 498 bp, Homo sapiens
ccgggcaggtactcttgtgagagaagttacatgttcattgttaaggaaattatatgtaaatcacaaagatcatggtctgtgaataatgtgccatatctcacaaaatatggtcattggaatcttattaaaattatctacaggtgacttcagttttcaatttcttcacccctttgccttaagataccaaagccttggacatgaccacaatcccaagtcagtcatagggctccttctatgatgggcggagatatcttcaagttcctggcttcatagcctaccgtcgggccaatagaagtagtgctgccagtttattcataaagattaattcacaattcaccttgtgatttcatcctttgaagggttaaaactttgtgatttccttttgcttgtttcaatggagggtcaaacaaaaacttcctttccagaagcccagcattaaaaaaaaggtctgtaaacttcttttcaaacatggtcaccatttaaaattatttgttgtcg

SEQ ID NO: 12491 - DNA, 490 bp, Homo sapiens
  misc_feature 319, 455: n = A,T,C or G
aggtactgactttaacttgctctgactgaatgctttctggatggaaccctgtataccacttttatctgatttggagatgagacactatgaaatgtgactccacaagctttctgctgcttgctgtgtcttgataacattaatgctatgtttaaaaaaaacaattgcttaaaatgaacctaaagggcccttggcaagaaggaatgccattcctcccagaccctgtgtcgcattgcgaagctttaagtgtaaagggcttattcttggtgctatttcaagtatttattttcacccgtggctttttttcttttattccttcctnagccaagtatttggttttttacgcagtggggaataagaaaatttgttaaattcccccctaaaacaattcttctggctaacatttaaaatgggaacttttttgttattgtccttccttttggaacaacctgaatttntttttttttttttaaaatttgttcaaaactttggt

SEQ ID NO: 12492 - DNA, 414 bp, Homo sapiens
ccgggcaggtactccctaatgaatggttatgcaggcaggagaacttctcaggaagagaaaaggagaagactaactctacagagatttttgaaagactccgtgggatctcagcaatttgttaacactgctagggcccttcactgcatagggagggcattggactgccatgggtctccaggctcatgttccaagcaagaatagggtaagtaactgcgaattaccctacaagcagtaataagtttattataataatatttttatacatttttggatgcacccaacccactctaaagaatgtcagtgactttatacaaaagaggaagcatctagattggcattgtgaacataatgcataggggcgcggcgggagctctagagcctagtggttaaaaccgtggcctctggaatatgact

SEQ ID NO: 12493 - DNA, 515 bp, Homo sapiens
  misc_feature 304, 382, 383: n = A,T,C or G
ccgggcaggtactcttgtgagagaagttacatgttcattgttaaggaaattatatgtaaatcacaaagatcatggtctgtgaataatgtgccatatctcacaaaatatggtcattggaatcttattaaaattatctacaggtgacttcagtttttcattcttccacccttttggcccttaaagatacgaaagccttggactatgaaccaccatctccagttcatgcattagggcttcctttctaagaatggcgtggatatcctcagttttccttgctttcattatgctacccgtcggtccattngaagttatggccgcccagttttatcaaaaagtttaattcaccattcactctggggatttcattctttgaaagagttannaactttggatttctttttgctgtttcattgagtgttcataccaaaacttcctttccagtaggccagcaattaataacagtgccttgaaaccttctttttcaaaccagggcaacaattcaaaattatttggtg

SEQ ID NO: 12494 - DNA, 563 bp, Homo sapiens
gagtgaggcgtcggctgtgtttctcaccgcggtcttttcctcccactcttggctggttggaccccgctatggaaaagttggcccctgagccagagctccagcagccttgttagggacgtggcctgaggtcttggataatgtgggaatgttataaccgaataattcttggagccagatttttgaagtaaattacaaaatgtgtaatttggttgtccagttcacgtattgtctagtagtactagtactcaccattagacgctcctaacttatccttcttgaattaataatatggtttgtggtaataaacatctcctgtatatctatatagggaaaggacttttcattgccatactttgttgtttttcctgggcaacatgaaataagacatgctataaatttaattaaaaatttgaggttcccaaaaacctattttgttctattttaaaatcaacctggattaatataaccttttaattgttcaaaccctttaattggatgcctattaatttaatttcgcatatttggaatagcccccaatggaaaaaaattttatttatttcccc

SEQ ID NO: 12495 - DNA, 466 bp, Homo sapiens
aggtacgcgggtattaaggcctatcattctggtgaaggacatatgccctttagaactggaactggtggcattgcaacttgttacagtccacggacttcaactgaatcttttgctccacgggattcagtgggactggcaccccaggatagccaggccaggtaccattttaagtaatgggaccaacatgattatgagccccagagatgcctaccatggagccagaagggggttcttgatgacagtgtgagagtcacttttttgattgcccgtgaagcacatagttgatgaagaatccatcaagaagggtgatggtagcaagttaaccaaggaaagagaagggatgtttaaatttacgcaatcttcagggaaaactaatttgaatccttttgatgggcttatgaccccagttgtcaggtaggagtttccacaggaatgagggaggtttggctttcctcaacttacccct

SEQ ID NO: 12496 - DNA, 130 bp, Homo sapiens; identical to SEQ ID NO: 5023

SEQ ID NO: 12497 - DNA, 398 bp, Homo sapiens
aggtacgcagggagccacacttcaggtgcccagtgtccacactgactagtggtgactgcgttggacagtgcagatacagaacatttctgtcatcacagaaagttcctttggacagagccatgttaagtgatgttatcacaagatggacagaaacattcctgtttgatttatttttcagaccccagtttgtggagaaaaataatgatgctttacatatgtctcttgaatccttaatatgtgaatccagagataagtttatacgggaattatttgaatcatccacaaataacaacaaagatactaaacaaaaagcaggaaaacttagcttcatcagcgtgggaaacaagtttaagacacagttaaatttgcttctggataaacttcgaagtacctgcccg

SEQ ID NO: 12498 - DNA, 95 bp, Homo sapiens; identical to SEQ ID NO: 3185

SEQ ID NO: 12499 - DNA, 371 bp, Homo sapiens
ggagctccccgcggtggcggccgaggtacagggttggcgctctgttacccgattgctttccagctgtgtctggttcccattcatgctgcctccagcaacggataagtatacggcagcacctccttatttgagtgcaaatgtctggttgtaatagaggtagatgattcttggtgtggtgccgtggtcattgtccgtttgtgtcatggtaacatgttatccgacgtacggccgaggtactccttcagccgctgcacgttggcctgcagggactccgtggacttgttccgcctcctcggatccacagaaatgccgatggtccgggccaccttcttgtgaatgccggccaccctgagctcctccaggctgaagcc

SEQ ID NO: 12500 - DNA, 357 bp, Homo sapiens
aggtacttttttttttttttttttttgggtttgaactgagaccttaatgccaagaaacaacccccatagcaagacctgggcacagagggacctacaaaggcaacggcccagtgccagggactgagcttgggagctgaggaaataaaaagccagcccttccccagctgtccattgcttgatctcatgcttttttctctccacttgagccagcctgagatagctttcgccactagccctggagaaagcaaggttttctgtccacaccctctctctgcttgcacactctgggccttcttagcttgatcctctttcctgtccagcagctgagggtccatcgtagctgcaaacatttgtgga

SEQ ID NO: 12501 - DNA, 465 bp, Homo sapiens
aggtactttttttttttttttttttttttcgttctttggtttttctctcctgtgttttttgtttggttggcagctcatggatgtccacacctcttccctgtaagtttgaaacgatataatgcccttctcatatcctgctcgtccatttcgatctttttgggataatgattctgtcttcccagcatccccaaatgagatcagcacactctcaaagatctcggccaagtcattaataaaaagccctgaacagaacaggccaaaggaggtcatcacaaagttgcagggagattcataccacagcagagcagcctgagccagccggagtccaggagagccagttggggtgacctgggagccagaaccaaggtcaggcatcagaggggctgggcacatggggaagatacaggctgcatccctggggactggggacaccaagttggagagacgtgattcagggtgcagaca

SEQ ID NO: 12502 - DNA, 539 bp, Homo sapiens
ccgggcaggtactgggccaccacctctctcgcctgctgagtgccttgctttccatgacatttccccttcaagcaccaacacatttttctggtgatacccaaaaaacatattatcccagatttctggggcagaagatgatgatgaaagtcttctttgggacactttaatgaattggttggcaagaaaatgtgcctgctgaatcctgggccctgaaattaaagggtttatcggaaatgggtggtagaaatgaaaggtttcaagaatgggtgggaccaagtcttgttcttattcaccggtttcattcttccaatgttttctttggaagcgttcggggcaaaaattgccattttggcccctcccttgggtttaaagccaccggtttatttggggggaataaatatttttcttcttttcttttagaggccaaatggaatttaaaggtttagggccaaaatttttcccaagatattggtttaaaaggtcaaacaaccaccattaattttttttgcccctggtgataattgggaagaagaatttct

SEQ ID NO: 12503 - DNA, 535 bp, Homo sapiens
aggtactgacagaagtctacataagggacagcaggggaacaaaaaaaggcacagtcaaaacatctttgactgcaatttggagaactttaaacaaggattatcctttctacaggcatactgaaattttcttttaaattgcctcaactgtgccctattaaagcaaaatcccgaaattactaacaccacccagaacagaaagccccttaacccctggtgaagccggggccgccagttgggctcaactgccttgtaaagcccttgaccacttttgtggaagggccaaagggtggggtggaaatccacctttggagccttaagggaggtttcgaggaacccagcccctgggcaaaacaatgggttgaaaaacccccccggttcttctaacccaaaaaaatctcaaaatccataaaaatcattttaagccccagaggccctggtggggatgttagcgcccctggttgggtcccccaaaaataacctttgggaaaaagctttgaaaacccaggtatgaaatttcgcctttgaagcccccaag

SEQ ID NO: 12504 - DNA, 457 bp, Homo sapiens
ccgggcaggtactttttgtttatttttcttttttttatttccacattttgaatagcatcccacttttccctggtctgtagggatttgcctgagaaatctgttgatattcttatggaagttccattgtatgtgatgaattacttttttcttgttgttttcaaattctctccgtatttgacttctgaaagtttgataataatgtggcttggtgaagacttttttgtgtttggcgttctttgggctttattaatctgattgttcatttctctcccagatttgggaagttttctgtcattatttctttaatctttctgaccatctctttttctctgagaatactataatgtgcatacttatacacttgataccccgcgtacttttttttttttttttttatttttaggtcttcaactaaaacagcggaagaggtgatttattatattggtgttacactcgg

SEQ ID NO: 12505 - DNA, 458 bp, Homo sapiens
aggtactgacatgcactgacatcagtccagaaccatgctctggttgtgcatggcattgcattccgtggtgctggatcatgctgtgattcctcacacgggctgtagggacagggactgtgattcttagctcatggtctccgaagaggaagggcaatccaagggtggtgcttcttgcctttcttctatcatccattagcagtgtgtgatgataacagaggctaacgattcataactttatagcccttatgccaaatttttacatctagcagagataaatattaagccactttaccaatgaatctaaacaataatgtatgttgacaattctgaagccatttctaattacatttcacgaatacttttaaaactagcttatttattaaaaatttacttaagtcacataaacttgaaaaagcatttggctcaaagtctgttttttttctgataaagtgtttgat

SEQ ID NO: 12506 - DNA, 236 bp, Homo sapiens
aggtactaaatggtggtctaggaccacctggccggatagcaccggccatattttggaatggatgaggtctggcaccctgagcagtccaccgaggaactgggtcttatttgaagcaatttggctaggaggaatagtatgcagcacggttctgagtctgtgggatagctgccatgaagtaacctgaaggaggtgctggctggtaggggttgattacagggttgggaacagctcgtacc

SEQ ID NO: 12507 - DNA, 526 bp, Homo sapiens
ccgggcaggtacgcgggatagtcagtttgttttgaggctagtaaaaagatatttttctaaatagatgggagttggcatataaacaaaatacgttttttaactaatgacagtccattgaattcggaaatttttaaacccaatggaattagccgcggtcctaaccacgggggatgcctgtgtgcccaagaagatgggaactgttgcgggcctggattttgcaccagataaaattatttggcctttgtgtaatttcaatattaaaaatatgcaagtgccatatttaatacaatccccttgtgaagcccagaatgccttgaaataagaatttttttccctaattattttcaagatccctattaataaaaaaggaaaaaaaataaaaccccagtttttctaaaaatggtatggttataattaaattttctctccccccattttaaccaaatccttttcagtgttatttaaccaataagaaaagggattatgctttttttttttaaaaaaatttatttcttggccggagtag

SEQ ID NO: 12508 - DNA, 376 bp, Homo sapiens
aggtactcattttccttgaagtgccaacatgatttatccaaatctgaggaagagaagaaactaaaaaaaggattattcaaattttagatttgtagggaaataatgttttcacttatctcatttggattcccaaaatgctagcttaaaccaagccaagcagtggcataagataatagacccaaaatcagtttatattccagcaggataatagatgagccacagctggatgttctccatttactcatccatgaacaaacatgcactgagtacagtgtggccgtggtgcccacgggcagcttctgcagaacatcctcatccttcagggacttgcccttggggtccaggcggagggactggcgggcggggtacctgcccg

SEQ ID NO: 12509 - DNA, 492 bp, Homo sapiens
ccgggcaggtaccagacccgacaggaccagtgcatctataacaccacctacctgaatgtccagcgggaaaatgggaccatctccagatacgtgggaggccaagagcatttcgctcacttgctgatcctcagggacaccaagacctacatgcttgcttttgacgtgaaccatgaaaaaaaactgggggctgtcttgtctatgcctgacaaagccagagaacgacccaaggagccaactggggagaaagttcttacgaaagcttcttcgacttgccttgtcgccatttcccaaagttcagaatgtttcgtgtaacccttcggcccgactcttagtaaacatagatgggaatcccacccgaggacttgcaagggaattttcgattatccaaaagcttaattcgattacccgttcgaactcttcgaagggggggaggccccgggttacccccaagcttttttggtttcccctttttagttggaggggttttaaatg

SEQ ID NO: 12510 - DNA, 422 bp, Homo sapiens
ccgggcaggtactttttagcagagacatggtttcaccactgattcacttcttgccttagtctcagagatctcagacagaagctgtgaccttcttggctaaccatgatgacagtcgggccctctatgccatcccaggtgagtagttagcatttgaatggtgcccgtcaagaaggagtctggtgtgtctcagggagaggattctgatgtcctgtcatccactgggagggattatgatgctgagaggtatgatatcagggttatcccatactggaacaaggccagttaatgtttcttctcaaccccatctctctcctctcctgtgagtttcaccactgtcttttgcatctctgtgccaggcttggactatgttagccatgaagacatcctcccctacaccttcactgatcaggttcccatccaac

SEQ ID NO: 12511 - DNA, 422 bp, Homo sapiens
ccgggcaggacttgggacagttacaggcatgctgctattgccatgatcttcgggaagctgaagtgatgagcagcagtgtgtgattctgaggacacagagggctggggtctaggagctatctcaggtgggctcagtcagtgccatcctcccgtttggtgcctccctagaagtgctgagaagatgcaaaaccaaaagcttttactccaacattgcttagccaagctaagcacatgcattccctatgattcagcaattctgctcctagcatgtatcccagagaattgtcccatgggtccataggggcatataagaatggccattgcagcaaagttctggttggggtagggggagctgaaagtcatctggtgtccacaactggaggaatggatggataaaatgggatggatgcacaagtgggcaga

SEQ ID NO: 12512 - DNA, 443 bp, Homo sapiens
aggtacgcgggtgggagatacctccccagtgtccccaggcagtctaatgatagagacaccttgacgaccacaggcattattatgagagacacactttgccaaacccaggcagtctaatgctagagacaattgggcgacaagcattctagcgggaaaaattcccggctgaccccaagcattgtaataaaagaaaagcctgagtgatcccagccattttcatgggagagacttttgttcgaccccaggcatttcttatgggagggactactggccaacaccagacagtctaataaaaaagacatgtagatgaccccatgcattcttttttttttcacactttaaatactttatttatataaaaactaatttgttttttaaaagcctttaaccagtacataaagtaaaggagaaaaagttttggagcaaaacacaagccccgttag

SEQ ID NO: 12513 - DNA, 618 bp, Homo sapiens
  misc_feature 10: n = A,T,C or G
aggtactttntttttttttttttttttttttaacttgtttcactttgacccagactatttttcagaacataaagtcatcaacattcatattacagcaatgctttttcttttctgcccaattagcaccaatataaatcgtttattccatctaaggccctgtattacttcagggaatataaatctaagtcccggccaggtgcagtggcttacgcctgtaatcccagcaccgtgggaggctgaggctgaaggatcacaaggtcaggcgtttgagaccatcctgaccaacgtggtgaaaccccatctctactgggaatacaaaaattagtcgggtgtggtgtcacacgcctgtagtcacagctgctcgggaggctgaggcaggagaatcacttgaatccgggaggcggaggttgcagggatccgagatcgcctcactgcactccagcctgggcaagagaccgagactccctcaactcaaaattaaaatgtaaccgtcttaaaacacgaacattgctcctgaatgccacatgcatgaaaaaccgggtatgcactggattggacaagcagactcccaagctggaacagacaaaagggcttctccagggacgcgtccatggctga

SEQ ID NO: 12514 - DNA, 755 bp, Homo sapiens
ccgggcaggtacaatttgtagttgtttccaggtttggctaataatcattccttaacctagaattcagatgatcctggaattaaggcaggtcagaggactgtaatgatagaattaaattagtgtcactaaaaactgtcccaaagtgctgcttcctaataggaattcattaacctaaaacaagatgttactattatatcgatagactatgaatgctatttctagaaaaagtctagtgccaaatttgtcttattaaataaaaacaatgtaggagcagcttttcttctagtttgatgtcatttaagaattactaacacagtggcagtgttagatgaagatgctgtctacaaggtagataatatactgtttgatactcaaaacatttttcattttgtttaaagtagaagttacataattctatattttaagtcttgggtaaaaaagtagttttacattttataaagtaaagatgtaaatgattcatgtttaaagctctaattgacttcctttttttgtttgagatagcggcttgctgtgttgcccaggctggagtgcagtggtgtgatctcagctcagtgccaccttcgtcccctgggatcaagcgattcttctaactaaccttcccaaaagctgggactacaaagttgccctccaccaggcctggctgaattttggattttataggtgaggtgaggtttacccatttttgccacggcggtttcgaaaatcctgccctaaatgaaccaaccacctaaccc

SEQ ID NO: 12515 - DNA, 371 bp, Homo sapiens
aggtacttcgaagtttatccagaagcaaatttaactgtgtcttaaacttgtttcccacgctgatgaagctaagttttcctgctttttgtttagtatctttgttgttatttgtggatgattcaaataattcccgtataaacttatctctggattcacatattaaggattcaagagacatatgtaaagcatcattatttttctccacaaactgggtctgaaaaataaatcaaacaggaatgtttctgtccatcttgtgataacatcacttaacatggctctgtccaaaggaactttctgtgatgacagaaatgttctgtatctgcactgtccaacgcagtcaccactagtcagtgtccccgcgtacctgcccg

SEQ ID NO: 12516 - DNA, 406 bp, Homo sapiens
cgggcaggtactgcaaaaatcacccttggcaaaaacaatgttttgacctgcccgaagggattaatacggttcactgctcaatttttttccaaggggtccatggccattcaactcaacaatcaaaccaaagccaaagacatattggcaaaatttcaatatgaaaacagaatactgcactggcagcgagctgcactttccttcctaaatggaaaatgggttaaaaaagaaagagaagagtcgacagaaaccaacaggagccccaaacatgtattcctcttcactattggcctggacatctccacataggcagtcatatagagacttgaaatatcattcaggggaattgggtattccagtagacttttaatttacttatacttacaaaactgacttttgtacccttggc

SEQ ID NO: 12517 - DNA, 241 bp, Homo sapiens; identical to SEQ ID NO: 3351

SEQ ID NO: 12518 - DNA, 237 bp, Homo sapiens; identical to SEQ ID NO: 3349

SEQ ID NO: 12519 - DNA, 362 bp, Homo sapiens
aggtacgcgggaacaggagcccactgagaggcccctgaaagggatccagagtcgcctgcggaagaagcgccgggaggagggtcccgccgagactgtgggctccgaggccagtgacactgtggagggcgtcctgcccagtaagcaggagcccgagaacgatcagggggttgtgtcccaggctgggaaagatgacagagagagtaagttggagggaaaggcggctcaggacatcaaagatgaggagcctggagacttgggccgaccgaagcctgaatgtgagggttacgaccccaacgccctgttttgcattttgctcgtcagtccttacttcacatggttaatgatttgctgtgatcgatgtt

SEQ ID NO: 12520 - DNA, 241 bp, Homo sapiens; identical to SEQ ID NO: 3351

SEQ ID NO: 12521 - DNA, 320 bp, Homo sapiens; identical to SEQ ID NO: 3352

SEQ ID NO: 12522 - DNA, 342 bp, Homo sapiens
aggtacaggtggtagatgaagaaggggaccaacaacatcaagaaggaaaaagacttcggagggtagcttgcacctgtcccaactgtaaagaaggtggtggaagaggtactgccttctgtgactgggtggcacctccagggcacatttacacaaggccctgaatctgcagaggctgtttctcaagatgcccgtcatggtgtggcctgggccagctctggcttccacaggtccctgactgtcctcagagtggaacatgctcaacctcccgcccactgctctctctctgcccagatttcaggggtgccgttccccaaggcctgcccccttctttaagactgaact

SEQ ID NO: 12523 - DNA, 268 bp, Homo sapiens; identical to SEQ ID NO: 3358

SEQ ID NO: 12524 - DNA, 354 bp, Homo sapiens
ccgggcaggtacgcgggcaccggtgaaggcaggtgcggtaactgccgcactggaccctaggaagccccaggtattcgcaatctgacctcctcctgtctgtttcccttcacggatcaattctcacttaagaggccaataaacaacccaacatgaaaaggtgacaagcctgggtttctcccaggataggtgaaagggttaaaatgagtaaagcagttgagcaaacaccaacccgagcttcgggcgcagaattcttcaccttctcttcccctttccatctcctttccccgcggaaacaacgcttcccttctggtgtgtctgttgatctgtgttttcatttacatctctcttagactc

SEQ ID NO: 12525 - DNA, 349 bp, Homo sapiens
aggtacgcgggggctgatgccattttcagcctcagcacgcctgctcccaggcgctcattaaaacagcatgttgctccccactgcctcgtgttgtctgttggcgcgctgtcggggttcgaaccgatacaagaaccttccacctacctggtgctttggcctcatctataagcagcttttccactgtcctgaaacaagatagagaatctgagcggccagtcatctgccctaagtgctgccgccgaagactgaatgtcctggaaagtttgctgtcacatctccattatgacaaaagcattgtgccgaacagatgaaaaaatgcattgtcaacggaatcttttatgtttgtttg

SEQ ID NO: 12526 - DNA, 349 bp, Homo sapiens
ccgggcaggtacttggacggataaataaaagcctgagtaatattttctaaattcttaaaagtaagaaagagggtctaagaaagtaaactcagagccagggacttggcccatgttaaaccccaagcactacagctggcttttactcaacccgtggaaactgaccagggtatagagcctgatatatcttcttaggtgaaggtgagacaccagacctaaatctgtcatctcaagagtagaaggatgaaccacacatacaaacccatcacagatgaatgcaaataaaaaagtcagctccgaagttgggttctgagcagtgtagattctactgctaaggcttggactacaagcc

SEQ ID NO: 12527 - DNA, 268 bp, Homo sapiens; identical to SEQ ID NO: 3358

SEQ ID NO: 12528 - DNA, 348 bp, Homo sapiens
ccgggcaggtactttttttttttttttttttttttttttggagtagaatattgattgtcctatatcccattttcttgaagagattctggcttctaatatatgttcctaaaaaaaaatttatcgtctagtagtgatgtcttcatgtttcacccagctgtctcataggcatgactaagcatctatttcatcacctggctctggatgcctcctctctttaccattggtgaaaggcatttgctgattccttttgatatacctgaagtattgatgctagagaaatcacttccaatataacagcatcgtttgcagattttcacttctgtgctgcctcaagattatggtcagtga

SEQ ID NO: 12529 - DNA, 353 bp, Homo sapiens
aggtacaagccgtccactgcaggaatgacgtgctgtaaaagggatgcagtgtcaagtgtagtcatggatgggtgggaagaccagacaaaggcatccaatgggactgacttacctaaacaaaccagaaggaagtcagaacagtgggaagatctgatagataagcagtattctgcaggcagatgaaggagcaagctttgggcccccaaatcttcaccagtgcatccacattacagaggataatgcctgagggaggggaagatcatctcaggattctggaacactgggccctccctttcttattccaaaaggctggagcagttctgcatgtaggcttctctggaaatggtctagga

SEQ ID NO: 12530 - DNA, 360 bp, Homo sapiens
  misc_feature 321: n = A,T,C or G
aggtaccgggaaccaaactctcattccccaggggcctaagccccccgtggccaggcccttctcaagtcagggttcctgcacattcacagttacgggtggccctgggagtaacacctggcacccaaacaggtcaccagagtccacacatagtccacctgccctccctgcgtaagatcagctcttcctcctcccgacgaatagatcagggtcaatgatccctgccaagatggcgactgctccagcctgctggtccaacctgtccagccacagctgttgctcgaaggcttgaagttcaatgggaccctctcccgctttctacanactggttcctttatttttatgtttatttatttgggacgg

SEQ ID NO: 12531 - DNA, 356 bp, Homo sapiens
ccgggcaggtaccctttatagaagaagaacagagaaacttttccatgtctgtaaatagcgctgctgtcctgcgattgacaggacgaggaggaggaggaacagtggtgggggctcctagaggtcgaagttcttcaagagggcgaggcagaggcagaggtgaatgtggtttctaccaaagaagttttgatgaagtagagggtgtttttggtcgaggaggtggcagagaaatgcatagatcgcagagcaagagagaagagaggcagaaatgagggcaaaacgggaagaggaagagcgaaagaggcaggaagaactccgaagacaacaggaggaaattcttcggcgacagcaggaagaag

SEQ ID NO: 12532 - DNA, 365 bp, Homo sapiens
  misc_feature 365: n = A,T,C or G
aggtacctgaaggttttgtctcttaattttctttgaaccacacctcttctccttattataagaaaaaccctcttagggtaagggaagcccaaattaactgtcctgaaattttgcattatatttaaaccataatatttgatttacttctgtcaaacaaaacactaccatttgggttctcatttgtagattatttaaaaacatgtttttcctgttaattatcaatgcatttactatcacaaggataaaaaagatcacttcaggtggtggggatgtttcatgaaacaccatggtggggagtaggtagtgggcaggcagagtgacaatcagcttaaacctcctttcacctagctggtctttagaaaacn

SEQ ID NO: 12533 - DNA, 357 bp, Homo sapiens
aggtactccattctccagcattttctacatctggcaagctcgaaagtgaaaccctagtgggccatcatgcaggttttgagttatttactgttacagatgaggaaactgcgaagctacatggccacagtcaacaacgacaacagaaggcaacatagtatggcggttaagagcaccgactctgaagccagcctgaatcctagagccagagctgtgcaacagcaggtaaatgacttatcctgtgcagtttcctccttaatggaaatagtgcccaggccacaatatcgcgagatttacacgtaaagctggaaacaactcccgtcctagagtaagcactgtttactattaagcagcatcaga

SEQ ID NO: 12534 - DNA, 58 bp, Homo sapiens
tggtggtgaagctgtagccgcgctcggtaaggatcttcacccgcgtacccgctaaaac

SEQ ID NO: 12535 - DNA, 357 bp, Homo sapiens
aggtactccctagttgtgtctgaattggacgcaccagcacttgagcacacacaaatgcacgtgaacagacggaacatgttatgggcctgttagccaaggaatgacagaattaatccatgggcatttgcggccagtgttgtgttaaactaaagggaaaaagtgaactggaaaaagcaatgtttgttttatgaaaatctcagacccaatccttaggtgacagttctggaaatgaggggtgtctaaaacaaagggcatctgaaacttcggtttttcagcttcctttccttgtctcatgacctctttcctacccgctgcctctgttttctctaatatggaacagtgaaaatgggggccagc

SEQ ID NO: 12536 - DNA, 237 bp, Homo sapiens; identical to SEQ ID NO: 3349

SEQ ID NO: 12537 - DNA, 341 bp, Homo sapiens
ccgggcaggtacttttttttttttttttttttttttttgcatgataagtttccaaggaaccttagtgatggggactgtctcttttaaaattaaattgtgtaaataactcccagagccatgctggtaagaaacaaaacaaaacaaaaagaactagaaacttgaaacaaacgtaggatttctgctggtaaaaggatgcaaagcaggcctgcctgctgcacttccccagagctaatccttgagccaaaagagcttcctggtgaagcctcgcactctccgtaacagggtgtggggggaccgagacatgtgggctccagacttgaccatctttacctagttatggg

SEQ ID NO: 12538 - DNA, 357 bp, Homo sapiens; identical to SEQ ID NO: 3369

SEQ ID NO: 12539 - DNA, 343 bp, Homo sapiens
ccgggcaggtacttttttttttttttttttttttttttgcatgataagtttccaaggaaccttagtgatggggactgtctcttttaaaattaaattgtgtaaataactcccagagccatgctggtaagaaacaaaacaaaacaaaaagaactagaaacttgaaacaaacgtaggatttctgctggtaaaaggatgcaaagcaggcctgcctgctgcacttccccagagctaatccttgagccaaaagagcttcctggtgaagcctcgcactctccgtaacagggtgtggggggaccgagacatgtgggctccagacttgaccatctttacctagttatgggat

SEQ ID NO: 12540 - DNA, 348 bp, Homo sapiens
aggtacaatcagagcctctggaaatttgattcaggcaagtcgggggagtctccggtattcttctctgagaactctgttttcattatacagctggacaatggaatctatgatttgcctgtagaggttagaggtgcatcctttagaaaaatacatattgccagaagcaggctgacttgggcctctcctaccattttcttcatcaaagctgctgtgatgacgttctagcttttctcacaggcagttgttgatgaaaagggtctccttcaggtgctgccactggctctggatctcatctttggctatttccatagccaaggggccttcctgtgcatcaaagaggaaggcata

SEQ ID NO: 12541 - DNA, 586 bp, Homo sapiens
  misc_feature 93, 408: n = A,T,C or G
ataacttgcgtctgatccaggtgccgaaagggtccggttgagggtatatgtaggagtaatgtaggtagtttttctgtagggaccctatgtcanctcacctgtctgtctggtagggtggtatagtgtatagtaggggcatcctctgtcatgttggcccggtaatgcttggtaaccgttattggtttccccccattgcaggcccggcgggggattctcccccaaacattggccttgcttggaagttggaaaggaagggaaaaaccttggagaagttgaatttggtgcccagggcggcccaggtttttttctttggtgtatggacctggtgttatttttttggttggaattcttattaaccccttgttgtttgcccgatattttcttggcgcgttgttggttaattccccncaaattcccttttggactgccagatggaacaaccccagaaccaaccaagttggtttttttttggaagcctttcgggtaattttaattattaatttgtttttttttccttccaattttaaaaggggttttttaaaaaatttcctcatataaatatatattttacctttgccccccccct

SEQ ID NO: 12542 - DNA, 438 bp, Homo sapiens
tggcgggggtcacaggcagccatcatgttcttggcatcgaggacctgctgggtgagttccggcactgtggagagtctcgatactggctggcttccacggctggtgagaggggcaaagccaggcataaagaaatggagacgtggggaagggggaccattgttgaactggccaactttggcgggagggtccagcatttggagccgggcccggggaaaacggaggcaggtggtgacaccactcatggtggctgagacaaggtggtttcagatccccgtaagttggttgtggttcagccttcagagttgcgggaaggcagataatcataggagggccctggttggtcaattgccaatagggtctcaatcaggtattccttctaccccaactggatgggacgggagaggggtgggcattggtaggggccttcgaacccaccgg

SEQ ID NO: 12543 - DNA, 455 bp, Homo sapiens
aggtaccccgccatggaaccaaacaccacgtcaactggaactcttcttgcaaacgaaggctgaagatcaagaatgacattctcacaccacagcacagcttaaatacttctttgacaaaaataataataaattatattgtgactgcaggaaaataaaattcttgttcaagcaggagtggccaggaaggggtccaattcatttggcattggccacgaggggctctacggaggggctgaggaatggggtgcaggaatgccacagtggacaaggggacatgggggggcggggccccaggcagcacagggcttgaaggttaggctggacgcaatggcttttgggcttttttattccccacgggggcggggtagtgggcccggggacccccttgggcctggtggccctgggtccccaaggtggaggacctggcaaacctggtgccccccttttcctccctg

SEQ ID NO: 12544 - DNA, 437 bp, Homo sapiens
agctggtttcctgcccagcctggggcaaacctagccggaaggccgaggtcccattgttggcgctgaggtgtctggcctgaggtcaatggtgcaaaggagccgccaccgggcatgtctgcctggagtgctgtgctgtgtttaatcaggggaatacaggggcccctggggtttcttttttttcttttctttccttttctttccttggccaagagaagggcttacaggcatggacatgcaggtttggcaaacgggcttggactttggctgattttaaaaagttgagaaaagaaaggtaaaaaaagggttaatttttttcctttcctctggtaaagataatccccaagccttaaaaaataaaaagaaaattattatagatgttaccctttgggccgggttctaaaaaacctaagtgggaattcccccctgggggccttggc

SEQ ID NO: 12545 - DNA, 432 bp, Homo sapiens
ccgggcaggtacgcggggaagtgaggcagcggaggacgacctttttccggttccggcctggcgagagtttgtgcggcgacatgaaactgcttacccacaatctgctgagctcgcatgtgcggggggtggggttcccgtggctttccccctggcgccttgcagggccacccgaggttccggtatcttggccctgtggggaattcaaccccaacttcgtggcgcgtttgatacctaaagtggagtgggtcgggcgttcctggaggcgggccgcttctagaactagtgggaatccccccggggctggcagggaattttcgattatcaaagcttaatcgattaccggtcggaccttcgaaggggggggggccccgggtaccccagcttttttggtttcccttttaattgaaggggtttaatttggcgccgccttgg

SEQ ID NO: 12546 - DNA, 417 bp, Homo sapiens
  misc_feature 166: n = A,T,C or G
agctggtttcctgcccagcctggggcaaacctagccggaaggccgaggtcccattgttggcgctgaggtgtctggcctgaggtcaatggtgcaaaggagccgccaccgggcatgtctgcctggagtgctgtgctgtgtttaatcagggggatacagggcccctggngttttctttttttcttttctttccctttcttccttggccaagagaagggcttacaggcatggacctgcaggttggcaaacggggcttgactttggctgatttaaaaagtggagaaagaaagtaaaaaaggtttaattttttcctttcctctgttaagataatccccagccttataaaaataataaataattaaagttaccctcgggccggttcttagaaactagggggaattcccccccggggcttggcag

SEQ ID NO: 12547 - DNA, 439 bp, Homo sapiens
  misc_feature 137: n = A,T,C or G
tccacaaatgtctgcagctacgatggaccctcagctgctggacaggaaagaggatcaagctaagaaggcccagagtgtgcaagcagagagagggtgtggacagaaaaccttgccttctccagggctagtggcgaaangctattctcaggctgggctcaaggtgggagagaaaaaaaggcattgagaatcaaagccaatgggaccagctggggaagggctggcttttaatttactcagatcccaagcttagttccctggcactgggcccgttggcctttgtaggttcccttctgtggcccagggtcttgcctatggggggttgttttctttgggcattaaaggtgcctcaggtttcaaaacgcccaacccgttgtttcaaagaaggccccttcatctggttcaaccccttatcttaaaaggttaacccccttgactttct

SEQ ID NO: 12548 - DNA, 542 bp, Homo sapiens
ggtacgcggggcttttcacaagatggcgccgaaagcgaagaaggaagtctcctgtcccctgcctaaaggctgaagtccataaggcgatagggctttaaaggtccaaagaagcgcagttgttgaaagggtgttccactagctcacaataaaggaaggaaggatgccgtcaacgttgcactccacccttttccgggcgggcccggcttcttagaaacttaggtggggatcccccccggggctggcaaggaaattcgagtattcaaggctttaatcgataacacgttcgacgcttcggagagggggggggccccgagtgactcccaggctttgttggtttctccctttttaaagtgaagtgggtttaaatttgtcgggcggctttggggcgttaaaatccactggggttcattaaggccttggtttttttcccctggtggtgggaaaaaatttggttttaattccccggcttccaccaaaatttttccaacaacccaaaccaattagcggtagggccccgggtgtgagggcaattaaaatagggt

SEQ ID NO: 12549 - DNA, 455 bp, Homo sapiens
aggtacagctggttggacctattcatgcatcttcaccagcagctggagcatctccacccttggtatttctggtgtaaattacttgagctctgtgctttgaaaccagtttgataagtcctttactaaggagctcctgaaggggcttgccctggcccaggggaggccctcgaattctttcaagtctctcaagagaaccaacaagtttggggttataagtttatagtttgggaacttttcttacagagttttatcataggtagctttttgtcaaacaaagacttaagtttatttgaggctttggtcccgaaacttttgccctttggaacccacttcttttcttttttggccctttgtccccccgggatttttggttttaacctggaggtcctttttgtttttttctttggggccggaactttttctcaagcggttccctttttttttcctttctttgg

SEQ ID NO: 12550 - DNA, 135 bp, Homo sapiens
aggtacgcgggctcctacttggataactgtggtaattctagagctaatacatgccgacgggcgctgacccccttcgcgggggggatgcgtgcatttatcagatcaaaaccaacccggtcagcccctctccggccc

SEQ ID NO: 12551 - DNA, 398 bp, Homo sapiens
ccgggcaggtacataaagtgccatgtcaggccttctggctctaactctgcatctctctgattcttgctgcatggcaccaccacaatcatgtaagtaacatttattttcttagtaataaaactctacaacatgccgatagactgttctctgaaggcaaactgtgttaaaggtttccttttctggacaagcaagcccttacctgtaatcccagcactttgggaagccgaggcaggcagaccacttgagctcaggatttcgacaccagcctggacaacatggcaaaactccgtctcggcgcgctgttgctctccgcttccgccgtctccgcgaaagctcttatctctcccccgcgtaccctcgggccgctctagaactagttggaatccccccgggcctgc

SEQ ID NO: 12552 - DNA, 575 bp, Homo sapiens
  misc_feature 452: n = A,T,C or G
aggtacgcgggaaccgctggatccgagaaattcaaaaagtgtaccaagactgggatgcgtagatgccgtgtcatgcacggaatctggcctctcacagggaaattagtttttttggctaaatcttggtaaccgtggcgtgtatgaccgtcatccccaggtaggaataccgggtagaaggctcccgggaaaggttccttccctggaccttcctgggaattattctttggaaaaaccaatgggccaaaggcggctttttcattgctcaacccgttcagttttttgaaccacctggaccaccagggttccttaaaaccaagggccttttgggaaaaacttggtggaaattggagcctaccaaaattcgcttcttgtattggaccaaggattttttcccccttcttggaaattgcatttttcgccttgctccttggctccaccgggcaagcccttgngggaccaacaataaatataagggaccaagtggtcggccctttggtttgggctcaattttttttcaaccggccaatttttggaggataaaaggaactccccggtaaatatccatccacaaaaac

SEQ ID NO: 12553 - DNA, 199 bp, Homo sapiens
aggtacagtgaaactgcgaatggctcattaaatcagttatggttcctttggtcgctcgctcctctcctacttggataactgtggtaattctagagctaatacatgccgacgggcgctgacccccttcgcgggggggatgcgtgcaatttatcaggaatccaaaacccaaccccgggtcaggccccttttccgggccccg

SEQ ID NO: 12554 - DNA, 468 bp, Homo sapiens
  misc_feature 132: n = A,T,C or G
aggtacaggtctttgcggatgtccacgtcacacttcatgatggagttgaaggtggtctcgtggatgccgcaagattccatacccaggaaggaaggctggaacagcgcctccggacaccggaaccgctcattngccaatgggtgatgtacccctggcccatcggggccagcttccgtagcctcttttttccaggaagaaagaagggagggatggcggggggtgggccatcttcctgcttcgaaggtccaggggcggacgtaggcaacagcctttctcctttggatgttcgccgcaccgattttttcccgcttcggcccggcttttagaacttaggtgggattcccccccggggcttggcagggaatttccgattattcaaaggccttatttcggattacccgttcggactcttcgaagggggggggtctccgggggtaccccaaggcttttttggtttcccctttttaa

SEQ ID NO: 12555 - DNA, 458 bp, Homo sapiens
aggtacgcgggatttgatgtagttttcttttttaaattaatcagaaaccccacttccattgtattgtctgacacatgctctcaatatataataaatgggaaatgtcgattttcaataatagacttatatgcaggcttgtcgtttccggtttattgttgtgttaaggtcaacctctttcaacccctcaattcactggtcccgggctttttatttaaagaaaaaaaaaggcaagtatttcccttttttaaaatgaggctttttcaggaagtttgctggagaaaatgggggtggtaattatgggcaacctgttaaatgggcccacttgaaagccacggtgtaggaggacccctttgccaaaaaatgaatggtggaaaagggaacccagtttttctttggaaaagtcccaagtggttttttccaccgggcttgggaataacccctgttggttgttcctcccc

SEQ ID NO: 12556 - DNA, 424 bp, Homo sapiens
ccgggccggtaccgcgggagctcgggctcctgagggcgacggtcctctgatggcagatgcgggagaaactctggcgtcaggcggccctcgcgtggagcacacgaagtcgtggcttattctggcttcagtatgtggggtggagaaggcgatccacgcagctgcgtctatttcctgtggatcaatcgcaaaatacgttctgtaagccccgcccccactgcgtgcgggcggcttttgtctccatggcaaccgtcaactctggaaacgcctgtctttctccatggcaactgtctacgccgcaggctggagctgcccattaccggagcccatatggcaatgacccttggccagtctctgggaactaaactcctgggatgtttacacaggtgctgggtaagatgttcttccatatgctcaagaccacggg

SEQ ID NO: 12557 - DNA, 424 bp, Homo sapiens
aggtacaaaaaattctacatgctgtggccatagctggcgagccactaggaccttgcacttttcctattaccttaaggcctgatccaaataatccacagcagtttattcatgaacacactccagtaaaatttaaattattgaaagaattaaaagctagtgtggttaataatggaatacagagcccatttactttaggattgttagaatctgtattcagcactatgcgcctcccacccttggatataaagcatttagcttgcacttgtttctctgctagtgcatatttgacatggaatttaaattggcaagaaatgtgtgcagaccaggctagacagaatctcaccgctggacatgggaacattacagaggaaatgctattgggtagtgactcttattcagatctggtgcaacaattgacactttc

SEQ ID NO: 12558 - DNA, 204 bp, Homo sapiens
aggtactgtgctgagaaatgggccccttgccagatgctcccctctccttcctctctgcgaggcagaagtcagaaggtagagattgctggcaaaactgtgaagtcccaccctggggtctcaaccccaactccactggagggcaggccttccctgacgttgtggtgacttagggccagttaaggggtgggcgggttggatgggccg

SEQ ID NO: 12559 - DNA, 452 bp, Homo sapiens
ataggcaagcaccggaagtaccccggcggccgcggtaatgctggtggtctgcatcaccaccggatcaactgtcgacaaatgaccacccaggctactttgggaaagttggtatgaagcattaccacttaaagagggaaccagagctttctggcccaaactggtcaaacccttggaccaaattggtgggacctttgggtcaagtgaaacagacaccgggtgaatggctgcctaaaaaacaaggactggggcctggttcccaatcatttgatgtggtggcgatccgggccttactacaaaaggtttctgggggaaaggggaagagcttcccaataggcaagcctggtcaatcggggaaggggccaaaatttgctttgcacgcaagaaaagaggcctgaagggagaaagaatttaaaggaagtggttgggggggggggggccctggggggcccctg

SEQ ID NO: 12560 - DNA, 416 bp, Homo sapiens
ccgggcaggtactggtggccgtgggacccacgaccgagacccgagtgagaaaccaccccggctccagtggtttgaacagcaggcgaagaagttggcaaagcagcaggaggaggacagcgaggaggaggaagaggacctggatggagacgattgggaagatattgattctgatgaagaattggaatgtgaggatactgaagcaatggacgatgtggtggagcaggatgcagaggaggaagaggctgaggaaggcccaccccttggtgccatccctatcacggactgcttattttgttcccatcattccagctcgctgatgaagaatgtggctcacatgaccaaagaccacagtttctttattcctgatatagaatatctttcagatattaagggactgattaaatacttgggagaga

SEQ ID NO: 12561 - DNA, 427 bp, Homo sapiens
  misc_feature 143, 296, 297, 298: n = A,T,C or G
gctgtggtggctcacgcctgtaatcccagcactttgggaggctgaggcaggtagatcacctgaggtcaggagttcgagaccagcctggccaacatggtgaaaccctgtctctactaaaaatataaaaattagccaggtgtggntgggcggtatgcccctgtaattccccagctactttgggagacctgaagggaggaacaaatcaactttaacccaggaggcagaggctgcagtgagccaagattgtaccattgcactccagcttgggcaatgggagcaagacttccattcttaannnaaaaaaaaataaataaaaaaaaataaggtacctgccccggggcgggccggcttctaggaacctagttgggattccccccggggcctgcagggaattttcgaatattcaaggctttattcgaattacccg

SEQ ID NO: 12562 - DNA, 424 bp, Homo sapiens
aggtacttcctgcacacaggccacctgaccattgcaggctgcaaaatgtcaaagtcactaaaaaacttcatcaccattaaagatgccttgaaaaagcactcagcacggcagttgcggctggccttcctcatgcactcgtggtaaggacacccctgggactacttccagcaaacacccatggaagttcagggcctttaattatgagaaggtcttgaatgagttttttttaaatgtgaaagatatcctgttgcgctcctgttgacattcactgggtcagttttggagaagttgggggagaaaaaggaagcacgaacctggaataaggaactttttatggacaaggaaagacggccaaatttcaccaaaggccccctttggtgacaaattggttggacaacccccggcacccggtcatgggaaaaca

SEQ ID NO: 12563 - DNA, 425 bp, Homo sapiens
  misc_feature 259: n = A,T,C or G
aggtacaggggcccccaagactcgtatttgtgactggtctccaagggctgtggctgcatgctgctcggggattcctttgcagttcctgaggaggatatcttctcccacaccggtttctgttcgtttggaggagttgagacctggtgttcctggcctcatccagtttcccggttccaagatctttcgagggataagtgacagccctttttcagcgctcttcgggcaatgcttctgcacccaggcctggagcttcctgggngcaggtatggttcaggaactgcttccagcacccagttagctcccaggatctggctccttggtgtgggaatctcgggcccttcaggccacttcacagccagaagcaaccccgggagtttggccttcaggggccctcttcggggggttccagggggggtattccaatg

SEQ ID NO: 12564 - DNA, 426 bp, Homo sapiens
aggtgcagacattgagatatatatggaagaggagatccatgtggtcttgtgtaaagggacaagtacagaaccagtaacagaaatccggcatgccaaggacgtgaggcctcccagcaatgccgaacccaatgccacaagtgtgcctgtccaccaaaactggggggcttttaccaagaacctggcccatggtccttcatgttggctgcctacagttctgagcagaaacaagtgggctcctaacttttgtgcatataattaaacgtccccagccactatgaacacaaatacagagggagagattgttcagtttgataagtttccctttaagccgggctttttatattttttggtatttgattggttaaatgcatgggcctggttaaacattactgtggggtggcccaagggtggaaatggaggaaacaa

SEQ ID NO: 12565 - DNA, 426 bp, Homo sapiens
aggtacgcgggggaactttgccaggtaaggaggcagagggatgatgcttggcagaaagagtatctaacaagcttgcatgtttgacagaagcagcagccatgaagaatgaaagttttaaaacacaaggagcaagttcaaaagtctcgctctatcaccagtctggagtccagtggcatgatctcagattactgcagccttcacctcccaggttcaagcaattctcctgcctcagcctcccgaggagctgggacaacaggcacatgcgaccatgcccagaaacagcagctatgaagcctgcaaatttgaaaaaaagaaaagaacgtgcaaaagaacacaacctaaaagtggcttcagaggaaaagcaagaaaggctccaaagaagtgaaaataaacagccacaggattctcaaagttacggaaaaaaga

SEQ ID NO: 12566 - DNA, 568 bp, Homo sapiens
  misc_feature 162, 358, 359, 433: n = A,T,C or G
aggtacagctctaggcggagttggggctcttcggatcgcttagatgtctcctgctttgtctgtcattttgccccgccacagtgcctgcgtgtctccccgacgtgctggcctgtcgggaccccggtaggaaggggagtatatgggaggagggggggccctgcncggctttccttctgagcggccggtggcttcggccccttcggtgccttcggcccccggggccccgctttcttaggaaacctaaggtggggaatccccccccggggcttgccagggaaatttcggattattcaaaggccttaatcggattaacccgttccgaaccttcggaaggggggggggtctcccgggttacccnncaggcgttttttggtttccccctttttaagttgtaggggggtttaaattttgtcggccgcctttggggcggtanattcaattgggttgcaataagggcgtggttttttacccttggtgggttgaaaaaatttgggtttaattctccggccttcaaccaaagtgtttccaaccaccaaaacaaattagcggaaagccccggggggaaggc

SEQ ID NO: 12567 - DNA, 389 bp, Homo sapiens
aggtacaaatggaataagtgacaaactctaatttgtagaaacattttaggccatgtataagttacactgattttagcactaagctatatttttatcacagatgggtcaccttaaaagaaaactaaggagatggaatgaatctgaaatctttctaaatacaaggtagttaacaccatactcaagcagaaaattataatcctgtatttagagatacttttttttgagacagagtctcactttatcactcaggctggagcgcagaccgtctcaaaaaaacaacaaaacaaaaacaatcatagacagcactgtatttcagtaggaaatatgcaaggaggaggtagaaacaactgtctttggctagggctagaaccgtgtggcttctgaagaaa

SEQ ID NO: 12568 - DNA, 163 bp, Homo sapiens
aggtacaggcgctttgagaaggagaagctcaagtcccagtggaacaatgataatccccttttcaagagcgccaccacgacggtcatgaaccccaagtttgctgagagttaggagcacttggtgaagacaaggccgtcaggacccaccatgtctgccccatcac

SEQ ID NO: 12569 - DNA, 448 bp, Homo sapiens
aggtacataggtttatctcctattggaatattttctttatataggcgttttttttttttcttttttttgggagacagtagtcttgtctctgttgcccaggctggagtgcagtggcgcgactggagctcactgcaaccttccactttcccgggtttcaagttgatttgtccccaccttcaagcctcctggaattagctggggatttattagggtggcatgcttccatacctgtctctactaaaaatacaaaaatttgtttaagcttctgttttttcataaataggaaattagaaaagggtgaaaattggctttttctttctgaaaaaggaacaaggtttttgtttcattccaaggatagggttttttttggtgaacttgaaatcagtcaggtggccttggcccttagttcattagtctggtggcctttcaaaaaaaaacccttcaagct

SEQ ID NO: 12570 - DNA, 282 bp, Homo sapiens
acacacagccaggcgctaggctccctgcgggacctcgggaagggggaagagcgtcaacaatttacggagggtccagtccgctgggtcagattgagacaaaccattgtgtggttgggttcgggtcagcaggctggagagggttctgttctttttgatcattatcgtttgggggccccaaggggaagggttttgggagccacccgggccccaaagctgggaaatccctcagagctgctcatgtcagggagccttcttactggtgctggcggtccagggttacct

SEQ ID NO: 12571 - DNA, 636 bp, Homo sapiens
aggtaccgcaagggaaagatgaaaaattatagtccaagtcatgaatatgagtcaagggactcaatccgcctgtatactcttgtctgggcattatatggaatctgaacgtatgaaaaatatatcttatgcaatgggagtagtctcagatagcgtataggacgccccgcgtagagactcgagtatcgtagggctgacgcttaaagggacacaaggcgtatataaaggaaggcatccaacccccggtccttaatggtaaaggcaaaaaaaattaagtgggggggaaaagaattttaattagggtagcaggggcggaacaagaaccctaacccggaggcccttgggtgggactatggctttgggtttggttccccaaaggattgaggaaattcctttaacgtttttcaaaactttcttagagaaatttgggcgcccaacctaggcaaacccctcttgctttaaaaattccccccctttgggtaaaaattgtttaaaactttggttttaggtttcctcaaaaaagtaagaggaaaaccaaggtctttcctttttgggggaacacaccttatggggaaataaaaaaaacccctttttggtttaggtaagcaaggtaagggttaaaaaaaataaaactttttc

SEQ ID NO: 12572 - DNA, 191 bp, Homo sapiens
aggtacgcgggggtgaacacctgggcagcttctatgctccccgggtctggtggatgttccgtgtgtttggccaccgcaccgtatcagtgctcaatggtggcttccggaactggctgaaggagggccacccggtgacattccgagccctcacgcccaggaaccgggccgcttttagaaactaaggggatccc

SEQ ID NO: 12573 - DNA, 604 bp, Homo sapiens
agcgggaaatcgtgcgcgacatcaaggagaagctgtgctacgtgcgccctgggacttcgagtcagggaggatgtgtccgtccgtccgtcatcctgccctcttgctctgggagaaggagtcttacgagcctgtcccggatgtggcccaggtgcatgcaccccatgtggggcaagtgtaggccggttttcccgggtggttcccgggaggggccgcctggtttccccaggcgcctttccctttttccctggggggttaatggggaaatcctttggcgggcatttcccacggaagaacccaccctttccaaaccttccattcaatggaaaggttgttggaacggttggggacccattctccgctatagaggaaccctggttaccccttgcgggcccgggcgttcttagggaaaccttaggtttggggactcccccccccggggggcttgggcagggggatactttccggaatttatttccaaagggccttttaattccggaattaactccggtgtcgggaaccctttccgaaagagaggggggggggtcctcccggggttgaacccccccaagacctttttttttggtttttccccccctttttttag

SEQ ID NO: 12574 - DNA, 395 bp, Homo sapiens
aggtacccctccaagccggacaacccgggcgaggacgcaccagcggaggacatggccagatactactcagcgctgcgacactacatcaacctcatcaccaggcagagatatggaaaacgatctagcccagagacactgatttcagacctcttgatgagagaaagcccagaaaatgtttcccagaaactcgggcttggaagaccctgcaatgtggtgatgggaaatgagacttgctctctggccttttcctattttcagcccatatttcatcgtgtaaaacgagaatccacccatcctaccaatgcatgcagccactgtgctgaattctgcaaatgtttttcctttggtcatcaatgtatataaggtggggtttaaaataaaaggattcatggcat

SEQ ID NO: 12575 - DNA, 215 bp, Homo sapiens
aggtacctgcaggcctcctacacctacctctctctgggcttttatttcgaccgcgatgatgtggctctggaaggcgtgagccacttcttccgcgaactggccgaggagaagcgcgagggctacgagcgtctcctgaagatgcaaataccagccgtgggcggcccgcttctaggaaactaggtgggaatccccccggggcctggcagggaaatccc

SEQ ID NO: 12576 - DNA, 438 bp, Homo sapiens
aggtacaaccacttgacttgctctttaacatagtcctgtgagatgccagctgccatgaccaagcagtattcccactcctcctctacactctggcaaggctttcctggaacatccccatgcccacatctttacccagtaactcactaaagccactcttgactcaagcaggtgccgttccttgatcacggaatctacctttgatttcatcaggccagattcacaaacagaatgggagtgctttatctatacctttgagaggatggagagtgaaataactggaaacactgggttatcacagcttaatttcatccaggcttggtgtctttaccaaagatggttggggaaaggaagggagattcatcttgttcaggcagtgatttgctcagaattttacaagacataccctatacagacctatttgaattctactgtgggttt

SEQ ID NO: 12577 - DNA, 443 bp, Homo sapiens
ttcctctaagtctccgccacgcaggaaacaaaagcgatagaaggtccgttcctgtcctccggtgctttgatgagttcaggctgaagccgatgggggaggaggagaagctgcaagttaacagctgaagaataagttcatgaaaaaattgccacgtgatgcagaagcttccaacgtgcttgttggggaggttgactttttggatactcctttcattgcctttgttaggctacagcaggctgtcatgctgggtgccctgactgaagttcctgtgcccacaaggttcttgttcattctcttaggtcctaaggggaaagccaagtcctaccacgagattggcagagccattgccaccctgatgtctgatgaggtgttccatgacatttgcttataaagcaaaagacaggcacgacctgattgctggtattgatgagttcctagatgaa

SEQ ID NO: 12578 - DNA, 187 bp, Homo sapiens
aggtacagtgaaactgcgaatggctcattaaatcagttatggttcctttggtcgctcgctcctctcctacttggataactgtggtaattctagagctaatacatgccgacgggcgctgacccccttcgcgggggggatgcgtgcatttatcagatcaaaaccaacccggtcagcccctctccggccc

SEQ ID NO: 12579 - DNA, 507 bp, Homo sapiens
aggtacaccaaggtggtgcattaccggaagtggatcaaggacaccatcgtggccaacccctgagcacccctatcaactccctattgttagtaaacttggaaccttggaaatgaccaggccaagactcaagcctccccagttctactgacctttgtccttaaggtgagagggcccaagggtttgctaggaaaaagaaattcagcatgacaccaggttgtagaaccatgagtgttttcttaaaatggttgtaaattattgtccctcttctagtgttccttgggggaattacatggaccaatgctcttggagacaatattcagcttcaattttcttttgagggaccacaagataagggatgggggttgttcttgtgtttaattttgtggggtgtaaccctgccctcgggtccggccgcttcttataaacctagttggaattccctccggtgcttgccatggaaaattcgattattcaaggctttattcgtatacccggtcgaaccctctt

SEQ ID NO: 12580 - DNA, 529 bp, Homo sapiens
ccgggcaggtactgatgacacaaacatggcagacactttcaccgagattatgaccatgatgtcgccttcacagttcttgagttcatctcctttgagaatgacaaataatgaagacagtctgagtcccaccagcatcactctgtcaaaacctggaacttggatgccaacctaaaaaggaatcgcaagccttcaggagaaaagagaaagcaatatcgaaagagcctgatagaggtaaaactgtgaacaatgaagcaggaggcctctgtggaaagatgccttgaataatgtcacactttgtagggttgtaaaaaacggagtggccagctatgctagccggcccccttgggaaaggcacccaaactccagttgcccctcatggttcaatttctgttcaaagtccaggaatccagaaagccactgggcaggccctttgtgctcccttcccattccaaaggattgaagggcacttcactttcccttgtaactggcttccaagcatcccaagggcaggccctcattcccccaattt

SEQ ID NO: 12581 - DNA, 436 bp, Homo sapiens
aggtacttctatgggaaagtgaacagttctgtgacaggaaacatctctgtccatgccagcatagtagttgtatggacttctaaccagttgagttttttaaagcattgaggattttttcctcttaccaactcctcttcaggtttttaaagacccagccccttccaattttaaagagaaaaaggaaactgagttatcttgaataacataactttttaatcaaatgtttattttggcttgtggatcttggtgttatttaaaaaattgaggtgatggtcattgcaagctcatctattaagtacgcgggctctcggccttagcgccatttttttggaaacctctgcgccatgagagccaagtggaggaagaagcgaatgcgcaggctgaagcgcaaaagaagaaagatgaggcagaggtccaagtaaaccgctagcttgtt

SEQ ID NO: 12582 - DNA, 458 bp, Homo sapiens
ccgggcaggtacgcggggcttctcgcctaacgccgccaacatggtgttcaggcgcttcgtggaggttggccgggagagacctatgtctcctttggacctcatgccgtaatattggtcgcgattgtagatgttattgatcagaacagggctttggtcgatggaccttgcactcaagtgaggagacaggccattgcctttcaagtgcatgcagctcactgatttcatcctcaagtttccgcacagtgcccaccagaagtatgtccgacaagcctggcagaaggcagacatcaatacaaaatgggcagccacacgatgggccaagaagattgaagccagataaaggaaagccaagatgacagattttgatcgttttaaagttatgaaggcaaagaaaatgaggaacagaataatcaagaatgaagttaagaagcttcaaaaggcagctctcctgaaagctt

SEQ ID NO: 12583 - DNA, 806 bp, Homo sapiens
  misc_feature 669: n = A,T,C or G
cgctaaattattttatttatcactgtgaagatagatttctggacgacgtatacgcccggactggatatgttttgtaatatgtaaccaaagggaaggacggaccatccattcccgagctattttattatgtcggtatacgggcgcgcgtaggcgacttatatatggagagttgtggctgcaccccgggcaggtacttgaccccacagccatatgagccacttctcagccaccatgtcttcaaattcatcgacattgaactaggagaagccccatttctttgagaagtggatcgtctggcagccagagaacttgaacttggccctgtgcagggccttaaataacatgctccctagtttctgcaggcttggtggcgggacgggacatggggaaacttgtgccaaatgtgaaccccttgagccaacaggggcgccctgggggcttttccaaaagcgccactctccgccattgcccttgtttttgatagcccttaccatctggggggtagatggctaagagttctggaagtagcatggatacgataacaattctggaatagaggcccttatttaattcaaagaggtcccccctttaagaactcaaactctttattaataaggggaaaaaccaggggcgttgccatttacaatcccaccccaaaatggaaaggcnttggcttggttttttgccaagggccctattttggctaacgaaccttgtgggcccgcccccaattaaagggggaaaaaggggaaactcttcaagttaaccctttcgggggcccggcattcttaaggaaaactttagag

SEQ ID NO: 12584 - DNA, 219 bp, Homo sapiens
aggtactctggatatgggaggagctcagggttgttggctaagatgtaattttaaggaaacactttatatttcataccaagtaagaatttcaatggcaatgaatattaccacatagctgtatactgtaactcagggattctgtcagatgagtgcaaacattaccgtgctgtaaccatccagagtcccagggtcacattggcagccaaaagtacctgcccg

SEQ ID NO: 12585 - DNA, 520 bp, Homo sapiens
aggtaccaaaccaaagccgtcatcattgcaatgatcatcactgcggaggtatccatttcagtcaccatcttctgctttcagaccaaggtggacttcacctcgtgcacaggcctcttctgtgtcctgggaattgtgctcctggtgactgggattgtacacttaccattgggcctctactttccaaatacgttttaccttggcctccacatggcctctatgcatgcttctggggggcccattttggtttcaccccttggtttccttggcctttacgaccacaacagcctttggttccttggggggaacccggtaagacatcactcattcaggtcccggtaggaacataaccatcacttgggccgccccttgccaggattttacacaaggaccattcattcttaccaatctatcaccctttatgtggcttgccagcctgaatgggggggaatccgcaaattaaaggaagcaaaggctccccccattttttgcacaccgaatgccctggggcctcttcgccttt

SEQ ID NO: 12586 - DNA, 187 bp, Homo sapiens
aggtacagtgaaactgcgaatggctcattaaatcagttatggttcctttggtcgctcgctcctctcctacttggataactgtggtaattctagagctaatacatgccgacgggcgctgacccccttcgcgggggggatgcgtgcatttatcaaatcaaaaccaacccggtcagcccctctccggccc

SEQ ID NO: 12587 - DNA, 431 bp, Homo sapiens
tgcaccgcggcaggcggccgaggcacgcgggggctgatgccattttcagcctcagcacgcctgcacccaggcgctcattaaaacagcatgttgctccccactgcctcgtgttgtctgttggcgcgctgtcggggttcgaaccgatacaagaaccttccacctacctggtgctttggcctcatctataagcgggcagtcatctgccctaagtgctgccgccgaagactgaatgtcctggaaagtttgctgtcacatctccattatgacaaaagcattgtgccgaacagatgaaaaaaatgcattgtcaacggaatcttttatgtttgtttgtcttcctttaagcaacattgccttacttgttataaaagataaataaatatttgttcatttctaaaaacatacaatccagtaaaataaaaggtacctgcccg

SEQ ID NO: 12588 - DNA, 489 bp, Homo sapiens
aggtacgcgggatgaaagcaaagagaaaggatggaggcaaaataaaaaaaaatcacgtttcaagaaatgttaagctcttcttggaacaagccccaccttgctttccttgtgtagggcaaacccgctgtcccccgcgcgcctgggtggtcaagcttaagggatttctacctcacactgtgcattttgcacagcagatagaaagacttgtttatattaaacagcttatttatgtatcaatattagcttggaaggaccaggcgcactagccttctctctgtgacatgtgaactttgtcaaattgaagacagggacatttaaaatgagagcccgagagaagagaaacaagtttcagattacttgcaacatgttggatatttttttattttacaataaaacacaataaattaggtttccttgccccgggccgggccggctctagaaacatagtgggatcccccccggggcttgcagggaatttcgtatattcag

SEQ ID NO: 12589 - DNA, 463 bp, Homo sapiens
aggtacgttcctggcaatggcttcagcctcatcggggcccacacggacagcccctgccttcgggtgaaacgtcggtctcgccgcagccaggtgggcttccagcaagtcggtgtggagacctatggtggtgggatctggagcacctggtttgaccgtgacctgactctggctggacgcgtcattgtcaagtgccctaccttaagtcggttggagcagcagctggtgcacgtggagcggcccattctttcgcatcccacacctggccatccatctgcagcgaaatatcaaccaataactttgggcccaacacagaaatgcatctagtccccattcttgccacaaccatccaagaggagctggagaaggggactcctgagccaaggcctctcaatgctgtggatgagcggcaccattcggtcctcatgtccctgctctgtgcccatctggggctgacccccaaaga

SEQ ID NO: 12590 - DNA, 142 bp, Homo sapiens
tcatggtgttagaaaaattctttctcgttaattatataaataaattatctatcgaatgtgtaaaatctattatttgagtagataaatatatttttagtaaatattcaaattctattcttttcctagattatagagttgttga

SEQ ID NO: 12591 - DNA, 448 bp, Homo sapiens
aggtacgtcggaaataaactatttccagactgatacttcagtgtttccttttattttttatagcgtataaaagtttctgaggtgggggcaatattttgataagagtagtcgtttagctaaaactaagtaacattaaggaaacacattgtctggtcttatatgttagtgcaacacacagtatatatatgtttaagcaactattggtgagtgggggctacagggattaccaggagatgatctctcaattcagaatggcattattgtgacaaaggccaccagatacccactcctcatagacccacaaactcaaggcaaaacttggattaaatcaaaggaaaaagaaaatgatttacaggtgacatctctgaaccataaatattttcgcacacacttggaggacagcctttccttgggccgaccccttctcattgaggacattcatgaagag

SEQ ID NO: 12592 - DNA, 480 bp, Homo sapiens
aggtaccttctggacaatttccagaacattgaatttgcctatcactaagatgtcaaataccgcatttaaacccagcacagtgatcccttgctctttgcacagcatggccactgctcccagaaagatactcagcagcacccagaaggtggaaaaaatgcgctccctccttggtacttttctctaaatgcctttacagtaagcccaaggaatggataaacaagaaagaaccagggcacaacagggaggtcttgacacgggccgcttcttagaacttagtgggatacccctcgggcttgccaggaaattccgataatcaaggccttattcgattaccgttcgaacacttcgaggtggggggaccccggtacccagacttttttgtttccccttttagtggagggattaaatatgcagccgccttgggcgttaaatacattgggtcaatagcctgtatatccctggtgtggaaaattgtttatc

SEQ ID NO: 12593 - DNA, 540 bp, Homo sapiens
ccgggcaggtacggaaagttcccctgttccacaggcaatgcaattacctcggccacttcgtaagggtgcacagaacgaacaaaatctgtcaaagctgggaccaaggaactttgggttttaatcatcatcagcacctcactgtctttcctcgatactttccttttccacttcatagaatggaatgttaattctgaagggaatgaaggtttgaacgcaaaggctgacttaggtcgcttttcttccaaccatcggtccccttgggcggatgcatccctatgggccgaacactattcttcgtttagggggccatagttaaacataaagggcttgtcagtagaactcggaggctctcggaaatcgttaaggctcagtagacacggtaaattccggagggccccggaccgagaggacatggggattcgggagtgggctttactcaagaagggctcaattgtgttcaagtcaaagaacctgcggggggttagacaatacaaaaaaaggaacggtggagtgactcaactagggacaggccatgccgcc

SEQ ID NO: 12594 - DNA, 480 bp, Homo sapiens
ccgggcaggtaccactgcactccagcttgggagacagagtgagcagagtgagaccaattcctgggaagccacaaggaaaccaaattctagtagcaactcagagtcagcattcattagcaggtcacagggccataaggatgccaagaaggaatttggtccttctccttgtcctgtaagtccaagctactcaagaaaactgagggcaggaggaatttgccttaaaccccaaggagggcggaaggttgtcaagtgagtcccgaggtacgacgccaattgcaacttcccagcctggcgccatacagagaggggataactcttctttcaaagacccactctttttccttttcttctcttctactggaactggtcaacaagaatccttccttctgttacgcttcggacccgcttcttaggaacctaagtggaatccccccggggcttgcagggaaatttcgaatattcaaggcttaatcgaatact

SEQ ID NO: 12595 - DNA, 450 bp, Homo sapiens
ccgggcaggtaccatctcctcgaacataaaaattttcagataaacaatgtccctttttaaaacgaagctgagtcttatcatatcttccatagtctcgaaataacagcattcccccaggtttcagtaacttggacagtcggtttacaacaccttgcatccttgcagggatgaatagaagagagcacaaagacaaggagaatgacatccaggatcccatctggaaaagggtaaggtaagccatcatcacatacatcatgaacaaaggcaaaacactgggttgctctgtaggacgagtgtgactttacgagctccacagctccagaagcaaaatcacaacaatacagaaaggactccggagagttctccaaagtgttcaaaattggaaacacactattttcagctccacaaccaacctctagtatcctgaaagtggcattgctaccaggaaac

SEQ ID NO: 12596 - DNA, 411 bp, Homo sapiens
  misc_feature 379: n = A,T,C or G
aggtacgcgggggctgatgccattttcagcctcagcacgcctgcacccaggcgctcattaaaacagcatgttgctccccactgcctcgtgttgtctgttggcgcgctgtcggggttcgaaccgatacaagaaccttccacctacctggtgctttggcctcatctataagcggccagtcatctgccctaagtgctgccgccgaagactgaatgtcctggaaagtttgctgtcacatctccattatgacaaaagcattgtgccgaacagatgaaaaaaatgcattgtcaacggaatcttttatgtttgtttgtcttcctttaagcaacattgccttacttgttataaaagataaataaatatttgttcatttctaaaaaanaaaaaaaaaaaaaaaaataaggttcctgcccg

SEQ ID NO: 12597 - DNA, 305 bp, Homo sapiens
ccgggcaggtacgcgggatttttaaaaagtagacggcctgccacggggatgaagaaaacacatttactgcgggcgggggtctgagggcctgcaaacaactcgagctggagcctcggccaggaccggcgcgagaggcggttcttgctatattgccccaggctggtctcgaactcctgggctcaagccgttctcccgcctcccactgcccgcctgtcactgccgtctgttccctgagctgtgctttacgctgggaaagacatagaagaactattaagaagatagaattgttttgctgcgcagtacct

SEQ ID NO: 12598 - DNA, 355 bp, Homo sapiens
agttttccaagagataacttcaccaagatgtccagtgataggcaaaggtccgatgatgagagccccagcaccagcagtggcagttcagatgcggaccagcgagacccagccgctccagagcctgaagacaagaggaaagaaaccttctgccacccagcagaagaaaaacaccaaacttctttagcaaaaccactgctaagttatccactagtgctaaaagaattcaaaaggagctagctgaaataacccttgatcctcctcctaattgcagtgctgggcctaaaggagataacatttatgaatggagatcaactatacttggtccaccgggttctgtatatgaaggtggtgtgtt

SEQ ID NO: 12599 - DNA, 359 bp, Homo sapiens
aggtactttagcatgttgcataatatatgcttatgtagctttccaggactaacagataaatgtgtaatgaacaaagatatgttgtatgagtcgtcgtttctgtcagatttgtattgtttccaagggaaaagcttgggggaggactcagttcacaaaatgcaaaactcaacgatcagattcacggacccagagcttttccatgtgtttatattgtaaatatttttgatttcatcaaattatttattcattaaaagaaatttttgtgaagcacagtgagtgacaatcatttttcttaaggcctggaaacgattttctgtatgatgttactttatgtgaattctcatctcaataaatgatga

SEQ ID NO: 12600 - DNA, 336 bp, Homo sapiens
aggcacctgtggtggatttccaggctgaactgaggcaggcattcttagctgaggcaccaagaggtggttaaagccatattggagtagcgaggaatctgattccaagcaaaaaccaggctccatctactctttgaagcttctgcccagcttgcattgtttctaggagaacctgcgtcatacctttatctatagccttcccctaggtcttcagaagcatcaagttttaactgtggacattggatttggtggaacagcaatcatgactgttggcaagagtagcaagatgctgcagcacattgactatagaatgagatgtatcctgcaagatggccgaat

SEQ ID NO: 12601 - DNA, 90 bp, Homo sapiens
tgaccgtggctcacgtggcccctaagtttccgggtcttcctcagtctggatggcatgttggcagcccagacgaaaaagccccgcgtacct

SEQ ID NO: 12602 - DNA, 358 bp, Homo sapiens
ccgggcaggtaccggaagcagcgaatggaagagatgcggcagcagcttcacaaggggccccaattcaagcaggtttttgagatctccagtggagaagggtttttagacatgattgataaagaacagaaaagcattgtcatcatggttcatatttatgaggatggcattccagggaccgaagccatgaatggttgcatgatctgccttgccgcagagtactgtttgcattaataaattaaagctccatagggtcttctcgtcttgctgtgtcatgcccgcctcttcacgggcaggtcaatttcactggttaaaagtaagggacagctgaaccctcgtggagccattcatacaggttcct

SEQ ID NO: 12603 - DNA, 243 bp, Homo sapiens
ataatttaataacatcgtccttccatttggccgcgactgctctggaaaattggttcagtagtaaacagaattctagcaggtggaacaagaacaggcgaggcatcctgggcctggtctctcctggaggtctgggtgttgcagcctttcaggactgcggctgctgtggcctacacacctgggcctgtgtgcctgtcccgggctttaggctgctttccctacccggctcccccgcgtacctgcccg

SEQ ID NO: 12604 - DNA, 228 bp, Homo sapiens
taagtgagtggtttaaattgtctgcgtcttggtcgtaaattcatggttcatagcctgtatttccttgtgttgaaaattagttattcccgcttcacaattttccactacaaactatacgtagtcccgggaagacattaaaagttggttaaaagcacttggtggttgcccttaaattgagttgaagcttaaacttcaacatttaatttgacgtttggctgcttcaactgg

SEQ ID NO: 12605 - DNA, 301 bp, Homo sapiens
aggtacctccttcagcggaaggcctcaccacccacagtgtgaatcctgaggtgccgtcattggcggttctgctgcttcgctgcagggataaggtggagctaccgaacagctgattcatatgccaagaatttggagtcttctttcaaaccagtgggggttggacaatgaatgtagttaactggttcctgctcacactccagaattaaattctattgaaaaaggaaaatcagcaattcagcaaaaaataaatataaaaaaaaataaaaataaaaaaaaaaaaagtacccttgcccggagcggt

SEQ ID NO: 12606 - DNA, 67 bp, Homo sapiens
ccgggcaggtacaggggaaaagagctctccatttctcagcaggggacaccccggtccccactgccac

SEQ ID NO: 12607 - DNA, 249 bp, Homo sapiens
aggtacgcggggactgactggttgagccgggtagggaaagcagcctaaagcccgggacaggcacacaggcccaggtgtgtaggccacagcagccgcagtcctgaaaggctgcaacacccagacctccaggagagaccaggcccaggatgccttgcctgttcttgttccacctgctagaattctgtttactactgaaccaattttccagagcagtcgcggccaaatggaaggacgatgttattaaattat

SEQ ID NO: 12608 - DNA, 495 bp, Homo sapiens
aggtacgcgggggccacgtccaagcaaaccgggaaaggagaggatcccggagccgcgtgatggccagaggcctgggggccccccactgggtggccgtgggactgctgacctgggcgaccttggggcttctggtggctggaacctcgggggtcatggacgactctgcaacgacggattctgcaaagagggactttccatttggccacagtccacaagggcacgtcaacatgaaagattttctcaccattggccacatgcccatgtcccatggctcattggtccaacacttcactgagtaggcattctgtgcattgggaccataaccccacggattcaacgaaccattggatcatttcaccattgaggggattttactaccattgggccaattagccaatgggcttaccttcccaatggaggaagcccttttaaccacaagagggaccattgggacaattgaaccataggaatcaataggcccatttgggagggcta

SEQ ID NO: 12609 - DNA, 467 bp, Homo sapiens
  misc_feature 248, 249, 250: n = A,T,C or G
aggtacgcggggaaagagcctagtaaagaagtcacagcctgcaatgaaagcagagaattctgatgaagaatagatctgacttctttcatttaggacccaacttaccatatctgatttatttgctaggtaacacttggaagctgactcccctgggtaagaagagggccaaaatgtttacaattgaaacccttaatgtgatgcaaccaaaggattatattgaacccctgggtctgtgggggactgcatgnnngaaatatctttaatttcccaactgaaaatgcccgtgcttgatggttttttgtaaaaattcggggaaaaccgcccaggaacatttcttatctccttcaatttcaaaaaaatgcttgggggcgcttttgcctgtagaaaacccaaagggtgttttgaaaaatcgccattccagggtcaccccgctgagggcctttgacatgggcctttaattggttgga

SEQ ID NO: 12610 - DNA, 462 bp, Homo sapiens
  misc_feature 288: n = A,T,C or G
aggtacgcggggacgtcgctcgctccttgacggctgaccgacactgggtctgaggtgtaagcgctttccaggcccttccctggggcttggaggggaatggcgcaaaggactttttttacaagcagagcccactgcagtttaccaaagagtatgtcgctttattgtcctaagaggtttggaactccttgaaaatgcctgtgacaggttgtcatcaatctttcatcctggaaagagttggaaaaaaatttcaaaggcaaaaggagtttttcctccagtgaaaattgaccncacacattaataaccaattcttgggaggttaaagactcaagccaggggattttcaacaggttggacctttccccccccaaacccagacttggggtgggtggtttttcttcttcttgataagacaatcggctttgggttaccactgccccccgggacgggcccgtcttctaataa

SEQ ID NO: 12611 - DNA, 138 bp, Homo sapiens
ggttctgagtgatcccatccagctgctcctggacctggtattgagaggtttttcccttggagggcaaacaaagtggcagtggggaccagggtgtcccctgctgagaaatggagagctcttttcccctgtacctgcccg

SEQ ID NO: 12612 - DNA, 477 bp, Homo sapiens
  misc_feature 223, 312: n = A,T,C or G
ccgggcaggtacaagttccactctgctacagatgcgtctgtgaagagccttgtgccatccaactagtgactgaatgatgtcccatctcttatccgagccagagcacacatcttccatgctgtccgctgattgcctccaaattccaaaagaccaaataattccttttattccccaaagtagggctcaaaacagtttggtttcagggcattcctgggatctgcancccctttttaaattcccaggttaaaatcacaaagagggaataaagccccccagcggaatggcaaaaactggcttcccctttgaaagagnctgcttgttagtcttctgccttgggccttctttttgctcaagctttcaccaatggcgaccgggccgcttctaagaaactagttgggaatcccccggggctggcaggaaatttcgatattcaaggctttattcgataaccggttcgacctcgaaggggggtggcct

SEQ ID NO: 12613 - DNA, 365 bp, Homo sapiens
ccgggcaggtacatttccaaagtcaagagtcaaataaaaaaatcccatggaatttggagcctatttagaactcaaaataatgagaatgctgcaaatcaaaacttgtgacatcccactaaagctgttcttagagggaaatctatccaacacactaaatgcttacattagcaaagaagaaaggctaaaatgaacgagcatccaagttaacatgttagaaaaggagcaacagagaagactcaataaagtaaaaggaaggaaacaataaagataagattagaaatcaatgcaacaagaaaacaaagataaatgctggagaggatcttggttttctgaaaagacaaattaatgggtctcttggcaagact

SEQ ID NO: 12614 - DNA, 492 bp, Homo sapiens
ccgggcaggtaccagggcagcaacccaatcagtgacatttgggctatccacgcgctgcggatcgtggctaagtatctgaagagggccgtcaacagcactgacaaatgaagaagaagaatgagtcttagggcaccttttcttggaagtggcccttcgccaatccaggggaccaagcgcgtttgccttcccccggctgctttttacattcacattgagtcaagcttgacatgcgtgctggtcatgaaaatctccgattgatcttttgatagcaaaggttcttcattaatgcaactttgggcaaagtggctttttgcttgggcattcggtcttttgggaaaatgccttgggtatttcattcttgtggccaatgggaaatggtcctttaaccccaaattttccaaggtttttagttgaaagaattgttataaaaagccaaaaggaatttacaaatgttgggattcaccccacctgggttgctcccaattgtgcctg

SEQ ID NO: 12615 - DNA, 119 bp, Homo sapiens
gggctggcgcggtgcatcgtgggcactgtagtttccgccgcgtttatggccgcgttaagtctgagtgccgctttgagttgctgaatgaagtgaacttcatttgtcagcgttcggtacct

SEQ ID NO: 12616 - DNA, 385 bp, Homo sapiens
ccgggcaggtacctatgctttcagagtaagagcttacaagggttcaatctgtagtccttgcagcagagaattgattcttcatactcctccagctccagttttcagcttcctctttgatgaaaaatgtggctataataatgaacacctcctgctgaacttgaagagagaccgtgtagagagtatagctggatttaatcttctgcttgctgcagaacgcatccaagtgggttattacacaagcttagactacatcattggagatactggcattacaaaaggaaaacacttctgggccttccgtgtggaaccatattcatacctggtaaaagtgggagttgcttctagcgaataactacaagaatggctcctttctccccgggatgca

SEQ ID NO: 12617 - DNA, 380 bp, Homo sapiens
ccgggcaggtactgggcagggcttgggagataagacaggacatctgaagctaaacatggatcccctctgaaagctacaatcaaagtgtcatccacaaaatcttatctcaagccttgactagagaaggacccacttccaagaccacagagttgaatgaattcagtccttgcagcccgttgaactgagggcctccccaacatgctcacctgcttcatcaaagcctgcgagagagagagtccactagcaagaggacattgcagtcttatctaatgcaatcactgaagtgacatcctgtcaccttggtcaccttttctattctattcattataaatgagtcccaagtcctgccacactcaagtggaggggattacacagggctg

SEQ ID NO: 12618 - DNA, 556 bp, Homo sapiens
  misc_feature 23: n = A,T,C or G
gcactcgctctatagagagtacncttattactatcacatgatatgcaaagcacgtcaatcatattatatctcacttatcaatttattatacattcttctaatagaatactagtgatatttttatgttaattaaatattttttatattatttgtatttttaaaaaagctggaatacaccactatatgtagaattgaatagtaatccattacggtggcggccgtccgggcaggtacgcggggagaaatagcaagtgccgagaagctggcatcagaaaaacagaggggagatttgtgtggctgcagccaagggagaccaggaagatctgcatggtgggaaggacctgatgatacagaggtgagaaataagaaaggctgctgactttaccatctgaggccacacatctgctgaaatggagataattaacatcactagaaacagcaagatgacaatataatgtctaggtagtgacatgtttttgcacatttccagcccctttaaatatccacacacacaggaagcacaaaaggaagcacagagatccctgggagaaatgcc

SEQ ID NO: 12619 - DNA, 396 bp, Homo sapiens
ggatcttcggcaagactcacgtctccaacaaccaagctccccaaagtcctgacctcaagcaatccgcctgcctaggcctcgcaaagtgctgggattacaggagtgagccaccgtgcccagccaagaaagattttggaagagtgaatgaatacaaggatttccactagactgagaattagtttgtcaacagcatttcagtgtcttgagaagtatttacatttggcgtggacaaagctggcagatgacgtagaaagtaaaaagttgcctcttcaaagtttcccttcttgttaaagaataaatcataaatgttagaaacagttgccaaaaaaaaataggatggcaaaagattgaaagaacttgactcaagtatagaaaaaaaggcccgtccctgggccg

SEQ ID NO: 12620 - DNA, 468 bp, Homo sapiens
ccgggcaggtacgcggggatttatgcaaatttgaactagcttctttgttcacaattcagttcctcccaaccaaccagtcttcacttcaagagggccacactgcaacctcagcttaacgtgaataacaaaagactggcttcaggaagccagggctttggctccaggcatggttggattcaaccggaagggtcagttagtttcaaggactcagccttggcacaacattgtgtgaaaaacccccacgtctctaactaaaaaaattggtggtattattcttttggtgttggtctttccctgtattaatggtgttgcccaaggggtagttattttttcaacaaaaggtttcaaaaaacagcccaacaattaattcaagaggatggggagcaaacccaggtgcccattccagttccttttattgcaaaatgaaaaatgcttgccaaaaggggaaggcaagatttcttgtattag

SEQ ID NO: 12621 - DNA, 311 bp, Homo sapiens
aggtacgcggggagaaaaacagaggggagatttgtgtggctgcagccgagggagaccaggaagatctgcatggtgggaaggacctgatgatacagaggtgagaaataagaaaggctgctgactttaccatctgaggccacacatctggctgaaatggagataattaacatcactagaaacagcaagatgacaatataatgtctaaatagtgacatgttttttgcacatttccagcccctttaaattatcccacacacaacaggaagccacaaaaggaagcacaaaagatcccctgggagaaaatgcccggc

SEQ ID NO: 12622 - DNA, 553 bp, Homo sapiens
ccgggcaggtacgagtgagtgggctcatcggttgacctctgtgtgaagatggaacgtggtcctaccctgcagaaatcagagccaccataatttccaagttgtagcacaggttgtggcaatttcaggaatagcagctttttcaaacacattcttgaagggccccagaaccccccccttattaatggccaaggccttgaggagaagggccaactccctgttatttatggccaaggtatggcttagtggccccaattagggcaatttcaagtgcttaatggggcaaggggttattaagccaggaagaattctaaagtgcccaaaagatgggaaagttataaagccttgttccgcctatatgaaatttttggaaaaaaatccaaaaatggatattgggccctttttaccaaaaaccttttctcaaccccaacaaatttctttttttgaaaaaaagtgtgaattgaagattaaaccttctttgacccccttaactttcttttaacccttcccctttctactccatttaaaattttccaaggccttgtaaaataataaa

SEQ ID NO: 12623 - DNA, 405 bp, Homo sapiens
ccgggcaggtacagagatgaaagaggggtgggatccacactgagagagtggagaggtgacatgtgctggacactgtccattgaagcactgagcagaaagcctggaggcacaacgcaccagacactcacagcaaggatgggagcttgaaaaacataaacccactctgtcctgaaggcactgggaagcctagagaaggctgtgagccaaggagggagggtctttctttggcatgggatggggatgaagtaaggagagggactggaccccctgggaagctgattcactatggggggaggtgtattgaagtccttcagacaaccctcagatttgatgatttcctagtagaactcacagaaataaagagctgttatactgtgatgcatataaaataaataaatgaatttg

SEQ ID NO: 12624 - DNA, 259 bp, Homo sapiens
atgtacgcggggtttgagtcactggtgcgccatgatccccgctttgaaatctgtgtggaagtcattctggggcttgtctgctttcggctaaagggttccaacaaagtgaatgaagctcttctgcaaagaataaacagtgccaaaaaaatccacttggttccatgtcacctcagggacaagtttgtcctgcgctttgccatctgttctcgcacggtggaatctgcccatgtgcagcgggcctgggaacacatcaaagagc

SEQ ID NO: 12625 - DNA, 388 bp, Homo sapiens
ccgggcaggtacctccccacccaggcctcgctccttctccacggtttgcagggcccacatggcagctgtggtgcggggttccagccagcgggcgttgacagtggccagcgtaaggctcaggaacagcaggtaaagctggctggcctcccagaatgtgagctgagcccaagcatgctgtgaagccaagatgcagaggttgatgaaggcacagcccatggagatgtggaagtagaaggggaagagtttgctctgcactagtccgaaggtatgtcggggaaggcttcggaaaagcaggaagcctgagacgaaggtcacccacatttgcatgccccaggcacctgacaagaccagtagaaggaccatcttaatcaggcctcctaagttcccg

SEQ ID NO: 12626 - DNA, 67 bp, Homo sapiens
ccgggcaggtacaggggaaaagagctctccatttctcagcaggggacaccctggtccccactgccac

SEQ ID NO: 12627 - DNA, 229 bp, Homo sapiens
aggtacgcggggagggaaagcagcctaaagcccgggacaggcacacaggcccaggtgtgtaggccacagcagccgcagtcctgaaaggctgcaacacccagacctctaggagagaccaggcccaggatgcctcgcctgttcttgttccacctgctagaattctgtttactactgaaccaattttccagagcagtcgcggccaaatggaaggacgatgttattaaattat

SEQ ID NO: 12628 - DNA, 457 bp, Homo sapiens
aggtacgcggggtttctacctaataaatacgaagggctgtagaagctcagggcccttgctcactagaaggagccccctgaccccttcttccaaaaatactttttgtctttgtcttcgtttctgcattcattcccccttcgttcacttcccataaccaacccaacagcgtacaaacttggcaccctagggacaagggacgttgagttgaagggtctgcttgtgagcaagagaatacttgacaactgtactaagaaggaatcgaggaattgtagaaaactccttgcgtacgtagttcttgcttgacaagcttgatataaaggttctgcaaaaattcagtctgtgtaccatccataaacgggcaatttggagtagcttgcaacaaaccttgcatatttaccttttatttcaaatttaattgcaaaaaatcaaaaaaatggggggaggatgtttacaaggg

SEQ ID NO: 12629 - DNA, 482 bp, Homo sapiens
aggtactgtattctcatccaccatcaaagcccattcgtaggaaattcagaccataaaaccaatctacagaaaaccaagagccttccactgctgcaagtgggccagcttctgcggcaaccattgaaaccgcatccaacagttccaaaaagcagtctttctcaaacagtaaaaaggctcatttcaaaactgcttatccgcaaaaaaattaaaggaggtctaaacgccattgcttggcttctggcttgtaacaagtgtagtctcccaagcatgcaagcttcaagggagggtttcattcaaaagaaaccgaaatttgcatttgtgaaaaactcaaatttggaatacaaatccttcgtttccgtgtacaactgttgatttgtgaaaccacctccccatgggtttcaaagatgaaccaagttgggttgaactctttgttcttgcccaaaagaatcttttacttttttgaaaatgttttttgaaaacct

SEQ ID NO: 12630 - DNA, 462 bp, Homo sapiens
  misc_feature 152: n = A,T,C or G
aggtacagatctgggaactaaatattaaaaatgagtgtggctggatatatggagaatgttgggcccagaaggaaccgtagagatcagatattacaacagctttgttttgagggttagaaatatgaaaattgatttggtttatgaaccgcacnagtttagggcagcagtggccagtaattcctgtacccttctgcccccgtgggtttattcttccttacaccaagcttgggctggccgtcattgttcattcacaagtaattaccaatttttgtttttgttgccatggttcttggtgaaagccccatcaaagtaattttttttcggtcatgttttttcccctcttcatttgtgttaaatagcctccactttatgtggacctatcatttttcaatatcgtggttattccccgggtccaatatagaatttttccccgtagtggataaatttggtttattccgcctc

SEQ ID NO: 12631 - DNA, 370 bp, Homo sapiens
aggtacattagtaataaccttttcaaaaatatgcaatttctgtccttgaagcctagggagtgggatgcagccacattaagactcatgattaagcaccttattgtgttaatcatgatataaagagccttgtataacacaaaagccgagatcgcgccactgcactttagcctgggtgacagagtgggattctgtccgctcccgccaaaaaaaaaggagaaggtctaccctgcaagaggtggagagagagctagtggcttggatctttggggtgcacatgggaattgtgggcccacagtgtctggtgaaagaagaggaggcaggaggcctttttcttctcatatgggggttgagtggtgggggtgctactgct

SEQ ID NO: 12632 - DNA, 443 bp, Homo sapiens
gggcagaagttgagaccacccagcagaggagctaggccagtccatctgcatttgtcacccaagaactcttaccatgaagaccctcctactgttggcagtgatcatgatctttggcctactgcagggcccatgggaatttggtgaaattttccacagaaatggatcaagtttgacgacagtgaaaaggaatgccgccactcagtttatgggctttctatgggctgccaactgttggccgtggggtgggcaagaggtattccccccaagggaattgcaaccggaattcgcttgtctgttgttcacttcattgaactgtttgcctacaaaacggtcttggtagaaaaccgtgggatgttgggcacccaaaattttcttgaagctaccaaagttttaagcaaacttcgggggagccaagaaattcaccttggtgcaaaaaacagggg

SEQ ID NO: 12633 - DNA, 347 bp, Homo sapiens
gggccgtggctcacgtggcccctaagtttccgggtcttcctcagtctggatgacatgttggcagcccagacgaaaaagccccgcgtacggatgctacttgtccaatgatggtaaaagggtagcttactggttgtcctccgattcaggttagaatgaggaggtctgcggctaggagtcaataaagtgattggcttagtgggcgaaatattatgctttgttgtttggatatatggaggatggggattattgctaggatgaggatggatagtaatagggcaaggacgcctcctagtttgttagggacggatcggagaattgtgtaggcgaataggaaatcccgcgtacct

SEQ ID NO: 12634 - DNA, 461 bp, Homo sapiens
  misc_feature 198, 199, 208, 210, 211, 236, 237, 253, 254, 255, 286, 342,377, 379: n = A,T,C or G
aggtacacagcaggcttttcaggcagggcacatggctcagggccccatgatgtgataccttgaagcacaccattacagacaagtggacccccagaatcccccccacaagtgtctttaccacctgtccaagagcccagcaacacaacattgaacttctgttcaaccttcttcaggaagtaagcttcttagcacaacatnngtcattggnanncaggagaattggaggctttcacacnnacttgaagaactcacnnntcctcttggtttcagaatgctttgcccccanagccttgagggggcgttagacaggttggggtcccacagttgccttggctttccttngggtggggggcaggtctcccagtgtaccctttcancnaaacaatcttggtgaatcttttggcaaggccttctgtaccaggccgggagtcagtcattgaagggtcattgggcttggtagg

SEQ ID NO: 12635 - DNA, 374 bp, Homo sapiens
ccgggcaggtactcctttaaactgcttaatcatgttctgatggttttcaatggcttccttcaagatcatttcaggctggtccatcttccaccgccactcagtgcccacggggttggtgtggtgccgccaacagaagacacatttattagcacacgccaagctcggggtggtttccatgcagcgatggctctcaattccatagaatgtgtgtttgtaacaacctcctctccctcggagcatggactttgtccacctgcaaagcttcacccccgagtggctcccaatcaactgataaccttgtttagtaagggcttcttggagagcaggagttatcatagctcttctttcaccatcttcattcctccccatgttct

SEQ ID NO: 12636 - DNA, 470 bp, Homo sapiens
  misc_feature 232, 233, 244, 245, 255, 256, 264, 265, 351, 359, 360: n = A,T,C or G
ccgggcaggtacgcgggatatcaggtagtagaatgtgccatgcgagcacttcacttctcttccaggcacaataaagacattgccctggtcaacctggcaaacgttctacacagagcacactttctctgctgatgctgcttgtccatgagtccaatgccagctctgggatgacaagtgtactttctttcaccagtctaattaacaacttttggtggaaattattatattgcannatgctttgggnngaattataannccacttcnnagttgctattgttattgaaccacgtctttttgtctaggcacagtaaccttgggtttttgaagccaagtcttataaaaagagtgaanatgcatgnnctgtcctaattgtcaagccaaaaaacctggtagccattaaaatttgggagggcctcagtcattagtattcttcttcccagcggaaacacctgtaaattgaggttaataag

SEQ ID NO: 12637 - DNA, 138 bp, Homo sapiens
tacatattcttcatatatagtaaattttgattttgacaatttctataattttccatttacaatatctccaattattcaattttgtcaaattcatatattcacattttataatatttagtatcgtggggaccgctatac

SEQ ID NO: 12638 - DNA, 437 bp, Homo sapiens
  misc_feature 234, 235, 261, 270: n = A,T,C or G
aggtactccttagggcgcttcaggagctcaggggcctcctgggattcctcatcttggtttttccgtcggcatttctgctgcttccgagtcagggcttccttcgtttgtttttccgcctgcttggtggacttccccgcctgcccttcagcttccttcaggcttttttctcttttgcttctcaatactggttttcagcaagtttcttttctggctttctggctggttacttattgnncggccgcctcttagaacctagttggnattcccccncggtgcctgcagggaatttcggatattcaagcctttatcggattaccccgtcgaacccttcgagggggggggcccccggttaccccaagcttttttgtttcccttttagttggagtggttttaattggcggcgtcttgggcgttaattcatggttcattagcctggt

SEQ ID NO: 12639 - DNA, 371 bp, Homo sapiens
aggtacgcgggggctctaagctgcagcaagagaaactgtgtgtgaggggaagaggcctgtttcgctgtcgggtctctagttcttgcacgctctttaagagtctgcactggaggaactcctgccattaccagctcccttcttgcagaagggagggggaaacatacatttattcatgccagtctgttgcatgcaggctttttggcttcctaccttgcaacaaaataattgcaccaactccttagtgccgattccgcccacagagagtcctggagccacagtcttttttgctttgcattgtaggagagggactaagtgctagagactatgtcgctttcctgagctaccgagagcgctcgtgaactggaatcaac

SEQ ID NO: 12640 - DNA, 411 bp, Homo sapiens
aattcaagacttctccaaaatcaccaccagcaggcttggttccccctactttagactttaagttttcgaccttttcttcaaatgatttaaaagttggggagttttttacatcttccagctttttggtgatgactgagccaacagacgaaaaagcagcctgaggccttctgtccagcctggtgataaggttttcagaatgtctttcttgtaagccagatgtttgcttgtcacgttcttgccaacccctttgggcaatgtttctgtttttaagttcctgtaggagaatttgatttccaagttttccgctttgaatcttctgcttagatgctttcttttttttgctgcttaacaacttgaagacaagagttcctggattttctttcttctaacctttggcaaggtttctctttg

SEQ ID NO: 12641 - DNA, 447 bp, Homo sapiens
  misc_feature 168, 189, 190: n = A,T,C or G
ccgggcaggtactgacgaccagggccagctgttctagagcgggaattagaggctagagcggctgaaatggttgtttggtgatgacactggggtccttccatctctggggcccactctcttctgtctttcccatgggaagtggccactggggaatccctctgaccctangtcctcctgaatacaagactnngactgacatttgactgttgtcctgtggaaaaaatggggaagctccttggttgtgggaggagcccatagtaaaaatttttcagaagaacctttgaaagcccaaaagggattttaaaaacccgcttggctctttaaagaaaaaagaaaaacctggaaggccttgggccgcagttggccttcaccgccttattaattccccagagggctgaagggcggggccgggattcaccttggaggtccgggaggttccggggatcg

SEQ ID NO: 12642 - DNA, 370 bp, Homo sapiens
aggtacatgaaacgtcgggggcctatatcttccccagtgtgctcccaaattctgtccaattgatggaagcaagcttgcaggtccatgttcccacaagcaactttcagcccaggattctgcagatctttccagctctacatcccatgtcatatactccatattagaggctgttggatacacctgacttcgtaatttattatgaaggtccaaaatactctgcatgtcattgtctgtgatggcccttttccctcgttgtttggctatccaccactcaccatcctcatccatgtatttttccaaaagtttctccaataaagtggcattgggaaccaccatggctggaattgctctagccatgaacagcactgtg

SEQ ID NO: 12643 - DNA, 305 bp, Homo sapiens
tcgttcgaccctcggaggtgggggtccctggtaacccccagctttttggtttcccttttagatggagaggttttaatttagcagccgcctttggccgtaaaattcattgtgttcaattagacttgtttttccctgttgatgaataatttggtgtaatccccgcttcaacaaattttctcaccaccaaacaattacctgaggctccggggagtcattaaaaggtttgttaaaaggccctggggggtgcccttaaattgaggtgaatgcctataccttcacaattaaatttgtgcgtttggccgctg

SEQ ID NO: 12644 - DNA, 480 bp, Homo sapiens
ccgggcaggtacgcggggaggaagactggacaaagggggtcacacattccttccatacggttgagcctctacctgcctggtgctggtcacagttcagcttcttcatgatggtggattcccaatggccaatgaaatccagttgctacattactttcatctctaattagggccttcccctggatttaagaaggagggcttcaggtttctggattgggcactgtcccatttgttgcttctccttctacactttaattgcctgtcgcctatggttaaactttgaacaaaatcaattctaccatttgttgccgggacttggagtccacagcccctgccattgaggccccaatggtattattatttttcttttagcattggctttttcagtggcatttgcgcaattcccttcatccttccacccttcaatccccatggccccaaaaaaattgcctgggcccattctttctttgggtttcaaattcg

SEQ ID NO: 12645 - DNA, 222 bp, Homo sapiens; identical to SEQ ID NO: 3476

SEQ ID NO: 12646 - DNA, 371 bp, Homo sapiens
aggtacgcgggggttggagaaaactaaacaatttgttataaaacatccttaaaagcatcagaaagttaatacagcaatgaagaattacaggaccaaattaagaatgcaaccaggttgccaagaactgagtgatgtgtccacatcccgggagagagaagccaccagaagctggaagagctaaatcagactgctccctagagcttcagaaggagccagaactgatgactccaagatcttagcccagtgaaactgatctggacttctgaactatgagagattccattcctgttgtttgaagctaccacattattgagaacttgttacagtagcccgaggacactaacacaaatggggctccgggaaaatccagc

SEQ ID NO: 12647 - DNA, 230 bp, Homo sapiens
ccgggcaggtacttttttttttttttttttttttgtctttttcaccaaaattgggtgatgaggtggtggtgtctttcctctgagatgtctcttttttcccacaggattctttgctggacatccctaattccaagtcagctggatggacaggcaagctcgtcagctgctagtaaaccgccgcggcccgcgggctccgcacgaaccgaccagaccccaacccccgcgtacct

SEQ ID NO: 12648 - DNA, 364 bp, Homo sapiens
ccgggcaggtactttttttttttttttttttttttttttttattctgggcaacggcatttgcactcatgacgtctcatatgctccaaactcagggacccgggggaaggtaatacctacctcagtggcaggatccgtagtgggcagttgtgcgaatggccttggtattactgccgtggcttaattcggtcagagcaaaacatccaaaaatctaaatgtcaaagcacaaaatgatggaaagcaagaaaagttctttgtgcacattcccagaaggacctcactgccatctttcctttaaagatgaaaccacatatcaaagccccaaatttccatttacccaactagtgacttgactgagtcatgctg

SEQ ID NO: 12649 - DNA, 378 bp, Homo sapiens
  misc_feature 378: n = A,T,C or G
ccgggcctccaaagtgctgggattataggagtgagccaccacacccggacccacagtcatatatattactaaagccaaccgacaaaaagaaatattgtaacagtaagacaagattgacaagagcaaacattcacgcaatcaccgttaacagaaaacggcaacaagaaataattaaaatcccacaatcttattttcaagtcagtgaaataaaaaatactcccaactcacccttgaatcaccaacggcaaatactttaggttttctttcttcccaaactgttttggcctcgctgctagggctgtcgccgagcttacacggactccaggtgatgagtttttcttgagtcactgcaaaggcagtttcactaggcttcacttn

SEQ ID NO: 12650 - DNA, 371 bp, Homo sapiens
aggtacactggaggctggggcctgcagatggcatggctctgcggctcaccttgctgcagttggtggtggtgacagagactgcagcttgactgtagtggtgattaccaggagctctgccactgcatgtccactagtgacgggttcgctccaccaccccagctgggtagccgctgctctcacataaggggtccaattaaaattgccaggaataaattcccccggactttgacttctcaagagctaagaaggtttgctgagtattctggcatgatgtttggtgatcaaacaactgctggccaaaaatgatgagtatttccccctcttgctgaagatgtgctccatacaatagtccatcacattcatcattcatt

SEQ ID NO: 12651 - DNA, 119 bp, Homo sapiens
aggtaccgaacgctgacaaatgaagttcacttcattcaacaactcaaagcggcactcagacttaacgcggccataaacgcggcggaaactacagtgcccacgatgcaccgcgccagccc

SEQ ID NO: 12652 - DNA, 243 bp, Homo sapiens
aggtacgcggggtggttgagccgggtagggaaagcagcctaaagcccgggacaggcacacaggcccaggtgtgtaggccacagcagccgcagtcctgaaaggctgcaacacccagacctccaggagagaccaggcccaggatgcctcgcctgttcttgttccacctgctagaattctgtttactactgaaccaattttccagagcagtcgcggccaaatggaaggacgatgttattaaattat

SEQ ID NO: 12653 - DNA, 416 bp, Homo sapiens
  misc_feature 175, 205, 302, 303, 324, 325, 346: n = A,T,C or G
aggtacttttttttttttttttttttttttttgttgctatacttttaaaaagtttaaaagaaaataattagtatctttgtcagcaagtttccagtgcggcaggaaaacctaactaatacaaataaaggaaaggaagaatccagaacctccttggcatttactggaccaattattnttgaaaggttatttctttaaaaatcctgtnaaaactagagatcactagaatgtatctacgtaagaaaattctttttactctgaggggaaaaaatataaacttgccaaatttcttcaagggcaaaaannaaaacaatgagctattatttnntttgtgaatcttttcattttnaaaataaacccaaggtcattcccttcagtggcgcccacaaggtctatttaaaccccctcctcttaccctg

SEQ ID NO: 12654 - DNA, 365 bp, Homo sapiens
ccgggcaggtacatctacctaaaggactattatgtggaataatacatactaatgaagtattacatgatttaaagactacaataaaaccaaacatgcttataacattaagaaaaacaataaagatacatgattggaaccaagttgaaaaatagcatatgccttggaggaaatgtgctcaaattactaatgatttagtgttgtccctactttctctctcttttttctttcttttttttttattatggttagctgtcacatacaactttttttttttttgagatggggtctcgctctgtcaccaggctggagtgcagtggcgcgatctcggctcactgcaacctccacatcccatgttgaagtaattc

SEQ ID NO: 12655 - DNA, 342 bp, Homo sapiens
aggtacaaagatttcctgtggtaaaccatctagtataaacactcaaataatcacttcaatccttagactatctaattcaagtgccactaaagtatgcctaaaactctcataggaaactgatgactctaccctaaatgtcctgcatgtctccagtttatctgatggagctgaactaatctgagtatattatgaacacaagcaaaaattgtgccatccttcatcaacaaagatacagaaaccataaatatgatgtcagaatttgttgctaatttgccacaggagctgaagttaaccctgtctgagatgcagccagcattaccacagctacaacaacatgtacct

SEQ ID NO: 12656 - DNA, 242 bp, Homo sapiens
ataatttaataacatcgtccttccatttggccgcgactgctctggaaaattggttcagtagtaaacagaattctagcaggtggaacaagaacaggcgaggcatcctgggcctggtctctcctggaggtctgggtgttgcagcctttcaggactgcggctgctgtggcctacacacctgggcctgtgtgcctgtcccgggctttaggctgctttccctacccggctcaaccccccgcgtacct

SEQ ID NO: 12657 - DNA, 370 bp, Homo sapiens
aggtacgcggggtgctcttgtgatcttgattgacacgagtggcacccttctgcagaagtaaattgtctagcttagagaacttctgcctgagtgctggtttcactttgctgcaccaagcatttattcctagaacattttttatattcagcaattctgggggctcatccgggatccccattctccttcaagaaggggtcttcagtcaccctacccaggggagatgtgtcccactgccccattgtggtggcctcagggagggggagatcaagacccacccgttgttatgaataaacttggactctcagcaacacggggaggagaggcttgcagtatcgtggcgaccagctaaactctgtgcacagaccaagtt

SEQ ID NO: 12658 - DNA, 366 bp, Homo sapiens
ccgggcaggtacggggacagcaaaggcaagaaacacttttccgaccccttggccatggagcagagccaaaataaatactggctgggcggtaaggaacgcggggccttggtagagcaaagtgcggaccaaagactttgcgtctggttgcttttaccttgcctagtagggtcttcgttctggcgccatcttcatgaagcctcacgaacccgaagagacggctgtagagagagagacacagagcttgttaatggtctgagaaagccagtgacttgctccttcccgagtccaagagcgacagcgacagattggtgagtgccaagctgaggatgaccccgtcatcaacgtgggcaagctgcgtccaggcct

SEQ ID NO: 12659 - DNA, 243 bp, Homo sapiens; identical to SEQ ID NO: 12652

SEQ ID NO: 12660 - DNA, 229 bp, Homo sapiens; identical to SEQ ID NO: 3491

SEQ ID NO: 12661 - DNA, 401 bp, Homo sapiens
aggtactctggtaagcttgttgttgtccaagtgaagctccctcagatgaggcgtgttggccagagagccattgtcaacagcagagatgctgttgaaactcaatcccaacttagccaaattattcagtcctttcaggctagctgcatcaactttggttgatttggtggccatcaaaatgtaatttccgtaagggaagggaggaagaaccttggaggaatggctggtgataatgggtattaagcaaatggcggaatgtaggaaaagctttttttaatttcccctggaaaaggcccccaatttttccaatttccctggagccttttttcaagcgggaatttgggtggcccccagtttcttttggaccaaatcattcctggggtttcaagtcccatttgaaaagg

SEQ ID NO: 12662 - DNA, 222 bp, Homo sapiens
ataatttaataacatcgtccttccatttggccgcgactgctctggaaaattggttcagtagtaaacagaattctagcaggtggaacaagaacaggcgaggcatcctgggcctggtctctcctggaggtctgggtgttgcagcctttcaggactgcggctgctgtggcctacacacctgggcctgtgtgcctgtcccgggctttaggctgcccccgcgtacct

SEQ ID NO: 12663 - DNA, 178 bp, Homo sapiens
aggtacgcggggactgactggttgagccgggtagggaaagcagcctaaagcccgggacaggcacacaggcccaggtgtgtaggccacagcagccgcagtcctgaaaggctgcaacacccagacctccaggagagaccagcccaggatgcctcgcctgttcttgttccacctgctagaa

SEQ ID NO: 12664 - DNA, 871 bp, Homo sapiens
  misc_feature 11, 95, 96, 116: n = A,T,C or G
aggtacgcggnggtctgtgaaagctttaataaaaccacgtttgtttttctggcgaaagaggcgcaagatgaatgcttcttgacaaggactcgatnntattctgtgggctctatacnaccaagaaatgcctgagggggagaaacataattaaactacagaacaggtggcgggtgctcatgcctgtaatcccagcactttgggaggccaaggcagatggatcacttgaagtcaggagttcaagaccagcctggccaacatagtgaaaccctgcctctaccaaaaaatacaagaattagcccagcatggtggcgtgcacctgtagtcccagctactcaggaggatgaggtgtgagggtaaatctgacccccgttcctccatcttggctggaagtggaagtcccggtggacatttttgagcccctgatgtatgccaggcactgctgtaagcactgagtattcaaagatgaacaaaatgatgtggccccagtctcctaaaatttactatcaagagaagaagacaacagtgaagcatctgttgaaatggaggtgccacagatggaagcaaccatggcacggaaggcagcttccccagaaaactgcccaaactcacagaggtctttgtgggaggaagggataaacctatgtaaagcttccgagattttcgcattggttattactggagcattacttggtctgctccaagcaacggcaggcataaagatgtgtttggattgggccaaactaacattggagtttgttaaatatccgtctgaaaagaaacaattctggcttccaaattttaatttttaaaaacttaaatattttgctttgcctcgtttgaccctactggaagctcgggtccccggggctta

SEQ ID NO: 12665 - DNA, 334 bp, Homo sapiens
ccgggcaggtactttcttttttttttttttttttttttttttggaatcacagacctttaatttttaaagcttaggaagtaaagagagagaggacactgcaaataacccaagaagccaggagaaagaagcagatgtgctcaagtcacgacttcttcttcacctttggatccagtggctggaaagccctggttattttctggaagatcctcttctccatccatcacaaactttcttatcttttaaggcaggagccagcaaacctttcctgccaccgctggggaggcacatagctcgccagcgtccctggagtcccctcaggaatccccgcgtacct

SEQ ID NO: 12666 - DNA, 413 bp, Homo sapiens
aggtactttatagtttaggctggacattggaaaaaaaaaagccagaacaacatgtaatagataatatgattggctgcacacttccagactgatgaatgatgaatgtgatggactattgtatggagcacatcttcagcaagagggggaaatactcatcatttttagcccacagttgtttgatcaccaaacatcatgccagaatactcagcaaaccttcttagctcttgagaagtcaaagtccgggggaatttatccctggcaattttaattggaccccttatgtgagagcagcggctacccagctggggtggtggagcgaacccgtcactagtggacatgcagtggcagaactcctggtaaccaccactacagtcaagctgcattttctgtcaccaccaccaactgcagcaagg

SEQ ID NO: 12667 - DNA, 223 bp, Homo sapiens
aggtacgcggggagcagcctaaagcccgggacaggcacacgggcccaggtgtgtaggccacagcagccgcagtcctgaaaggctgcaacacccagacctccaggagagaccaggcccaggatgcctcgcctgttcttgttccacctgctagaattctgtttactactgaaccaattttccagagcagtcgcggcaaaatggaaggacgatgttattaaattat

SEQ ID NO: 12668 - DNA, 249 bp, Homo sapiens
ataatttaataacatcgtccttccatttggccgcgactgctctggaaaattggttcagtagtaaacagaattctagcaggtggaacaagaacaggcgaggcatcctgggcctggtctctcctggaggtctgggtgttgcagcctttcaggactgcggctgctgtggcctacacacctgggcctgtgtgcctgtcccgggctttaggctgctttccctacccggctcaaccagtcagtccccgcgtacct

SEQ ID NO: 12669 - DNA, 247 bp, Homo sapiens
ataatttaataacatcgtccttccatttggccgcgactgctctggaaaattggttcagtagtaaacagaattctagcaggtggaacaagaacgggcgaggcatcctgggcctggtctctcctggaggtctgggtgttgcagcctttcaggactgcggctgctgtggcctacacacctgggcctgtgtgcctgtcccgggctttaggctgctttccctacccggctcaaccagtctccccgcgtacct

SEQ ID NO: 12670 - DNA, 229 bp, Homo sapiens; identical to SEQ ID NO: 3491

SEQ ID NO: 12671 - DNA, 245 bp, Homo sapiens
ataatttaataacatcgtccttccatttggccgcgactgctctggaaaattggttcagtagtaaacagaattctagcaggtggaacaagaacaggcgaggcatcctgggcctggtctctcctggaggtctgggtgttgcagcctttcaggactgcggctgctgtggcctacacacctgggcctgtgtgcctgtcccgggctttaggctgctttccctacccggctcaaccagtccccgcgtacct

SEQ ID NO: 12672 - DNA, 249 bp, Homo sapiens
ataatttaataacatcgtccttccatttggccgcgactgctctggaaaattggttcagtagtaaacagaattctagcaggtggaacaagaacaggcgaggcatcctgggcctggtctctcctggaggtctgggtgttgcagcctttcaagactgcggctgctgtggcctacacacctgggcctgtgtgcctgtcccgggctttaggctgctttccctacccggctcaaccagtcagtccccgcgtacct

SEQ ID NO: 12673 - DNA, 220 bp, Homo sapiens
ataactaataacatcgtccttccatttggccgcgactgctctggaaaattggttcagtagtaaacagaattctagcaggtggaacaagaacaggcgaggcatcctgggcctggtctctcctggaggtctgggtgttgcagccttcagactgcggctgctgtggcctacacacctgggcctgtgtgcctgtcccgggctttaggctgctccccgcgtacct

SEQ ID NO: 12674 - DNA, 416 bp, Homo sapiens
ccgggcaggtacgcagccgctgacgtcggaaagaacctgctgggcccctgtgctcaggccctaaacaaacttggtgtcccgaaggggaggcgcgaccaaaagaaatcaaaggtctttagggcggagatcacagaatcattggagatattaatgcaaacgggggcctgtccaataatcctgctaatgctaatgggttactggaaagatgagaagagaggaaagatcccaacgatcccgtcaacacgaaaatcccaggaatcagagaaatgctgagccgattatcaggattagcaaatgttgttttgcatgaattatcaggagatgatgacactgatcagaatatgagggctcccctagaccctgaattacaccaagaatctgacatggaatttaataatactacacaagaagatgtt

SEQ ID NO: 12675 - DNA, 229 bp, Homo sapiens
aggtacgcggggagggaaagcagcctaaagcccgggacaggcacacaggcccaggtgtgtaggccacagcagccgcagtcctgaaaggctgcaacacccagacctccaggagagaccaggcccaggatgcctcgcctgttcttgttccacctgctagaattctgtttactactgaaccaattttccagagcagtcgcggccaaatggaaggacgatgttattaaattat

SEQ ID NO: 12676 - DNA, 413 bp, Homo sapiens
aggtacactctaaagaaagccatgaggatgataatccactttgatacttccaatctgctggccttgctgaactctttggatcatggatatcataagttcgacaaaatattttttttgtagaagcacaaatgtgaagtgtcactcgttctgagacttccttctctgtgaaattccacaatctctttctatttatagacttttccacagcaaacattagtctacgcagggcattttgaaaatcatttgccagttctaaagtagtaataataaatactccaagaactaaaagtccccctggtagcattctggatacctggcaggcatgttctgtggcccattcttcatccaagttatccaacttagctttgggatgtttgaggttcttactttgctcctctttggggggcgttctg

SEQ ID NO: 12677 - DNA, 403 bp, Homo sapiens
ccgggcaggtacctttcattggattgtccatggtgcatcgctttagcaagcggcgtgactctccgctgcccgtcatcttggccaatatctatctgctggttcctcctgtgctcaacccaattgcctatggagtgaagacaaaggagattcgacagcgcatccttcgacttttccatgtggccacacacgcttcagagccctaggtgtcagtgatcaaacttcttttccattcagagtcctctgattcagattttaatgttaacattttggaagacagtattcagaaaaaaaatttccttaataaaaatacaactcagatccttcaaatatgaaactggttggggaatctccattttttcaatattattttcttctttgctttcttgctacatataattattaa

SEQ ID NO: 12678 - DNA, 403 bp, Homo sapiens
aggtacaaaagttaagctccatttaccactcacttgacagtgtcctttaaatctgaacttgctcttgctcatgcggagcttggctaagagaaaccagatcagaatgcaagctgtaggtgggtgggtgagtgtgtcccctcccacactgctctctggtgggtttgggcagtccctggctctagtctctgctgcagattctcaggaccaaaatgtgggtgatttgtctgggtccaggcaggagacagaaatcacacaagctcttttattagagataatataaagaatgattaaccaggtgacagtaaagggcaggaagggaatacaaaggtatccatggaggtagcaccccaggaagcaggcatcacacttgaggcttgggaacaaggggaagatgctggactca

SEQ ID NO: 12679 - DNA, 482 bp, Homo sapiens
ccgggcaggtacgcggggtctgtgcctggaggggactcgccgccatctcaggtctcttggctttgccagggcccaccggagaaaactgacgacccgtttctgtaatccttatgggagaccaaccttgtgcctccgggagatccactctcccacccggaaacgcacgggaagccaagcccctccaaaaaaagcgctggccttcctcggctccgcgtttgggaattattccgggaaggaaacctccccaacgggaggtaggtaccgcggggagaatgaattggaatgttggcctattgtttccaattaacaatttttaatttaacaaaaaaaccagaaggggtgggtcttgtatttaacaaacaaaccagaattggtttttgtaggcacctattggaattagtcgcaaaaaaaaacttatgggataaggtgaccaaaaaaaacaatgaaagcctgtttctggacccatttcttgcccaaacccc

SEQ ID NO: 12680 - DNA, 164 bp, Homo sapiens
aggtacctcaagatcatggcaggcagcaagtgaagccccagctggactcatggatgtgcaccctttgctccctgctcttattgcctatgaactcatgtatctgcgcaggtatggtactggatccccatttgtgttagtggctgggggcatttattgcctataaa

SEQ ID NO: 12681 - DNA, 119 bp, Homo sapiens
aggtaccgaacgctgacaaatgaagttcacttcattcaacaactcaaagcggcactcagacttaacgcggccataaacgcggcggaaactacggtgcccacgatgcaccgcgccagccc

SEQ ID NO: 12682 - DNA, 402 bp, Homo sapiens
aggtacgggggttatttccaatgacgtgtgtgcgcaagttcaccctcagaaggtgaccaagttcatgctgtgtgctggacgctggacagggggcaaaagcacctgctcgggtgattctgggggcccacttgtctgtaatggtgtgcttcaaggtatcacgtcatggggcagtgaaccatgtgccctgcccgaaaggccttccctgtaccattaaccaaatagcgtaactattttatgtccacatttcacttctgtatttacaaacatatcagtaaagagttaacaatgagatgcgatcaaacatccatattatctgttttgtagacagcaatgtagatgattttgtaatcacctttcatcggagtgaccttatataaaaaataagtcaattatttagaggtt

SEQ ID NO: 12683 - DNA, 222 bp, Homo sapiens; identical to SEQ ID NO: 12662

SEQ ID NO: 12684 - DNA, 219 bp, Homo sapiens
  misc_feature 23, 24: n = A,T,C or G
tgagggtttaatttgcgccgctnntggcgtaaatcattgggtcattagcatgttttccctgtggtgaaaattgtttaatcccgcttcaccaatttcccacaaccaaccataccgagccccggggaagccataaaagttgtaaaaagccctgggggttgccctaaatggaggtggagccttaacttcaccatttaatttggcgtttgccgcttcacctgc

SEQ ID NO: 12685 - DNA, 278 bp, Homo sapiens
atgctgcgccttggcagtacatcaatgggtcaatagactgtattccctgtcgtgagaatatcgttatgcccgcgtcaccaaatctccaccaactaagcatactgaagctctgggaggccattaaaggatgtaatagccctggggggtgcccttaattgcagatgtacgcttaaagtccaccatttcaatttggctgtttgccgcctacacatgggctccggctatttcccagttccgcgggaaaaaccattgttgcgtagcacaaggcattgcccatg

SEQ ID NO: 12686 - DNA, 205 bp, Homo sapiens
ataatttaataacatcgtccttccatttggccgcgactgctctggaaaattggttcagtagtaaacagaattctagcaggtggaacaagaacaggcgaggcatcctgggcctggtctctcctggaggtctgggtgttgcagcctttcaggactgcgggtgtctgggggcctacaccacctgggccctgtggtccccgcgtactct

SEQ ID NO: 12687 - DNA, 158 bp, Homo sapiens
cacgctggttttgcatcttcaggagacgctcgtagccctcgcgcttctcctcggccaattcgcggaagaagtggctcacgccttccagagccacatcatcgcggtcgaaatagaagcccagagagaggtaggtgtaggaggcctgcaggtaccttggc

SEQ ID NO: 12688 - DNA, 426 bp, Homo sapiens
ccgggcaggtaccagcttcagcatcactgggaagcttattagaaatgcagaacctcaggccctgcttactgaacaaaaatccacagagtctccaggctgctcatgacttacttcctcatgtctgcctctccagctttctggaggagggactgggctggggcttgggcccatactcctggtttaagcccctggtgccagggttgtaagcagcacaccgaggctgctctgaaaccaactgatttagcttgagctatcaatattgtgtggctcagctgggggtccccttcctcctctgtctgcaatggttgtttgtttttgaggcagagtctcactctgtcacccaggctggagtgcagtggcacaatcagctcactgcaacttctgcctttccggattcaagcaattctcctgcctcagcctcccgag

SEQ ID NO: 12689 - DNA, 448 bp, Homo sapiens
ggagctccccgcggtggcggccgaggtacttatcattccatctgcgtgcttctccgcattactctggtctttggcaatctgcagcaacacaatgcagtgtttaattgattctaccatgctatttgttgtctctttgagagtttcaattttctttccctgttcatcttctttgcagttttgaaaccttggcttcaaaaaaaggctttaaattgttcaatcaagatttgttggtaagcatcacctcctgaagtttcttatcaaaatcttggacactaggaacaaatcctgaatccaaaccttgaagctggagagtatgtcgaagaattgtttcttctaaggcatggatccacttctctcgctcatcagcatcacgggcctggaaatggaaggttttttgatcaacagttattgtgaaggtgctgtcgtcctcatcgtctataccaatcac

SEQ ID NO: 12690 - DNA, 423 bp, Homo sapiens
aggtactcacacagtcatcacccctacccgtgcacagatggccacttctgcctccatccactcaatgccaacaggcacgattcctccactgacaacgctcacggccacagggtccacacacacagcctcaccaatgacggggaccaccattcggaccaccccaagcccacagctcattcagcatagcccggacaaaaaaaaaaaaaaaaaaaaaaggtccagagatttaaatgaaatcttcgaaagaataaatttgcttttcagtccactgtattttcaaaattgattatcaccaagcttggatgaaagctgtgaaccacaaaccatttgtttatttaatagaaaaaagaatgtgtagacccgcgtaccttcataacttcttcaagataccgggttgaacttccatttgcatatgcagtttgt

SEQ ID NO: 12691 - DNA, 520 bp, Homo sapiens
  misc_feature 48, 55, 65, 104, 186: n = A,T,C or G
ggatgacactaggaaccgagcccacgttgtcgacttacggtacaacangaacgcngtcaccttcncagagttagcaccagcacactatgaaacggacaggaganggaggctcacaggcggaagtctcctggggcgcaagaactcctctggttcgaagccgccccagcctgaggcgtagcagggggnccccagagctggctcctgggggggcaggcccaggaccctcacaacatctgtgatcttggcaggccccgacaggcgaagcagcatgaggtcatgggcgggagcctcaaccgggcaaaggccctcgaggcctcaaaagggccaaaaaggaaaaccgcgggggagaaaacgccgggcacaaaaggggacccccgggggcccgggcgccagggggcaaaaaaggggggggccccccaccccagcccacaccgggggcaattttttaaaaaaagcaggggggccggaaaaccaccccggggggggggggaaaaaaaacccccccccgggggggccgaag

SEQ ID NO: 12692 - DNA, 441 bp, Homo sapiens
ccgggcaggtaccagttgtaaaattaccaggaaccgccatgcctcaagatcgccctgttttctggcttcatcaatgactgcatgcagtgcaccaccctgtccactacgtgatgctgtaggattaagtctcacagtgggcggctgaggatacagcgccgcgtcctgtgttgccggtgaattagacgccatcgctgtgggttgctggtatggtgccgtgctatttggcacaggacacaccgcttgaggtctgtattgaacctctgaaggaggccgatactgaagctcggttggcagccggtattgataaactaccagcggttgggtcttattttctaccggctgatattgtggatactgtatctgagttggcattgccgggatagagactctgtccctttctacttgattttctcttggggtttgtgcttgtctaacctgcgt

SEQ ID NO: 12693 - DNA, 229 bp, Homo sapiens; identical to SEQ ID NO: 3491

SEQ ID NO: 12694 - DNA, 249 bp, Homo sapiens
aggtacgcggggactgactggttgagccgggtagggaaagcagcctaaagcccgggacaggcacacaggcccaggtgtgtaggccacagcagccgcagtcctgaaaggctgcaacacccagacctccaggagagaccaggcccaggatgcctcgcctgttcttgttccacctgctagaattctgtttactactgaaccaattttccagagcagtcgcggccaaatggaaggacgatgttattaaattat

SEQ ID NO: 12695 - DNA, 435 bp, Homo sapiens
ccgggcaggtaccccactcccagacaccattgaccagatgctaagagtcaaaggaatgaaacacagaaaaactccaagtcacacaaggatgttaaaagatggtcaagaaaggcccacaatccttaaaagcacagccttctaacatcgctttcagtaagggagaaaactgaagaggaaagactgtcttgccagaaatggccagcttgtgcagactccgagtccttcagtgacaaaggcctttgctgtttgtcctcttgacctgtgtctgacttgctcctggatgggcacccacactcagaggctacatatggccctagagcaccaccttcctctagggacactggggctacctacagacaacttcatctaagtcctaactattacaatgatggactcagcaccttcaaagcagttaatttttcacttgaaccagtg

SEQ ID NO: 12696 - DNA, 67 bp, Homo sapiens; identical to SEQ ID NO: 12626

SEQ ID NO: 12697 - DNA, 610 bp, Homo sapiens
aggtaccaggagggtattgatgtttgaggtccaaactgaaaacccatcacctccttcccactgctatagcagcgttagccctggggttcattatctagccagtccacaccttctaaagtggggctctgaaaatgtcttactccctcacagacaaagcaattctcaagcctcctgagatcacccaccaaccagagcaactgctgtcacttggaggtgcagctgaattcttctaattgtgacacaaactcttgaaactgtaaatgctgaaagattaaatgaggttataacactcagaaggttttacaagtaaaagtaagtcaaatcaataggtctttatttcatatctgtaatggtttagctctgcgggaagtgttagcagctatatgaattaggaagaatttagaagacaatccctaaacacatgaaatgtccaagtaagaagataacatatttatccaaatatttaaagtgaaatgctccagatatgggaagcttacagttttcaagcaaagctttttagaaaaaattatggaactattttaaagagagctaaacatttctttgcttaggcagaatatcagaacacagaatcaccttttctgacctgccc

SEQ ID NO: 12698 - DNA, 832 bp, Homo sapiens
aggtacttgcccccaggcccagataatttatttaaaaactttttttgtagagacagggtctcactatgttgcccaggctggtctcaaactcctggcctcaaacaatcctctacctcaacccccctaagtgctggcattacaggatcagctgccatgcctggctacaaatcttaatgttttccccatggcttctttttctggcgttcttttctcaggtaatggaagtgggcagagaatgatcctttccctaggctccagtgtgtaagaattaaagaaagaggaaagaaacacaatggcttgatggtcgaggacaggtttattttaaagaaaacaaacccaagagtggcttctggctgagttagatcagaggcatgctctcttacagactaaaagtttttaaggattcagggtgggagagtttaccagaggcttggactgcttctgtgtctctttaggtgtgcttatctgggagggagttgtgtgtctgtttccatacatcttcctgcagctgcaggcatacccccaggtctgcttttagcttccctatcttaatgcacctgaagggaaagaatgtgcttattaaggcccactgttatactggggcccaatgtattagggtgaagtttggcaattaacccagaagactttccccccaccttcctctgggccctgacctggctaatctaagattttactgactggccttttctgtctgcttggtgataagagaaaaaatgattttcttgtatagcattgagctggaaaagggactggcccttaaagggcggtggttgtcccaaaaggagggactactgctttgtacaaggggcag

SEQ ID NO: 12699 - DNA, 142 bp, Homo sapiens
ccggcaggtacaggggaaaagagctctccatttctcagcaggggacaccctggtccccactgccactttgtttgccctccaagggaaaaacctctcaataccaggtccaggagcagctggatgggatcactaaacccggcgt

SEQ ID NO: 12700 - DNA, 433 bp, Homo sapiens
aggtactgaaccaaaacaaacaactgtgtatagactgctgttttcttttttatttgaaatgaggcattttggtgttctttcccctaccatacggcctgtctgcccttccctccccacattggctccagcagagtagccgaaggtcctgccgccgccgccaccaccaccactgcagcaacaacagcagcagcagcagcagcgcctgcatagctccactctgacctgtgaaggaatggggatgaggccaggagctagtgtctaccacggccacacagggagcagtgtgggcccttagcccccaaggggcctgctatgcatgtggctcttttttttttttaaacaccagaaactagattagtcgtaagggttttaattgcccctattctcctttcctgcaattactttctctcttctttcctaatctgtccccttc

SEQ ID NO: 12701 - DNA, 511 bp, Homo sapiens
ccgggcaggtacccaatcctgtccttgccggtccctcctcgccgggtgggaatcttcgtggattatgaggcccatgacatttctttctacaaagtgactgactatggctcccacatcttcactttcccccgctatcccttccctgggcgcctcctgccctatttttagtccttgctacagcatttggaaccaacaaacactggctccttctggcccatactgctaccctggaatgggtgaggcaactaaagaaaagcatacccacccttaatccaccaatagggctttgggaaattggggcccctgtgcctcccattgggcgctttgtgagggactcgaagcccaactgaacaggttatttccccttgaaaaactgtaggctttgcgccccaagttattcccaagggaattccttctggtcatgataccctttggtccttttggcttacacaggtcttgaaagttcttgtccaatgaaaaccaactttattttttaaaaaaaggccaaaag

SEQ ID NO: 12702 - DNA, 256 bp, Homo sapiens
ccggccaggtactttcttttcctttccactgccatgtctgtgggaataggtggctaggcattgaacaaagagctccgtggccttggccgtgagcaccaacgcctcctggttgatgctggacacctcgggggaactcttcatgatgacccggatgcgggatagaggcagcgagatgaaccgctgatccccgcccttgtctttacccacgaccacgttccgccatcttcccgcccgccacgcgggtccccgcgtacct

SEQ ID NO: 12703 - DNA, 470 bp, Homo sapiens
tgatcgaacatttcgtataccgcaattgggttccggcgagtggcggccgcccgggcaggtactctctttcagttacccttttgcctccagaagtgcatgttgctccacctgggggcggatataaattacctctagattgtccaaagcccagtctttcccttccctgtgcagccttagaaactaagtagcagtaccagcatggttaggttctgttgagggctctcttctgggttgtagacttccagcttctcactgtgtcctcatgtggccttttgttagtatgtgtaggattcaagcagtgtaaccaggatttctccgggtctcttatctctgttggtctcatttactttcactccagataagctttcttcatgttgcaaatgacatggtcataaatagcctccttgagtccatgtcggtcccatttcagtgacccttttccacgttcccaaggccatccatgtttctca

SEQ ID NO: 12704 - DNA, 229 bp, Homo sapiens; identical to SEQ ID NO: 12675

SEQ ID NO: 12705 - DNA, 429 bp, Homo sapiens
ccgggcaggtacgcgggggcggcgcgggtcctccatatgctgagcgccggtcccctgggcccacttttctttctctatactttgtctctgttgtctttcttttctcaagtctctcgttccacctgaggagaaatgcccacagctgtggaggcgcaggccactccatctggtgcccaacgtggatgcttttctctagggtgaagggacttctcgagtgtggtcattgaggacaagtcaacgagagattcccgaggtgaaggtacctcaaatttgagcagtttttgtgtttgtgtaaattaaagtaaaaagcaatccacaataatgttttgtaatactgcacaccagttctaccagattttgtaactatcagatttaaatgaaaaaagagaaggaagaagcttgttggtggaatgttaaagaaaacttggc

SEQ ID NO: 12706 - DNA, 245 bp, Homo sapiens
gaattagttcgcgcgcagattgccatttgcggcatgagcacctggagcaaaaggtctctgagccaggaagatgctcctcagacacctagaccagtggcagaaattgtgccatccttcatcaacaaagatacagaaaccataaatatgatgtcagaatttgttgctaatttgccacaggagcctgaagttaacccctgtctgagatgcagcccagcattaccacagctacaacaacatgttacctt

SEQ ID NO: 12707 - DNA, 427 bp, Homo sapiens
ccgggcaggtaccatgaacaagctggccacagccatgcaggagggggagtatgatgcagagcggccccccagcaagcctccaccggttgaactgcgggctgctgcccttcgtgcagagatcacagatgctgaaggcctgggtttgaagctcgaagatcgagagacagttattaaggtagttgaagaagtcactcaagatttaagggagaggagctaagtgaggccaatgtgcggctgagcctcctggagaagaagttggacagtgctgccaaggatgcagatgagcgcatcgagaaagtccagactcggctggaggagacccaggcactgctgcgaaagaaggagaaagagtttgaggagacaatggatgcactccaggctgacatcgaccagctggaggcatagaaggcagaactaaaacaacgtc

SEQ ID NO: 12708 - DNA, 426 bp, Homo sapiens
ccgggcaggtacttgtggaacaacatcaaaaggtggcaggccatatacaaacagttcgacactgaccgatcagggaccatttgcagtagtgaactcccaggtgcctttgaggcagcagggttccacctgaatgagcatctctataacatgatcattccacgctactcagatgaaagtgggaacatggattttgacaacttcatcagctgcttggtcaggctggacgccatgttccgtgccttcaaatctcttgacaaagatggcactggacaaatccaggtgagcatccaagagtggctgcagctgactatgtattcctgaactggagccccagacccgccccttcaccgccttgctataggagtcacctggagcctcggtcttctcccaggccgatcctgtctgcagtcacatctttgtggggcc

SEQ ID NO: 12709 - DNA, 502 bp, Homo sapiens
aggtaccagtcaaacgtcactcagatgcagtcttcactgacaactatacccgccttagaaaacaaatggctgtaaagaaatatttgaactcaattctgaatggaaagaggagcagtgagggagaatctcccgactttccagaagagttagaaaaatggatgaaaaaagaccttttggagccaaagcctgatgacaaacttcccagtggaattctttgaaggaaaaatgaattacgccaacaataaattaaatttttgaagtttctacattaagtaatttcaagaaaaaccaactttcaaatatcccaaacccaaattaaaaaattatttgtggttagtgaaattgttgatgatggtatttctaagcttaaatggtaataacctgtgaaaagttttacaatttggtaaaataagttttttagaaaagtttcttaaaatttttgtacctttaaaacttcattaaaaaaagcccttggcaatttttcattattgcttttaattag

SEQ ID NO: 12710 - DNA, 119 bp, Homo sapiens; identical to SEQ ID NO: 10958

SEQ ID NO: 12711 - DNA, 343 bp, Homo sapiens
aggtacatgttgtgggtgccgctccgggagtcatagcgcagccagatcccgaagttcttcacccgcacgggggacttctcaaacacctgcccacagtagacaatctcccctgaagacttcttcatcttctttaacatgagatacaaagtactgtgaagatattgtaaacacagctgcatggggaggtcagcttgagctaagagctctgtctcacattttacaaacaccaatagagataatacaggcagattctcctcccattatagttggtgaagaatattcaaaaaaaccactaatacttgtatatattgagacatgcatatggcttatgagaacattataa

SEQ ID NO: 12712 - DNA, 222 bp, Homo sapiens; identical to SEQ ID NO: 12662

SEQ ID NO: 12713 - DNA, 264 bp, Homo sapiens
ccgggcaggtactttcataaacaaataggaaaatgtgatctattgcttcttttcttggtccgtgcccctcgccttgctaagtcagtttttcgactgcctgtgtgtgtgtgtgtgtgtgtgtgcatgtgtgtgtgcgtatgtgtgtccagaggccactgatccagtccaagtgtatttagaaattatttcagtggctcacaaaggtcttagaggccactactgcgctggggaaatccattgagcttggcttgttctctcttgctc

SEQ ID NO: 12714 - DNA, 897 bp, Homo sapiens
  misc_feature 1, 190, 414, 692, 812, 837: n = A,T,C or G
nggtgtttgcaacttttacatacggcgactgggagcttaccgttgtggcggccgcccggcaggtacgcggggaagaaggacatttctggtagctggtcgaggttggtgacgttgaggatctaaattaagacagtattataggaatggggaagaggaggcaaagtcaagaacaatgtgaactatcaaaccncaggacctatactataaatgagagggaggaaggaccaaggatgcttcttatgtagctgccttctattcctgggtgactggttgcacagtctccttagagaatccaggaacagagagaatatataccttccactggaagaatctcaaacagcgctgcttactcaggatcagtggcaccagccaactcagctttgggacaaacccagccaagtgaccaggacactntagtgcaaagagctgagcacattccagcagggaaacgaactccgatgtgcgcccattgtaaccaggtcatcagaggaccattcttagtggcactggggaaatcttggcacccagaagaattcaactgcgctcactgcaaaaatacaatggcctacattggatttgtagaggagaaaggagccctgtattgtgagctgtgctatgagaaaatctttgcccctgaatgtggtcgatgccaaaagaagaatcctggagaagtcatcaatgcgttgaaacanacttggcatgtttcctgttttgtgtgtggagcctgtggaaagcccatttcgaacaatggttttcactttgaggatggtggaccctactgtgagactgatattatgccctttttggacctngggcggtctaaaactaatggaaccnccggctggaggaatccgatttaaacttattgatacggtaaacctgaaggggggcccggcc

SEQ ID NO: 12715 - DNA, 296 bp, Homo sapiens
  misc_feature 1, 60: n = A,T,C or G
nggaggtcttaatctctacttagtgactggactgaccgtggggcggccgaggtacgcggngactgactggttgagccgggtagggaaagcagcctaaagcccgggacaggcacacaggcccaggtgtgtaggccacagcagccgcagtcctgaaaggctgcaacacccagacctccaggagagaccaggcccagatgctcgcctgttcttgttccacctgctagaattctgtttactactgaaccaattttccagagcagtcgcggccaaatggaaggacgatgttattaaattat

SEQ ID NO: 12716 - DNA, 413 bp, Homo sapiens
ccgggcaggactgggctaaaaaatagccctcagcatcgcaattcctgatgagggtgtcccggttggagaccatgccccaagctgctatgccaatggccacaatattctcctctgaactcctgctgatggtgttatctctcaccacctccccgatgtacaagaagaacataggtaaatttcaagaggaagccaatatttatgctgccaaaacagctgtcactgctaccaatgtgtcagcccatggaagccaaactaactcgccctcaactcccaactcggctggttcttccagttcttttaacatgtcaaactctggagatttgttcatgagcgtgcagtcactcaatggggattcttaccaaggggcccaggttggagccaacgtgcaatcacaggtggatacccttcgccat

SEQ ID NO: 12717 - DNA, 411 bp, Homo sapiens
  misc_feature 331: n = A,T,C or G
ccgggcaggtaccgcctctgtccctaccttgtctgttagccatgtggctgccccatttatccacctccatcttctttgcagcctgggtggctatgggtacacaaatacaaacatgcactcccccacacacacacatacatggacacacacagaggcatatcatgcattatcttccctcattcatcgatattctcaaatggcttattacacagatttacattcacaaatattctattatgtaaatgtaaatctattctattatgtgaatgtaaacctatataatatatttagccattttctcagttggatattttggttatttctatgttgncacaattttaaatcacattgaaataaactaggcccctttgactcctttctttctctcttactccatgtggtagactaaat

SEQ ID NO: 12718 - DNA, 406 bp, Homo sapiens
ccgggcaggtaccctagttccacacccaaatcccataaaacaattatctccagcctctcatcctcatcccatccatttttggttagaccccaggtaaagggtagggtgcccaaatacttccttgctgagctgggaggaaggcagaggcagaaaatgtaaagctccagattcattttatacaggtccttctgggctctcactgccagtctctgagcttgatccatctccccaagccgaagcccaaagggaaatgcaatgaggtatttcaaaggcttattcttagcttctgagcttctgaatgaattgcattctattcatccagggagccctggatgcccctgttttcttgaggatgtcttggtcccccagaagtccttaaatcccagccaccccatgccttccagag

SEQ ID NO: 12719 - DNA, 312 bp, Homo sapiens
aggtacgcgggggcagacacccagccactctgagcagaactgacagcatgaaggcactcctggccctgccgctgctgctgcttctctccacgcccccgtgtgccccccaggtctccgggatccgaggagatgctctggagaggttttgccttcagcaacccctggactgtgacgacatctatgcccagggctaccagtcagacggcgtgtacctttagtggttgccaatctgggcatgtctgaacaactgggttataaaactgtatcaggttcctgtatgtccactggttttagccgagcagtacctgcccg

SEQ ID NO: 12720 - DNA, 407 bp, Homo sapiens
aggtacgaaggcagtttggagctggggctaagcagctgtcgcacggtcagatcatgggctccaccaagcactggggcgaatggctcctgaacttgaaggtggctccagccggcgtctttggtgtggcctttctagccagagtcgccctggttttctatggcgtcttccaggaccggaccctgcacgtgaggtatacggacatcgactaccaggtcttcaccgacgccgcgcgcttcgtcacggaggggcgctcgccttacctgagagccacgtactataaggaattcaagttaacagaggcttgatttatataaaagaaagctgcagttttaaagttgtgttccttaaagaccagattatagcttatctgaatgggcttgacactttcaaatggaataaagttacaa

SEQ ID NO: 12721 - DNA, 409 bp, Homo sapiens
aggtaccggcggatgtcggtggtctacgggatcggcacctggtctgtgttgggctcactgctttactatagccggacaatggcgaagtcgtcagtagaccaaaaggatggctcagcaagtgaagtactttcaggatgctttttgtatgtatatcacatagagtaggttggtttcctgagtaattgggattccaactagatagtcattggtgtgaccataataaaaacaaaagctaaaataaaagcatcagatttagactggcgctgtgccctctaccactatatgccaaaaattgcttctctagtgccattttgatattatatctagctataaattatacatgactattgttttctattgaatgtcaaagacttactgggtctttacacctctgtaaagtggaggtttt

SEQ ID NO: 12722 - DNA, 67 bp, Homo sapiens; identical to SEQ ID NO: 12626

SEQ ID NO: 12723 - DNA, 421 bp, Homo sapiens
aggtactgttacttccttttgctgtcagagggttgttgacaatggcaaggggggatgttagtgagatccaggtggtggtggcttcttggtccactcagcttgcacacatgcaagaggagggtctgtggcccctcagccgtgctggtggcctgcttcctcaagctttaacttgtgccctccctggcaacagggagtcatgggttaatgtcacctgtcatgcctctttcttcagggaaaatattaaaaggctcaaatccaagctgtgacttcccttagacagtgtaagcctgtagggtgcacccccaagtttatgtccaaaggctgcctcagaaccctggagggagcagcgcccagctggcagctcactctccccttgcagttcactggccttttcgcagccaggctaagataggcagtgcaa

SEQ ID NO: 12724 - DNA, 420 bp, Homo sapiens
ccgggcaggtacaggtgaatgactggcccactctcccttgctccacttccacatgtttctcagcggtcggtcatgtttcaagctgcttgtgcagctcaccgacatttcttactgggttaatctcttcagagacattcaacttgctgacatccccacattttcccaggagattataagctgccccagcagcagggtttggggcagaagtgagaggggcaggctatctcaccaatctcctcttggactcaggaactcttgcaaaggtttcaaagatgaggaagaatctaaaagaaaagatcattaagctgtgcccagtgttcctcttgcaacaattctggaacaaaactttaccctgtttccaaatttaagctaaattcgttgtattatgcaaatgtagggacgtaacttgtaaaactccag

SEQ ID NO: 12725 - DNA, 419 bp, Homo sapiens
aggtactctgaagatggatagcaatggtgtgatcacagtaaagcctgacttcacgggcctcaaaggaccctacaggattgagacggagggggagaagcaggagctgtggaaatatacgatcgacaatgtttccccccacgcacagccggaggaggaggagcgggaacggcgagtgttcaaggatctttatggccggcacaaggagtatctcagcagcctcgtaggcaccgactttgagatgactgtcccaggtgccctccggctctttgtaaatggagaggtcgtttcagcccaaggctatgagtatgacaatctctacgtccacttctttgtagaattgccaactgctcactggtcaagcccagcattccagcagctctcaggagtaacacagacctgcaccaccaagtccctggcaa

SEQ ID NO: 12726 - DNA, 415 bp, Homo sapiens
ccgggcaggtaccatggtggtgggagaaaatgaccactggccaagaggactgctgacctgtgcaccagatggaaaaactgcaactcagaaatgtaaagtgagtcgaccaaggctaaagcggcaaaaccactatactttataacacagagtttggcactatttccactttgttctctctcaaagatgaaggctcaggaggagggaagataaaaacaaatcactggagagtcctggcatgccggaacatggactctagctagcaagaagggctcaaggaggtggccttctcctagacctcaactttgatgcaaaagctgttttgcagcctgaacaaagacaatccaatcctccagcaaatggcgtcatttttccctacgtgtctagccttgagctacagaacaaaagaacaatcaca

SEQ ID NO: 12727 - DNA, 421 bp, Homo sapiens
aggtacatctacctaaaggactattatgtggaataatacatactaatgaagtattacatgatttaaagactacaataaaaccaaacatgcttataacattaagaaaaacaataaagatacatgattgaaaccaagttgaaaaatagcatatgccttggaggaaatgtgctcaaattactaatgatttagtgttgtccctactttctctctcttttttcttcctttttttttattatggttagctgggactagaggaacgtgccaccatgactggctaattttctgtattttttagtagagacagagtttcaccatgttggccaggatggtctcgatctcctgaccttgtgatccacccgcctcaacctcccaaagtgttgggattacaggtgtgaaccactgtgcccggcctgtgtacctg

SEQ ID NO: 12728 - DNA, 249 bp, Homo sapiens; identical to SEQ ID NO: 12668

SEQ ID NO: 12729 - DNA, 223 bp, Homo sapiens
aggtacgcgggggcagcctaaagcccgggacaggcacacaggcccaggtgtgtaggccacagcagccgcagtcctgaaaggctgcaacacccagacctccaggagagaccaggcccaggatgcctcgcctgttcttgttccacctgctaaaaattctgtttactactgaaccaattttccagagcagtcgcggccaaatggaaggacgatgttattaaattat

SEQ ID NO: 12730 - DNA, 386 bp, Homo sapiens
aggtacaggaagcatggcggcttctggggaagacttacgaaactttgactcatggtggaaggcaaagtgggagcaggcgtcttacatggctgacgaggtccttgccttcctcccgcctcatcttttcaaactgtgtggtgctcttgatgctctggccaccttgaccttccttttgatccatgaatccccgagtatcattcttgctgggggacgcttttctcttgctgtctcccacggttggaatgcactttccctggatcttacaatggctggtgttttctcatcacatgtcacatccttaagagacggtttttctgacccctgtctccagtatgagtgtcctgcacccatcttcctctgtcctatcacccccgcgtacctgcccg

SEQ ID NO: 12731 - DNA, 249 bp, Homo sapiens; identical to SEQ ID NO: 12668

SEQ ID NO: 12732 - DNA, 252 bp, Homo sapiens
ataatttaataacatcgtccttccatttggccgcgactgttctggaaaattggttcagtagtaaacagaattctagcaggtggaacaagaacaggcgaggcaccctgggcctggtctctcctggaggtctgggtgttgcagcctttcaggactgcggctgctgtggcctacacacctgggcctgtgtgcctgtcccgggctttaggctgctttccctacccggctcaaccagtctccccgcgtacctgcccg

SEQ ID NO: 12733 - DNA, 845 bp, Homo sapiens
aggtacagaacagtaaagttaaaacggatgtctccattgatctgccaaatcgttatagagagcaatttgtctggactagaaaatctgagttttacaccatactgttaagagtccttttgaattaaactagactaaaacaagtgtataactaactaacaagattaaatatccagccagtacgcggggggctatttaggacggaagctcggttggtgtttctccagaagtttcccccttgggcggtggtggaggtggtaaccgtgatagtagcagctccggcggcagcaacagcgactacgagggatggcggcggctgcagcaggaactgcaacatcccagaaggtttttccagagcttctcggatgccctaatcgacgaggacccccaagcggcgttagaagagctgactaaggctttggaacagaaaccagatgatgcacagtattattgtcaaagagcttattgtcacattcttcttgggaattactgtgttgctgttgctgatgcaaagaagtctctagaactcaatccaaataattccactgctatgctgagaaaaggaatatgtgaataccatgaaaaaaactatgctgctgccctagaaaactttacagaaggacaaaaattagatagtgcagatgcttattttagtgtctggattaaaaagtgtcaagaagcttagaatggctcagaatctgaggggggacttaatagtcaaaaatcaagtatgactggtttaaacacgattctaagtgtcttacacttatgatcaaaatgttcaaaaaatgatgaaaggtggaatttcaaaaaagattggctgtttgggtaaactttcttttggaagg

SEQ ID NO: 12734 - DNA, 229 bp, Homo sapiens
aggtacgcggtgagggaaagcagcctaaagcccggaacgggcacacaggcccaggtgtgtaggccacagcagccgcagtcctgaaaggctgcaacacccagacctccaggagagaccaggcccaggatgcctcgcctgttcttgttccacctgctagaattctgtttactactgaaccaattttccagagcagtcgcggccaaatggaaggacgatgttattaaattat

SEQ ID NO: 12735 - DNA, 520 bp, Homo sapiens
ccgggcaggtactttttttttttttttttttttttttggatttttatggactctttattagggtattaagatattgaaaataatacacgtaaaccacaaaagagtagcattccattttcttgaagtgcacatgatattatgaacaatcaaatgcattatttttatcattaatagtttaatcattaattatctcataagtcaatgcagagagtgaaattactatgaattaaacttctgttcacaatgtactgggcgggtgaaacgattaccacccatagtgcgaggaggagccatcgacagatactggcccaccgccgacgggcgcctggttgaatatgacatagatgaagtggtatatgacgaagattcaccttatcaaaatataaaaattctacactcgaagcagtttggaaatattctcatccttagtggggatgttaatttggcagagagtgatttggcatatacccgggccatcatgggcagtggcaaagaagattacactggcaaagatgtgcct

SEQ ID NO: 12736 - DNA, 827 bp, Homo sapiens
  misc_feature 11: n = A,T,C or G
aggtacgcggnggaaacaaatcaaatgtttgttctcaaattcttactctgtcatttattattctccatgtttttgtaactgcttccttggagatatttaaacataaatatatacagagagggtgaagatggaggagtgcttttacagttcacagtcgtctttttcatgtgtgacaggtttttgctgtgttgcccaggctggagtgcaatgccacaatcttggctcactgcagcctcaacttcccgggctcaatcgatcccccacctcagcctcccgagtagcaaggactacaggcgcacaccaccacacctagctaatttttgtatcttttgtagagacagggttttaccatgttgtccaggctggttttgaactcttgggctcaattggtcctagcacctcagcctcctaggtgctgggattacaggtgtgagccgctgtgttcagccaatactcttaacgtttttacttttcacttttaaaaattaactctttttatgaaaaaagtagaattttttaaagagcagagaaaagcacaatgaagacagaaagatcacctgtatattcttattgaccaaagatgatctatttggggtaaatcctcttttttttttttgagaccggagttttgctattggtggccaggctggagtgcaatgggcccatcttcgcttacgcaacctcttgcttccagggttaaacaattttcttgctaaccctctgagtagcttggatacaggcttgcccaccaccccggctaattggtattttaataaaaccgggtttctcaggtgaggctggcttgactccaggcctaggggattgag

SEQ ID NO: 12737 - DNA, 836 bp, Homo sapiens
  misc_feature 748, 749, 750, 752, 753, 754, 759, 760, 761, 762: n = A,T,C or G
aggccgtatgggattagaatttacgtatcagtctgttgtttcttcatttcttctttttctatgctctttttacaatttcagctactccagaagctcagattttccctattccaagctatgagatgtgatgccacattgcattgccttcttgatatccccttctgagaatgcattgcctgctttttaactcattatattcaaaactaaattcatcatcattctctccttacaccagttctcaccctgactttgccatttttccttactaagtacgcgggggttttttttcttgctgcagcaacgcgagtgggagcaccaggatctcgggctcggaacgagactgcacggattgttttaagaaaatggcagacaaaccagacatgggggaaatcgccagcttcgataaggccaagctgaagaaaacggagacgcaggagaagaacaccctgccgaccaaagagaccattgagcaggagaagcggagtgaaatttcctaagatcctggaggatttcctacccccgtcctcttcgagaccccagtcgtgatgtggaggaagagccacctgcaagatggacacgagccacaagctggactgtgaacctgggcactccgcgccgatgccaccggcctgtgggtctttgaagggaccccccccaatcggactgccaaatctccggtttgcccgggatttattgaaaattatttgattgaatatgaaaataaacacacctcgtggaaaaaaaaaannntnnntttannnntattttaattttatcccctataaaaataaaaaaaaaaaggccctcgccggcttaaaatggggtcccgggccgat

SEQ ID NO: 12738 - DNA, 861 bp, Homo sapiens
  misc_feature 271, 499, 500, 588: n = A,T,C or G
aggtacatacatagttacatgaatagaacagatcaaaatttatgaacatttccaaaaagctgtccaaatattcttgtatattgccttacataaaatgaaacaaacgaaagttgataacactcagtctcttaatataatataaattaaaacctaataacatataatagataataggttcccgcgtacatgacaaggtgcggctccctaggcccctcccctcttcaaggggtctacatggcaactgtgaggaggggagattcagtgtggcggnggactgagtgtggcagggactccccagcagtgagggtctctctcttcctcttgtgctcttgctggggctggtggtccaggggtcttactccttggaggccatgtgggccatgaggtccaccaccctgttgctgtagccaaattcgttgtcataccaggaaatgagcttgacaaagtggtcgttgagggcaatgccagccccagcgtcaaaggtggaggagtgggtgtnngtgttgaagtcagaggaaaacaacctggtgctcaatggtacccaggatgcccttgaaggggcccttcaacccctggttaacaactttnttatggtaatattatttggaggtttttttaaacggaggtaaggttcacaatgacacgtttgcagtggggacacggaaggcccatgcagtgagctttcccgtcaacttaaggatgacctttgccacacccttggcgtgccagttaaagccaggaatatgttttgaaaaccccctgggccataacccaaaattttcggagggccattcaaaaatttttgtgagacctatgggatcgcctcgccatggggccccccaaacaccaatggtgtatgtt

SEQ ID NO: 12739 - DNA, 197 bp, Homo sapiens
ataattaataacatcgtccttccatttggccgcgactgctctggaaaattggttcagtagtaaacagaattctagcaggtggaacaagaacaggcgaggcatcctgggcctggtctctcctggaggtctgggtgttgcagcctttcaaactgcggctgctgtggcctacacacctgggcctgtgtccccgcgtacct

SEQ ID NO: 12740 - DNA, 428 bp, Homo sapiens
  misc_feature 340: n = A,T,C or G
aggtacgcggtggtccctgaggagcgacctgccggggccacctggctggacgaaaaagacacaccttggacttaagccgtgagaaaaaacttcatcagtaagaagaatgaataaacagactaggttgaatccatacaatggaatgttgcaacaataaaaagaaaatgaactattgatgtcccctactgcacagcagaagctctgaatcgtgttcctgaatgaaagaagtcagagatgaaaagatgggccaggagtccagtttctggaaggccaagaatcgaagtagcaagctgcagccgttttccagacaagcaggatgtggggatgcagaagaattcangactggaggggcaaactccgtaagcaggggctgtcacgattcccatctccctctataaacctctctcttttcatgtcgtacctgcccg

SEQ ID NO: 12741 - DNA, 837 bp, Homo sapiens
ccgggcaggtacatttccaaagtcaagagtcaaataaaaaaatcccatggaatttggagcctatttagaactcaaaataatgagaatgctgcaaatcaaaacttgtgacatcccactaaagctgttcttagagggaaatctacccaacacactaaatgcttacattagcaaagaagaaaggctaaaatgaacgagcatccaagttaacatgttagaaaaggagcaacagagaagactcaataaagtaaaaggaaggaaacaataaagataagattagaaatcaatgcaacaagaaaacaaagataaatgctggagaggatcttggttttctgaaaagacaaattaatgggtctcttggcaagactgagaaaggaaaaaagaaggcacaaacacagtaggatgtaaccactcaaaagtatcatgacctgtttcttcccatcacgtggactctgctccgaaggacaagtgcttttcttgcctggtttgtccacctgtgccagccactgctttggttcgggtgccggtcctttgagtccacatgcaagctccttgctttgctcccaaaactgcctgtgcttggttggtcagatccaacatggggaaaccccctttcttgattggggccaagattggaataagaagcttgcaacaaataagcaatggtactggccttagaaatagaagtaggaaataaagattccagacttttattttccagataaaaggctggggcttaacatagcagtacctggcgctttagaacagggaaccccggcttgaggaatcgttttaattattgatccgtcaccctagggggcccgacccattttgtccttt

SEQ ID NO: 12742 - DNA, 549 bp, Homo sapiens
  misc_feature 517, 518, 519, 527, 528, 533, 534, 535: n = A,T,C or G
ccgggcaggtacgcgggaggccactggttctcaaacattagggtgcactgtaaccattacagagcttgtgaaaagtgcagaaacctgagcctcaccttatgagattctgattcagccagggggaggacaggaatctgtattttcattagcaacctcaagtaatctttattctgagggtctcgggattgcaggttgaaaaacacaaccttaatcagcagtaaattcttctctactcggccaggcgcagcggctcatgcctgtaatcccagcactttgggaggccgaggtgggtggatcacaaggtcaggagttcgagaccagcctgaccaacatggtgaaacgccatctctactaaaaatacaaaaattagccgggcgtggtggtgctcacctgtaatcccagctacccaggaggctgaggcaagagaatcacttgaacccgggaggcaaagggtgcagtaagccgagattgcaccactgcactccagcctaggcgacagagcgagaccctgtcccannntaaatatnntaaannnaaaaaaaggtccct

SEQ ID NO: 12743 - DNA, 516 bp, Homo sapiens
aggtacagctgcccaagggcgttcgtaacgggaatgccgaagcgtgggaaaaagggagcggtggcggaagacggggatgagctcaggacagagccagaggccaagaagagtaagacggccgaggtacgggttctcaccaaaattgggcctgagaaatttgttatatcctgctgtgaggttctcaaagccaggcagggaaagcttgtcacttctgccgacctcgacgttgaactgactcccctggatgcacatcctctcagtgaagagactcagacacacgaaggccaagtggaggctgtagttcatgttgagaagctgctcacaccaaggggctgaagtaggaatcaccaggtagttgttgaggctctgttagggcaagtccttcaggcctacaggcaggacttccaggcaaggcacggtcttctgggtccccagggttctcctcatcctcagccctgtcccctcgtatgtggacacgcagccaccctcagatggagtcccccgcgtacctgcccg

SEQ ID NO: 12744 - DNA, 371 bp, Homo sapiens
  misc_feature 17: n = A,T,C or G
ccgggcaggtacgcggngggaatgatgcgtatatgattctggcacaaccagttctttccccgaagcagctgttgccaccaccctcttcctgccaggcagtggaggaaggtgcttgcaggagctgcggacacactgttgtgtgtaggatctacttagctggcctcatgttctgcttttgctggcagaattccttgctgaagctgtaagccctcgaatctgatctgtgctctgcatttttaacaaaccaggaagaagctgctcaggtgcatggagtcaaggacccggcgccagcatcaacccagagcgtgcttgccgatgggacagattctgcaggtaagatacagggctgggggttgtcccaaattgtacct

SEQ ID NO: 12745 - DNA, 249 bp, Homo sapiens; identical to SEQ ID NO: 12672

SEQ ID NO: 12746 - DNA, 402 bp, Homo sapiens
aggtacaatcagtatctgccatatggctggtctctgtagacgccctttgctgtcctcgctgaaggtgccttgtgtcttgagttagtccactcttcttgcccgtaggaatcataagtctcctcactgagtccatgtccgtaatcatagtaatcagcaccactgcagtgccaccttgggagtgtggcttccacgtgggagtcttcctgttcatctgccaaatcaggggctggtctagacgccgctcaggtctcctggcagctctaacatcttccatggctctttcacagcatctagctccacagtagtcaacataatttctcattttgttgaaaataaactggcaaatgcttcttggaaactcagtgctaaattaaatgaacctcagtcttctttccaagggtc

SEQ ID NO: 12747 - DNA, 224 bp, Homo sapiens
aggtacgcgggtagcagcctaaagcccgggacaggcacacttggcccaggtgtgtaggccacagcagccgcagtcctgaaaggctgcaacacccagacctccaggagagaccaggcccaggatgcctcgcctgttcttgttccacctgctagaattctgtttactactgaaccaattttccagagcagtcgcggccaaatggaaggacgatgttattaaattat

SEQ ID NO: 12748 - DNA, 127 bp, Homo sapiens
ataatttaataacatcgtccttccatttggccgcgactgctctggaaaattggttcagtagtaaacagaattctagcaggtggaacaagaacaggcgaggcatcctgggcctggtctctcctggagg

SEQ ID NO: 12749 - DNA, 411 bp, Homo sapiens
aggtacacatatcctgagctatccacagtccccgaactctgcaacattgctttcaggtgatagagacaagatggtccatgcaaatgagctgacacaagtcatgtcgtgtgcaatcaagataggatcccagacatcttcagaatggtttacagtcacaagaaataaagttccaatgaagtggttggcatttggaagcacactgttttaaatatatctccctgaaggtatgtttatatattagtgcactggtcaatatctgacactatctgtcattttattgcaaaaggatatcagggcaattaataggagggatcttagcactactttagacaatctttaaagcctgggtaagattcattagctacccaagtggcatttctgacttcaaattgtagtatcatgcaagattta

SEQ ID NO: 12750 - DNA, 332 bp, Homo sapiens
  misc_feature 145, 146, 188, 189: n = A,T,C or G
ccgggcaggtacgcggggaaggctcttctgtgtcttcctgaccagctgctctgttcccagcttagaggaccagagggagaagccacctgctacacgctggatgctgcagcctgtgccactgtggcttacatcgctgtggttggtnnggcagcaacggagacctggcagccagctggagtggctgtganntgacagtgcttatcaatcctgtccccgccacaccaccaacatacacagaaaaaaagcaggcaatgagttggctccgggatgacctcgtatgaagacgtttcattccttagtcttggcaattgacatcacaaacttgggtacct

SEQ ID NO: 12751 - DNA, 846 bp, Homo sapiens
aggtactgttacttccttttgctgtcagagggttgttgacaatggcaaggggggatgttagtgagatccaggtggtggtggcctcttggtccactcagcttgcacacatgcaagaggagggtctgtggcccctcagcctgctggtggcctccttcctcaagctttaacttgtgccctccctggcaacagggagtcatgggttaatgtcacctgtcatgcctctttcttcagggaaaatattaaaaggctcaaatccaagctgtgacttcccttagacagtgtaagcctgtagggtgcagccccaagtttatgtccaaaggctgcctcagaaccctggagggagcagcgcccagctggcagctcactctccccttgcagttcactggccttttcgcagccaggctaagataggcagtgcaaggagcttcccactggccagagcagctgccttgtagaatgtggggctggcttttaaaagtttcacacgcttgcaactaaaaatgcagaagctctttgtttaacttcgtgaaacaataacaacttttaagggcttggctttttggtaaggacctattatctgaccttgcaacaacaccctgaacttctgggtttggtgggtggttggttgatggggttgtttaaaatttaattctctttcccaaatattaagtagatgtaagaccctatttagggaaatcatggccatatatcttaccattttaagggggtacttatatatggctataaatctcctgtacaccctttgtaacttatagatataaacatccattgccctgtaaacgctatcctatcttatgtctctctgactatctcattttacaccat

SEQ ID NO: 12752 - DNA, 195 bp, Homo sapiens
  misc_feature 165, 166, 180, 181, 193, 194: n = A,T,C or G
ataatttaataacatcgtccttccatttggccgcgactgctctggaaaattggttcagtagtaaacagaattctagcaggtggaacaagaacaggcgaggcatcctgggcctggtctctcctggaggtctgggtgttgcagcctttcagggactggcggcttgcnntgtggcctacacanncctgggcctgtnng

SEQ ID NO: 12753 - DNA, 560 bp, Homo sapiens
taggtatcctatctactcactataggcatatagcgggtggcggccgtcgcggcaggtacaaagcaacctggttggccaatagttgaattgacaaatgagatcaattaagcagtggctacttgtcaagccaaagtatttattcaggtgttcataaaatcttgaaattactcatattcacaaactttttggacacaatttgcataaagaggaatatatttgtaaacaagacctctgacttgtataagttccttggaaaacaggcaaagcactcttatatatgcagaattattttaattatttcaaagatcaaagttcccactcttggctccccaacttgcctgttcatgtttataggactcattcaagaattttctatatctctatcttatatactctccaagttcataatgctgctccatgcccagctgggtgagttggccaaatccttggggccatgaagattcctttatggggtcagtgggaaaggtgtcaatgggacttccgtcttcatgccgaaacaccaaaatcacaaactttaactccttggctagtaccttggg

SEQ ID NO: 12754 - DNA, 240 bp, Homo sapiens
ataactaataacatcgtccttccatttggccgctactgctctggaaaattggttcagtattaaacagaattctagcaggtggaacaagatcaggcgaggcatcctgggcctggtctctcctggaggtctgggtgttgcagcttcaggactgcggctgctgtggcctacacacctgggcctgtgtgcctgtcccgggctttaggctgctttccctacccggctcaaccaccccgcgtacct

SEQ ID NO: 12755 - DNA, 400 bp, Homo sapiens
aggtacctttgccctcaggcgaggaaggggaatatgtcctggcactgaagcaagagctacgaggagccatgaggcagctcccctacttcatccggccagctgtccccaagggagatgtggagcgttattcagacaaatatcagatgtcaggtccgattgacaatgccatcgattggaaccctgattggcggcgtctaccccgggagctaaagatccgagtgcggaagctacagaaggaacggattacaattctgctccccaagaggccccctaagaccacagaagataaggaggaaacaatacagaaactagagaccctggagaagaaggaagaagaagtaacttcagaggaggatgaggagaaagaagaagaagaaaaaaaaaaaaaagtacctgcccg

SEQ ID NO: 12756 - DNA, 840 bp, Homo sapiens
  misc_feature 519, 545: n = A,T,C or G
aggtacaccaatcaaacatagtgtgtccagaattggtgggttcttggtctcactgacttcaagaacgaagctgcggaccctcacggtgattctaagcacattaaaatctggatgacacttatctgaatcatttcgcacttgagagagatggagaagacacgcatggtgtaactgggcatcaccagaatgtgcactgccatctgtggctgtcttcctgctggcaaatccttttcattccaagcaaataagattccctaaattagacaaaaaggaagaaacacaacagagtccataattctgagaggaagagaagagtgatcatcagcagcaaaaggcaattgcagagaagcaccaccaagagccagcttcatgctcaggagtgaatgctgagccgcctcctcgtggtttccggtgctccacatgttcagagaaacttctctggtaagaaactatagaaatggtgcatggaagtgttactagaaagggttcctgatccagaccccaagagagggttctggnatctcacgcaggatccaagaatttanggtgcattcatggaagtaagtgaaaggcaagtttattaagggattaatttgttttcatgccgcttaataaccacatacctgagactgggtaatttataccggaaagaggtttaatggactcccagttcacacgggtggcgaggcctaccattcattgtggaaggcaaggaggaccaggtatgtcttacattgatggcaacaggccaaaaaaaaaccttggccgggaaacccccctgtataacccatcaaatctgggggacttattactgcccaacaccagattgaaggaccggcc

SEQ ID NO: 12757 - DNA, 349 bp, Homo sapiens
aggtacgcggggtccgccctcccttaagatcacggaagtatcacgcttgcctcttacacaactttttttccttagtctgtatactttctgctgtcactagcataacagaaaagacgaatggcttttgttttaaactgagggcacttttacaaaagtcatctttccatttatttttctttcagaaaaaagaatttgggttttgagcttttttaaaaaaaaaagacaaacactttccttgactttgagaaataatttaagtcaaagaatctgctctatgctaaccaagagatagagcacagcaaagatctgccagccccaggcctttacctagtggcctggaaattcaagt

SEQ ID NO: 12758 - DNA, 864 bp, Homo sapiens
aggtactttttttttttttttttttttttttgggggaaatgaactcattcctgttaagagtctgctctgacagtagcatttgagacattactgctttaaatgcattttcatggttcaaaataatagcactattaaaaaatgtttcttaacaaggatttgttttctccctaagaagcttaatgtggacactacaaataatgaccaaagctgctgagtatggcataacaaagagaaaacaaagcactcatcctgtcctccagatcatgcccagaacactgtctaccaacatgtggcttgccaactggaatgatgcaaatgtcagacccacatctgtggaaaaggggctcgtcccacaggaaacaagctattggggaatggggagaatgatataattagaaatttaagacacagtataactcagaaaaatgttggctgggcagcacattgctaagacttgaaatctttattttgttctcttttcaaaagccctgtgagcataatgagcagaatatggctttaagaactaagattcaccccattaggcattaatggtgtccagaaactatgtgaacaaatcttacttgacatccccaaaacatttatatctgtccaatgcataaataaaggggggaacatgttaattttcttaaccttttgattgcatatttacaagatctcttaacccacaaaagcttcaaatattttcttatgacttcgacttgcttaaaaattagacttggcattatcttggcccattaaccagatctgtttgaccaatacatttatatttatgatgacctgaggccaatatagggtgttaaaatttgccttggaacatgaaaaccctctttggcataaatccat

SEQ ID NO: 12759 - DNA, 378 bp, Homo sapiens
  misc_feature 342: n = A,T,C or G
ggtcgtcttcagtaaaaatggccattataattaaccatctgcaggacccttttagggccgtctgcacgtctactgtggggcgcacagcacaaatggacccagggcctggggctccagggcagttgctgccacacccgccgggtctaccacactacactgagaaacgtcacacggagttggaaaaaagccacagcttgctcagcttccgacaaagagcggattcacagtccgttcgatctcagagaactgagtggggcacccacttgatggggccaaccgcactaacaaatacaaggcaacgcaaccaataactaatacaaaaaccaaaaacccacacaaccngccgattgttttgaaaactccccgcgtacctgcccg

SEQ ID NO: 12760 - DNA, 1049 bp, Homo sapiens
  misc_feature 175, 247, 248, 280, 283, 284, 290, 294, 295, 296, 314, 317,318, 327, 328, 329, 337, 338, 345, 349, 353, 364, 365, 370,371, 434, 473, 474, 485, 492, 498, 499, 529, 530, 569, 570,716: n = A,T,C or G
ataatttaataacatcgtccttccatttggccgcgactgctctggaaaattggttcagtagtaaacagaattctagcaggtggaacaagaacaggcgaggcatcctgggcctggtctctcctggaggtctggatgttgcagctttcaggaactgcggctgctgtggcctacacancctgggccatgtgatgcctgtacccgggcctttagggctggctttgccctaacccggcatgcaagccacccnncgcgtaccttgcggccgcatcttaagaactangtnnggatcncccnnncgggctgggcagggaatntcnngatatcaannngcttatcnngataccngtcngacnctgcgaggggnnggggnnccgggtagcccagctttattgtatccctttttagtgaggggtataattggcgccgctatggcngataatcaaatggtacataagctggggtttccttgtggnnggaaattggtntatcccngcttcnnacaattgcccacaccaatcataccgtagcnncgggaagccataaaagtggtaaaagcccttgggggtgcnnctaatgaagtgaagcctaacctcaacattaaatttgcggttgccgcctcaacttgccccgctttttcaagtccggggaaacccttgttcgtgcccaagcttgcaattaaatgaaatccggcccaaccccgccgggggaggaggccnggatatgccgtatatggggccgccttattccccgtttgcttatggttaacttgacactcgcttggcgcttcgggtccgttccgggctgccgggcgaagccggtattcaagtttaacttcaaaagggccggggaattaccgggtatttccacaaggatatcaggggggattaaccgcacggataaaggaccatgtgtaggcaaaaaggggcccagcaaaagggcccacagaaacccgaaaaaaaggccccggttttgctgggcggtttttccattggggcttccgccccccctggacaggcattaacaaaatattggcgcctctaaggtcagat

SEQ ID NO: 12761 - DNA, 222 bp, Homo sapiens; identical to SEQ ID NO: 3476

SEQ ID NO: 12762 - DNA, 67 bp, Homo sapiens; identical to SEQ ID NO: 12626

SEQ ID NO: 12763 - DNA, 76 bp, Homo sapiens
ttacgcgaacactactatgggcaattgagctcaccgcggtggcggccgaggtacgcggggggaggcgaagaacgca

SEQ ID NO: 12764 - DNA, 211 bp, Homo sapiens
ccgggcaggtacgcgggggacgccactgcgcacgcgcggccccttctaccgttcccgactccgcggctcttagagggtgggctgtgtcccggctgcggaaacgccaactccaggcgattggcgcgaaggaggcgaaaagggcggattcccttttccggttcgggcccgggctgaaggtcctaatcccgaagctggggttactaggtgaaca

SEQ ID NO: 12765 - DNA, 288 bp, Homo sapiens
gggagtgtctgtcctatgtggttgagataaggactgagatacgccctggtcgcctgcagtacgcggggggggtgccgccgaccgttccgctcttccggccaggtgcttttctgtcaatttctatggaatgcaaaaggaggtttttgttttatttttgtctttttggaaaaggttaaaaaaaaaatttacattttatacttgagcctccatacttaaaaaaagaaaagaaaagaaattaataaaaagaaactggggctcaaataaatataaataaaataaatagttcct

SEQ ID NO: 12766 - DNA, 421 bp, Homo sapiens
ccgggcaggtaccagttgtaaaattaccaggaaccgccatgcctcaagatcgccctgttttctggcttcatcaatgactgcatgcagtgcaccaccctgtccactacgtgatgctgtaggattaagtctcacagtgggcggctgaggatacagcgccgcgtcctgtgttgccggtgaattagacgccatcgctgtgggttgctggtatggtgccgtgctatttggcacaggacacaccgcttgaggtctgtattgaacctctgaaggaggccgatactgaagctcggttggcagccggtattgataaactaccagcggttgggtcttattttctaccggctgatattgtggatactgtatctgagttggcattgccgggatagagactctgtccctttctacttgattttctcttggggtt

SEQ ID NO: 12767 - DNA, 229 bp, Homo sapiens
aggtacgcggggagggaaagcagcctaaagcccgggacaggcacacaggcccaggtgtgtaggccacagcagccgcagtcctgaaaggctgcaacacccagacctccaggagagaccaggcccaggatgcctcgcctgttcttgttccacctgccagaattctgtttactactgaaccaattttccagagcagtcgcggccaaatggaaggacgatgttattaaattat

SEQ ID NO: 12768 - DNA, 424 bp, Homo sapiens
aggtacatcctcatagagaatctcagtggattaaggcagctgtaacttgttttggactgcagttacagaggccaaggtatagaagaaaggtaacgagagtgccaggataggaaagttctgagatgaagacaacctggcagctcaaagtcacagttcatgccctgttgcttcagaccaaattccctctacagcctgaagcaagctggccttgcccacagagaactgcctttctccatatgcagccacctccctcagggcaattccttgccttggatcctcactgcacctgcttcaccagcatcttggctcttcatctccctacccccagagaagctttccatttaggagctcgcaacgcccttcctaggccatgccagtgttttaatttgctggagactagcccacaggaacaatagtggctgtg

SEQ ID NO: 12769 - DNA, 63 bp, Homo sapiens
ccgggcaggtactttttttttttttttttttctttttttattaagtgttctgttactatgact

SEQ ID NO: 12770 - DNA, 400 bp, Homo sapiens
  misc_feature 168: n = A,T,C or G
aggtacgcggggccatcgcaaagttgttaaccccagagtcttctggctgtgctgcctcctctgcttttaatcttctgtggatatttctccgatttcccccaaaagcccacagatcctgggggaagccaccccattcggccaccgatcatggaagaaagtattactttntatttaccaaacattttaaagatgttggaagatccatatgctgcctggaggctgttgtttctagggacacaagtatccagcctatattgttacaatttttttcaagaactgccgtcttctttgtctgcactaatggaacatcatcttcagcgggctatttcagcacagcaggtgtatggcgagaagagggataatatggttataccggtcccagaggcagaaagtaatattg

SEQ ID NO: 12771 - DNA, 223 bp, Homo sapiens
aggtacgcggggagcagcctaaagcccgggacaggcacacaggcccaggtgtgtaggccacagcagccgcagtcctgaaaggctgcaacacccagacctccaggagagaccaggcccaggatgcctcgcctgttcttgttccacctgctagaattctgtttactactgaaccaattttccagagcagtcgcggccaaatggaaggacgatgttattaaattat

SEQ ID NO: 12772 - DNA, 283 bp, Homo sapiens
ccgggcaggtacggcttcggaggctaggccgccgctccagctttgcacgtttcgatcccaaaggccctttttagggccgaccacttgctcatctgaggagttggacacttgactgcgtaaagtgcaacagtaacgatgttggaaggcttatgattttactgtgtatgtatttgggagaagaaattctgtcagctcccaaaggataaaccagcagttgctttattggtctacagatgtggctgcaaacacttgagactgaactaagcttaaaacacggtacctg

SEQ ID NO: 12773 - DNA, 199 bp, Homo sapiens
aggtacgcggggacacaggcccaggtgtgtaggccacagcagccgcagtcctgaaaggctgcaacacccagacctccaggagaggccaggcccaggatgcctcgcctgttcttgttccacctgctagaattctgtttactactgaaccaattttccagagcagtcgcggccaaatggaaggacgatgttattaaattat

SEQ ID NO: 12774 - DNA, 494 bp, Homo sapiens
  misc_feature 152: n = A,T,C or G
aggtacgcgggggaagccgcccagtgccctgagcgtctccatggcctgcctgagcccctcgcagctccagaagttccaacaggatggattcctggtgctggaaggattcttgtctgcagaagagtgtgtggccatgcaacaaaagaattgcnaagatagtggcctgaaatggatgttccctctccactggccgcacaagaattctccacccaaggaagagggagcagctttcgaagcccaggggcagcacaagacctattttttttgagccagtgggggaccagaattccatatcttttttttgaaaaaaaggcctttttttggatgagaaaagggaaaattttccctggggcccttcccgggagaaaattccattaaccaaaaatttgggccaacgctttttggaacgccccacggaccccccgtttttaaagaagcattcaccaccctttcttttaagggtggcaaaacctttggcccaaaaagttttgggc

SEQ ID NO: 12775 - DNA, 222 bp, Homo sapiens; identical to SEQ ID NO: 12662

SEQ ID NO: 12776 - DNA, 127 bp, Homo sapiens
ataatttaataacatcgtccttccatttggccgcgactgctctggaaaattggttcagtagtaaacagaattctagcaggtggaacaagaacaggcgaggcatcctgggcctggcctctcctggagg

SEQ ID NO: 12777 - DNA, 470 bp, Homo sapiens
ccgggcaggtacgcgggggagtttcacgcgcgtatgctttgcccgctatggccgcagtcaaggagcctttggagttccatgccaagcggccttggcgccccgaggaggcagtagatgatcccgacgaggaggatgaggataatacttagtgaagccgagaatgggttctccctggaggaagtgttacggctcggaggcaccaagcaagattaccttatgctggctactttggatgaaaatgagggaagtgataaaaggaggcaaaaaagggagccaatcgatgaccttttacaagggggaattggggagccttttttttaaaaaatttttattttggggaaaagttttaaaaaagctttcttttttttgggaaaaaataaaaccccctttaaaaaaaaaaatttccccccaaaaaaaaaaaaaaaaaaaaaaagtcttttgcgcgcttttaaaaaaaggggacccccccc

SEQ ID NO: 12778 - DNA, 169 bp, Homo sapiens
gttttgtatcactactatgggcaattgagctccccgcggtggcggccgacgcggccaggcactcacgagaggaagatgacttcattcaacaactcaaagcggcactcagacttaacgcggccataaacgcggcggaaactacagtgcccacgatgcaccgcgccagccc

SEQ ID NO: 12779 - DNA, 251 bp, Homo sapiens
ataatttaataacatcgtccttccatttggccgcgactgctctggaaaattggttcagtagtaaacagaattctagcaggtggaacaagaacaggcgaggcatcctgggcctggtctctcctggaggtctgggtgttgcagcctttcaagactggcggctgcttgtggcctacacacctgggcctgtgtgcctgtcccgggctttaggctgctttccctacccggctcaaccagtcagtccccgcgtacct

SEQ ID NO: 12780 - DNA, 425 bp, Homo sapiens
aggtactttttttttttttttttttttaatcaatcacaggagcaattcctgtgaactaatagggagaggtccaggtagagctatctgattgcaatgtaattctgaccctgagtgaaggaaaaaaggaaggaagactggggaagagtcccatgcctgtcttacaggtccagggaaagtttggtttggcaaggccatcatggagtcgttaatcaaaaaccagctgccaggggagtcccatttgtctcccaaatagcaggccttagcactaagttatgagctaggtgcagcccgtaagaactgtggcttcccttggcgggatcatggagatttcaactcgcagccggttaactccctatcgaaagaaggctgggaggcacattctcatggctgccacattctatcctgtgcattcttaacattctaca

SEQ ID NO: 12781 - DNA, 211 bp, Homo sapiens
tgttcacctagtaaccccagcttcgggataaggacctgcagctcgggcgcgacccggaaagggaatccgcccttttcgcctccttcgcgccaatcgcctggagttggcgtttccgcagccgggacacagcccaccctctaagagccgcggagtccggaaacgggagaaaggggccgcgcgtgcgcagtggcgtcccccgcgtacctgcccg

SEQ ID NO: 12782 - DNA, 432 bp, Homo sapiens
agggacatcctcatagagaatctcagtggattaaggcagctgtaacttgttttggactgcagttacagaggccaaggtatagaagaaaggtaacgagagtgccaggataggaaagttctgagatgaagacaacctggcagctcaaagtcacaagttcttgccctgttgcttcagaccaaattccctctacagcctgaagcaagctggccttgcccacagagaactgcctttctccatatgcagccacctccctcagggcaattccttgccttggatcctcactgcacctgcttcaccagcatcttggctcttcatctccctacccccagagaagctttccatttaggagctcgcaacgcccttcctaggccatgccagtgttttaatttgctggagactagcccacaggaacaatagtggctgtgtgtagac

SEQ ID NO: 12783 - DNA, 420 bp, Homo sapiens
ccgggcaggtacccaatcctgtccttgccggtccctcctcgccgggtgggaatcttcgtggattatgaggcccatgacatttctttctacaatgtgactgactatggctcccacatcttcactttccccgctatcccttcctgggcgcctctgccctattttagtccttgctacagcattggaaccaacaacactgctcctctggccatctgctccctggatggggaggactaagaaagctaccaccctaaccacagaggcttggaattgggcctggcccccatggggcttggaggaccgagccactgacaggtatcccctgaaactgagctgagcccagtatccaaggattcctctgtctgatcctttggtctttgctaccaggctgaagtctgtcatgaaaccacttattttaaaaag

SEQ ID NO: 12784 - DNA, 310 bp, Homo sapiens
agtcttcttcatcaacgaggaggccaagagcaccacctggctgcaccccgtcaccggcgaggcggtggtcaccggacaccggcggcagagcacagatttgcctactggctgggaagaagcatatacttttgaaagtgcaagatactatattaacccatattgaaaggaaagtgacctgcaaacattcagtcacaggacaaccatcacaggacaattgtatttttgtagtgaatgaacagactgttgcaaccatgacatctgaaaaaaaaaaaaaaaaaaagtccttgggccggtctgaaacttatgggat

SEQ ID NO: 12785 - DNA, 410 bp, Homo sapiens
ccgggcaggtactttccgccgccgccacagcggccccctctctgaagaatgcagccttcctaggtccaggggtattgcaggcaacaaggacctttcatacagggcagccacaccttgtccctgtacagtggacagcttagcatgttgacaactgagaataaaatgctcagttctgaactggacaatgtaagacacaacgacgaaacactggaaatggaaattcaattacatcattgtagactggctactgctctacatgattgtgaccaaagtcagagagctgaaagagacttctttccagagaacaagatatgaacaggtttatttacagaagacaatgaattctcatttgtctaacctaaaagattacagaatctttctcaacaagtctaatgtagacagtaaaatca

SEQ ID NO: 12786 - DNA, 358 bp, Homo sapiens
ccgggcaggtaccctaaagctatgtaacttatataaatagtttcaaaatgaagcaaaatatgatagaataaatgaagaaatatataaatctttaaacacagtcaaaacttttaatgctcctctctcaatatttgatagggcaaataaacaaaatttcataaggatatgaaacatctgaataacataattagtgaatcaaaagaaactgacatttatagaacaaagtactttttttttttttttttttttttttttttttctggctcttgggggttccttgagggctttgatgatcagggcagaggcagaaggcaccacctcaatctgggcctgtctgttctgaatggtcagtttcact

SEQ ID NO: 12787 - DNA, 433 bp, Homo sapiens
ccgggcaggtacctgtttagccacgatggccgccaggcggcccaggagatggcctcgaccatcaagcaccaggacctgcacctccgccatcttcggcagccgcttggaaaagccccgcgtacagaatggattttggaagagggagtcaccactggaccttcaagggagccacgtgcagacatctacaaccttcgatctcctgacgagtttattgttggccaaaaccaggctttgattgaaccaggatgaatgcgggtgttggaagtagaatatatatatacatataaaattggttgggagccacgtgtacttttcattttggctcaccgtggattttctcataggaagtttggtcagagtgaattgaatattgtaagtcagccactgggacccgaggatttctgggaccccgcagttgggaggaggaagtagt

SEQ ID NO: 12788 - DNA, 424 bp, Homo sapiens
ccgggcaggtacctgtttagccacgatggccgccaggcggcccaggagatggcctcgaccatcaagcaccaggacctgcacctccgccatcttcggcagccgcttggaaaagccccgcgtacagaatggattttggaagagggagtcaccactggacctccaaggaagccacgtgcagacatctacaaccttcgatctcctgacgagtttattgttggccaaaaccaggctttgattgaaccaggatgaatgcgggtgttggaagtagaatatatatatacatataaaattggttgggagccacgtgtacttttcattttggctcaccgtggattttctcataggaagtttggtcagagtgaattgaatattgtaagtcagccactgggacccgaggatttctgggaccccgcagttgggaggg

SEQ ID NO: 12789 - DNA, 426 bp, Homo sapiens
ccgggcaggtacgcggggaagaaggacatttctggtagctggtcgaggttggtgacgttgaggatctaaattaagacagtattataggaatggggaagaggaggcaaagtcaagaacaatgtgaactatcaaaccagcaggacctattactataaatgagagggaggaaggaccaaggatgcttcttatgtagctgccttctattcctgggtgactggttgcacagtctccttagagaatccaggaacagagagaatatataccttccactggaagaatctcaaacagcgctgcttactcaggatcagtggcaccagccaactcagctttgggacaaacccagccaagtgaccaggacactttagtgcaaagagctgagcacattccagcagggaaacgaactccgatgtgcgcccattgtaacca

SEQ ID NO: 12790 - DNA, 119 bp, Homo sapiens; identical to SEQ ID NO: 12651

SEQ ID NO: 12791 - DNA, 450 bp, Homo sapiens
aggtacaaaagttaagctccatttaccactcacttgacagtgtcctttaaatctgaacttgctcttgctcatgcggagcttggctaagagaaaccagatcatattgcaagctgtaggtgggtgggtgagtgtgtcccctcccacactgctctctggtgggtttgggcagtccctggctctagtctctgctgcagattctcaggaccaaaatgtgggtgatttgtctgggtccaggcaggagacagaaatcacacaagctcttttattagagataatataaagaatgattaaccaggtgacagtaaagggcaggaagggaatacaaaggtatccatggaggtagcaccacaggaagcaggcatcacacttgaggcttgggaacaaggggaaaatgctggactcattgaaagggggttgcttggaaaagggacatggggctgaatcttagac

SEQ ID NO: 12792 - DNA, 454 bp, Homo sapiens
ccgggcaggtaccggggaaaaataatttccattttttctttttcaccgggaccaattgtaaatgctatgcggtaagaggagttacctgtggaaaggtggttaagagattaggtaaagaaaaggaaaggacaccaaaataaagtgctgcggaagaatttttggccagctgtgagacgacgagtgcgtgaagtgaaggcgattgagaggggctgagggaattgtcctctgtggaagggactttcttttggccctaggccccttcctgcccctgtcgtcagcagagagatggaaaacttgatgactagctccaccctaccgcccctttttgcagatgaagacggttccaaggagagtaatgatctggctaccactgggttaaatcacccagaagttccatacagtagtggcgccacatcattcaccaacaatccaaaatttgtggaggatctctttt

SEQ ID NO: 12793 - DNA, 249 bp, Homo sapiens; identical to SEQ ID NO: 12672

SEQ ID NO: 12794 - DNA, 425 bp, Homo sapiens
aggtacttaagctcatcggttgtgaaaacaaatctgatgaggtatcgaaggagccgtctcccacctttctttgaagaatttacagcctcatcccactgtttgctcgttatgtagacaggatagttgttcaacagctgcttgcttccctctgtcggctggtcagctggctgtggtatcaggagttggttgtggtgctgcagaaccatcttcaagtaatctaaaacggtctggcagggcactgggatgctctctaatttccttctgagctcttcattttcttgttgcagtgaaataacctcctgctccagctcttggcatcgaggacaatagccttcctcgtcctcctcctcctcttcttctggcagtgtagatgaagatgggtggccatgggattcggacgttgctggggaagtccagccacctat

SEQ ID NO: 12795 - DNA, 412 bp, Homo sapiens
aggtactccttcttccgccgccgactgtcctgagctgactgcttgttacggattttcctcctgaccttcttgaggaccctctcctctgccttggtgaggggcaggtgagagggcagggaaaccccttcctgccccagcagacgcttctcctcatcggtcaggaacagggtttgacagggcagctgggggtaggggcaggagaagatgcaataggagtgaggagggggtcatcccatttgcagcacccaggctactccccccacatgccttctggagagtgtttcctcactgggagacaactttaatctaaaggtggggtgaggggcagagactttaattcagacaggctctagatcaagccaaagggacatcctgaggccaataagggagagaggagggtattgtcatatct

SEQ ID NO: 12796 - DNA, 410 bp, Homo sapiens
aggtaccatgttcaggaaaccaaggacgatattgctctactgttggaaacagagtaatcaaattttctgtgctagccttaattcctgccctctttaagaggagcttaataaaatgtaaatatgcagaatgtttacttttggattgtcccatggtgtccctggaatgctccgagtgcacaagcttaccgcaaggccgaccacacgttctcgggagttcctggacagaccgttcttcacaacgaccacgctcaggtgtaacttcacctgggttcaaggagaccgtgttgggtgccaaagatgtaggggaacctgcctgatacaccacccgcaggctctccccttcccggtggagacgagggaatgagaaaagaaataaagacaaagacacaaagtttaagagttaacaaaag

SEQ ID NO: 12797 - DNA, 407 bp, Homo sapiens
ccggccaggtccccggaacccatagtaggcctaaaagcagccaccaattaagaaagcgttcaagctcaacacccactacctaaaaaatcccaaacatataactgagcccctccaccccatttgctcacactatcctgtcatctttgtattcttgctgcagttccctttgggttccatgttttccttgttcccttccatgcctagctggattgtagagttaagtttatgaatatgaaataaaatctaaataggccgggcgcggtggctcacgcctgtaatcccagcactttgggaggccgacgcaggcggatcacgaggtcaggagatcgagaccatcctggctaacacggtgaaaccccatctctactaaaaaaaaaaaaaaaaaaaaaaaaaaagtacgcggggct

SEQ ID NO: 12798 - DNA, 469 bp, Homo sapiens
tggaaggggaccgcgtatacgactactatagggcaattgagctccccgcggtggccggccgaggtccaaagcaaagcaaagtgtggtccctgaatctgtctcacccccatgatctttacacacagagaccttcccaggagctgtgacttgaacttcacaatctgcagggtccacccaggagccgtgtcctcctcacaggcaattggatcccctcctctctcaacctgtgtgggaagattttgtgagcagcctcggcgcaccggatgtcgtctttgccatccccagtgggcgctggggccgcgtctggagagacggtggctctccccgcgtactttttttttttttttttttgactgaatgcgaggatttaataccaatgcgggcacaagaattttcttagaaaaggtcagtggggagggatcatggacaccttggtttcaacaactccaactccttcatacaccatctt

SEQ ID NO: 12799 - DNA, 411 bp, Homo sapiens
aggtacaataaagattttagaattcatcaatttgcacacttatgatagatgcactttcctgtatgtatatttcaataaaatcttttaaaaagtaaaatgacaaaaagacactattaacaaaaatgacatattatattaactgttatactaaggaaaatataaaaatgagttctataacaggggctctgcaggtcatgtggtcatgccaaggaccatatgtgctcaagattctcatgacattttggaaggaggttgggctttctttatctttcctttcttctctcccttcccttcccctcccttcccttccctatttttaaacctaggtttggtattttcctggggtgatggtgactttggaaaattgtgtccggggcggaagtgaaaggcttgcaaacattttcccataaa

SEQ ID NO: 12800 - DNA, 502 bp, Homo sapiens
aggtacaaatctgggaactaaatattaaaaatgagtgtggctggatatatggagaatgttgggcccagaaggaaccgtagagatcagatattacaacagctttgttttgagggttagaaatatgaaatgatttggttatgaacgcacagttttatgcaccagggccagaaatcctgaaccctctgcccccgtggttattctcctcacccaagctttggctgcactcattgtcattcacagatatttccatttttgttttgattgacatagtctttgtggaaggcccatcaaagaattttttctccgtcctgatttttccctcttcatatgggtaattgcctcaacattttggtgacctttcaatttttcaaatacttggtaaatccccggtgccaaaaataaaatattcccaacacaccagggaatcctggtattttcccttgcacccattcctttttaagggaaaccaccattcacatttcattttttccttaaatggtcc

SEQ ID NO: 12801 - DNA, 464 bp, Homo sapiens
ggccactgtaaccaagaaagtggctaagagcccaaagaaggccaaggttgcgaagcccaagaaagctgccaaaagtgctgctaaggctgtgaagcccaaggccgctaagcccaaggttgtcaagcctaaaaaggcggcgcccaagaagaaataggcgaaacgcctacttctaaaacccaaaaggctcttttcagagccaccactgattctcaataaaagagctggataaatttctgtccaaaaaaaaaaaaataaaaaaaaatataagttaccttcgggccgtctcttagaactaggtggtattccccccggtgcttgcaggaaaattccgattatcaaggctttattcgaatacccgtcgaaccttccgagggggggggcccccggataccccaagctttttggtttccctttaaattgaggggttataaattggcgccgctttgggcggtaaaatcaatggg

SEQ ID NO: 12802 - DNA, 199 bp, Homo sapiens; identical to SEQ ID NO: 3633

SEQ ID NO: 12803 - DNA, 222 bp, Homo sapiens; identical to SEQ ID NO: 12662

SEQ ID NO: 12804 - DNA, 199 bp, Homo sapiens; identical to SEQ ID NO: 3633

SEQ ID NO: 12805 - DNA, 498 bp, Homo sapiens
aggtactttttggcagaaagttgacccaagagtttactgaagtcgctggtgaaaactccatcagcatgcctggcatttctggatacatcataatagggtgtgtcattttcagctaatgcattttgcaacatgtcaatgtcttcttttaatgaaacttgatcaggttcatttgctccctcaaagggtattctgtcacccaacctgagagcagaaggtgccctgtaaagaggccatgccgaagtctgtgagaagagcacactgagaagagtcaggagcacaaggagctgggccttatttctggtgtccatttctgtgcctctcgcccagtcgtgctcccccggagctgactgttctggtttgttttgaagctgtcttaggtgctgaagtcctgggagtaagagaaaggctccaccagttctctgcccttagcaatggctaagggttggctgttactgcctgctggtgcttctcactctaccctccccgcgtacctgcccg

SEQ ID NO: 12806 - DNA, 631 bp, Homo sapiens
  misc_feature 585: n = A,T,C or G
aggtacgcggggtcctcactcaccccaccctccccaattccagccctttgccctctcggtcagggttggccaggcccagtcacaggggcagtgtcaccctggaaaatacagtgccctgccttcttaggggcatcagccctgaacggttgagagcgtggagccctccaggcctttgctctcccctctaggcacacgcgcacttccacctctgccccatcccaactgcaccagcactgcctcccccagggatcctctcacatcccacactggtctctgcaccacccctatggttcacaccgcaccctgcactcacccacagcagctccatccactgggaaaactggggtttgcatcactccactgcacagtgttagtgggacctgggggcaagtcccttgacttctctgagcctcagtttccttatgtgaaagttgctggaaccaaaatggagtcacttatgtcaaactctaataaaatggagtcggggggccacatagaagccctcacacacacatgcccgtaacaggatttatcacaagacacgcctgcatgtaaaccagacacagggcgtatggaaagcacgtnctcaagactgtagtattccagatgagctgcagatgcttacctacca

SEQ ID NO: 12807 - DNA, 423 bp, Homo sapiens
ccgggcaggcaccatgttcaggaaaccaaggacgatattgctctactgttggaaacagagtaatcaaattttctgtgctagccttaattcctgccctctttaagaggagcttaataaatgtaaatatgcagaatgtttacttttggattgtcccatggtgtccctggaatgctccgagtgcacaagcttaccgcaaggccgaccacacgttctcgggagttcctggacagaccgttcttcacaacgaccacgctcaggtgtaacttcacctgggttcaaggagaccgtgttgggtgccaaagatgtaggggaacctgcctgatacaccacccgcaggctctccccttcccggtggagacgagggaatgagaaaagaaataaagacaaagacacaaagtttaagagttaacaaaagtgggtcca

SEQ ID NO: 12808 - DNA, 243 bp, Homo sapiens
ataatttaataacatcgtccttccatttggccgcgactgctctggaaaattggttcagtagtaaacagaattctagcaggtggaacaagaacaggcgaggcatcctgggcctggtctctcctggaggtctgggtgttgcagcctttcaggactgcggctgctgtggcctacacacctgggcctgtgtgcctgtcccgggctttaggctgctttccctacccggctcaaccaccccgcgtacct

SEQ ID NO: 12809 - DNA, 419 bp, Homo sapiens
aggtacctggtaaagaatcagtgaccttttaccttaacatcaaaatgtagtttaaccagttaatgtatttttcagttttctttccttatgtcatctgtgaacatcttgagctgtgagctattaagtgcatgtttccctcaaggccctctggtccattctggactaatgttgaaagatgggatggattggcatggaactgttggggtgatcagacccaacaccgggctgtgggggctaagaagtccagtggagtcaaaggaatgagaaaagacaagttaagaatgcataaggtgggtccagggggccaacgctagtatggaggctgcaatagacctgagctctggaagcccacactattagtgatcaaacaaagcaccaggtggtgaggatgtggggtttgaaaggaagcagtgcatcag

SEQ ID NO: 12810 - DNA, 365 bp, Homo sapiens
ccgggcaggtacgcgggataccagcatcaccacaaacatgaataatgaattgagctgtgacattactaggcaataggaatgtttcagctccattataatcttgtgggatcaccgttgtatatgcagtcctgtgttgactgaaacgttatgtgactgcagttgggtaatggtttcttagccttatgtcagctctatgtatccaattagttcagtcagttgcctcccctcttcagtggaagattttgtttttagttcagtttaggaaggaagatttcctttcaggaggccaggtgtggtggctcacacctgtaatcaatcacagcactttgggaggctgaggcaggaagactgcttgagcccaggag

SEQ ID NO: 12811 - DNA, 312 bp, Homo sapiens
aggtactcagagtgaggattttctgcaacctacgtttgtccctccagcatctgctctggctccatggcggaccctgcaagtcacagtccccggataccagtccgcgcccaagccgttcgttcttaagagccctgcaccgcgccaccagctcccagcacaaacagctccggccgcccgggcaggtacgcgggcacccccaagtagtgcaacaaccggggctgctgctttgactccaggatccctggagtgccttggtgtttcaagcccctgcaggaagcagaatgcaccttctgaggcacctccagctgcccc

SEQ ID NO: 12812 - DNA, 349 bp, Homo sapiens
aggtacagtgtgcgaggggaacagtgtgaaaacctggctaaagggtttgggtggagacctttgtgagagtagaataggattgggattataggtgtcaaagccagtgagcatctcacccctccgttcccttctctacgccaccctgtccctctccgaaccctgcctggagacactggatcatcatttctgggaccatgtcattctacttttgcttgtgttccttccagtctgccatgcacggactgatcatgggcggcctggaagtgatctcaatcacagacgacaccccaatcccacacaacggctgccgccccaagaaggctcggaagctgtgatgggaaggaggcct

SEQ ID NO: 12813 - DNA, 348 bp, Homo sapiens
ccgggcaggtacgatttatattcagctgtatgctgggcaggtccaacttggcatttcttggctgtatctctgaaggaaagtcatcttaatctctatgagcctccatttcctcagctgtaaaatgggaagatcttcctcacactgctgtgaggaagcggattttctgacgcatatgaagagtgagaactgtctacatctaagtcttctttgagaacaataccagctgagcggctatttacattccagcttcttttgagaatctctgaagatgattaagtcattgtcagctggcccagaaccatatcctgctccacaagcctcgtccttggcaagaagttgcacctgccc

SEQ ID NO: 12814 - DNA, 362 bp, Homo sapiens
ccgggcaggtaccttactgagaaattcatcagctttttcctaccaaaggcagacatctaaccgttccgaaccctcaggggagatcaacatagacagcagtggtgaaacagttggatctggagaaagatgtgtcatggcaatgctgagaaggaggatcagggatgagaagaccaacgttaggaagtctgcactgcaggtattagtgagtattttgaaacactgtgatgtctcaggcatgaaggaagacctgtggattctgcaggaccagtgtcgggaccctgcagtgtctgtccggaagcaggcccttcagtctcttactgaattccttatgggttcaacctagatgccgggccgatccagaa

SEQ ID NO: 12815 - DNA, 413 bp, Homo sapiens
aggtactattttctaacaagaagccttcaggggaaataatggatcctagttatgtcaaagaaaacaatgagacaaaatggcaacttcacagtcttcaagtaaatagaatccctgatcccgcgtacgcggggctcttaccgccatcttggctcctgtgggaggcctgctgggaacgggaccttttaaaaggaaactatgtcctggaagggctgtggtctcaaggcgcatttttttgctggctattaagtcggggggcttccggaaaccataagggaagcggcacaggctctttcttaaaatttgataggtgttttaccgctcgaacattgaaacagaaatttcttattttggggccaagaaaatggcccctttatgttatattagaaggcaaaggaaacaaccccagggggcct

SEQ ID NO: 12816 - DNA, 362 bp, Homo sapiens
aggtactttttggcagaaagttgacccaagagtttactgaagtcactggtgaaaactccatcagcatgcctggcatttctggatacatcataatagggtgtgtcattttcagctaatgcattttgcaacatgtcaatgtcttcttttaatgaaacttgatcaggttcatttgctccctcaaagggtattctgtcacccaacctgagagcagaaggtgccctgtaaagaggccatgccgaagtctgtgagaagagcacactgagaagagtcaggagcacaaggagctgggccttatttctggtgtccatttctgtgcctctcgcccagttcgtgctcccccggagctgactgttctggtttgt

SEQ ID NO: 12817 - DNA, 380 bp, Homo sapiens
ccgggcaggtacccacggcgaggacgaggatgagagcttgtgccgagatgtgccccagagcctcccccacttccttgtggcccactgtggagacccggcctcctggatctactcagaccaaaaatgtgatggcactaacaactgcggggactgttcagatgaactgagcccagtaactgtgtgcccaccctgcggccctgggtggtggcgctgtccttcaaccttcttcaagtactttcttatacttcttattttattttttttttatataccatttttaatattttgaaatattttaccttaatggaaaccactttctggggttcgaggggtaataacacgggtttttctaaatggccttcttcacggtgtgttttaaa

SEQ ID NO: 12818 - DNA, 242 bp, Homo sapiens; identical to SEQ ID NO: 3649

SEQ ID NO: 12819 - DNA, 358 bp, Homo sapiens
  misc_feature 358: n = A,T,C or G
ccgggcaggtacgttgaaatattaggggcaggttcccccaatatctggcgcccaacgtggttttctttttcctaagtgcatgtgggaacccgattccctttggtaggtgcggagaaatgttcatcggtccagtccacagaaatgcttgttcggctccccgacgattggtgagttgtctgtgtattgtccggggtaactatgggtcacgcagagtctaaacattatgcttatctctgctatattaaattcctgttaaaatgggggagttcgggttcccatggaaaatatggtcaccctattcagggcagtggaagaacactgtccttggtttcctgaaaagggaacgttagatgtggan

SEQ ID NO: 12820 - DNA, 357 bp, Homo sapiens
aggtacttttttttttttttttttttcctctcgctcggaatacagccactgaaggaggtaaaagatatctacaagtagaactttgatattattacttcttctactgaacttaaaccaattactgtttgctttggtgtctgttgtgatttctcttatttagttggattttgtagttactttaaaagttaacgaaatttcacatttcatcaagtccagaggccagagacacccaaatatgcacagacaggaatcagctgcaattgtccaagccagagctgattaggcctcaactggaatagtcccaccatgtaataaatcttcctgagtattgtgtataaggtcaaatatttccagctt

SEQ ID NO: 12821 - DNA, 355 bp, Homo sapiens
aggtactttttggcagaaagttgacccaagagtttactgaagtcactggtgaaaactccatcagcatgcctggcatttctggatacatcataatagggtgtgtcattttcagctaatgcattttgcaacatgtcaatgtcttcttttaatgaaacttgatcaggttcatttgctccctcaaagggtattctgtcacccaacctgagagcagaaggtgccctgtaaagaggccatgccgaagtctgtgagaagagcacactgagaagagtcaggagcacaaggagctgggccttatttctggtgtccatttctgtgcctctcgcccagtcgtgctcccccggagctgactgttctg

SEQ ID NO: 12822 - DNA, 356 bp, Homo sapiens; identical to SEQ ID NO: 3653

SEQ ID NO: 12823 - DNA, 228 bp, Homo sapiens
ataattaataacatcgtccttccatttggccgcgactgctctggaaaattggttcagtagtaaacagaattctagcaggtggaacaagaacaggcgaggcatcctgggcctggtctctcctggaggtctgggtgttgcagcctttcaggactgcggctgctgtggcctacacacctgggcctgtgtgcctgtcccgggctttaggctgctttccctccccgcgtacct

SEQ ID NO: 12824 - DNA, 503 bp, Homo sapiens
  misc_feature 319, 482: n = A,T,C or G
ccgggcaggtacgcggggagggtagagtgagaagcaccagcaggcagtaacagccaacccttagccattgctaagggcagagaactggtggagcctttctcttactcccaggacttcagcacctaagacagctccaaaacaaaccagaacagtcagctccgggggagcacgactgggcgagaggcacagaaatggacaccagaaataaggcccagctccttgtgctcctgactcttctcagtgtgctcttctcacagacttcggcatggcctctttacagggcaccttctgctctcaggttgggtgacagaataccctntgagggagcaaatgaacctgatcaagtttcattaaaagaagacattgacatgttgcaaaatgcattagctgaaaatgacacaccctattatgatgtatccagaaatgccaggcatgctgatggagttttcaccagtgacttcagtaaactctggggtcaactntctgccaaaaagtaccctcgg

SEQ ID NO: 12825 - DNA, 497 bp, Homo sapiens
aggtactttttggcagaaagttgacccaagagtttactgaagtcactggtgaaaactccatcagcatgcctggcatttctggatacatcataatagggtgtgtcattttcagctaatgcatttgcaacatgtcaatgtcttcttttaatgaaacttgatcaggttcatttgctccctcaaagggtattctgtcacccaacctgagagcagaaggtgccctgtaaagaggccatgccgaagtctgtgagaagagcacactgagaagagtcaggagcacaaggagctgggccttatttctggtgtccatttctgtgcctctcgcccagtcgtgctcccccggagctgactgttctggtttgttttggagctgtcttatgtgctgaagtcctgggagtaagagaaaggctccaccagttctctgcccttagcaatggctaagggttggctgttactgcctgctggtgcttctcactctaccctccccgcgtacctgcccc

SEQ ID NO: 12826 - DNA, 756 bp, Homo sapiens
ttggtgttgtctccacagcggaggccgtcgcagaacccagctcccacagctacgatgttcttaagcgcaccacagagttcaacagtgtctgcatcatcaaccacggtaattcgaaaatttggagtctgcagaagttctttgaagagaaggccgttctccattactttgctgccgatggtggtctcacagaacttctctgcagccacctcattggcaatgttggctcccatcagcacactgatgtcaatacccatcttctcacggatgatgtcagaaatgagcttcagcccctcggggccctcgtctatgcccttgatgagggtgattcccagcgctttcttgggcactctcccagtgatctcatcacagattctgtgaatgaactggtggggaatgacaaacaccagcaggtctgcatcctgcacagcctcgctaagatttgacatggcaaccacattttctggcagcttgtgtccaggaagatattttacattttcatggccattatttatgatgtctgtcagttttctgccattcactgtttcttcaaagacccacattttgactggggaggcaaatttctggaatttcttgacattattaccaattatttttgcaacaactgaaccccagtttcccgagcccacgatgccaacttttaagggccccggttgcttgcccggccgaatgtagcccgcctggacgtgccttcctggccgggtgccttcccgggttcttagccggtcttaacttagg

SEQ ID NO: 12827 - DNA, 502 bp, Homo sapiens
  misc_feature 10: n = A,T,C or G
atgtactttntggcagaaagttgacccaagagtttactgaagtcactggtgaaaactccatcagcatgcctggcatttctggatacatcataatagggtgtgtcattttcagctaatgcatttgcaacatgtcaatgtcttcttttaatgaaacttgatcaggttcatttgctccctcaaagggtattctgtcacccaacctgagagcagaaggtgccccgtaaagaggccatgccgaagtctgtgagaagagcacactgagaagagtcaggagcacaaggagctgggccttatttctggtgtccatttctgtgcctctcgcccagtcgtgctcccccggagctgactgttctggtttgttttggagcttgcttatgtgctgaagccctggagagtaagagaaaggctccaccagttctcttggccttaacaatggctaaaggttggctgttactgactgccggggctttttaatctacccttccgggttccttgaccgggc

SEQ ID NO: 12828 - DNA, 768 bp, Homo sapiens
  misc_feature 722: n = A,T,C or G
aggtacatgaagttcacattgtcaaagattatcactccttcatggggccaggctggtggtgggcgtttctgatattcccaaggtgcttctttttcaaggtctgtgtattcaatgaccctttctactgagatcatcatattctcaacttcagcactttgtcgaacacaccactgaaacatccccatgagcgtgagggcataggacagtgccaaaccaacctgcccggcatccagagtttttgccagaatcagggacccaaaggcaacgatgatgacaaacatggcacagatggcatccagacggacggcgaaccagcgggacgttgtcaaaaacaagaaccaagcctctgaatgtaaatcctggtgtgcatcaaacagttcctgacacctctcttctgctttgtatgcccggatggtccagagcccctggagagaagatgacaagtgggaaaacactggactccgagttgtagattccaagcgcttcacatctcttgacgtttccaaaaaatatcgccgaagaaaaatgaaaatgattccaaggggaaccaagggtattgcgatccaaagaatcacggccacagccacagagaccacaccaaccacttgttagcatgtctggatgaaaatctaaaacgtcagcggcagcaaatcatccaagtgtccaatgtctttgggagaaacgattaaaattctttctattggaattctatcaaagaatantaccgagccttcagaattgactcaaacttttggtgggcaaagttgg

SEQ ID NO: 12829 - DNA, 356 bp, Homo sapiens
aggtacgcgggggcactcggcctgagaaactcggcaagcgcgcagtgtcgactccccggtctatgccaggcgcatctcagctaatccaaaagtaaatgagaaacttagaaaaggattgccaattccaaatcaacatatttagagaaaattggaaaaggagaagcttactacagctttatttgaggactttttaaagaacgctgggttctatctgtgagctgcaaatcttggagcaaaaaccagagacattgccagagcaaacaagaacagaaatacaaatggagaactggtcaaaagacataacccacagttatcttgaacaagaaactacggggataaataaaagtacctgcccg

SEQ ID NO: 12830 - DNA, 576 bp, Homo sapiens
ccgggcaggtacgcggggatgctgaccactcaccatcatctcaaggcagcagtgaggccccagcgtctcagccacccccccaggtcagaggttctgtcatgccctctgtgattagagcacatgccatcattaccttaggtaagctgtgcttacagcacgaggatctggcaaagaagagcatcccagccctggtgcgagagctcgaggtgtgtgaggacgtggctgtccgcaacaacgtcatcattgtaatgtgcgatctctgcattcgctacaccatcatggtggacaagtatattcccaacatctccatgtgtctgaaggattccgacccattcatccggaagcagacactcatcttgcttaccaatctcttgcaggaggaatttgtgaaatggaagggctccctgttcttccgatttgtcagcactctgatcgattcacacccagacattgccagcttcggggagttttgcctggctcacctgttactgaagaggaaccctgtcatgttctttcaacacttcattgaatgtatttctcactttaaataactatgagaagcatgaaaagtacctt

SEQ ID NO: 12831 - DNA, 229 bp, Homo sapiens; identical to SEQ ID NO: 12675

SEQ ID NO: 12832 - DNA, 467 bp, Homo sapiens
aaactgacacctcagggacaaagagatctggacagaatcgccggacaggtggcagctgccaacaagaagcattagaacaaaccatgctgggttaataaattgcctcattcgtaagaaaaaaaaaaaaaaaaaaaaagaaaaaaaagtactttttttttttttttttttttttttttgggaaatcttgcacaaatggcattttattaaagaaaatctaatttacaaagctttgtaaattttaagaaaaacattcatagatcataaacaaaaatttcaatatgcaatattcaaatttacaagaaaataagcacaaacttttagacagggcagttattgctgcactcctttaattccttatccagagcccaaaaaatgtagacaaaccctaaaaatgtagcagaagcatttccgaacactggtgtccagaatctaattttggcagaaaagtttccactagattatagagg

SEQ ID NO: 12833 - DNA, 466 bp, Homo sapiens
ccgggcaggtacattttagaaagtgaaatgctgtggacatttaaggtggagccactgtgagagtctagggggatagatggtagtcgtctcggaatgaaacgaatacacccctctcagagccctttccaaggatcccctccttctttcagctccttccctccacctcaatacacactcctgtcccaggaacctaacctcatctagaaataccagggccagcatgccttacacctagaggtttggttggcttcagagaaacttctggaggctaaaagcagccaagaagaatcagccactacatgctgggcctggatgaacagagcagtgagctgtgatggggctggggctggggcccaggaggagcaggcaggagagtttgtatgcaccgtgattcaaatattataacaaaaatattcgatcatgtgttaggcactttacagttcccaaagcactttcccatccatgg

SEQ ID NO: 12834 - DNA, 472 bp, Homo sapiens
ccgggcaggtacgcgggggccgttactccgaggagataccagtcggtagaggagaagtcgaggttagagggaactgggaggcactttgctgtctgcaatcgaagttgagaggcccagtatttaggcgacagtgaatttattactctgaagagggttctgcacatatttccaaattatattggtggtcatcagaagtaggtgataggaagaaatacttctcaagggtgcaaaaatgcagagtaataaaacttttaacttggagaagcaaaaccatactccaagaaagcatcatcaacatcaccaccagcagcagcaccaccagcagcaacagcagcagccgccaccaccgccaatacctgcaaatgggcaacaggccagcagccaaaatgaaggcttgactattgacctgaagaattttagaaaaccaggagagaagacctttacccaacgaagccgtcttttttgtgggaaa

SEQ ID NO: 12835 - DNA, 470 bp, Homo sapiens
ccgggcaggtactagtcagtatgctgtagtattaatcagtaggtcaagttcagtgaagtaaaggagaattgaattcttgaagttcacatttaggcaaaaatttggcgttttaggaggtgagtataagacatgatctttatagaaaacgctgatgataaaaacagcgctctctgttaggtgcctttatgcttgactccattgtcatcttttcttaagaaactaagctcaggactgggtgcaatggctcatgtctgtaatcccagcactttgggaggctgaggctataggatcagttgagctcaggagttcaagatcagcctgggcaacatagctaggcctcgtctctactaaaaaacgaacaaacaaaaaacaaaaaaaaacccccaaaaaacccaacaaaccacttggcttgggggtgcctgcttttgggccccctggttaaaaactttaaggggagggtaggttggact

SEQ ID NO: 12836 - DNA, 463 bp, Homo sapiens
  misc_feature 361: n = A,T,C or G
aggtactatttttattttacagatgaagaactgtggattttgtttctaagaaaatttccaggctcacagaactaagcctaatttctttttattttttagcaaatacagtttttataagaatttgaattctatgaaaataaatggattactcctaaatctctgatgcctcagtgaacactttttccttattaacaaaattctcacttttggctttggattggctttgcaggagtgcagattgatcatagcttttttcatgtcctaagagttgtcagagttttctcttgtagcatttttttctttactttttttttttactatctttaaatatatgactgtaagagtatgataaatatgctgntttctaatctctgctgttgtcacataaactaatatattttgagtaattttgaaatgatattaataatgtcattagattttctttggattttttgaaaaaata

SEQ ID NO: 12837 - DNA, 437 bp, Homo sapiens
ccgggcaggtactttttttttttttttttttttttttttttttagagatggggtcttgctagcttgctcgggctgaactaaagatatcctcctgcctcagcctcccaggtagttggaactatagtaggagtatctaccctgccctgctagaacttcaagttttgatgggcaaatccaccccagaggacaggacaaatgccagtattctggttaatagccccagatgagccagcttcccacccatctcccgtaagggggcagacacataagggaagccaccttggacctttcaggtcaacccatctaccagggtgatacctacagagtggagcttttggatacattgacaatggaaaacaaaatggccacgcttgagtccccaacctaaattccctgagtctacaaaatttattaaaactataatatttataaggttt

SEQ ID NO: 12838 - DNA, 466 bp, Homo sapiens
ccggcctgtgacctcaggccctgaggttccctctattctgggagaaaagccacacgactgatgggccacataagctctggtctttttctgccggaatgccaggaccctatgataagccgtgatcctattgcacagatgactgcataataccacaggaattcaaatggggaacatcaatatcatacagagggagcactctactgggaacttacactatactctgtatctactctattggggcgactgtgtgcgctgcttgcagtcccccatagggtacatacagtgaccatgtctgtactatagtaggataatttgagcttatgggggtgtgccatgtgcccatcttcctacgatggaaagtgatagggacaggatattaccctaggagcctgacttcagaggctgtggcctttacgaccaacatgcagggagagaagctgctgtttgagcacccactgtgagcagg

SEQ ID NO: 12839 - DNA, 475 bp, Homo sapiens
aggtactaagtcacacccagccagtcaataactgagaaatcaaaataaaataataatttcaaagaattacataaatacagggccttttgagatttttggcaattgtaaacaaaaacgaatggtttttacaattcagtgtaattctacgaatatttatttggcacccatgttaggcactgaggctacacagcagtgaaataggcctagttgttctcaactagagaacatagttggttaatgtagctgcactgaattgtagctgtttagaagataatataccctgaggctttttaaagtatactattactataagaagtaaaattattttatacttataaattttgttttggattattcaactgaatttggagtgttcagaattttcatggcggttgagacaaggaagaggtataatgctattttttttccttttctttttttttgagacggaatctcactctgttgcccagactgg

SEQ ID NO: 12840 - DNA, 464 bp, Homo sapiens
  misc_feature 412: n = A,T,C or G
aggtacaagtcataaacacagtgtgcagcagtgacgatccacaggggcgtgatgacagagcccccgcacaggtggtagccctggaactgaaggctggcctgccagggccactgcgagagcaaggacatgtttccacccacgatgcgtgagctgtagccccttctatgaccacaggctgtgcactgcaaggtaaccacgtggccagaggcacatccctccctcacatatactgagtggtgtaatgcagtcaccttgtcatctggcaagaggtgatcgatggacacaaactcctcccggaactgcccctccagcgagctcactctgaggttatctgaactcacatagcttgggaaacccagctgggcacatgcaacatttgcgtagtgacccttccagtcatcggagcacatgngtcttccacgaagcagctgtgaacacctggagcacggcattctgaccactca

SEQ ID NO: 12841 - DNA, 463 bp, Homo sapiens
ccgggcaggtacactagtatttaacctagacgtgaggaaggagtaggaaattttctggtgaatacagaagagcaaagaacagcaggtcagcaggaatgactaatgtttttctatgcatgtttaatggaatattcgtgtaggatattttgagtaggtaattggataatcagcatttgtaacttgcatcctagtagtctgactctcactaataagacttgtcaaagttccaagaatctgaaagtggatgataaatgtccatgtgtatcaccatccatgaccgaaagtcagcatccacagaacacagaattgggacagatgaacttaatagataaagatgaatatcggagttgttcctcttagggaatgatactctccatgagctgtgtgagtcacagctgccagaaaagaaagagcaaggagcgtatgaaggcagcacagcaaattcagtcctagagtgccctgc

SEQ ID NO: 12842 - DNA, 461 bp, Homo sapiens
aggtacttttttttttttttttttgttttttttttttttttttttgatttcctttctttttgatcgagctttacttgaaatttattaatccagtatttagcacatatttagcattaagcctcaaacgatacagcaatatgttacattctcttgtgaaaacagttgttgtagactgttaattttttttaaatgtaactccgacttgtgcctaataggatttgacctttaagaggtttcttttgctgtggatgggggggctttgcttgaacttccattctgtgccttgtagctggagaggctgggagtatggatgggcctgatgcccttggcaccttgattcagtgagacggaggaggcaggaaaaggaggggaggaggaaaatgacaaaggggggggtgcttggccattttgactctgcggggagaatgaaagagggggacctttacctggatgagggaggg

SEQ ID NO: 12843 - DNA, 237 bp, Homo sapiens
  misc_feature 22, 107, 108, 197, 198, 199, 200, 201, 202: n = A,T,C or G
ccgggcagggtacacttggggnaaaaagggggggggttaaaaccttaaattatttctttagaatgggattaccttcccgggacctttaaatttaaaagggttttttnncccccaaaagggggggtttttttcaaaaagggtttggccaatttttgaaaaatggaaattggggcctgggccccttttttatacccccnnnnnntttttttttttttttggggggggctttttggggga

SEQ ID NO: 12844 - DNA, 346 bp, Homo sapiens
aggtacggattgagaagttgcccttcagtatgtcgctgtcataggtgtaatcgatggcaggggagatgtgctgcgagaagatctgggccatcatggtgcggtaggccttcccatccacgttggtcagcgtgtggtgcagcacttcatgcagctctgactcctccatctggggtgggggcagcagctcactcttgagcagttctgtggctgtgggccgttttgctggatcgtggttcaacagccaggagatgactgatttctgctttgcatgctctccatcgtcaaagtcttctggaaacttaggcgaagtgggctaaaaaaatatattcaaatcagcaaggttttg

SEQ ID NO: 12845 - DNA, 457 bp, Homo sapiens
tgtagaacatgttattttgatgggggcccgggggcctccgtaccacatactatagggggtattgggagctccccgcgggggggggcgcccgggcaggtacacaaactattacttccagaagagaattgtttaggttgttctggcctaaattttatgcaatgaataaaaatttaaatctcttcatccatgatctactgcaggtcaggatccttggcatcagatggtagtgataaaaaccggatattggggtgctgccggtggagaaaaatggaagaagccagaggtcagcaagaaggggaggctagtatgaaaaagaaagaataaagagaaacctatgatggtgaaataaagaaaagttcggggggcccatgaaatacatcgttcgaagagatgagaaattttcaactgggatagcttgtgggagggcgaagacattcaaggcgggattggaagaaga

SEQ ID NO: 12846 - DNA, 354 bp, Homo sapiens
  misc_feature 89: n = A,T,C or G
ccgggcaggtacatcgagccctcagggtccctgactggttctccagccgccccataggctatgagcatccccgttccctacacaaaggnaccactgggatttattaaaggttatgccttgcaatgcagtactgttttcatatgtgtgatattatactactttctccaattttctcttcacatcctacccattctttttgctcaatcttttaagtcttttaatgaaatagttatacaaaaaagtgtatagagtcaggtgcggtggctcacacctgtaatctcagcactttgggaggccaaggtgggcggattgcttgagcccaggagtttaagacccagcctgggcaatgtggtg

SEQ ID NO: 12847 - DNA, 353 bp, Homo sapiens
aggtacatttgaaacataaccatggcagtaagttctgactgggagcaactgttcaacacaactctgtaggaatacaccgattttttataactgtgctgcctaatatggtagccacatgtggtttctgagcacttgaaatgtaggtagtccaaactgagatatgctagaaacatataatacacaccagacttcaaaggcttagtatgaaaaaaatgtatatgaaaaaatttcatatcgatgatcttgaatatagaggctggaaaaaattatttcatattgattatatactaaaagataacatttcagatacactgggttgagtaaactatattattaagtttaatttctcctgt

SEQ ID NO: 12848 - DNA, 339 bp, Homo sapiens; identical to SEQ ID NO: 3679

SEQ ID NO: 12849 - DNA, 406 bp, Homo sapiens
  misc_feature 13, 17, 21, 28, 32, 37, 47, 74, 78, 82, 84, 85, 97, 101,103, 105, 114, 115, 132, 138, 143, 155, 156, 157, 158, 160,161, 162, 163, 169, 170, 176, 178, 186, 187, 188, 189, 192,193, 195, 206, 207, 208, 249: n = A,T,C or G
ggttcgcggaacngacncacnatttgcnagtnggacncccccgcggnggcggccgagggacagatcgtggaacngaanattnanncggagcgcggcngganananggagaaggnngggccctttggaaccgnagagancaganaccacaacagcnnnngnnnngagggnnagaaanangaaaggannnnggnnangaacgcacagnnnaggtttttagggcctttttttctgaccctgtgtcccgcggntatctcctccccagcttggctgcctcatgtcatcacagtattccattttgtttgttgcatgtcttgcgaagccatcaagattttctcggctgttttcctctcattggtaatgctcactttgtgacttcatttcaaatctggaatcccgttcaaataa

SEQ ID NO: 12850 - DNA, 346 bp, Homo sapiens
ccgggcaggtactgatataatctaacaaatgaaggtgcacctttacttcctggaacatagacagccacctaagatacatagacataaatcatcacttaattttttgaagaataaaaactgagatggacatgtttttacaatcacaaaaaactaggaaaaggtttaaacacataatattacacataaacaaaaacagcaattaccttgtatggttggggtccaggtgataatacaaagtcattaattttttgcaaatgcaatttatttgcaattgtgtctaaaaaaagagtaaattaaatcagattgatgagagaacctaaaaggaacatgttaaactctgaataca

SEQ ID NO: 12851 - DNA, 518 bp, Homo sapiens
  misc_feature 62, 63, 64: n = A,T,C or G
ggcgtgatcgttcaattcgattgcaggcgatttagcttcccgccaaggcctgccgaggactnnntttttatttttttttttttgagacagagtctttctctctctcccaggctggatgtgcggtggtgcattctcagttcactgctcactgcaacctccgcctcctgggttcagactgttctcctgcctcagcctcctgagtagttggggttgcaggtgcatgccaccatgcctggctaagttttgtatttttagcagagacagggtttcaccatgttggccgggctggcctcgagctcctgaccttgggtgatccaccctcctaggtctctcaaagtgctggaattacggggtgagccactgcgcccggcccttagtagcatcttttaatggaggtagagttgagatttcagtgactaacaactaaaggtattaaaggtaggggtttatatgatacatttgcattttagaaaactgatctaagcttcaatgtgaagaacagattgaaatggaagggg

SEQ ID NO: 12852 - DNA, 483 bp, Homo sapiens
aggtacgcggggtctggcatcagcgttgcggctcgaggcaaagctggtcctgtgcctgctgtccattgccgctaaggcctgctgctgccattcaggcgtgtctccctctctctctctctttcatgccgctctctccaccccatcttgggacggccagctctaagaattcctgctacgacactgaattcaaccaggaggtgatgccacactcaatcagaaactatgctactgctgaagaggtatattgagccctgcctggttaacctccagtgaggttattagagaattgggagaggctcaaatcagcatcctgcacctggttatcaaaccattgtgaagtcttgattcctggatggccagaaaacttgtcattggtcaagagcaacattaagatctgcctgttactcatactgatgcttcctgcccagcaagttcatcagagggcgaggatgaattacggttgccatgaatgtccttgtgagg

SEQ ID NO: 12853 - DNA, 519 bp, Homo sapiens
  misc_feature 9, 19, 65, 108, 113, 114, 116, 118: n = A,T,C or G
ggcgcgtgnaatcgacccnatatgactccgggcgaaaatatcgccaacgtctcggcggccgaggnacgcttggctcgcaggcatgaaacctaggcgtaacagctaagncaagnngntnggacagattggtttcagggggcggccctggctcttggggcttccgaggcgatcgggcagtgtcagtcttcagctgttaagctgagaagatctgggaaggagtcagtcagagagccttgggccagagttccaggagctctgggagtggctgtcagaaatggccaatttctttcaaatgctgtatactggaaaaatccaaaggactcatcagatgaacacatttcaaagagccgctaccaattttttttcttaagcaaagcatcaagcctctgatttgccgctgataaattctctaaataagcacttggaacagaaaggagctctacccaactacccggaatgcaggcgggcctgggactatgtgactaccaccctctagtgtgggttttgaaaataaacaca

SEQ ID NO: 12854 - DNA, 460 bp, Homo sapiens
ccgggcaggtacctataaatgaagttgttttctggccgggcgcagtggctcacgcctgtaatcccagcacttcgggaggccaaggtggagggatcacttgagtccaggagtttgagaccagcctgggcaacatactgagactccgtctctccaaaaaaaataacatactaaattaccttaaaagaaattgctttttaagcagctttcatatagacctccttatctcagctatcacctccctcccacccccatcaccatcttttccagaggttgcctgatgctgataattcctgagcccttttgaagtattctgtagagtaagttccactgattcttggattttcttactaccagctttagattctgctttctcagatctgataagctcggttaccacttactgatctggctttttaatcttccaaaattaattttaatgctgctggattcctatattggt

SEQ ID NO: 12855 - DNA, 455 bp, Homo sapiens
aggtactgctgaaacagaaattatgtgtttgggagaaccgagctaaggaaacatttcaaaaccaatgtatgttgatcccacctgagctgctttgatatatgacagcctctcataattactggtgtcactattgttgtaaatgaagaatagttaaatatggagagattaagacacaattcaaaacactttttaaaaaataaatggctgtttcataaacacaaacaaatctttaaaagaaaaataatcacatcaattgcaatatacattggcaaatagtaaaatgtcattttccaaaatagtagcttctttattatatgccccatctattataccaatctggaaatatatcttaacatatgggggattatatgaaaatggttcactttcaatgtgataaattaattaagtagatatgatttttttcctctggtggtaaccattgaaaaactaaccgc

SEQ ID NO: 12856 - DNA, 333 bp, Homo sapiens
  misc_feature 86, 95, 139, 140, 141, 142, 143, 144, 165, 168, 170, 172,189, 190, 191, 192, 193, 194, 247, 248, 251, 316, 317: n = A,T,C or G
ccgggcaggtacttatactaaattatggtagttatttctgcctttccagttttggggccctttttttgggggattatatttttgtnttgaaattnatttaaaaagaaattttcttttgggaaaccttttttaaaaatannnnnnaaaattttttttttttttttnaantnanaaaaatatataaaaaannnnnnttttttttttaaaaaaaaataaaaaaaaatatatttttttttttttttttttnnttnttaaaaaaaaattaatattataattttaaataattataattatttttttttttttttattaaatnnaaaaaaaatccttttc

SEQ ID NO: 12857 - DNA, 368 bp, Homo sapiens
  misc_feature 337: n = A,T,C or G
aggtacttttttttttttttttttttttttttttgcgacagagtctcgctcttgttgcccaggctggtctcgaactcctgacctcaggtgatctgcccgcctcagcctcccaaagtgctgagattacaggcatgagccactgtgcccagcctgtttggtttggttttagcaattaagataatttggttgttaagccttgcttgtttgcaacaatgaagatggcacttgagattctggaaaggactttctaaactcaaggacctatgtgtgattgcttttattacctttttgtttattaggttttcaagacttgacattttgttttccttcatacagntcaccttgttggtctagtctatagagaaaca

SEQ ID NO: 12858 - DNA, 365 bp, Homo sapiens
aggtactttttttctttttcttttttttttttttttttttagtttttgagatcgtgtctcgctcctgttgcgcatgcctgtaatcccagctactcaggaggctgaggcaggataattgcttgaacccgggaggtggaggttgcagtgagccgagatcatgccactgcactccagcctgggcaacggagtgagactttgtctcggaaaaaaaaaaaaaaagatctggcggatgaaaataaccagaatgaaaatagctagaaaactcagcaagcaggaagctccctttctcacccttttgttcccttgccgatagaatcagtcactattggaaaaaatgaaagacgctctgtttaaaacaatgatga

SEQ ID NO: 12859 - DNA, 191 bp, Homo sapiens
aggtactaactcatccagtatctgattctgtcttttcctctatccatctgtcttccatctttgcatccatcattcaacgaaatttacagcctatgcagatgttctgtggtcttaaacatgttgtattcctctttgccttggccatgcttcctcccctcccagccgttgttctcccccacgagaatatcttc

SEQ ID NO: 12860 - DNA, 460 bp, Homo sapiens
ccgggcaggtaccttttattcctaaaagaaattacttggccaggtgcagtggctcacgcctataatcccaatgctttgggaggctgaggtggaagccaaggagtttcaggctgcagtgagctatgatcacaccactgtgttccagcctgggagacaaagcaagatcctgtctcttttaaaacaaaaaacaaacaaaccaaaaaaaaaacaaaaaaaaaacctaagaaatgtaattaatcattaagtagctgcaaattgaactgttctattttgatacttcctaagagtgtccagtgtaatcagatcattttataatgggttattgaccccaggtgtcctttagaaccacctggaaagctttacaaaaaaaaaaaaagggtgattttgatttaagttgttatggaataggacccaggtatcaattttttaaagctttgccaggctaatatgtagctaagag

SEQ ID NO: 12861 - DNA, 436 bp, Homo sapiens
ccgggcaggtacctgctgtcccctctctgactagaaaacagtttccctagatacctgcatagttagccccctgagcttatttcaattctctgctcaaatgtcatgtaaatggtgacatcttccctgaccatcttatataaaataatacttccctttcccctgatattctctatccaccttatcctgtttgatttttctgcactgccccatcaaccattgacatataacatgtctacttgtttatatatgtattgtgtttcaccagcattgaaatgtgactttcacgagggtagggatttttgtctgttttatttaatactgtatccccaagaatgccttgcataaattgggactaacaaatatttattgaattgaataaatgaatacatttgggaaggcgcaaaggaagtccttgcccctgaaaatcattttttca

SEQ ID NO: 12862 - DNA, 503 bp, Homo sapiens
  misc_feature 23, 25, 32, 38, 44: n = A,T,C or G
gggacgttgactcctagactatntntgagacngtcgcncattgnggggacggccgaggtacctctgggccattttgcagaacccttcccttttttggtgtctgacgaaagctcgctccctgcccaggtttttcattgttgatcgaaattaacaccaggtggtgaatagagcccctcctaaggttgctcaggataaatcatttattaaataggtctgcttatcaggaggggcgtgaaggctcccaaaaggaaatgctggcacctgggcccagaagccagggcctctaactcctggggttgatttcttcagtgaagtttgcaccctacaaagggaatatggccaaagcggcactcaactgaaggctgatatcaggcgattagacagccatgcattctgcgtttgtctggaacggatttgttaaagaatgactcatttgaggacttccaacccccgattgatttttttgcccggagggaccaaacgctatactttgcttgcctaac

SEQ ID NO: 12863 - DNA, 491 bp, Homo sapiens
gatcgcgttgtaccacttcggacaactgtagctccatcgcggtggcggccgaggtacgtggtgaatagtcatatagccactattgctacttgaacttttcacgtttgtattttgtgttggcctatgtataagccaatctagcatgtttgagggcatgtgtgagagtaggtaagggagctgtaagttacattcaggtgggaatttagggctttctgcacaaaaaattctaatttctctgtccttttgctatgttgcatctcccagtgttgacaggttagtctgcatgattaataactgagcagctgtagagccatgccagtaagtctccaattcctgaacgtggccacatttgtcttttgatgtgactttcaaccacaagccacaaagtaagtctttcactaggctccgttgacttcagtctttatataaggggtttcaaggtattttgcagtcaaaaattaatggcacctcgcaactgtcttatgaagtag

SEQ ID NO: 12864 - DNA, 439 bp, Homo sapiens
ccgggcaggtacatagacgagctttctttgcctgctccaacctgagaggagtgttatcggggaacccaggatctcctccatctcctatagaaagcaagttacaaaatatcaaaaaagaaagcccaaattttccatgaagaggttacatatctaggtgtcatattgagccacgaggaacactggtttggctatgagaggaagcaagccatttgtgcacttctaaccccgactacccgatgacaaataggaatttttagacgcagcaacattctgccacatctggattccaagtttttcactgatggctaagctgttatatgacgccacaaaaggaggggaaaaggagcccctcttttaaaaaactaaccaagaaatagccttcaaacagatcaaggaagctttaacccaggccccagccttaagactatgaaacataact

SEQ ID NO: 12865 - DNA, 435 bp, Homo sapiens
ggcctgccctggagctaattacgactacagggcgaattgtagctccaccgccgtggcggccgaggtacctgtcttggcctcctactgtcctttttaccttttttgttttttagaatagagacagggtcttactatgttgctcagactggtttcaaactcctaggctcaagcaatcttccagcctcagcctcctaaagtgctgggattacaggcatgagccaccacacccggccaagttctttaccatcttcagaaggcttagcttgcacttttggaagaagaatagactcccaggaagactgtgagagagatttggggcccaaattgatattaacaaatacactgaacttgattgtattcaccatgttctggctcttgagaaatgagagtgctagtgaggctggtgccactttgtgtatcttctgtacctgcccg

SEQ ID NO: 12866 - DNA, 438 bp, Homo sapiens
agtcggtaacggagaatgtttacgccgacattggcctgtattagcgcgtatggcctcgggccctcgttccccaaggcgtgccgcctccctgttctcagtcgcaggctgaagccttgtctgctctcctcctttttggtttggttttggaactgactccgagggttgggagagcgcgttggtggcgacggccgagtcagatcactataaacaaaatttccacaagagaaaatgttgaaataggagttgcggatacattggatatactggatgaaatacaagcggttaatttttgtaacgtgagggaaaagcccacattgctggttacatgtgtaaatcactgcgttattgctttagtcattgtctctatttagcaatgaccagactggaagaagtaaatagaggaagtgaacatgcattcttcagtgcggtatcttggct

SEQ ID NO: 12867 - DNA, 431 bp, Homo sapiens
  misc_feature 387: n = A,T,C or G
aggtactggaacagggataagttcttggattaggtgccaacatacctataaaagctgatttttgagtaaattattgattctaacatatgtaatggatttggtgcgataattttctgatctttaactataagtgactttttattctccaccagaaaagataaatgactgagaatgtaagtctgcgctctgattaacacaatggagaaacggaaaaactatctctgttaaaaactgattcctgtcattcttctgatatcaaataagaggaaggaaaataaactttttgtgtgtagatagaaaaacatacctgaggccaggtgccagtggatcacgcctgtaatcccagcactttgggaggccaaggcgggcagattagctgaggtcaangaattcgagaccagcctggccaacatggtgaaatcacgttttta

SEQ ID NO: 12868 - DNA, 421 bp, Homo sapiens
aggacgcgggggtgggggactccagccagcctgagtgacatgatccaaagagccctcttgggtaggaaattgccccggtggaatccctcaccagagaagcaggtagcaggccctcgcagaggattaacacagtggctgaacaccagaaggaactggcacttggagtccagacatctaaaatttggtatcgtgccttggatccaccacagtcagctgaaattatcagcccaggaccagtggaccaaccagcaggacatagaccatctgacccgaatgatcctgcaatgagaccacattgccagtggagatgacaacagcactgctctggtcactctggaagatgaccagtctatgcatggtggaagcttgagaaaatagcaagccctgctctagtcacaccaagaactgactagtctatgca

SEQ ID NO: 12869 - DNA, 801 bp, Homo sapiens
  misc_feature 801: n = A,T,C or G
ccggcaggtactgaggcagacgttgtggcggagaagggcagtggctgtagctgctctttccgtttccagggttccgaccaggtcgttgaggacttccacatggagattggcacaggaccagactcaagacacacaactatacagttgatgaaaaattggatatcactactttaactggcgttccagaagagcgtataaaaactagaaaagtcaggatctttgttcctgctcgcaataacatgcagtctggagtaaacaacacaaagaaatggaagatggagtttgataccagggagcgatgggaaaatcctttgatgggttgggcatcaacggctgatcccttatccaacatggttctaaccttcagtacacaagcgtgctgaagtggttggagaagagttcagtgaggacatcatgggtgagaaacttccgtaggttcaagccattctccagaaagaggcggacaaacttgggtctgtcctttatgagagccgtaaacatgacttcttgaaggtcagcagactcccatcggcggtcattggtgaaaatcccatcattggctaagtccagctggttccactccagcagaagcttcaactgcccattccagttatccttgtcttgctcactggtgctgaaggctttgtatagaacgtaggagatggcattgctcacaatttcatccccagcttcttccattttaataacttgttataggtgaggacattccaagaatttcttttgactgtaatgaagttccgatcagctcttattttggattgcaatgagccctgactacan

SEQ ID NO: 12870 - DNA, 544 bp, Homo sapiens
aggtactactcgattgttaacgtcaaggagtcgcaggtcttctggttctaggtaaatgggggaagtatgtaggagtggaagattagtccgccgtagtcggtgtacacaggccaagaaaaaaccgtatcaaaatgtaaatataattccacattacagccagttaaagaacaatgggaagaccaagaaggagatggcagtgacagaagaagggagaaggggaaataatgggcactaagaaagcagaaagagacatatttggagggagatggctaccgaaatctgggcttttcttagatcctctccaaggaaagttatcactggaaatacccaaggccctgattgtatgcactgtgctagggagaaagacattcagatgctgaaataaaaaactagggaattagtaaaaattggatctctaagacaaataaattgatcaaactataataataatcaaacttctaataatgtataacctctccagagatgaactccaagaacagctcaatggtttgttgaaaaaaaaaaaagagaagtaccctgcccg

SEQ ID NO: 12871 - DNA, 803 bp, Homo sapiens
aggtacgcggggattgttgatcgaaattaacaccaggtggtgaatttagccctatctaaggttgctcaggataaatcgtttattaaataggtctgcttatcaggaggggcgtgaaggctcccaaaaggaaatgctggcactgggcccagaagccagggcctctaactcctggggttgatttcttcagtgaagttgcaccctacaaagggaatatggccaaagcggcactcaactgaaggctgatatcaggcgattagacagccatgcattctgcgtttgtctggaatggattgtagagagatggacttatatgaggactaccagtccccgtttgattttgatgcaagagtgaacaaaagctatctctacttgtctcctagtggaaattcatctccacccggatcacctactcttcagaaatttggtctgctgagaacagacccggtccctgaggaaggagaagatgttgctgccacgatcagtgccacagagaccctctcggaagaggagcaggaagagctaaaaagagaacttgcaaaggtagaagaagaaatccagactctgtctcaagtgttagcagcaaaagagaagcatttagcagagaacaagcggaaacttggaatcaattttctacaggaactaaaacagaacattggcaaaaggtggcaagacgtgacaacaacatctggttacaagaagacatcttgaaccttattccacggctgaccagaagccttaactgctttttcggttggtggctcaagcatcaacaaaaaggtggaagatggaaaaaacttcccact

SEQ ID NO: 12872 - DNA, 795 bp, Homo sapiens
  misc_feature 629: n = A,T,C or G
ccggcaggtaccataccaactggaatttaggctttaaaaataatgtttcaaggccatttgtggtgattcatgcctgaaatcccactacttggggaggctgcggctggagaattgcttgaggctagtgagctgtgattgactgagaacttgctttggggtgcaattaaacaataaactgattttatttgggagaaacaaggaagggtgcacttaactagcaacctaagcatgatttttcagcttttgcccttagggtttaaattacaattccaaaatgttagacatactgtattttttcgttcagtgtggctttaattttcccctcttgcagtttgttctgtagtgccttttacatttggacacatagtttatgctttttagattttggttgctttcttgccaaaataagtgttaactgtgtttcaaacttgattttctttctcttttctttttttttcttccagaatgtcttatttaaaaagaaagctaaaagcatacttctaagtcagagcctctattttggtgtaagacttgggatattttttacttcacattgaatatagccaggcacccaagaagtctgatggccacctgagtgcaggtgacaaggacctgacagagcccatgcnaggctttaagattggacacacaagagtggataactttctcatgaactccttgcctgatctaaactcatatattgggttctgactggttgaataataattttaaggttaacccctttggcagttacccatttcaaaaagggcacaggggaaatgagaatcatatggt

SEQ ID NO: 12873 - DNA, 830 bp, Homo sapiens
  misc_feature 32, 40: n = A,T,C or G
tgtggactgagcgccaaaaatgcacactacanggcgaatnggagtggcaaagcggtgccggccgcccgggcaggtacgaatttaagcacttacatgagggggttaagtcagagtctgttgaggagctgaagaaggtggctgaggagctggaggagaagctaagcatgctcaacaataattataagattctgcaggcggaccagactgtagttccagctaactgggcggctgaggcaggagaatggcgtgaacctgggaggtggagcttgcagtgagccgagatatcgccactgcactccagcctgggtgacagagcgagactccatctcaaaaaaaaaaaaaagaatatattgacggaagaatagagaggaggcttgaaggaaccagcaatgagaaggccaggaaaagaaagagctgaaaatggagaaagcccaagagttagaacagttggatacaggagaagaaacagcggctccactacagacccagccccaggttcaatgtcctccgaagaatgaagtctttccctggggatggtcccctgccctgtctttccagcatccactctcccttgtcctcctgggggcacatcttagtcaggcagcggctttctgatgatggtcggtggggtgggttgtcatgtgaaggggcccctccaggttactaaagggtgcatgtcccctgcttgaacactgaaaggcaggtggtgggccatgggcatgggccccaaattgaggagcaggggtcccttagaaacccaaactttccaaaaaagttgtgagaacccaaccaaggaaacaggcccattgcttttaccgggaaggaaaaag

SEQ ID NO: 12874 - DNA, 391 bp, Homo sapiens
ccggcaggtacgcaatgtgatgttttcatacagtatacactatgaaacgattactataatcaaattaattcatatgtctaacaccctcatagttgccttttattgttcggtgatgagagcatttaagatccactctcttaaaatgtcaagtaggatccttgcttccaaaatgccaaaggaaagaaggaacaatggtcatgccattcacttgcagcctgttcactgcaagaactgtgctcaatgcatgcccaggaataaggctattaagaagtttgtcattaaaaacatagcagaggccactgcagtgagggacatttctgaagtgagccctcaatgctcacagtgtttcccaagctgtatgtgaagctatattgctgtgcgaattgtacct

SEQ ID NO: 12875 - DNA, 752 bp, Homo sapiens
aggtactcatgttcctggtgtagcaacgtgtggtatggctacacttagaacatgagaacataaagccatttttatgcttactactaaaagctgtccactgtagagttgctgtatgtagcaatgtgtatccactctacgggtcagcttttagtagagagcataaaaatgataaaatacttcttgaaaacttagtttactatacatcttgccctattaatatgttctcttaacgtgtgccattgttctctttgaccattttcctataatgatgttgatgttcaacacctggactgaatgtctgttctcagatcccttggatgttacagatgaggcagtctgactgtcctttctacttgaaagattagaatatgtatccaaatggcattcacgtgtcacttagcaaggtttgctgatgcttcaaagagcttagtttgcggtttcctggacgtggaaacaagtatctgagttccctggagatcaacgggatgaggtgttacagctgccttcctcttcatgcaatctggtgagcaatggtgcaagcggggagccaaaaaaacttgccagtatataacttctctttggctttctttatctgtgaaacaatgataataccgaactgtaaggttaaggggagagtttttaattaaaaagatgtgtgaaaaggacttgcccgggcgggcggtctagaactaggggatcccccggcttggaggaaattcatattaaacttatgaaacccgggacttgggggg

SEQ ID NO: 12876 - DNA, 396 bp, Homo sapiens
aggactctgctcagcatggccacgtaggtttacagagggtcttgacttgttcttttatttagacggagactcactctgccacccaggctggaatgcagtggcgcactcttgcctcactttaacctcacttccctggttaagcattcccctgcctttgcctcccgagtagctgtgattacaggcacacaccaccacgcccagctagttctgttgtattcctagtagagacggggtttcaccatgcaggcccagctggccacgtacgttctaaagcaaggggcgtgaagaaggcacagggaggtatgtggctgctctcgcggtagttcattcggcctaaatcgacctggtattaaatttcacgaaggatctggcatttgctctgcttgacccttctct

SEQ ID NO: 12877 - DNA, 967 bp, Homo sapiens
  misc_feature 20, 27, 28, 40, 91, 124, 660: n = A,T,C or G
ggaagtttctgagttctaanatgctannttcgggcgattngattgcaacagcggtgccggccgcccgggcaggtacagagtctggacaggngcttccctgttatcctttcaattttagagcganaggagcatcatccggagtttacatgtgaggaaacagggtcaaggaatagcatttgcccagagtggcacagctagtcagtaggggagcatcagatttgagaaatccagagctattctcacatccagggctcctttctagactacatagagctgagggtttcggcagtaagatgaggaagcccacgctccgaagatggttaggtttggagccccagacatttagattccccttgagcaccatggggcccagccttgagagtgcagaagcccctgggtctaaggaatccctggcttctacaagcatgacgttggtgaatcctgtgcaagtctttttaaccctctccacacccagggcttgcgcttggtccaaacaatgattcccctatcaggggagagggggactttagtaaaaaaccatctggaagaggcattgtctgtcaaactacaggtggggccaggccctctgccccagaagaggccttgaagtttgcttcaccttaaccaagggaaggagggggcagaagcatatggcaattntggtttaccacaccctttttcacaacattggtggaagaattacaggtttttgaatcctcaaaaggctttctgaaccttgtggggagagtgaacgtttaaagtccaagagagaccccacaaccactttacacccctgtaaaagaaccccggggacactttgggccgcggtttaaaaaaactaagtggatatccccccgggggtttgtaaggaaatcctaataattcaaagcctattatccatcaacccctcccaccccctcaaagggggggggccccggcccccccaactttttggttccccttttag

SEQ ID NO: 12878 - DNA, 552 bp, Homo sapiens
  misc_feature 29, 40, 96, 125: n = A,T,C or G
ggcgtatgaatgagtctgcaattgcaccnacgggcgaatnggatctcaccgcggcggcggccgcccgggcaggtacttctttaagctctattcagnagggatctagcctttgcaataatgtcgancctagccacggagggtgttttcttgttaccttataaaacaggtaataaccaatcattttgtgttcgtatttccatcctttttatgttctggcctttgtgtacgactgatgattaagtaaggcaaactagcttctacttttcaaacgagccgccaagggcattaatagaccccatttgtaaactgagaaatgattctcgttttagtaatcattctataaatgatactgctggattgattgccgagggttgatagctggaggaattgttttggacaatactaacatgtgaatctatgtcttagttttatttgcagccttgctaagtaaaatgagcctttgtatctacttattaattaaagtgaaatttagcgatagtgaatattaggtgacataaataaaacatcccagactagtgagttaagtgcctg

SEQ ID NO: 12879 - DNA, 807 bp, Homo sapiens
  misc_feature 10, 15, 16, 561: n = A,T,C or G
ccgggcaggnacttnntttttttttttttttttttttttttctgtcgccaggctggagtgcagtggcgtgatctcagctcaatgcaatctctgcctcctgggttcaagtgtttctcctgcctcacctcctaagtagctggactcaggcacgcaccaccacgcccagctactttttgtatttttggcagagacggggtttcaccatgttggccaagatggtctcgatctcttgaccttgtgatctgcctgcctcggcctcccaaagtgctgggattacaggcatgagccactgcacccggcccaaaagtcttaaacctctaaatatttgtttctaatctggctcttcaaaataaattttatctgaaaacaaaacaaaacaaaacaaaaaaaacacaacactacataaaatccctaacagcttggaaatctactttcataaaataatactaaactattaacaagtagaagggattaaggaatttcaaaattaattgaaggaaatgaagaggctttccaacccgtaaataacatggaaaacccagagtgggggggatgagggtnagaaaatttggaaatacgatgtataatatttaaaaaaaggtttcactatcaataaaccccttcacatggaattgggggggaggaaccttcccaaggaaatttttttttttttggaaacgcaatttccccacatcctgttaaatcccctaaagcattccctttttggatagaataaatttaacctcctttgagggcaaacaaggttttaaaagaagagaaccgggaaaattgccaaattcttttcag

SEQ ID NO: 12880 - DNA, 446 bp, Homo sapiens
aggtacattttttcaatgtccttcatttgacaccgtttggtttagctctctttgtatgtgttcaaaaaccaaagcgttttctttcagagcctctcttgtgttatggagctcagttttgaggcacctggacttactctcagctttagaaagttgctgagaaagaatcagaacatgagaattcaaattttcctgtaaatgacgcaatttatctactgtgccctggaaatcaagctcttggtctctttctgttgagtgactttgatcatgatcatgtagagcaacattcagtctacgatggtatgattccatttcgtcagtctttgcctgctttgtttttccttctccagtttagaacggagcattgtgttctcatctgtcagagcagtaagctgtccactataatgggctatcggttttgttggattttccccattctggttaaccgc

SEQ ID NO: 12881 - DNA, 508 bp, Homo sapiens
gaaacatgggccatactgatatcgggcgaattgttgctccaccgccgcggccggccggggtccttttttttttttttttttttgaaacaaatttggcattgagcagagatcacaccactgcactccatcctgggcgactcagggagcctccgtctcaaaaacaactttttttcatccatggacaattgttgtcttgttttggtcctctttaggaggtggttttataatcagctataaaactccaataggtgctcttgaatgcaggtttctgataactttggagattgtgacaacagaatagaggaagaaccttcaggactcatggagagctaaatgttcatgagtatcaagcaggaattaacaggaattaactgcatggactgaaccaatcttttttactttttgctcaaaatatttgctggtcctttgttttgcgtttccgagtcttatgacttttcttttgagctactgacagattttaacaatttagtatactcctatgaacaaa

SEQ ID NO: 12882 - DNA, 446 bp, Homo sapiens
ccgggcaggtacgcgggggcacacagatggcattttaaagtttataaatgaataatgtctgatgaaaacatcaaagctactttctagatttgtggagattgcccagataaacgaagtcacggtaaaaggctagtgtgagaaacaccaacagcaggcccatctcagatcttcactatggcaacttatgcaagaaactgttgaattagacccgtttcctatagatgagaaaccatacaagctgtggtatttatgagcctccatttcttatactactgcagtgaaccaacattggatgtgaaaattgccttttgtcagggattcgataaacaagtggatgtgtcatatattgccaaacattacaacatgagcaaaagcaaagttgacaaccagttctacagtgtggaagtgggagactcaaccttcacagttctcaagcgctaccagag

SEQ ID NO: 12883 - DNA, 446 bp, Homo sapiens
  misc_feature 446: n = A,T,C or G
ccgggcaggtacccagtgcggctggaatgtcgtttattgggagtgccaccacctcagatattttggaagaaagaaagtgaatcactcactcacagcactgaccgagtgaggtaagactgcacaatgagaacctgatccttaactgttcagtcctaatgatgtatcaaaagatacattttatatagcatggaaatctatgtgtaaaagccacatagatgttttgatttttgatgaaatcaatcaaagacaaaaaccatgcgttacccaatgtaggattaagcttttagaaggaagctatgggtgtttgatctaatggtgatttcttaaaagtgtttatcattctatctaaaagaaaagatgaattcatttgctttagtgataaaagactattcagtggtttttgtaaaggcagatcctcaactaggaattaagcacacagatgcatn

SEQ ID NO: 12884 - DNA, 449 bp, Homo sapiens
ccgggcaggtaccaccccatccccaggaggcccatttataccagaaatcccaagtccattagctacaggctgatattcagggacatcggtgtaaacaaagaagtgggatatgaactatatccctgattttttttcttttttttttttttttgagactaagcctcactcttgtcccccaggctggagtgcaatggcgcgatcttggctcactgcaacctccgcctttcaggttcaagagattctcttgcctcagcctcctaactgggataacagacacctgctaccatgcccggctcatttttttttgtatttttagtagagacggggtttcaccatgttggcctggctggtctcgaacacctgacctcaggtgttccgcccgcctcagcctcccaaagtgctgggattacaaggtgtgagccaccgcacccggcctatattcctgatat

SEQ ID NO: 12885 - DNA, 457 bp, Homo sapiens
  misc_feature 457: n = A,T,C or G
agggactttttttttttttttttttttttttgggagacggagtcccactctgtcacccaggctggagtgcagtggcacgatctcagctcactgcaacctccaactcccaggttcaagtgatcctcctgcctcagcccctccagtagctggaatcacaggcacatgccaccacgcccggctaatttttgtatttttagtagagacagggtttcgccatgctggtcaggctggtcttgaactcctgacctcaggtgatccacccacctcggcctccaaagtgctgggattacaggcatgagccactgctcctggccccagcttctaattaattaaaagtgataaagatcatttcaatatcttcttcagttcatagagttctacaatgaaggcttttcatacaaatgaatgaagttaacagtgcacaatttttgaaagtccttttaataagcaccctttn

SEQ ID NO: 12886 - DNA, 450 bp, Homo sapiens
  misc_feature 410: n = A,T,C or G
aggtacttcttttttttttttttaagagatgtgtattttgctacattggccaggctggtctcgaactcctggcctgaagtgatccttctgccttggcctcccaaaatgctgagattgtaggcatgagccgccatgcctagcccagcttgtctttttgtttacttaccagtgtttttcagagaacaaaaattttaatttgatgaagtccaattaattaaatttttaaaatagagtgtgatttttttgtcatgtctaagaaactattgtctagtcctaggtcctaattctcctttgttttcttctaaatgttttattattttacatgttaacgtttagatttatgatctattttaagttttttttaagtatgagggttatgttttttggttgtgtttaggagcatatggtgngatgtctaagttgttccagcaccattttgttggaaagact

SEQ ID NO: 12887 - DNA, 450 bp, Homo sapiens
  misc_feature 32: n = A,T,C or G
aggtactttttttcttttttttttttgagacnaggatttactgtgttgccaaggctggagtgcagtgtgtgatcacggcttaatgcagcctccacctcctaggctccagcaatccccccacttcagcccctcaagtagctgggactacaggtgcatgccaccatgcccagctaatttttgtatttttttgtagagacagggttttgctctgttgctcaggctggtcttgaactccaggactcagtctaaccaccagccttggcctctcaaagtgctaggattacaggcttgagccaccatgctcggcctatatttccttcaaatgtgtgttttgcgcttaagtatttcttctgttggccaaatctctgatttcccattttaattaagtcttaatgtttgcaaaatatttttttcatctttttaagctttttatgttgcatctcaacatta

SEQ ID NO: 12888 - DNA, 514 bp, Homo sapiens
  misc_feature 12, 26, 90: n = A,T,C or G
gggacattgatntcgaatcgattacnggccgaattttagttccaccgacggggcggccgaggtactgattccatgggatatgtcaatacnccctccgtgagcttggaccaggcaggagaagagagtggtatcacctgggtaatgaatggaaatatatgtcataatgctcctttttggcagtagagttacattaccagggtgtcaaacccagcaatatgtcacaattgcttatgtggtcggggaacaggcaggagagtcacataacctgggcatagggctcagagacatgtcccaacgccttccgtaggcagtgccaaggcaggggaggagactcaaatcatttaagtgtaaggtccagcgatatgtcacaatgtcccctgtgagcagcaccaatgcaaaaaaatagaatcacatcccctcagttctggggtcagctatgtgtcactattccatctgtgggctggccttaagcaagagagtcagatcactcacgtgctgggcaaagaaaaatgtt

SEQ ID NO: 12889 - DNA, 456 bp, Homo sapiens
ccgggcaggtacgcgggaaatcaaggggtcttaagagttgtttccttctgaggctggaagagaatctgttctgtgcctctctcgtatctcctggaggtttgctagaagtctttggcattccttggcttgtgacagcataactctgatattcatatggctttctcactctatctctgtatccaaatctccccttttcacaaggacttgatcatattggattaggcccaccctaatgacctcaccttaactagatcatctgcaaagaccttgtttccaaggtgctagggtggtgggtggagacaggggagagactattcaattcataacacctaagtattgtgtctccttagtccgtttcagtccccacccagccctgacttgactctcagctgctttgggtctgagcaacaccgctgcagaagctctgatttggagctgacagaaaaagaaggggaa

SEQ ID NO: 12890 - DNA, 523 bp, Homo sapiens
  misc_feature 5: n = A,T,C or G
ggggncgtccaatacgtatacgggcgaatgttagctgcaacgcgccggcggccgaagtaccggattacaattacagtttaaaaccagcaatatataatgccttggctatggaggccctagcagatgaatacaaagacattctgggtaaaagaaggggaaagaaaggaagagatggtctcagtagagatgaactcaggtgcagaatctgagtctcagcacagggctactatgcagaagtgggtaaaggaatgagaacactcaggagctcggtgggcacacagtcatggggactaggcagttccaaggattgaaatacggataagcaggtcgagaaaagcgacatccagagaacttgtagatgagtgctccgtggtttgtgacattgaaaaatgagacaatgcctgcctcatagtctaggaaaaccccaatacgacagggaggcacagccataaagagagtcaaaaccttgggatcagaagaagaggaatcctcaaaagcattatattcacatgtattctgtaat

SEQ ID NO: 12891 - DNA, 548 bp, Homo sapiens
gggaatcatcatctactacttaggccaattgagctccacgcggtggcggccgaggcactttttttttttttttttttttttgattattactttaaaaggggagataggtaggagtagcgtggtaaggccgatgagtgtggggaggaatggggtgggtttcgtatcctccaactgacattttatttttccgttcttccatatggaaaaaaacgcacccccggtgccttaccttaggcatatgttacaccccaatctttcggtagggtttctcccacctcctacaccaagccctgttcccagcctatgaatcacttttcacccctctttcttgcccctttctttacccccccaggccccaacgtccccccatttctcttccctcccttccttataatcctgcacctccccccaccttcttgattttaaaacccttttaacccctcccaaaccaaacctcccttccctacttctttaaacccctaccaaaatccctccccctccccatacttttcttccctcccataacaacacacttttccattttttag

SEQ ID NO: 12892 - DNA, 414 bp, Homo sapiens
aggtacgcgggggctcactgcaacctctgccttcatgttcaagcaattcttctgcctcagcctcctgagcagctgggactacaggcccgtgccccactacgcccagctagtttttgtatttttagtagagatggggttttatcatattgaccaggctggtctcaaactcctgacctcgtgatccgcctgccttgtcctcccaaagtgctgggattacaggcatgagccactgcgcccagcccaagactcctatttttaaaacctgaaaaaattttcatgaatgaaatgcagatagaatctgtaagtcacttgctacattaaaatactcaggcaaagggaggtatttctatacattatgatgtgtgcctccaagcttgtttcagaaataaatattttaaaataggtacctgcccg

SEQ ID NO: 12893 - DNA, 510 bp, Homo sapiens
  misc_feature 9, 22, 89, 114: n = A,T,C or G
ggcgactancgacatagagtantacagggcgaatttgagcgccaccgcgggggcggccgagcgactttttttttttttttttttacccnttttacgtaatttcagagacggggnttcgccatgggggcctttctggtctcgaactcctggcctcaagcgatccacctgcctcagcctcccaaagtgctgggattacaagtgtgagccaccgcaaccgtccctgtatactttttacccacacagcatagccacattgcctacaacacagggggtgttcaataaatgcctaaatgtttgttggctgaatttaaaataattaaagacctgcagtttatatgcataaaatcataaactctaatgggatcactaccacattgccaaatccaccagaatataaggcccccatgatgattttatctttccacagaattcttcttgaaggtcatttaaacacattttcctctgaatgaggttggcagcaatggaacagaagataagcttaatcaccgt

SEQ ID NO: 12894 - DNA, 509 bp, Homo sapiens
  misc_feature 21, 33, 34, 84, 85, 106, 109, 509: n = A,T,C or G
ggacgctaatcgttttgaganacagggcgattnntgagctccaccgcgggggcggccgaggtttactatacggaggtattaggnncttcggatcactacttgaagntgntaaaatgatattttatagttttgatgtgcttaaaaactgggaattgagaattttttttttttattttttgttttaagttaaaaattaagcacaagatgccaggcatgggaggatcactttgtgaggccaaggcgagaggattgcttgagcccaggagttcaagaccagcctggagagcatagcaagaccccatctctgacaaaaaaaattagctggatgtggtgggcatgcctgtaatcccaactacttgggaagctgagatgggagcattgtttgaagccaggaggtcaaaactgcagtgagtgttgatcatgccactgccctttcgcctagatgacagagtgagaccgacacaaaaaaaaaaaaaagtacctgcccgggcggccgatctagaactagn

SEQ ID NO: 12895 - DNA, 358 bp, Homo sapiens
ccgggcaggtacaggctatggtgaagttttgtagtcgacttggatgccaggtaggcatgtcttcaggttctagtcacggcagtggtaggccaaatattcctttccttgggacctagggcagtgtataatggcattagtgttggctagtccagatagctgattcttgaacctctaggtggcttgcctggttactggtagtgacagcagtaggccagttgggtgggcaggtttttgggctcctgggcatgaagtatgctatgggcaatatcagtagccgtggcaggacaaatctctggcttccgagttgtctatcccggtattgacagcgacagtgattggcttggcaggcccatacctt

SEQ ID NO: 12896 - DNA, 418 bp, Homo sapiens
aggtacttaccatcttgtctctcagtaggttcatgtgacttaagaggaaaatgtttaatatttgctttatctattagatcagaacctcttcgaaaaaagaagaaggtagatcctaaaaaagaccaagaagcaaaggagcgcttgaaaaggaagatccgaaaactggaaaaggctactcaagagctaattcctattgaagattttattacccctctaaagttcttggataaagcaaggtaaggatccttctctagggatgaagtcctcaggacaaaggagtaatatcaacttcaggtagttgtgtctgtagttcacacctgtgatagtcattggtcagtaggcttgagctgacttggccctaatgagtccttgctccttttggaagcaggagaaagcatccttgggtggtaccttgccc

SEQ ID NO: 12897 - DNA, 457 bp, Homo sapiens
agttgtgatgtttgcttcacaacaggggtcttttggcaatgtctggagacatttttattgttatagctgaacaggaaagtgctactggcatctgggaggaggctgctaaacatctcacaatgtgttaccctgtcccaaatgtcagtcgtgttgaggctgagaaacatggtttaaatgagtcagaggctggccacagtggcacgtgcctgtagtcccagctactcaggaggctgcggtggaagattgccttaacccaggagttcaagactagactgggtgatatagcaagacctctgtctcaaataaagaagtaaaaaattatggattaagagacttgtaaattttccctcttttaaaattaaggggtttaaccctaaaacctttaaaaaaaaaaaattttgggcctggtaattaaaaggggggcccgacatttttgggggtaaaatttttttaaaaa

SEQ ID NO: 12898 - DNA, 489 bp, Homo sapiens
ctgggcaggtacagtgtcacaatcatggctttactgcagcctcgatctcccaggctcaagtgatcctcctacctcagcctcccgagtagctgggaccacagacatatcccatcgcacccagtttttgggttttttttgtttttttgttttttgttttttgtttttgtctttcagagagatggggtctcactatgttgcccaggatgatatcaaactcttggactaaagcagtccttctgccttggccttccagggggttggatttaccgggctttggaccccccttttttccaggttgttggttttattttccaaaaaaaaaaaagtttttccctttttttggggtttttcacaaaaaaaaaacacggggggggcgttttttttataaaaaatttttgttttggaaaaaactttttttttccaaaaaatttttgggggggggggttttccttccccaaaaaaaatgttttttgtccccccccccccccc

SEQ ID NO: 12899 - DNA, 568 bp, Homo sapiens
  misc_feature 3, 30, 116: n = A,T,C or G
ggngcgttgttcacttcgtagttcggaaanccgtcgaataatagctccaccgcggaggcggccgccttggcaggtacaactgaaacatgagccttttgggtctacatgcctgaggnagtgacagaccagctttggaagagtggaagccctatttccaaattcaagcatgctttgagtataaattaagtttacctctttttgcacagcaacatggccaatctttcctaagctgctcagcttacaagaaatggaatcatactgctaagaaataaaactttagcagtcataggtaagtaagggaagttttttaaacctttttttgccccccttcccgggaaatctaaaattttaccaggtttttttaaatttcaggaaacagggtggttccctttaatcaggggtctttcgcacttttaaaaaaacccccccctaaaaagggggaaggggtctccttctttttttgggggggcacactctttttttaaatttggggggggggggaaaaaacctttcgtttccttaaataagacgagggggggttttttttttctgaagaaaaaaaaaaacg

SEQ ID NO: 12900 - DNA, 515 bp, Homo sapiens
gtgggagcagctcgactacagggcgaattgtagctccaccgccgtggcggccgagggactttttttttttttttttttttttgggaaattcccctaaaagattcctgcttccttctggaacaacagagcaacagggcagttgtgatgttgggtttagatgacacttatttaggagatggagcaataagatcagaggtcttctaaggattctggggagtcagtgtatagatggaaaccaaatatgagtgtgtagccccagaaactgctcagataacctggtcagaaactaggcaagctggcaggggttgggaagcacagatgtagagcacatcaaggcaagtgaccaagagtattgtaaaaaaacattttggtatcatcttgtagcaagttctggggaagttcactgactcaaggatatgcacaagcatgggggtgctgataatattaacaatgccaatggcagtggtaataataaggataacatgagcaattgaatgtaaaagttacagggaatt

SEQ ID NO: 12901 - DNA, 460 bp, Homo sapiens
ccggccaggttcgcggggtcgatgatgaaatggaggccaatcttgaaaagttcgacatcagcgaggatgacatcgatgatggattcaggagactgtttgcccagttggcaggagagctcccacggggggccaatatctatgctctggttatgtgtgcacaggatgcggagatccctgcctttgagctgcagaccatcctgagaagggttctagcaaagcgccaagatatcaagtcagatggcttcagcatcgagacatgcaaaattatggttgacatgctagatttcgacgggagtggcaagctggggctgaaggaggtttacaatctctggaccaagattcaaaaatacccacgacaaggatctttatcccctgagggccttgggcggtcttgaaataggggttcccccgggggttgagaaatttcaaataaacttttcaattccggggaccttgaggg

SEQ ID NO: 12902 - DNA, 309 bp, Homo sapiens
agcgacccagtacttatgttgcattgtgggtgcgaaagtgaaaacactacctcttttgagactttgcccaggggcctgtgcctggatggaggcgcaggcagccttgaccacggctggtcccctcacccaaaagaattatcagcccaacaggcaagacccaacaggtgctgaactgtgcatcaaccaggaagagctctatccccaagctggccactatcacatatgcttactgttgcttaaaattaataaatcatgttttgatgagaaaaaccattccgactactttgatagcaagcgtgcctgcccggt

SEQ ID NO: 12903 - DNA, 771 bp, Homo sapiens
  misc_feature 517, 521, 522, 523, 524: n = A,T,C or G
ccgggcaggtacgcgggggcagtttgaatcgcggtgcgacgatttgttggtggtgggatctcaccgtgggtccgattagccttttctctgccttgcttgcttgagcttcagcggaattcgaaatggccggcggaaggtggaaaggactccggaaaggccaagacaaaggcggtttcccgctcgcagagagccggcttgcagttcccagtgggccgtattcatcgacacctaaaatctaggacgaccagtcatggacgtgtgggcgcgactgccgctgtgtacattttcctgaagaagcttagatatagttgtgttagtattttcccctggaatacgccccattatactttctcatggatagtcagtttggtgctttttaatcctctccttttaaaaaagcattttttggttaaacatttttggagtctgttgtgtaatagtggtgagtaaaacagatctagtcctggttcttatggaacttatagtctactacgtttttttttttttttttttcaancggnnnngggggctttatatggctaacccacggcatgtcaacatacccgggaagctaacaggacacaagtgggtcaagacttatttcaccttatagttattttacttgaacaaggtgaccattagggggggagttaaagatgggatccactttatgagaagaagccggaataaatactactccggggcctcttgatcgtttgagaatttagggattcccccgggcttatagaaatctatcttcaatcttattct

SEQ ID NO: 12904 - DNA, 917 bp, Homo sapiens
  misc_feature 159, 185, 251, 260, 273, 274, 275, 402, 403, 411, 412, 441,442, 451, 468, 471, 472, 475, 483, 484, 517, 519, 520, 530,531, 535, 541, 549, 550, 553, 556, 557, 567, 568, 606: n = A,T,C or G
aggtacttttttttttttttttttttttccgcattattatgaggatatccttaaaggttggggaacttgggcgactttggctaatgaggagctctgtgccttgagccccccaggccatagaatagtaaatagtctgtgcctccagccctgcagtgtganggttcacagtcctgtgggctccacancccatcactctgtatcagggaggctcatggttctcacctttgtctttcttgccagccttgaggatnggagtcttngagcctccatcgnnngcaccacgcagggagggacacgcggacttgttctcccgtggtcaatggcccagcaagagggggaagggcagtttcaagcgagtggctgaggggcacggttggggaagcccttggttttggtatcccnntcatcctnncaggaaaaaaaacaagggagaagtgcctnngtgggcaanaatgtggaaggaagacncannacngttgcaannacgtgtccgggcctcaaagcaagaactggtggnanngtttcttgtnntctntgggtntattgggnncgnggnnggggggggcnngggtctccaagaaaaattctttaattcaaaaaaatttnttgctttctcccctccccacacctgggttgggtcctttttcaataggacccatctcaacccattgaataggcaggggaaatgaagtcccctcctaaaactaattcttctaagaaacaataaaaaaggatttatgaagggtgatggattggggggtaaaggaggatgtattgaccagacacccattgggattcattgaaccccttaactggagggcttccctaaaggggccaggcttcttggagctctggggggctaatgcagcttggttttcattttccttttgcggaggcctcccagtttattaagggcc

SEQ ID NO: 12905 - DNA, 826 bp, Homo sapiens
  misc_feature 29, 174: n = A,T,C or G
cttgttcaaattggaattacggacgaatnggagttccaccgttgtggcggccgcccggcaggtacagctctcagtctactgatgtttaaggatggtctcggtggttaggcctactagaataaactgagtccaatacctctacacagttatgtttagactgggcttctttgacanccgggaagaaggtggcggggtttaggggcaaacttcaatggttatgcggggatgttcacagagcaagctttggtatctagctagtctagcattcattagctaatggtgtcctttggtatttattaaaatcaccacagcatagggggactttatgtttaggttttgtctaagagttagcttatctgcttcttgtgctaacagggctattgctaccagggactttggacatgggggccagcgtttggaaacctcatctagttgttttgagagataggccactggccttggccagggccctacagtctgggttaaaactccaactgccactttttctctttctgacacatagagtgtaaaaggttttgtcaggtcaggtagccccagggctggggctgacatgggttttttctttttttcaacccatggagaggagcctaagtaaagacctacactaacattgatttgggttacacttgaatggccgatgtgctaatgataaaatctgtatatttctgttgtctttcgtatctgtcctaacccctaaaaatagcttgttcattactataggacgcttaataaacttaagagggtgtgtaaaattacaagggcttgggtttaagggattggggcgataagtattctgttgctttag

SEQ ID NO: 12906 - DNA, 617 bp, Homo sapiens
aggtacgagatgccacggcacgaagtctacgttctcctgatccgaaacatctttttgataatatcaatcattggcattctttgttactattggctcaacaccgtggccctgtctggtgaagagtgttgggaaaccctattgccagcatctaccggctccttctgatggattttgtgttctctttagtcaattccttcctgggggagtttctgaggagaatcattgggatgcaactgatcacaagtcttggccttcaggagtttgacattgccaggaacgttctagaactgatctatgcacaaactctggtgtggattggcatcttcttctgccccctgctgccctttatccaaatgattatgcttttcatcatgttctactccaaaaatatcagcctgatgatgaatttccagcctccgagcaaagcctggcgggcctcacagatgatgactttcttcatcttcttgctctttttcccatccttcaccggggtcttgtgcaccctggccatcaccatctggagattgaagccttcagctgactgtggcccttttcgaggtctgcctctcttcattcactccatctacagctggatcgacaccctaagtacctgcccg

SEQ ID NO: 12907 - DNA, 448 bp, Homo sapiens
  misc_feature 9, 13, 18, 20, 21, 22, 26: n = A,T,C or G
gttatgaantccncatgnannnacanggagctcaccttggtggcggccgccgactacctgagtctgggcaatttataaacaaaaggggttcatgtgactcacagttctgcatggttggggagacctcaggaaacttacaatcatgacgaacctcggggaacttacaattgtgacgaaggcaaaggggaagcagccttcttcacaaggtggcaggagagagtgcagggaaaactgccacttttaaaaccatcagatcttgtgagaactccctcactatcacaagaacagcatggggaaacagcccccatgatccaatcacctcccaccaggtccctcccctgacacgtggggattacaattcaagatgagatttgggtggggacacagagccaaatcatatcagcctcctaacttcacatttggtaaatttgatttctggtcctgcccg

SEQ ID NO: 12908 - DNA, 581 bp, Homo sapiens
  misc_feature 14, 19, 29: n = A,T,C or G
agtgatgatatccnattgnaaggcgcctnggagctccaccttggtggcggccccgacatgcaaaaaaaaaaaaaatttgatgaatctagaaccattttgagtgaaagactccagatgcaaaataataaatacggtatgactccatttacatgcaatcccagagcaggcaaactaatctatgggataggattagaaaggttccctcagcagggtgcagtagctcacacctgcaatcccagcactttgggaggccgaggtgtgtggatcatgaagtcaggagatcgaggccatcctggctaacatggtgaaaccccatctctactaaaaatacaaacaattagcctggtgtggtggtgggcacctgtagtcccagctcctcgggaggctgaggcaggagaatggcatgaacccaggaggtggagcttgcagtgagccgagattgtgccactgcagtccagcctcaaaaaaaagaaagtggttccctcagtgagaaggaaagggggtttgactagaaagggacaagaggatgagacaactttctggaactttaaaaggtaattacattaatgtgtacctgcccg

SEQ ID NO: 12909 - DNA, 452 bp, Homo sapiens
  misc_feature 102, 116: n = A,T,C or G
ccggcaggtacttaaatattatatattttccatttcataattgttttcctttctctgtggctttaaagtttttgactattttacaatgttaatcactaggtnaacttgccatattntctggttctatattaagttctatcctttatatgctgttattataaagctggtttttagcatttgtctgtagcaatagaaattttactaagtctctgttctcccagtaagttttttcttttctcagtaagtccctaagaaaacatttgtttgccactcttactattcccaatcttggattgttcgagctgaaaaaaaatttgatgagaaacaggaggatccttttctggtgaatataggttcctgctttaagaatgtggaaatccattgctttatataactaatatacacacagattaattaaaattgtgagaaataattcacacatgacaagtagg

SEQ ID NO: 12910 - DNA, 544 bp, Homo sapiens
  misc_feature 1, 9, 33, 34: n = A,T,C or G
nggcggtgnatgagttctaacccgcaggcgacnnggagttccaccgtggtggcggccgacgacggattctgtgagctgggttgacagataccctttcattgttggcagtgggatgatgtagcaaaggaccaattttcctggagatcctattacgtgaagggacttatactggacacatcatggagaaaatcagaagaagtgttaataagacccactcctggatgcggccactctcaattctcagtgtctttgggaagcaaggttcgccatccacttgtctaaacagatgatgatagcagaggtgctgcacaccttctccctgtgacttgtgaatgcctttcatgctcccaaataaggaactcctctcactgctgtctgctctgagctgtatttcattttgatagccatttgcaggagacacctttgaactccatgcaatgtaaaagatgtcgttgagaaattcttcaatggaatttcttccccttttcccccaccctcattttcctctgggtgatttacagcttgaacattaagtaccctgccg

SEQ ID NO: 12911 - DNA, 514 bp, Homo sapiens
  misc_feature 22, 34, 62, 104, 105, 106, 108, 205, 217, 218, 239, 245,276, 277, 312, 366, 434, 489: n = A,T,C or G
ggtgtatttttatgcgggcaanttttctgcaacngacaggcggccgcccgggaggtacttanaaggtttaattcaacgggtttgtttttcccaaaaacaaaacnnnanggaaagactgacaccaaaaaaggagagggccgcagaacaccagacaaaaccaaagggaaagacaggagcgggggaaagaaagaagaaaaagggaaancaggaaaaggcnnccggggagacaacacaaaaanaaaaancaggaagcggccggaaacagaagagcggccnnccccaaaaggaacaccccccggggaggcgggccgngcccccgggaggcgggcacaacacgggggaacaacccacacaaagaaccacggncggagcaaggccgaaaaccggggggaacagggagcaacccggaaaggaacaaccaaaaaggaagaaangggaccccggaccaaggccgggcaaaaacaaagggacccccgggcgggaagaaancaaaaaaaggcaaacgaacccgcag

SEQ ID NO: 12912 - DNA, 484 bp, Homo sapiens
aggtacttttttttttttttctttgtgagggacgtcttactctgtcgtccaggctggagtgcagcggtgggatcacagctcagcgcagtgaactcctggactaaagccaccctcccacttcagcctcccaagtagccgggacaacaagcacaagccaccacacctggctaatttttaaaatatttcgtagcgatgggggcctccctgtgtttcccaggctgatctcgacctccgaggctcaatcgatccccccacctcgggctcccaaagtgctgggattacaggcttgacaactgtgcccggcctgggctttttggaaggagtcttcctggtcccgacagttctcctggatgtccttgtggaggccagtctctgttttttgatgaccaaattgctttttgggtagagcctgggcaccggagctggtttgggggaataaagggaaatgggggttagggaggagctgggagaaccaactgggagg

SEQ ID NO: 12913 - DNA, 449 bp, Homo sapiens
ccggccaggtacgcggggacagaagcttctgggtaggggctggagaagggtcggggagatatttccgttaggacatcgctgaaacacagactgggatcaaactgtgctcatagtcctaaggatctccagcaccctgccggtggcactactgaaagacgaggtgccagggtggttcctgaaagtgcctgagccccaacttatcagcacggagctcatcatgctgacagaagtcatggaggtttggcatggcttagtgatcgcggcggggtccctcttcctgcaggcctgcttcctaaccgccatcaactacctgcttagcaggcacatggcccacaagagtgaacagatactgaaagcggccagtctccaggttcccaggcccagacctggccaccatcatccacctgctggcaaagagatgaaggagacttaaaccgagggagacttcg

SEQ ID NO: 12914 - DNA, 385 bp, Homo sapiens
aggtataaactatgcatattataactaccagctcattaggtcaagactaaatcaaaaattgtcaaggacttttctaaaaatttttttagcataaactgtttcctctaacttaaacttctcttaagtgaacctgtctttccactgggatgactgtctacatgctcaggaatcctgaattcatgactatgttcaactcccacgaccatttttaaatcatcaaaatggcagcaaatgtcattacctggaccaaaaagctgcaggttttgtggcaaatgggaaatgtgttatagaatatgactgggaaagagggatttcttagtgctgcccagaattaattcagcaaacactgaacattactacgtgccacatataggatcatactgca

SEQ ID NO: 12915 - DNA, 521 bp, Homo sapiens
  misc_feature 23, 65: n = A,T,C or G
ggcgtacactgatgcaggcaatnttgcttcaacgcaccggcgggcgaggcactaaagaatttgtncatgtcatttctacacattagttattaatggagagtgaatattttatttggtgatgtattcttcacttattaatgatgaggtcaatgaactgatgcaattattaaaaaaaaaaaaaaacagacaaccttataaaggaaaaaacaaaaacaaatacaaaaaaaaccaaacgtccattctaattctgaatctgttgactggagtgaattcagtggtcacaataccaccatcaaataagaatcaacttcctcagagtaaggagctgttccgatcttctcaatagttcacacaggtctctcagatataggcaccatgttttaagtctcacacaaaatgtctgggtcacttaaattacacaatatggcaatgtttgtcttatggggacatactgaaaggggcaaagtagaaaacaacctgttgcatgttatatgtgagtacttgccgggcggtccgtctaa

SEQ ID NO: 12916 - DNA, 453 bp, Homo sapiens
gccgggccggttccgaaaagaattaaggacctggataaacagttcgtaaagcctgatggtgagaatagagctcgcttccttccagggaaagatctgaccgaaaaagaaatgatccaaaaattagacaagctggaactacaactggccaagaaggaggagaagctgctggagaaggatttcatctatgagcaggtctccaggctcacagacaggctctgcagcaaaactcagggctgcaagcaggacacactgctcttagccaagaagatgaatggctatcaaagaaggatcaaaaatgcaactgagaaaatgatggctcttgttgctgagctgtccatgaaacaagccctaaccattgaactccaaaaggaagtcggggagaaagaagacttcatcttcacttgcaattccaggatagaaaaaggtctgccactcaataaggaaattgagaaa

SEQ ID NO: 12917 - DNA, 497 bp, Homo sapiens
  misc_feature 3, 46: n = A,T,C or G
cgnccgggcggcgcgaggacagattttcatttcaacttaaaacagnccagctcttttcaaaggagaaattatggcaccaggacttttcctgttctatcatgcgatgatttagattatgattcaaactacatttctcttttctaggctttgtcccataaaaatttgtgcagtttttcaacattagaattcttaattctattggaaacaaaacaaaacaaaacaaaacaaaaacaaaaccaaaccagacctcaagtcaacaaatctattgggatattgtttacgaacaaagtccaccttaagcattggtcctcaaaacagagctcctcaaaatattaggtgctgtgctcattacagaatcaaactgatcacactgattgaaaacttcctcaatgaaatttttaatcaacaacatgcttcaaataaaagtcaaacagtgtttcaaccacttggttcaaacccaggagattttagggttaaaacacttaaaaaggggtttg

SEQ ID NO: 12918 - DNA, 339 bp, Homo sapiens
ccgggcaggtacgcgggcaaccatcaagcagctccattacccagcacttctacctgaatttcaccatcaccaacctaccatattcccaggacaaagcccagccaggcaccaccaattaccagaggaacaaaaggaatattgaggatgcgctcaaccaactcttccgaaacagcagcatcaagagttatttttctgactgtcaagtttcaacattcaggtctgtccccaacaggcaccacaccggggtggactccctgtgtaacttctcgccactggctcggagagtagacagagttgccatctatgaggaatttctgcggatgacccggaatggtacct

SEQ ID NO: 12919 - DNA, 452 bp, Homo sapiens
ccgggcaggttcgtgtcacttttatgatctttattgttggtagccatgtgcatagctaaaaatggttttagtgagtgggtaactaatgagatagaaagggagaaaggatattgggaggaatcgtagtctttgctacaaggtaataccgtataattttttaaatgataaagttgtataagtaagggtcaaaagtcacttgtagctaactttcattagttccacctttaccttgcctagcacagttagcatggtcttggtatctagtgtaaatctgatcttatccaaacatgaatttgttactttttatattacttggttaactgttgatttcaagtctcttttcagacttgtctcccaagttcacatgaatagggccaggctttaagttctttttaatgcgttcattattaccaagcagtgctttttaacactagtgttcagtaagtttattg

SEQ ID NO: 12920 - DNA, 507 bp, Homo sapiens
  misc_feature 63, 67, 68, 88, 96, 98, 102, 103, 104, 105, 106, 108, 110,111, 112, 128, 129, 130, 139, 153, 154, 156, 161, 166, 169,185, 193, 210, 220, 233, 234, 235, 238: n = A,T,C or G
cgggcgtgcttattagttgcggcaaatttgctgcacgcgcgggcggccgcccgggcagttacngatnnagattaagaacaccagatgngaggcccncnaggnnnnnancnnnggaggagattcggggnnncaccgtatnggccagggcgaacnncnaaccncaagnganccacccgcctcagccncccaaagnggaaggaacacaggcangagccaccgngcccactgagaannnaanacactttatgtaagttaattttttatgatagttatctagctttgccagaccaattttgttagtaaatttaaaacattaaaaaattttgaatcctcctaattctgtgtctctaatttagtaattttaagttttgatccttgtttcattctatcattcttttatttaaaaaaattgtcattggcttttctaaaagtgaatcgtgaatcatgattcatgtgaaataattaactctaaaacagcaaagataccttttagaaccgtcatttttg

SEQ ID NO: 12921 - DNA, 515 bp, Homo sapiens
ggggacatgccatctgaggcgggcgaattgtagctccaccgccgcggcggccgcccgggcaggttcggcacagaggttgactttgctgtttctccttctaccaagctggcccggatagaagaaccaaagagagtgctgctctacgttcgaaaggagtcagaagaagtctttgatgccctgatgctcaaaaccccatctttgaagggcttgatggaagctatctcagacaaatacgatgttccccatgacaagattgggaaaatattcaagaagtgtaaaaaggggatcctggtgaacatggacgacaacattgtgaagcattactccaatgaggacaccttccagctgcagattgaagaagccggggggtcttacaagctcaccctgacggagatctaaaggcctgcgggccacagctccccaggagttcagtgcaggtgtttctagatcttacggtttggcaactgcaggtaaccccagtcagccatgtcgccagcacaggtctgtgtcgaggg

SEQ ID NO: 12922 - DNA, 475 bp, Homo sapiens
ccgggcaggtacattccactgcagtctggttgatggctttggccttgaggctaggtgcaggtgggcgaatccctctggtcataacatgctcaaatgccagagggctatcccccaagtcagtcttggcccaggcagaaatctcataggatgtatgagctgtcagattgccaactttgtgtgacaatatgcttcctcggaagttcaaagttctcctctcttgcttgtgggtgtcaaatgcccagaaaaggttcaccacatagccattcacctgccgagaaccaagaagcatgttagatgaacagctagtcatggggcacactaaatacaaaaggcaggattaaaaatacacctctttcctgttctttccttgggtatctcattcttacaggaacaaggttgtttttaaaaatttaaacaggtctacttgtgctaccattagctatatttaggtgtacctcgggcgtctgactaatgg

SEQ ID NO: 12923 - DNA, 454 bp, Homo sapiens
ccgggcaggtactcagtttggtcttctttcaggtgtaggataacttttgttccacgacccataggttcacctgcaagagaagaaagaaaaattgacttaataatacattcaatttagtgcccaacgccatgcctaacacccttataacgtgtctataaagcaaggtttgccgttactacagatgcaaaggccaccacagcagaaccttttgggcaaggtgcctcgcccaaaagaaccgcccaccaagtcatgccattacactaattaagtgctctagcttgttcccgatcgttgggcaaacacaaattctgtaggcttcaccgcatccccaggggtccaagggttgcagcaccccacccttccaccgctcacttaaccagtgaatgttcaggtgcctacctgtgtctgtcctcactgtgaatgatccccctgctgaggactcccaagcgtacct

SEQ ID NO: 12924 - DNA, 498 bp, Homo sapiens
  misc_feature 498: n = A,T,C or G
ccggccaggtacgatcttggctcactgcaacctctccctcccgggttcaagtgattctcgtgcctcagcctcttgagtagctgggattacaggcgcgtgccactgcgttccggctaatttttgtatttttagtagagatggggtttcaccatgttggccaggctgatctcaaactctctgacctcatgtggtccacccaccttggcctcccaaagtgcttgggattacaggcgtggagccaccgcgctcagtcctacaagcaatttttttaaaaactgacaccttattactgataaaagttctcttgtttaaaaatcctatttactatttttaaagataagtattaagttttttttttaaatacaataatttctggtaatttgataaaaatttaaggcatttttcattgccctttggcagaattaactcataactacctaacagggaaagaagggtttaatttattttcagattggattatttattctaaaattaatn

SEQ ID NO: 12925 - DNA, 764 bp, Homo sapiens
tcggtcgcccgggcaggtacgcgggggatgctgtggtggaaaagagcttatttagttatttggctaattaccttgaaaagctcatcaatgagtttcattatatactatgactctcgttctttgggaagcaaatttttttaattcttttttggcataataatactcttttgatttggtttttattgtctcaaatgccacgttatctctttacgtcctagcatagacatgtcctcttggtagaattacaatactcttttcgttttttatgtaaaccacctagtctcaatacttgattatgacaattggccactccttgctaaaatggggtttcaatacttttttccccgttattattaacaattatttttagctctttgccttggatatttctaatttgaggaatcttggcttaactcaattcttaccatctcatctcattttccgccaagtaaattaggggtaaacatcgtttattttaaaaagaaattatatggccatcggctcctttatataaaatatatttaccctatcctgggtggtttaatttaaaattctcctaggcttgtacccagcgtatgttgtggcttttttatcctacccccaaagtgtggactttgagggatattagttattataaatacttttcccacgtgggtaattttaaccattttctggcgcctatagaaaattattttcctggttatttttctcggaggctaccccttccggggcccggtcttctaagaaaatcttatggtggggaa

SEQ ID NO: 12926 - DNA, 498 bp, Homo sapiens
aggtactttttttttttttttttttttttttttttcttttttttttttttttttttttttttttttttttttttttttttttttttttttttttttttttttttttttttttttttttttttttttttttaaaaaagggaaaaaaaacccccttttttattttaaagagggccctttttttttattcccaaacaccctttgagggaactttttttcggggcgggtccttaccaccccttttagattggagaagggccccttttttccgggcgggggttttggggaaaaaaaccttggggggggggggttttttccggggggggggtttttttttgggggaaatcttaaccgccggaaccccaaaagggggagaaaaaaagggattttgttttttctcccccgggggggctctttaaaaaaaagccccaaaaggggcccccaccccaaaaacgccccccggggggggtttttaaaaaagccccccccccaaaaaaaaaa

SEQ ID NO: 12927 - DNA, 355 bp, Homo sapiens
ccgggcaggtactttttttttttttttttttttttaaaaaagagagtatttcaaagtggaaataaataggttgaaactgttgagaggtctaattagatgagaactaaaacatcctttggatttggtaacagagttacaactgcatttttattgaaaatgaaaatgcttaattgagagtgtatataaacttctaggtaaagatggcaaattgaactcatgcatctaattttgcttgttcctgatgcctctcttatacgataaacagatttttttaatggagtctcgctctgtcacccaggctggagtgcaccatctcagctcactgcagcctccgcctcctgggttcaagtgatta

SEQ ID NO: 12928 - DNA, 238 bp, Homo sapiens; identical to SEQ ID NO: 3759

SEQ ID NO: 12929 - DNA, 335 bp, Homo sapiens
  misc_feature 26, 28, 31, 32, 36, 39, 46, 49, 50, 66, 70, 95, 99, 100,101, 111, 122, 123, 124, 125: n = A,T,C or G
gggcggcgtatacgactcatattagngnggnncggnaantattggnggnngaacctttccccaacncggncggggtggcggccgcccgggcaggnactnnntttttttttnttttttttttnnnntataggaaagaaattgaaaaaggggtttgttagggtcaaagggaaaaaaaaatcagaagggagaaaggtttaaataatttttattggcggagggtttatattttaaattaaaatttttagcccaaaaatttccttttgctttgtttttaaagataaagaaatttaaatttccctttttttaaaagggggaaaaaacttttttttttttgg

SEQ ID NO: 12930 - DNA, 331 bp, Homo sapiens; identical to SEQ ID NO: 3761

SEQ ID NO: 12931 - DNA, 364 bp, Homo sapiens
tgtcccttctcccctgattcttccctccgggtaggagggaagaatccgcctgagcagtggcctgccagcacttgagaggctccgcaagcacaagtgtgtttatgggagttgtgcacatgctcagttgaggcattcttcccttaccagtcgagtgtttctagaggaaggtcatagactaatagtctaatagtctatgacctttagtcatactagtgcacatgcctgagcccactcacctgtgaacccccaaaatttgagacaggtctcaattaatttagaaagtttattttgccaaggttgaagacatgcccagtgacatagcctcaagaagtcctgatgacatgtgcccaaggtggtccggccg

SEQ ID NO: 12932 - DNA, 360 bp, Homo sapiens; identical to SEQ ID NO: 3763

SEQ ID NO: 12933 - DNA, 361 bp, Homo sapiens
ccgggcaggtacttttttttttttttttttttttttttagggcttctttattttcttttaataatgttttatcattttcaacatatatattgtatgggtcttttgttaaatttatttctaagtagtttataaatttgcttctataaattatttttaaaaattaatgttttattttggggcttactctctccatgattttctgctaatcttcttgctgctctgccaatctcatattgtatcctctgacactttaagctagtaaggctgcagatttttgcccctggagcccattccagactggaaagttctctcaggcaaaaagtcacaaacttgcagatctcattcatcacagtttagctct

SEQ ID NO: 12934 - DNA, 412 bp, Homo sapiens
  misc_feature 17, 20, 22, 47, 66, 74, 78, 103, 110, 126, 155, 159, 161,166, 168, 174, 186, 188, 191, 200, 204, 216, 219, 230, 255,261, 310, 322, 325, 328: n = A,T,C or G
gagcttcgggaaacacnacnanaggttgaaggggagaccaccgcggnggcggccgcccgggcaggnaaggtganaggnattataaatccggccaaaggaggangcagggnagagaagaagttgagngggcgccggggaaggaaccgacacagccngcangngcagnanggcggngaaggggcaganancanagcacaccnaacncaacaggttttnacnttgttttttgngaggtggtcaagccagggcacaaangctctncggactactctagggcacacgggggaccaccctacatctgttttctctntcaggctccagnagnagncttaaaagtgaaggttatctaaggataagcacatgcctatcttgctcactgctgggtccccactttttagcacagcggctgctg

SEQ ID NO: 12935 - DNA, 148 bp, Homo sapiens
gtgggcgggcccggcccggggccaggggaacttttttttttgggggctttaaaattttccccttcaaatttggggaaaaaaatgggaaaaaggaaggaaaggtaatggtttaaaaattttttgggggacccccaaaaaggggggtttt

SEQ ID NO: 12936 - DNA, 357 bp, Homo sapiens
  misc_feature 4, 9, 11, 12, 13, 40, 54, 79, 194: n = A,T,C or G
aggnacgcngnnntgttggagcagtttgtttgcgcccgcncccggaaaacacgngaaggcccggagcgaaccttaaagnggctcacaggagcgccctatttctttcaattaactacaaggacaaacacatctaaaaggtgagataagagaccagtatgatttgccaaaaatctattttgcactgattttgaaanggataaaggttacctttggggatttgcactgcatgaattctgggaaaagcttgtcggatattgtgatagagatagagaaatgacgtctattatataagacactatgaggctccctgcctatgcttcacatcccaggctaacaaacgtgccccataaacatgcg

SEQ ID NO: 12937 - DNA, 458 bp, Homo sapiens
aggtactttttttttttttttttttttttggacatgtgaagtgtgagatgctcgtgggatatccagcaaaggtgaaaggtaggtggttggacaggagtctggagctcagggagccatcagcatggtgacccatgtggacaagcttaactcggtgatttcactgaaagtcccgggactgggcggcgtgattgcccagggcatgggctctcagtggtatcatactgccccctaggggctaccagaaactgcagtctatttttggtggtcagtaatacggggctactggcattggaaggaagggtatcagggaggggactctagatgtcctgcagtctccttcgtaatggagagttactctaaatcctggactttcaaaagccctgaataacattcatgtagataagaaaaatctattataatggaactgagcccacaccctaacttcatgtttcataata

SEQ ID NO: 12938 - DNA, 360 bp, Homo sapiens
aggtaccaaaacagaaagagggtttaaaaaacagctgcacaaaccagaacaccgattcagaatcttttctccctcttgagtttttgtaaaatactttattattgatttttgctttttttctccctttccctcccaggagaagacatttgggtcttggcctgaggcaggggtgttgagcgatgatgctctgatatggagctgtcactctagagctcggccagatggaagacactatagaaccaggttggacagatttggggtcagggttggaggctgagttcttttgaggactggttggagtggcagccagatggtggctgctgacaaggcaagaggaatttcagagattaaacattgtcc

SEQ ID NO: 12939 - DNA, 396 bp, Homo sapiens
aggtacactcgccagcggttttgccacaagagtatacggaacaaaggagacaggctcatttataatctgacgcggccaccctcctgctgcgttcggtttccattggctgggacgggacctcaccttctgtatttgtcccgactggctagcacttagaactttttaaaagaggcaaaggcataggagaacaaaggaaggaggaagtaacttgtggaatattgagaaaggtaaaaacacctttaaataaggaagaggaacaggctatgacctaatgcttgtttggatcagtataagcatgttagggcaaatatttaggctaaattggggagctaagaacataaagtaattgattttttattatggctagcagatattaagaatgtttgtacctgcccg

SEQ ID NO: 12940 - DNA, 462 bp, Homo sapiens
ccgggcaggtacatggtttgctttgaaggccaaaaggaactggtttctaattcttattcctctcctgactagttttgtgacctagggaaattttgcaatcttcttgagtttcgtttctcatcaggaacaggatgctacctaagtcacaggatagttgctagatttaaatatgatcgcatggcagtggacatgagccataattagtggctaagaatatattgacactgagctctcctttatccatgttaaaattgtagataaacaacatttgacaaagaatagacaaaattttttacacataattttttttttcccttggttgctagaaagaatccacccttctttaaaattaattagggcggacctatttcatattgagcatttttcccaccccgtgaaacggttttttttaaaaacccatagtttcttgagtgaatccaaccttcccttcccttttttggg

SEQ ID NO: 12941 - DNA, 355 bp, Homo sapiens
aggtacgttcctggagacatgggtgtgtctgtagactaatccttattctccaattattgagtataatatctcttgtttaacatgaggaaagggtcaaatttgaggaaaaatggcctcttgtttgatgtgttttagttcattattctcttctattaagagaaattcactgttaaaaaattgtttcccatttccgtatctgaaataatgactgtagttgaggtgatcttgccctgggtctgaaatcatacttccaaaccaaaaaggactttgaatacaaaacttttaagaaatcttgtatgaatacaagctatatctgaaaaattgtgttttataatattgatgcccagttttgccc

SEQ ID NO: 12942 - DNA, 359 bp, Homo sapiens
aggtacttttttttttttttttttttttttggatttttagtagagacgggatttcactgtattagccaggatggtctcaatctcctgacctcatgatccacctgccttggcctcccaaagtgctgggattacaggcatgagccactgcgcccagccgagtcattttttaatactactgcatgtgagttaacacaatcattcccaaattgaagttttagatgggccctcaaaatttttaggatatggttttcctacaggtttatattgaaagtatggggtatctcctattactcctctttttatttgtcttaaaggagaaagggagaggccagagaccaaatgtccccatttccctatag

SEQ ID NO: 12943 - DNA, 352 bp, Homo sapiens
ccgggcaggtacgcgggaacaaaatgaaaggaaaaagcctcctgtagccacagaaggagaaagtgcattgaattttaatttatttgaaaaatctgcagctgctactgaagaagagaaagataaaaagaaagaccctcatgatgtaagaaattttgactatactgctcgaagttggactggaaaatctcccaaacaatttctgattgattgggtcaggaagaatcttcccaagagtccaaatccttcctttgaaaaagttccagtaggtagatactggaaatgtagggttagggtaatcaagtctgaagatgatgtcctggtagtatgccctacaatcttaacagaagatggc

SEQ ID NO: 12944 - DNA, 418 bp, Homo sapiens
  misc_feature 37, 50, 77, 78, 79, 92: n = A,T,C or G
gagtttgcgagatacgactactatagttcgaagtggngacccaccgcggnggcggccgcccgggcaggactcctttnnngtttttttattcnttcttcccttttttttttttaaaaacactactatattttattaaaacaaaaacaagagcccgtagagagcatattatgattacagtccttcactcattcactactgcacattaaatgccagcagtgtttggaatttttttgcccagtaggagggctgacactgaacaccacctctgggatgatgttcatcatcctcatatgcttctccattgtagtggcgccgtctttcccgatttggatcaaagtccaccagttccacttggtccatctcatcagtctcttccacttccttcctctcgggtaggagtttttccagcaaagacagt

SEQ ID NO: 12945 - DNA, 356 bp, Homo sapiens
ccgggcaggtacagaactgaaattcaaatatcgaggatagcaagaaaagctggcaacttctatgtatctgcagaacccaaattggcgtttgtcatcaggatcggaggttatcaattgggtgagcccaaaggtctgaaaggtgttgcaacttctttgcctcatcaaatcttcaatagaaactttgtgaagctcagcagggcttcaataatgtgctgaggtttgtagaaccatatattgcatgggcatacccaaatctgaagtcagtaaataaactaatctacaaatgtggttatagcaaaatgaataagaagctacttgctccaacagataatactttgattgctcgatctcttggt

SEQ ID NO: 12946 - DNA, 364 bp, Homo sapiens; identical to SEQ ID NO: 3777

SEQ ID NO: 12947 - DNA, 357 bp, Homo sapiens
aggtacctcatcaatatgtgcatttattatttgccaattaaaataatataaaactctttaaaaattaaaaaccatatatttccctagtatttctgggatgatttttttttctcaatgacttttgagaatgcttttgctttgttctcaaacctttgataatctccatcattactggttgggtatcccttatctgaaatgcatgggaccagaagtgtttcagatctcagattatttcatatttgaaaatatttccatacagataatgaaatatcttaataatggaaaccaagtataaacaggaattcatttatgtttcatacacaccttatgcatgtagcctgaaggtaattttattat

SEQ ID NO: 12948 - DNA, 357 bp, Homo sapiens
  misc_feature 357: n = A,T,C or G
aggtacaacttaaatacgtccatatatgaccaggttcttcttatgccaagagtgaactctgtgctgaatcagttaatgttctactaaataaaggaaattcacattcgctttcttgttaggttcatgcaaatattgaaaactcttggaatgaggaagaagtttggagaattgaaatgtatatctcctttggcataatgagccttggcttactttccctcctggcagtcacttctatcccttcagtgagcaatgctttaaactggagagaattcagttttattcaggtatgtggggttttgtttggtgaaggattgtgcaggataggatttccttgttaagaacaactgcattttaaan

SEQ ID NO: 12949 - DNA, 360 bp, Homo sapiens
  misc_feature 360: n = A,T,C or G
aggtacgcggggtaaccacctgggaaaacttcacagaaaatgagagtttcagatactgagaatagaaccactaagaagcagaaaagagaagatattctcgtgggggagaacaacggctgggaggggaggaagcatggccaaggcaaagaggtgggcattaataagaactgcttcttgctgccgccatatgaagaaggacgtgttcgcttccccttcctccatgattgtaagtttcctgagacctcgccagccatgctgaactgaatacaacatgtttaagaccacagaacatctgcataggctgtaaatttcgttgaatgatggatgcaaagatggaagacagatggatagaggaaaagn

SEQ ID NO: 12950 - DNA, 300 bp, Homo sapiens
  misc_feature 6, 101, 117: n = A,T,C or G
ccgggncaaggtacttcatacaacttaagcctaaactagattagattatgtagaaacttattcttagagaatatatcgccttaatatttcttatcctgaanagagtatttcttaagntgcccctctcaaagtatatcgattaatatttgtctcaaattaaaactatatcctgggttttttcctttacagtgtgttagcaagtaaatggttacttactaatttaatttctcccaaacttattttaccagttaagcttacctaagttttggttttggggtttgaaaaccccccctttgcttt

SEQ ID NO: 12951 - DNA, 351 bp, Homo sapiens
  misc_feature 351: n = A,T,C or G
aggtacattttacccacactaaagaataggcctgagatgctaataaagcctctaagctattttgagggcagctcaaaatcagtgatatggtttggatctgtgtccccacccaagtctcatgttctgtattcatccccagtggtggaggttgggcctggtgggaggggatagaatcatggtggtgattcctcatggtttcacatcactctccttgatgctgtcattggattagtgagttctcctgagatctggtctttaaaagtatgtgacacatcccccactctcttccttctgctctggccacgtgaaatgctagctctccttttgccttcctccatgacagaaagtttn

SEQ ID NO: 12952 - DNA, 266 bp, Homo sapiens
ccgggcaggtacttttttttttttttttttttccttttttctgtgaatagcttaactcaggcctgggacagttgatcttgaaagaagagatggagaaagagagccgggaaaggtcatctctgttagccagtcgctacgattctcccatcaactcagcttcacatattccatcatctaaaactgcatctctccctggctatggaagaaatgggcttcaccgggtaagatttctccccgattcattgtttctgcctttactcccacct

SEQ ID NO: 12953 - DNA, 320 bp, Homo sapiens; identical to SEQ ID NO: 3784

SEQ ID NO: 12954 - DNA, 353 bp, Homo sapiens
aggtacccagaaaataagaaagggttccaaaatgaagaatcgctccttttgcaaaccttatggtgacaaatataatatttataaaaagtgaattaggtaatatgttaatggagaaataaacatcattatgaaatgctatcttaaacaaaaaataagagaaaatattagtttaaaaatagaacttatagtcgatttaaaaaacaagaccaaactcttagctatgcacaagaaagttactttacacattcacaaatataaaaggatgagaaaacatggattatgaaaatatgaaccgaaataaagctatagtagctgtgcaaatttcagacaaaatagacatcagaaaagacttt

SEQ ID NO: 12955 - DNA, 342 bp, Homo sapiens
ccgggcaggtacactggaggctggagcctgcagatggcatggctctgcggctcaccttgctgcagttggtggtggtgacagagactgcagcttgactgtagtgtccatgttctccagagaagcagaacgagttggatgtatgttttggaagagattatgaggaaccggctcatgtgatgaaggaggttgagaggtcctgtgctctgccatctgcaagctgaagacctggaaagctgagggtgtggctccagtctgagtctgaaggcccaagaaccaggggaaccaacggtgtagattccaggttgaaggcaggagaagatggatgtcccagctcagcaggca

SEQ ID NO: 12956 - DNA, 342 bp, Homo sapiens
ccgggcaggtacaggtttgaggaagcggtgaaggaggctcatgctgtagatcaaaagcttgcagagaagcaggaagatgaagccaccctggaaaataaatggcccttccttggggttcctttgacagtcaaggaagctttccagctacaaggaatgcccaattcttctggactcatgaaccgtcgtgatgccattgccaaaacagatgccactgtggtggcattactgaagggagctggtgccattcctcttggcataaccaactgtagtgagttgtgtatgtggtatgaatccagtaacaagatctatggccgatcaaacaacccatatgatttacagcat

SEQ ID NO: 12957 - DNA, 339 bp, Homo sapiens
ccgggcaggtacatagactccattgatctggagaagatcactgaaaccgaggaccctgtgaaatttcatgaagcttggcagaagctatgcaaagctgatggtatccttgtgcctggaggctttggaatcagaggaacattgggaaaactccaggcgatttcttgggcaaggacaaagaagattccttttcagggagcttgtcttgggatgcaactagcagtgatagagtttgcaagaaactgccttaacttgaaagatgctgattccacagagtttaggccaaatgccccagttcctctggtgattgatatgcccgagcacaaccctggcaatttggga

SEQ ID NO: 12958 - DNA, 347 bp, Homo sapiens
  misc_feature 347: n = A,T,C or G
aggtactacaccactttttcctcaccaacccccatcctattcttgagttgcaggatacacttgctctctggaagtgtgtccttacccttctgcagagtgaggagcaagctgttagagatgcagccacggaaaccgtgacaactgccatgtcacaagaaaatacctgccagtcaacagagtttgccttctgccaggtggatgcctccatcgctctggccctggccctggccgtcctgtgtgatctgctccagcagtgggaccagttggcccctggactgcccatcctgctgggatggctgttgggagagagtgatgacctcgtggcctgtgtggagagcatgcatcan

SEQ ID NO: 12959 - DNA, 332 bp, Homo sapiens
ccgggcaggtacttttctctgaaaggaatcttgtcttgttaaaccctaaagagagtgtccttaatagcaatcagcacttgtaagcttatatactggtgcatttggttttctgttgggtgaatgcggtgtgtgggcgtttgtggattctgaaagagaaagccgtgtgtcgtgtgccatgacatttctattgcacattctttgtactcagaggaatttttttgttttgttttgtcttttaagaaaggaaagaaaggatgaaaaaaataaacagaaaactcagctcaggcacaattgtcaccaaggagttaaaagcttcttcttcaatagaggaa

SEQ ID NO: 12960 - DNA, 327 bp, Homo sapiens
ccgggcaggtacctcatgatatggtttggcttcgtgtcctcacccaaatctcatcttgtagctcccataattcccacatgttgtaggagggacccagtgggagatgactgagtcatgggagtggatatttcccatgcttttctcatgatagtgaatgggtctcacaagatctgatggttttaaaagtgggagtctccctgcacaagctctccttttgcctgctgccacccacgtaagacatgacttgctcttccttgccttctgccatgactatgaggcctccccagccatgtagaactgtaagtccaattatacctctttcttttg

SEQ ID NO: 12961 - DNA, 317 bp, Homo sapiens
ccgggcaggtacatattttttaaaactggttagcgatagctacatgacccaattatattttctatatttatttgattatcagccagtaaactcataatgaagcagctgcgcactcccccaacaattgagaattgaacaaatttccagagagaagtgaaaaatatcaaaaattaaaatcctaaacttgaagacaagttgagagaccatttagtctggccacctgtatccaagattcatttaaaaccaagcagcggccaggcacgatggctcacgcctgtaatcccagcactttgggaggccgaggcgggcggatcacg

SEQ ID NO: 12962 - DNA, 337 bp, Homo sapiens
ccgggcaggtacgcgggattccagggcaaaacacattgtcctaatgaagttgttgcagctctcttcgttttcttgtgccgctggaattggcttgtgggtcacttgttgtgcaaaagtgaattaatttcaaataggaatcatattgcttttgtgaaacaaagaaaatttaccaccttgtctgatacatagattggaaggcgctcttggtaaagaataacccacaaacacctgatcttgattggaaagcattgtaggtcattagggaaaactgatgatgctgactgttgctccagctgtgttggcaattcaagatgaccttgttactaactgaaagtta

SEQ ID NO: 12963 - DNA, 332 bp, Homo sapiens
ccgggcaggtacagcaatgacttcagtaagccaggcatccttggatgtctccatgataataattatttccttaggagcaatttgtgcagtgttgctggttattatggtgctatttgcaactaggtgtaaccgcgagaagaaagacactagatcctataactgcagggtggccgaatcaacttaccagcaccacccaaaaaggccatcccggcagattcacaaaggggacatcacattggtgcctaccataaatggcactctgcccatcagatcttatcacagatcgtctccatcttcatctcctaccttagaaagagggcagatgggcagcc

SEQ ID NO: 12964 - DNA, 339 bp, Homo sapiens
aggtacatatatccaccatttctggtgctcttcatttcatcctgtggattcaggttaccatctggtgtcatttattttctgtgtgaaggatttagtatttcttgtaaggcagacgtccataggcaacaaattgtcttagtatttgtctgggaatgtctttaatttcactttttttccaactttcaacaaaagcttcatatcctggtgatgtctttgttataaggaaaaaaaaatccctaaatccagccttcaaattgaagtaactatctttaatgtgagagcaatcctattcacaaagcccctccccagagtcaatcaagggtttggggaccacatctc

SEQ ID NO: 12965 - DNA, 350 bp, Homo sapiens
aggtgtgatgtttgccccacacaggggtcatttggcaatgtctggagacatttttattgttatagctgaacaggaaagtgctactggcatctgggaggaggctgctaaacatctcacaatgtgttaccccgtcccaaatgtcagtcgtgttgaggctgagaaacatggtttaaatgagtcagaggctggccacagtggcacgtgcctgtagtcccagctactcaggaggctgcggtgggaggattgccttaacccaggagttcaagactagactgggtgatatagcaagacctctgtctcaaataaagaagtaaaaaataaatgaatcagagactagtaaatctacctcc

SEQ ID NO: 12966 - DNA, 324 bp, Homo sapiens
  misc_feature 59, 77, 324: n = A,T,C or G
aggtacgcggggcccttgctcactagaaggagccccctgaccccttcttccaaaaatanctttttgtctttgtcttncgtttctgcattcatcccccttcgttcactcccataacaaccaacagcgacaactggcacctaggacagggacgtgagtgaaggtctgctggagcagagaaactgacactgacaagaagaacgagaatgagaaaccctgcgacgagtctgctgacagctgatataagtctgcaaaatcagctggaccaccaaacggcaattgagagctgcacaacctgcaattacctttattcaattaatgcaaaan

SEQ ID NO: 12967 - DNA, 311 bp, Homo sapiens; identical to SEQ ID NO: 3798

SEQ ID NO: 12968 - DNA, 353 bp, Homo sapiens
ccgggcaggtacatttcttgttaaccacgttattaaaacttgatcagcatgtaagctttcttctgttagatcttttggcagcaaacaaccttccccccaagcctctgaattttggaggagggtaggcttgatgaattgtttagaaattttgtgtttggtggtggcaggaggggagggatcatgcggccttctggtcacaagcaagcctgcagaagatccagtggcctttccagttgacttatacagcctgtgtccctggtgtcactgactggcacctatagcaatacttggtgttatttaacttcttgtcacatacaactttcttgtcttctttccttcaatagtccctttct

SEQ ID NO: 12969 - DNA, 361 bp, Homo sapiens
ccgggcaggtacttttttttttttttttttttttttttctttttgcacatttttacaaatttaattaaagctatgtccagtcttaaaaagacaaaccattatcactccttgctgcggcaccctttcttgggccaggtttgtaacttcaaacatcaaaagggtagggcatcaattttaactaaaaaatgaggagggcctaatatataatctgggcatcaaatttctttttttaaatatatccagattcacatatttttactcttataaaataatggttttaaataataatcatcacagggtttacctacataatcccagatctgggttaaatcatggggataccgaaattttaaaattccat

SEQ ID NO: 12970 - DNA, 611 bp, Homo sapiens
  misc_feature 476, 593, 594, 595, 604, 605: n = A,T,C or G
ccgggcaggtactttttttttttttttttctttttttttttttttttttttttttttttttttttttttttttttttttttctttttttttctcatttttttccctttaaattattttgtttttcccaaaggaaaaaaaaaaaaaaaaaccaaaaaccccccccctttccccccaaaaaaaaagggggggcccccccaaaaaaacaaaaataagccccccccccccctttttttttctttaaaaaaaaaaaaagggggagcccccccccacccccccaaaccaaaacaaccccaccgggggcccgtacaccaacagaaggggggggaaccccccccaaaccaaaaaaaggacccccccccccccaaaaaaaacccccccccccgttttgtatgaccccccccccccccaaaaaaaaaccccccccccccccgaaaaaaaaggaaccccccccggggaaaaaaaaaaaaaaaaaaanaaccccccccccccccccctgggggggccccccccccccccaaaaatccctccccttggggaggaaaaaaaagcgccgggccaaaaaaaaaaaaaacaaaccccggggggaaaaaannncccccccannaacaag

SEQ ID NO: 12971 - DNA, 629 bp, Homo sapiens
  misc_feature 535, 536, 549: n = A,T,C or G
aggtacttttttttttttttttttttgggctttttttcttttttctttctttttttttttttttttttttttttttttttttttttttttttttttttttttttttttttttttttttttttttttttaaaaaaccccgggaacccggggcggtaaaaaaaaaggggaccccccggggggggggggggggaaaaaaagcttaatgaaccccgccacccggggggggggccccgcccccaatttttggtcccttaaagggggggaaaagggcccccgggggaaaaaaagggaaaaaggggtcccgggggaaaaagggtatcccgtaaaaaatcccaaaaaaaaaaggggggggggaaaaaaggggaaagcccggggggcccaagggggggcccaacccaaaataaggggggggggccacccggcccttttccaagaggaaaaaccggggggcccagttaaaaaaaaaaacgcccaaccccgggggagggggggtttgggaaagggggccctttccggtttccaggaaaaaaaacanntgggcccgggggntttgggggggggggaggggaaatatctaacaaaaggggggaaaacgggaaccacaaaaaaaaggggaatacccagagaaa

SEQ ID NO: 12972 - DNA, 359 bp, Homo sapiens
ccgggcaggtaccaagcctcaaaatacttgaactagaagccatctcttaaagttaaaagtaagaagctccaggaaaaataaagattgcatagtaaaaagggatagatggcaggattaattcaactcaacaaatatttatcaaatgtctactctggtcaggtgctgtgttagcagccagcttccctaaagggaggaaaggctagacacgaggacattgaggattgtttatttaaagtcactcataggcatgccataatggatttattaaggggaaattggggtttctgtgaatctttacaggacatagccatggagacaatcactatgttaagtaagttgctgttttcccaattgggctc

SEQ ID NO: 12973 - DNA, 505 bp, Homo sapiens
  misc_feature 447, 448, 449, 500, 501: n = A,T,C or G
aggtacaggtaagccctggctgcctccacccactcccagggagaccaaaagccttcatacatctcaagttgggggacaaaaaagggggaagggggggcacgaaggctcatcattcaaaataaaaccaaattaaaaaaggttttaagggcggaaaattaaaaaaaaaaatttttgggcaattttccattaaaatttttcccccccgaagaggcccaaatgggccttattcaaaattctcccccccttgtgggggggggggaaccttttggggagaaaaaaaaaggaaccttggggggcccccactttttctccccctttaaaaaaaaaagaagaaaaaggggggggggggtggggggtttttttttttataaaagaaagaaggggggccaaagggaggggggctccttcttttctcttgtggtgggaaaaaaaaaaagggggggcgcnnntttattatataaataatatttgggggggggggagaggaaaaaggggggccnnccaa

SEQ ID NO: 12974 - DNA, 591 bp, Homo sapiens
ccgggcaggtactttttttttttttttttttttgtctttgagacagtctcactctgtcgcccaggctggagtgcagtggcaccatctcatctcactgcaacctctgcctcccgggttcaagtgattctcatgcctcagccttccgagtagctgggactacaggcatgcaccaccacacccactaattttttgtatttttagtagagacggtgttttgtcttgttgcccaggctggtctcaaactcctgagctcaagtgatcctcctgcctcggcctcccaaagtgctgggattacaggcttctgaaccaccatgcccagcctagaaggtgggttttctttctttcacctgaggtcctcccagcctgtctttgctatagactcaggtatcagatcagctagcccctgtgagtattaacaaaataagactgccaatcttattcgagttcataggctctgagtgaaatgtatatgggcttcaaggtgacacgtccagggccttaaagacctttctttcactgccaggatgttttctggaaaagctaaggggagtctatcctaaaaaaaaaaagtatgacattaacatcttaatt

SEQ ID NO: 12975 - DNA, 610 bp, Homo sapiens
  misc_feature 607, 608, 609, 610: n = A,T,C or G
ccgggcaggtacatggcgaagctagagactgtaacctgaagattgggacaaattaaagaaaaaaatgtgatttaacacaattacaaaaactgttacgttagggtcaaacaagaaccattttatgaaactgaattacaacaaatgacattatatctaactcttccgggtctccacagcacttatacttacttaagcagcttaaacacttccgagtctccacagcactctgatacttacttaaacagctcttttaacctgccctagtattcttaagtgcagcatatctaattttttttttcctcagtagtttgaacacttgctggctattttttctgtccaagttctcagtaacttcggcctgtgtagtcagtggttctacacagccgacactacttcttacataacacttggtctctctggcttctggaaagggcgaggggttaccttccggagtccagtgctctttcggcacttctgcaaccaggcagtggtaaaaggggtgctctccaaaaccatcttctagcagatctttttcagttaagattacttgttcttccatgtattcatatttagccagctccttgatcagccgcagtatgtcactgcnnnn

SEQ ID NO: 12976 - DNA, 195 bp, Homo sapiens
  misc_feature 18: n = A,T,C or G
gatcattaaggcgaatgngactccacccggtggcggccgcccggcggtactaatgggtgaatattacgcctggaggagaccctggctttatctacagatgattggtcattttaaaactttgattgacagatttggcggatatttccctaaaggcccttttcggggaaacttgcccatttattcaaagcctcaatg

SEQ ID NO: 12977 - DNA, 383 bp, Homo sapiens; identical to SEQ ID NO: 3808

SEQ ID NO: 12978 - DNA, 345 bp, Homo sapiens
ccgggcaggtacaactttgtgttagagatgccaaaaaatatactttccaggacttcaagttgaattacttcaaatgttgttctacagtgattgtgcaatggaatgaattgggtccttgcaaaattcatatattgaagccctaaccccaaatgtaattgtttttgctgtaaggaagtaattcatattaaatgagctgagaaggtggggtcctgatctgataggattcttgtccttataagaagagccaccagagaggggccacctgcaagccaggaggagaaccctcacgagaagcagaaccctgccagaccttgatctgaaacttccagtttccagaactgtgac

SEQ ID NO: 12979 - DNA, 361 bp, Homo sapiens
ccgggcaggtactgtgtctcatctatatgcactctctgatgggcaaggaggtatgaattacgactgaagcccttaccacatgccttacacttatagggcctctctcttgtgtggactctgaggtgaacattaagatctgaattccggctgaagcctttaccacactcatcacatttatatggtttctctctgatgtgatctctttgatgtaagtgaaaatatgaactgtaactgaagcactttccacacacttcacatttatatggtttttctccagtgtgaactctctgatgagtgtgaagaacagagctatacgcaaaatcctttccacacacattgcatttgtatggtttctcccctg

SEQ ID NO: 12980 - DNA, 359 bp, Homo sapiens
aggtacgcggggcagaagagatggttgtcaagatcttgttcctatttctgtatatgtgggagaattagaatcactcctcttatgctcgagcggccgcccgggcaggtacttttttgttctcttcttttttctttttttaatagcatcccgctcttatttcagaataaaaaaaattttaaggtatgttgagtacgaatctatagagcaatgaaaatgcaagagcaatagctatgggcaccaaatggtcaatcttcttatcataatgttgagtggaagaagccaggtccaccagacacatgctgctcatttatgcaaagtttggacacaggcaaaacaaaactagtttgatcgtgatggga

SEQ ID NO: 12981 - DNA, 359 bp, Homo sapiens
cgggcaggtacaactctccagggcacaatacgtttacagctgcctttccttcacatacttttctaattcagaactactcacaattctaagcaaattcccattcacgaagtctgcccataatgcgaccttctctttttttaacatatacatcttaaaaaacaaatatataaaaaattcttattttgctggaatgctttcaatttttcacattttacatgatcatcacatttatttcttatattgaaaggcatggtttctgttgacatgtcgtgcaaagccaaaaaaaaaaaaaaaaaaaaaagggctggattgcttttcaattggtctaacacttttccttgtctaggctttggatttta

SEQ ID NO: 12982 - DNA, 361 bp, Homo sapiens
aggtacagaggccggtgggctccctgacatcccttccaggcaacctgaaagcactgaaatagcttatggccctgtgccagggaccttggcccaagctgctgacctccagggtggggagggagctacccccaggagaagagtcactcagacagcagtatgagcaagccagccagcagctccgtgcctgcacccagctcaggggaatcccagggggttcagatgcccaggaaggaaaaggggacagcgctactgctatggaatgagaccaccacttctcctgttgtccttcccagcttctccccaacctccccttttccctagtttataagacaggagaaaagggagaaagcaaaaagctgga

SEQ ID NO: 12983 - DNA, 363 bp, Homo sapiens
  misc_feature 193: n = A,T,C or G
ccgggcaggtactttttttttttttttttttttttttttctttttttttttttttttttttttttttttttttttttttttttttttatttaaaaaacaaaaatttaatttttcttttaaaaaaaaaaaaaaacacacacaaacacacatatcaaaaaaaatgaaaaacaaacttgccttccgaaaagcccgnaaaggcccaaaataaactaaaaaaaaaatactgaaaaaatctttactgcaaaaaaaagaaaaaaaagggaaacactgtttgccttaaataactggggaagattaaaaaaaacactggaaattttgccagcaaactttccaaaaaaaacaaaaaaatcccgaaaaaaaaaa

SEQ ID NO: 12984 - DNA, 359 bp, Homo sapiens
aggtactttttttttttttttttttttttggaattataatttttatggcattttataaatttaccaattttttcttctggggtttttctttttttcttttttttttgtagacacagagtctctctatattgcccaggctggtcaggaactccatggctcaagtaatcgtcccacctaggcctccaaagtgactgagtatttttggtcatacttaggcctgttaaaccaaaactatacaaatttttcctgcattttctttaagaactttcatatattcatatttagtatttgactcatttggagtttaattttctcagaaataaggtagaaacccaacctgggtgttttctcagttttcc

SEQ ID NO: 12985 - DNA, 479 bp, Homo sapiens
catcttgggtcatcgatgagcctcgccctgtgcctggtcccgcttgtgagggaaggacattagaaaatgaattgatgtgttccttaaaggatgggcaggaaaacagatcctgttgtggatatttatttgaacgggattacagatttgaaatgaagtcacaaagtgggcattaccaatgagaggaaaacagacgagaaaatcttgatggcttcacaagacatgcaacaaacaaaatggaatactgtgatgacttgaggcagccaagctggggaggagataaccacggggcagagggtcaggattctggccctgctgcctaaactgtgcgttcataaccaaatcatttcatatttctaaccctcaaaacaaagctgttgtaatatctgatctctacggttccttttgggcccaacattctccatatatccagccacaactatttttaaaaattaggtcccagatctggacctcggccgctg

SEQ ID NO: 12986 - DNA, 473 bp, Homo sapiens
ccgggcaggtacttttttttttttttttttttttttttttttccaagaaaacgtttttatggaaaacactactatgccagaaggcaccatctttgaaaacacaaactacaatcattttcctgaggcagattcccactaggactgctttcaacttaaagccaactgttaaacaaactgagacaaaatgggaatacaacaacgggggcactgacctgtcccccgagcccaaaagcttaagttacccattgctctcatccccaggggatcagtttgaaattccgttaacccatcaactacagttccgtattccccaacaacgatgggagaagcttcatttctcatgttatctggaccttgaagacggactgccccgagacctatgtgcaagtgacctgggccaagctcatttccaggacaggccttctgatgaggctttttcagtgagcagcaggaagtaaaggcgttcaaggcaa

SEQ ID NO: 12987 - DNA, 483 bp, Homo sapiens
ccgggcaggtaccatgagaaattgtagactttactcctatattctctttccaagccctaggattagccatttttccaagaaatgttgcataccattctgctatgaaaggaaccaaaactcaaatcttgattctgggtgtattttttgttaatttgctgtcttttcttgtagaacctctcaggtaatgactctaggaggtatgtgttgtgtattaacccatatatacacacacatataaactttttatttaatttttatacctatattatgctaaacttggaaatatattgacacatctgccctaagttaataccacatgaatgtttattacctaccttctattcctgcccctaacctcgcactccaaccgtgaggaaccccctcctgccacaccctgtctattccctttgtagtccagtttcaggattttctgtagactggaaccagattgtgtatgttttgctcttttgtggaacatcatca

SEQ ID NO: 12988 - DNA, 472 bp, Homo sapiens
ccgggcaggtacttggagtttccttgtagtagtaagcatagagtttgatgataagtaaacgtcccttaacaaaaacctcaaccttattactatcccattaaaaaacagcaaatacttactgagttcttgtaagagctaatgtcattgtaagatttaaaactaagggcttttatcactttgcaaattattttttaaatgcattcatcattggacagtgttctctcatttcttaaaatgcgagtcatcttccaaaagagttggttttaactgccctaaacatttttggggaagtatgcagggtttaaatttttaagtttaattagctctgaattaaaatatgcacatggaactggtctggcagactgatgcaatagttaaacaactgcagaattactattaatggaaacaatccattgaaaagacaacagctgctcccattaaatcttttttaaaacggtgccccggagctttt

SEQ ID NO: 12989 - DNA, 486 bp, Homo sapiens
aggtacttttttttctttttttttttttgatacggagtttcactcttgttgcccaggctggagtgcaatggcgcgatctcagctcactgcaacctccgcctcccaggatgaagccattctccttcctcagcctcctgagtagctgggattacaggctttgtagctgagcagtttctaaataacacagccactcaactgacataccatggattatgtgaactaacttcaacggttcaggaaggagaactttgtgtgttctttcggaataatcattttagcaccatgaccaaatacaagggtcaactgtatttgttggtaacggaccaggggtttcttactgaagagaaagttgtttgggaaagcctacacaacgtagatggtgatgggaatttctggtgactcagaattttatcttcgacctccttcagatcctgaaactgtttacaaaggacaacaagatcagataggacaggattatcttatggg

SEQ ID NO: 12990 - DNA, 499 bp, Homo sapiens
aggtacaattgcatcaccaaaagctgtttaatttggattgtgtagaataaaagaaaactacataagtctttggtctttgataaaaattttaaaatataaaaatgaaaaaaagaaacccaaaagcagtattcaaaactaacaaatgtcaccttggactatttacagtaagacgcctttttgacaggagaatcttgttctcagcttgttcttttcctcacattttacttacagggattctcactcccccatttgatccctattcataccttgttccatttcctgtctcacatgacacagccatcttccatgcttatctaactcaatctttgagtctctctgtgacactcctttttcctactcttaaattattaataattttattcaacagacatttattgagcacctagtatgggccaggcactgtgttaagagggggggaacaatacagagatgaaagactttgcccttttcttagaaattcatactttgggttgaataa

SEQ ID NO: 12991 - DNA, 402 bp, Homo sapiens
ccgggcaggacgcggggacactagccacacttcaggtgcccagtgtccacactgactagtggtgacggcgttggacagtgcagatacagaacatttctgtcatcacagaaagttcctttggacagagccatgttaagtgatgttatcacaggatggacagaaacattcccgtttgatttatttttcagacccagtttgtggagaaaaataatgatgctttacatatgtctcttgaatccttaatatgtgaatccagagataagtttatacgggaattatttgaatcatccacaaataacaacaaagatactaaacaaaaagcaggaaaacttagcttcatcagcgtgggaaacaagtttaagacacagttaaatttgcttctggataaacttcgaagtacct

SEQ ID NO: 12992 - DNA, 487 bp, Homo sapiens
ccgggcaggtactatcttggctcactgcaacctcttccttttgggttcaagtgattctcgtgcctcagcctcttgagtagctgggattacaggcgcgtgccactgcgtccggctaatttttgtatttttagtagagatggggtttcaccatgttggccaggctgatctcaaactcctgaccccatgtggtccacccaccttggcctcccaaagtgctgggattacaggcgtgagccaccgcgctcagcctacaagcaattttttaaaaactggcccctaatactggtaaaaattttctgttaaaaatcctatttactaatttaaaagataagttttagtttttttttaaattccaatattttggttatggataaaattaaaggctttttaatggcttttgggagttttccttaactcccttaacggggagggggggtaattttttgaaggggggttttttttttaaaaaaaaaatttcccaattatg

SEQ ID NO: 12993 - DNA, 780 bp, Homo sapiens
  misc_feature 9, 10, 393: n = A,T,C or G
aggtacttnntattttttttttttttttttttctttaaaaaaaataggaatacaaggatttacaaaaaaacctcacacagtgcaataataaaggaaagcagacactagtggaacccctagggccactgcatcttgttcatggcaaagaggaagggaggtgaggtctgggtagagtgcttttcccagtcccctgctggcacttctccatgatgacaaggaagtctctgccatcctggccacagtgctgggctccctgcatgacagtgaaaacagtgacaatgttccagcaaagccaccagacaaagttcttaaggtcacaggagagaagggagcccaggatggaaggcacagcagagccatgagtcctggggcaaagagtgctgggctgagacntattgctttgctagacttccataggaatgggcttcttgcggcgagaaaagggtgccccaccctctacttggactacactactctgaaaccttgtggcaaaggcagagaaaaatctgctttatcgggagtggtcagactgtgcttcaatttcaacaggctgccccaaaagagggcacaaggtggacaatgggttttctgaagatataagaatttgtgggcaaagggaaaggaaaagagtgcctattaggcaaattgtgaagccaaaaaggtcaagtggcaatccaaactgttgttggctacctttgagtaagaaagatgagggaatggaaagattgccgtttccaccaattttgaagttccccgaaaggaaaaaggcggaaaaaaaaa

SEQ ID NO: 12994 - DNA, 412 bp, Homo sapiens
  misc_feature 14: n = A,T,C or G
ccatgcgaactaanatgaaagggccaattggagctccattgcggaggccggcggcccggcaggtacgcggtggcttactcttgaagtgaccgccctttagacggttgctcagagcaaggcccatgtagcatccctggagggcctcatccctgaagataaggttgtgcttctggcaggttctcccttacagaatgaagcccctgggtcagtgtggggtggaagccctgacaaccctggaagtggttggccgcaggctaggagttcacaatgtctaaaagtcagctgattttgtgttaaaattcagtgtctggctttgcttcaaaaattgggaagatcggccggacgcggtggctcacgcctgtaatctcagcactttgggaggccgaggtgggtggatcacgaggtcaggaga

SEQ ID NO: 12995 - DNA, 766 bp, Homo sapiens
  misc_feature 632: n = A,T,C or G
aggtacctcacaggtcctcaaactttttggcttcaggagacttttttcactcttaaaaattattgagggctggccaggtgtggtagctcacgcctgtaatcccagaactttgggaggacatggcgagaggattgcttgagcccaggatttgagaccagtctggccaacataacgagacctcgtatctaaaaataataacccagcctggtggcacacgtctgtggtcccagctacttgggaggctaagatgagggaatcacttgagcccaggcaattgaggcctccagtgagccgtgattgtgccactgcactccagcctgggcaacagagagagtccctgtctcaaaaaaaaaattattgaagacctcaataattttttatgtgagttatatctattaacatgctaggaggccaatacagccttggggaattgagggactataacaaaagatctagtatttgtgttatcacaaaagatggggagagactgaaaagtattgaaataaataatgtcttgaaagttaccagttttgccaaaggcagaaagctatagattcaggagcctgagcaaatccaaacttggaaaatccaagggatatagaccaaccacattatatcaagttctgaaaatnaagttaaggaaaacccaccttcaatttggaaaagtggaatggttttttattttcgttaggatggcttccaaccaggaggtctcaaggccacaggggcttttatttagtataggaggccccaaaagaacctcttt

SEQ ID NO: 12996 - DNA, 570 bp, Homo sapiens
aggtacctggaagaccaggcccctttccctccaagcagcaagtagctgatgaagatgaaatatggaagcaaagacgaagacaacaatcagaaatttctgcagcagtagaacgtgctcgtaaacggcgtgaagaggaagagcgaaaggaagaacaaaggaaggcagcttgtgcggagaaactgaaacgattggatgagaagcttggcatcctggaaaaacaaccatttccagaggaaattagggaaagggagcgagaaaaagaacgggagcgtgagaaagaacttgaaaaagaacaagaacaggagcgagagaaggagagggaaaaagacagagagagacagcaggaaaaggagaaagagctggagaaggagcaggaaaaacaaagagaaatggagaaagaaagaaagcaagaaaaagaaaagaactagaacgacaaaaaaaaaaaaaaaaagtactggccgccatgaggaaagctgctgccaagaaagactgagcccctcccctgccctcttcctgaaataaagaacagcttgacagcaaaaaaaaaaaaaaaaaaaaagtacctgcccg

SEQ ID NO: 12997 - DNA, 501 bp, Homo sapiens
tcgaccaacatgtgtttagcattccacgggcgcatgaagtctgggtgttgtgctcgagtctctgaatattttgataggaagcgacaagaaaattcaaactgctctttgctgactactggaaagtgaaaagatgctaagttacattcaaagaaaccataggcatttcaaaaacctctttctaaactttggtttaaaaaaaatcagttcaccacaaacagaaatataaatcgaggctgtagccagctgctggtcatgtccttggcagtcttttgtgcaaaataaggcatatttgagctccacattaaccttgcggcaggcgtctacttgctctgcatgctgtagcagtgcacgtcctccttccccttggtggtgtagcctgggagaggctgcccatacttatccacacaccagcagaagccccgcttcctgcctttggaagggcgacaccgctttttcttataaaatcccttcttgtcacagttgggaatgtgtacctgcccc

SEQ ID NO: 12998 - DNA, 350 bp, Homo sapiens
ccggcaggtacctcaaagctgcaagtcagattctgatattgaaagatggtaaaatggtgcagaaggggacttacactgagttcctaaaatctggtatagattttggctcccttttaaagaaggataatgaggaaagtgaacaactccagttccaggaactcccacactaaggaatcgtacgcggggggttccgggcgttaccatcgtccgtgcgcaccgcccggcgtccagatttggcaattcttcgctgaagtcatcatgagctttttccaactcctgatgaaaaggaaggaactcattcccttggtggtgttcatgactgtggcggcgggtggagcctcatctttcgc

SEQ ID NO: 12999 - DNA, 515 bp, Homo sapiens
ccggcaggactccaagtaaagctccagtgactaatatgtataaatgttaaatgatattaaatatgaacatcagaattactttgaaggctactattaatatgcagacttacttttaatcatttgaatatctgaactcatttactatttcttgccaattactcacttgggtatttactgcgtaatctggaacatttagctaaaatatacacttttggcttaaaaattattgctgtcaattccaataataattcttagcttataaccaaagagcagtgtttaaaaggagagcttctatacaaaacctattcctggcgttacttttcatacaatttttgttctgttttacctggaaataatttaccaaaataactgagtgttgctgctaaagaacaaaagtggggaggtatcagggaacaagaaaacaagaaagggtatgatcaatcattttcttctgctccaaacagctggagtaaaattcatgggaaatggcccttcatttaaaaaaagatgtacct

SEQ ID NO: 13000 - DNA, 781 bp, Homo sapiens
  misc_feature 585: n = A,T,C or G
aggtacagcatatggaggtcaggaaggctatttgcagcacatgtgattaggggctactgatcttcagggtttagctttcttccaaacagtgtaaaatacccacaattccaagtatgaagggacacagacgatctcctttgaaattccacaggacaatacaggcgccccagctgttcttcatagagcgacagtgcttctgtcagattgacacagttcccctaaatcaaagagagataagcaaatgggattcttgagtccttccaagggccccactcatctgaaggtctttaataaaggagaacaattctagctttagataaaagttcatctttaaaaacaagataaggcttctgtattttcacaaatcacactgcattctatttatagacccattagagctcgttatccttctacctcatttaccaagccatttcaaattattagaatatgaaatgatagaaagcagtgaaaccaatttcttattagtgacactcactgaagtaaaaacatgcaatttgcaaagattcatacaaataactcattcaaagggaaattttctcaataacggtcaccattatattacanatgaagtatcaaaaatataggggttctgatttccacaatggtttaaactaacaatcttctaagagtctaaatgttgacacaaaactatattcaacccccatttttttcctagaactggggataagagaacaaaagttattcacgatatatacgaataggatatcccctaattggcaccttattaaaactttttttt

SEQ ID NO: 13001 - DNA, 477 bp, Homo sapiens
  misc_feature 245, 246, 247, 251, 252, 253, 254, 258, 259: n = A,T,C or G
aggtacacaaagttataattttaatgcttttcacatccatgctgaaaatctgcaatttggtaaaaatgaaaggaacataaatttttccaaaggaatttttcacgccattatatatacacttcatgagaaagtttcaaacactttctcaatgatcacgagttaccaagaaaataaaagattaaatttgtacttttttttttttttttttttgtaactgaagctttatctggagtggggaggggggnnntgtnnnncagnntggggcacccaaagacaaccatgctctcggtgaaggcgccgaggtcctggcattgtttctggttctcttcggcttggcattcgtcctcctcaggccagtgctccacccaagtgtccttcccgatgatgtagctgaggttgggcttctctcctcagaaatcggaggagagacccccatgaagggaggtttttttttccttcaatttaagggtttttctg

SEQ ID NO: 13002 - DNA, 477 bp, Homo sapiens
  misc_feature 336, 477: n = A,T,C or G
aggtacttttttaaattttttttttttggtggagatgaggtcatcgctatgttgcccaggctggccttgaagtccagggcttaagtgatcctcctgccttggcctcccaaagtgctggtgttacaggtgtgagccaccacacctggccaacatgtggctttcagttcttacttgaagacagctgctctagctagaaactttctatcggcatttgaacccactgggagaaggcattaacttccccacccccaagaacacttcttggaagttacacacaatacataaacttcaatttcaaacagttgcttggtcccactagccatgaagctggatggngacgtaatattctatctgggttgtcatgggccaaattaacattttgagatttctgttaagaagatgagaattggataatgggcaccttaacagtgtctgtcagagttgactcctttgtgtatctcctgcacaaagcatttn

SEQ ID NO: 13003 - DNA, 480 bp, Homo sapiens
  misc_feature 457: n = A,T,C or G
gcgaggtacttttattccagtttaatgacctagacagccttctacctccaaaatatacatgcagatatctacccaaacccaattctttctctagaacgaagcttggcccatttaggacactttctttttgacgcttccagagaactttagaaaaggtactatttgggttccttctataatcattcccctgcctagggaaactctcttttggtatcccggactataatgaagaggctttggatcctggcctttagcatatttagaccgcggtcacaaaaaaagaattgggttccttttaggggagggttttttttgtccccccccaatttttaaaaaaaacccgtgggggggggggggggggaaaacccctaaaagagaggggggggcggaaaagtggccatccattgttaaaattgcccacagtgtttctgggccctctttttatcaggacccgaanttctgtgcatcttcacccatagc

SEQ ID NO: 13004 - DNA, 468 bp, Homo sapiens
  misc_feature 269, 327, 381, 424, 468: n = A,T,C or G
ccgggcaggtaccccagctgatgatgttccacaaaagagcaaaacatacacaatctggttccagtctacagaaatcctggaactggactacaaagggaatagacagggtgtggcaggagggggttcctcacggttggagtgcgaggttagggacaggaatagaaggtaggtaataaacattcatgtggtattaacttagggcagatgtgtcaatatatttccaagtttagcataatataggtataaaaattaaataaaaagtttatatngtgtgtgtatatattgggttaatacacaacacatacctcctagagtcattacctgagngggttctacaagaaaagacagcaaattaacaaaaaatacacccagaatcaaatntgagtttttgggttcctttattagcagaaatggtatgcaacantttcttggaaaaaatggcttaatctaaggcttgggaaagagaan

SEQ ID NO: 13005 - DNA, 392 bp, Homo sapiens
  misc_feature 257, 276, 312, 360: n = A,T,C or G
aggtactttttttttttttttttttttggcaagtcttcacaaaattttatattccccaagggcgggcgatcacaatgcctgtgaagcttgactggcagacactgaggcctgaagctgggggctgcagggggtcactggctcacccggtccccccgtaatctgtaaaacatactgggtgagggaggctgctggaggacctgaattctcccttctccaggcagtagcgaggcataggcctgttggccttgggcccattnacgagcattccagccccanagatgaacgatgaaatcttgggggaaaaaagagggntcttggggccaattggggaacccaaaaaattttctctgtggtaaaaantgaaaaaaaaaaaaaagggtggcccccttttt

SEQ ID NO: 13006 - DNA, 388 bp, Homo sapiens
ggcctgatgcctcaagcctgtaatcctagcactttgggaggcagaggcgggcagatcacttgaggtcaggagttcaagaccagcctggccaacacggtgaaaccccatctctctaaaaatacaaaaattagctgggcgtggtggcacacgcctgtaatcccagctactcaggaggctgaggctggagaatcatttgaacctgggagggggaggttgccgtgagctgagcttgcaccattgcactccagcctgggcgacaagagtgaaattccatctcaaaaaacaaaaacagattgacaacaaagacagtttcagaaaatgacaggactgggcaaattaacaaaatgtttgtaaacatggaatgttcaggaactactgatgtaccctt

SEQ ID NO: 13007 - DNA, 496 bp, Homo sapiens
ccgggcaggtactgaatgagtattgcttttgcaccattgtgaagttgacaaatctaagaccatcataagtgggggaccatctgtatacacaaatacacgtaaacacacatgtattttttttttttttgagacaaaagtcttgctctgtcggccaggctggagtgcggcctcacatggtaaagtaagctggcctttcttatttgtcacctggaaatacatgcgaccatttaaagagacaaaagagagggtggtagcataccctgaacttgagttgggagctacacacaatattagtgggttccgagcatcacagacaccctttgtggttctttactgggcccagaatttctaatacttgatttcagtgggtctgttggcaggttacaaatgaaggcaatcttcataaaagtcactttgtggaggtggactgatcacaaaaccatttttttttggggagcccccttggggacccaacaaggttttatggctttttggg

SEQ ID NO: 13008 - DNA, 475 bp, Homo sapiens
ccgggcaggtacaggttgagtatcccttatccgaaatgcttgggagcagtggcgttttggattttggattttttaaaattttggaatatttacaaatacataatgagatatcttgaagatgggaaccaagcctaaacataaaattcatttttctttctttaaaaaaagaaaagccagtgtcttgctctgtggcccagctggagtgcagtggtggggtcatagctcgccgcagtctcaaacttgggctcagccaggtgccattgcaccctttttaaaaatgtttattgatacagcctccctatgtttcccagactgatctcaaactcctggcctcaagcaatcctcctgcctcagcctcccaaagtgctgggactacaggcatgagccaccacacccggctaatttatgttttatatacatctttgtagttataacccaagctactgttgacaactgttgcatttgatgcattata

SEQ ID NO: 13009 - DNA, 471 bp, Homo sapiens
aggtactttttttttttggtatttttttttttttttgagatggggtcttgtcatgttgcccaggctgctcttgaactcctgggctcaagcaatcctcctgcctcccaaagtgctgggattacaggcataagccattgtgcctggccctcttggtaattttgtattactgacccatactctgctccttggctataaattcccacttgcttatgctgatatttggagttaagtccattcaccctctaccactgcaaaatcccattacatttgtctatatacctgtcataatggccctgaataaagtcttccttactgtgctttaacaattctcattgaataatttttttaaacatgtatagcttaattaaggaggtgagattccaacgcctttgccatattctgaatagaggtaaggcactaggccagtccctgctcaagagaagggtgtaaagccccaagttgtccctgttt

SEQ ID NO: 13010 - DNA, 392 bp, Homo sapiens
ccggcaggcactttgcttttttgttctgttttttttttttttggggaggtttttgctgtcttatcacttgaggtcaggagttcaagaccagcctggccaacacggtgaaaccccatctctctaaaaatacaaaaattagctgggcgtggtggcacacgcctgtaatcccagctactcaggaggctgaggctggagaatcatttgaacctgggagggggaggttgccgtgagctgagcttgcaccattgcactccagcctgggcgacaagagtgaaattccatctcaaaaaacaaaaacagattgacaacaaagacagtttcagaaaatgacaggactgggcaaattaacaaatgtttgtaaacatgaatgttcaggaactactgatgtacct

SEQ ID NO: 13011 - DNA, 393 bp, Homo sapiens
aggtactccaagctctgagaccacctcttctgcaaagccttcctgattctgcagagaacaggtaggcatttcatccttgggacctcacagcaattcaggacacatttgtgtcccagccctgcgtggcttggctgtctccatgaatatacactttgcaacttctgcaccaggcatcataccaagcacacagtaggcactcctgtgttttttgaataagtgactatatcatcaccacatttcaaatgcggaatatatgagctactagaaaagacataagggtgagattttacatctttattgtatcctagatatacaagtctattactgccttttcccatgtttctgtcaacatagcataaagaatgtgcgatttacctgttagaaattgaataa

SEQ ID NO: 13012 - DNA, 472 bp, Homo sapiens
agggacttttttttttttttttttttttttcggcttccaaaagctttattggcaaatatgctctataaaagaatgatcaatcctgttgcctctaagtcaatggaatgaagagctgtgtccagggacacaccacgccgtgctgaaggagactgctgttgtgtccacctcttattcatagacccagtcatgagcacaagacttgtagtcaaccagttcttcaggcttaaaccacccgcgtactggaagcaggagggagccctggctagggcaggccttaaacgcaagggaagctgagcagagatctgcacactcaaccccatttgatattcttctcctcctcagtcatggccagcgtggttggtgactagaccggtgccaatagtcccggttgccatctcgcaagggtgaaacgctggcctttctttcccgggtacctgccgggcggccggttaaacagggggatcccccggct

SEQ ID NO: 13013 - DNA, 477 bp, Homo sapiens
ggcatttctcccagggatctctgtgcttccttttgtgcttcctgtgtgtgtggatatttaaaggggctggaaatgtgcaaaaacatgtcactacttagacattatattgtcatcttgctgtttctagtgatgttaattatctccatttcagcagatgtgtggcctcagatggtaaagtcagcagcctttcttatttctcacctggaaatacatacgaccatttgaggagacaaatggcaaggtgtcagcataccctgaacttgagttgagagctacacacaatattattggtttccgagcatcacaaacaccctctctgtttcttcactgggcacagaattttaatacttattttcagtggggctgttggcaggaacaaatgaagcaatctacataaagtcactagtggcagtgcctgacacacaccattctcttgaggtccccttaggagatccacaggtcatatgacttctgggg

SEQ ID NO: 13014 - DNA, 376 bp, Homo sapiens
  misc_feature 349: n = A,T,C or G
aggtactttccttgggatggctttctaatttaaagaacagcctgcctcaaaagcttgcagtgactgagcagatatgctagcaccaacttttccaaaaaaaaaaaaaaaaaaaaaagggtactcccaactgtggtcgcgctctcaccccttctgctgctctcgtggccccctcgcgatggcgggcatcctgtttgaggatattttcgatgtgaaggatattgacccggagggcaagaagtttgaccgagtgtctcgactgcattgtgagagtgaatctttcaagatggatctaatcttagatgtaaacattcaaatttaccctgtagacttggggtgacaagtttcgggntggtcataggctaggtacctgggcccg

SEQ ID NO: 13015 - DNA, 456 bp, Homo sapiens
ccgggcaggtactttttttttttttttttttttttttttcctttggaaacagggactcactctgttgcccaggctggaaaacactgacgccatcacagttcactgcagccttgacctcccaggctgaaacaatcctcccaccttagcctcccacatagctgggactacagatatgcccaccatgactagctaattttttgtaaaaacagggttttcgccatgtttgcccaggctggtcttcaaactcctgggcttaaggaaatacctctttccttggacctccaaaagtgcctgggaattaccaggtgtgaagcccaaacgcccagccctattttcttttgatttggggtcctgtatagaccaatcatggcaattgacagaatcatccatttatcaaggacaatgggggccttttcctttgggaactttgggtagatataatgcaagaacatttta

SEQ ID NO: 13016 - DNA, 438 bp, Homo sapiens
ccgggcaggtacctttttttttttttttttttttttgtttattttttttttttttttttttgtggttttaccctttgatatttattaacaaaaatggtccacaaaaggattgagtcaaaattacaaagtgattaagagttaaaacaaaagttgttctttattggagtttctgggggactttaaccagtccccaaagctgtttttatttcctaaaataggacttaaatgacatccctcaagtgaccgattttaatagaaactcctcctctttccttttggcaaagcaaaatttacgggaaagtcatctgttggtacactcaaaccctcctttcctaataagatgtgcatgcctgtatatggattgggatgcagcgaagaaagaagtttaactaaaagggtaaaaaaaaaaaaaggccaggcacagaggctgacaactgt

SEQ ID NO: 13017 - DNA, 434 bp, Homo sapiens
ccgggcaggtactaaaagcgggcaccaccatgcttggctaattttcatatttttcatagaggcggggttccaccatgtggccttgcttggtctgaaagttctgagctcaagcaacccacctgccttagcctctcaacgtcctggaatgacagcatgagttgccacacctggctgcatgccgaatactttagagttgtttatgcctgacacttccagggcatgcagaactatggtggcattaaccgacacattaaccaactgcctcacttacttttcttttgactcagtttataaattttcttaatttaaattttaatttcaacatgtatacatctttgaaataaataaaataagctctttgaatgtttgacataacgtagaagaaattgacaaatggacatctttacttcattttctgtctcaaaatgtggtaa

SEQ ID NO: 13018 - DNA, 538 bp, Homo sapiens
ccgggcaggtacttaacatgctttcaacaataaattctctgacaaaccctaagtgtaactcagaaaaaagctacactaactaaatgcagattgaattaacataatctaccataatcaagaaagttttctaaagaacttttcatattttctttgattaaacatttatggtcttataataccctaattgatcatctacctcctaaagaaattccatacttttaaaaatgataacaaacgcagagatttttttgccaaatggaaatttgggcagaagttatagagtttttaattaaccaaaaagggaattctggtgttttaaaaattattgcacctacttctgacccacttatgtaattcttattggtgacctggtaaggaaaaactcaacttccaattcttctaaagagttcaaaaacaataccctcaattaaaaaaataggctttatcctgggatataaaaaatggattactgggttttggaatttttaaacggaacagaacaccatattttgaaagccattaagtaatatttcattat

SEQ ID NO: 13019 - DNA, 443 bp, Homo sapiens
gggggggcgaggtacagatttgattatgattttaatgtttgaaagattgcacttgtttgcttttactatagggggggtaaaatatattttgtgttcacagtatatgaaaatatggagtaatttaaacagtaaataaacattctgtggatgcttatttttgtattgacaaagtatcaattaaactatatgtgttctttttcaaaaatgctggatccattcatgattggttcaaatatctaattatttcctcaacttaaatttgctttttaaattgcttaatatgtaggggtaggttaccaaatgatagttggataaggaatcatttagttatcagagcttcagagggtcatctgctttccaccaaggaagtttaagcattatggttcattagtgattttgcttgaagattttaaaaatgtacgggcatcttccagctgcttggg

SEQ ID NO: 13020 - DNA, 556 bp, Homo sapiens
aggtactaaatgcatcctccatttcttataatctttcttttctaaatatcaacggcatgggtgaatagccagcttactgggtagttctaaaaacttttgcatttctttcaaaaactctttcagaaacactatatcccatgtctataaattgatgatacgatttggatagaatatattgttccattaacaacatttctgtgaagaggaaataccttctcacctcttgttgtaatgtaacgatcatgaatacaacgcatcaaaaaacctcagagttaaggcccacttaatatattcatactgtgaatcaaaaaaattatatcaccaggattcgctgactgcctacctattcattggtgctgaatctcttgaagcttcttaggtatactcacctatgattacaatggcaatatcccatttacacatggactttggtcctaatttcatacattaaaaaaatcttaaattccctggtccttaactacccctttctctatagaacagaaaatttactttagtgaaaaaccttttttttgattagggttttttcataacccat

SEQ ID NO: 13021 - DNA, 434 bp, Homo sapiens
ccgggcaggtacatatttactgtttctctcaactttaagaactctagtctcacttcagatatattatacaaatcctaatcaagaaaaaaaaaaatcaatggattttcacttttaaaaatctttcttccctctccttttaggaaacgcagaaaaactaagctttctttcaataccaacaccaacaatgggctttcaataccataagcacatcaggggaattaaactcttccatggcagaaagaggagataatttaaaatgaaacctcagcctactcctcatagtctaccttaaatagttatactatgtttttaaaaagcaagttattactttagtaaccatttaaaagaaagtaactagaactattttgttataaagcatagctaagaaaacaaaatgtcccaatcattatattaacttacaaaagcatactaaa

SEQ ID NO: 13022 - DNA, 419 bp, Homo sapiens
ccgggcaggtaccatccacgtcactgggcacctggcctaacatggccaggtagggctcgtagatgaccgaacggaatatccacctccagcgctgctcattctgcctaaggatcccttgcctggccacgccaaaggccaccatccacaccgcaaagaggaacaggaagaagaacacatcgatcagcatcctctgcagcattataatcttgggtcctaagtttctgcttacagtaaaaatgtggatcaatcttagagtgaaaataatgtagtccagacagaaaatgactcgtccagaatacaaagagcttttattagaagagtggagccgaaatacaattcctgctatgaagaaaaaaagccccaacgtgtccatcacattccacagggcagtaaaataattcaccccatttacgtacctt

SEQ ID NO: 13023 - DNA, 293 bp, Homo sapiens
ccgggctggtacaagaagcactatatagctcatttatcttcattaactccaatcttgctttgcataaatatggcatttcagaagtcaagcatacaaaatactttccttagagaaataaaaatatatgtaaaagccagacaggccaacagggcgatcacattcctcagaaccgcattgtccaattcaataaccatcattcacatgtggcaattaaacacatgaaatgtggcttgtccaaactgaaatgtgctgtaaatgttaaatagacactaggtttcaaagatcttgtacct

SEQ ID NO: 13024 - DNA, 497 bp, Homo sapiens
aggtactttttttttttttttttttttagtttatacaactcattaaagaaacttccaaggtctggtttgccacatgctatatagtctgaatgttagtatcttcccaaaattcataggttgaaaatctaacactcaaggtgacggtattaggaggtgaggactttgggaggtgattaggtcataaaggcagagccctcatgaatggaattagtgcccttataaaagaggcctgatagagaccccctagctccttctaccaggacataggtagaaggtgccatctatgaaccagaaagcagatcctcacccctcaccagacaccaaatctgccagtgccttgagttcggacttcctagcctctagaactgtgagaaatttctggtatttacaaactacccaatttatgattttttttatagcagcctaaacagactaagacaccacacttattcacgccccttgggatggtatattccttggatttcttattgcttttc

SEQ ID NO: 13025 - DNA, 497 bp, Homo sapiens
gcctacacacagagccacctgccacctatagatttttttttgcacaggaaagaagtttcttttaatggagcccatgtgctatgagtctctgttatagcagctgagccaggaagtgcgggctaacttctgattccttgccctatttcttcttctctcagctctgaggctgataccttaaatctgagaggaggtagatttactagtctctgattcaattattctcgacttctttatttgagacagagggcttgctatatcacccattctagacttgaactcctgggttaaggcaatcctcccaaccgagactcctgagtagctgggactacaggcacgtgccactgtggccagccctgtgactcatttaaaccatgttttttgagcctgaacacgactgacatttgggacagggtgacacattgggagatgtttaacagccttctccctggatgccagttggaactttcctgtgcagctttaacaatagaaatgtcccg

SEQ ID NO: 13026 - DNA, 517 bp, Homo sapiens
  misc_feature 371, 383: n = A,T,C or G
gggggttattcggtcaccacgctccggccggtactaacggattttccgagcttaagcctctcacgaagcgggaatgggttgtcttctggcctcagagtatcccttatcagagccttgggcccctgggccccttcactcaatacttggtggaccaccatcacaccctcctgcacaatggttattggcttgcctggctgattcatgtgggagagtccttgtatgccttagtattgtgcaagcataaaggcatcacaagtggtcaggctcagctactctggttcctacagactttcttctttgggatagcatctctcaccatcttgattgcttacaaacagaagcaccaaaagtaaacttgaagatgtctgaanaaaaaaaaaaantttttgggaaaaaaatagtgaaaaaaaaaaaaatggggggggggcccccccctctttttaaaaaaaaaaacccccccccccccccgcgggggggaaaaaaaaaaaaaaaaaaaagggggggggaaaaacccgtg

SEQ ID NO: 13027 - DNA, 255 bp, Homo sapiens
gggggagttactatagggagtcacccacgttcacagccatgctcccttccctcagagccgttcaggaccaggaactattcctagcatttggcatatatgtgcaggagtgccagcttcctctctcttcagtctcaatttctgtgctgcctcactattgacacttggtgttttatctccagagatctgcttaaagtatgtcggtgtattcaatattctgttatctttcagtggagataaaaacaccaagtgtcaaaa

SEQ ID NO: 13028 - DNA, 530 bp, Homo sapiens
aaacatatactagaacagctacgcatgccacatgctctcaaccttctgaggaatctcgtggtgttgattattctgggttgcgactgtatcctctgtttctctttttataggctcctaacgttgggattacgttgtccctattaactaaagttctacccgttactttaaataagaaagttcgttcttttcaccttccttttacagccagatttttcaaaccagtgttgcaggtgggtaggcagatatggttgctggcaggagcttgtgaaaatgaagcagggtttcagctgagagtgaggaggacggaggagagatcggaggtttaagatagaaatagtgtggatgtaatcatctaggacagagagatagtacttacatctgcatgagtgacatggcataaaaatacttaaaccaggggctcctggaaatggggaaaaaaatgtaacccacatcttttaaagggattgtaacctccctccctcccaatggggcctatttttttgggggaaaagagaatttttaggaagggg

SEQ ID NO: 13029 - DNA, 500 bp, Homo sapiens
aggtactttttactttttttttttttaaaaaaaccttgagctcttaaggattaatgctcttgagttatgagatatccctacattccaataactctaccttctatttttatggattaaactagttggagtagtttctgttcttttcttccaaaacacccctttggaaatctggaaaataggggaaccgatttttctccttaataatggaaattgggctttttctgagaaatatttattaaaaagtgggtatatgaaaaaaatttttgggggggtggggggcggtacaacttgtaaattcctattgtcctttaaaagggccttttgttttaaaggtccttctttttatgtcccggtttttttttaaaatttttatttggggttattttttttaggatttttccttatttttaaataaataaaaatgtggttgtttggctttttgtggtttcttttactttagttatatatttttttttttttttctttttatgtttttttgt

SEQ ID NO: 13030 - DNA, 433 bp, Homo sapiens
aggtactttttttttttttttttttttttttccctttctatggtctaaagtcaggcaataaatacaagaatatttggaagtttttatttttatcatacaatgagactatctttcctaccttggcttcctagtataaaaagctatttgaaaatttatattcaatgtaatttttgttgaggcctttattggaaaaaaaattgtaccatttttttgaggaagaaaaacacataatgtgaacagagctataactgctgaattaaagaaaaactatgttgcatttatttcttagaaaaaaattttgcaagaaaggtctgaggccccacttaggtccgccctgcaagtcaacacatcctgggtttgctccgactgaactcctcatggtccccttgcttgacaaaaaattcaccctggtgatggcagctcccaaggcagc

SEQ ID NO: 13031 - DNA, 447 bp, Homo sapiens
aggtactctttgttttggcacacttttcctgacaaatcagccagtgttctcaacacataaatactagtccacgttaacaacaatagcatatgagaccgctctccgtaaagatgccagattggatgcaaatggactggaaataccttggagggtttcacaaaaataagacaaagggcaaaggaactttgccaaaggagatggagagcaattctttaaagttagtgggagggaggaagcaaagagctcataaatacaagcctcttaaaatgggacgcatttgcctcgcgcctactgggtgtctgcagctcagcttggtgccccacacaggacaccgactttaagtggctgcctttgcaaggctgaaaggccatgagggttgatgcctgaagtgtcagcgccatctagtggaaacatgtggcatggcccttttggaaggccttagcctat

SEQ ID NO: 13032 - DNA, 417 bp, Homo sapiens
aggtacttacggagtgacaaagggaaaagtttgctttgaggcaaaggtaacccagaatctcccaatgaaagaaggctgcacagaggcctctctccttcgagttgggtggtctgttgatttttcccgtccacagcttggtgaagatgaattctcttacggtttcgatggacgaggactcaaggcagaaaatggacaatttgaggaatttggccagacttttggggagaatgatgttattggctgctttgctaattttgagactgaagaagtagaactttccttctccaagaatggagaagacctaggtgtggcattctggatcagcaaggattccctggccaaaccgggccctttttaccccatgttcttttgaaaaatttggggttgtaaaaataaaccttccggtaaaaagggagg

SEQ ID NO: 13033 - DNA, 562 bp, Homo sapiens
ccgggcaggtaccgtggccagggtcagattgtgcagaaggttatggtgcagcccatcaaccttattttcagatacttacaaaatagatacgcggattcaaggtggtggactctatgatgcaagatgaatattgcgcgaaagaaagggctggcatacattggcttctagattgacgtataatagaaccccttgttatctaggatcgaaatgcaggatagaagattccatatactataaaaccacaagttcaaagcaaaaaccaaacgtggggggtcgggaattcaatggcttaaaaaagggaagcattaactagtgcaccttcaagcataaccaagaggttgctccttcccaaacctaagaaaaagtggaattcacaatggaaagttgggaggaaaaatttgattggaagaaaagtggattacccaggcctggtctttattaaaaaaagatgacctatatgccccaccaggggaaaacacactggttccataaagggcggaggaagaaaccccccacgggagacaaaaaccacgatggcggacgtcgaaaaaaacttgagagg

SEQ ID NO: 13034 - DNA, 410 bp, Homo sapiens
aggtaccaatttgggttctatattttgtcattcagttgggtttttaaaaaaattcaaaactcatgcatgttacctacttgtcatgtgtgaattatttctcacaattttaattaatctgtgtgtatattagttatataaagcaatggatttccacattcttaaagcaggaacctatattcaccagaaaaggatcctcctgtttctcatcaaattttttttcagctcgaacaatccaagattgggaatagtaagagtggcaaacaaatgttttcttagggacttactgagaaaagaaaaaacttactgggagaacagagacttagtaaaatttctattgctacagacaaatgctaaaaaccagctttataataacagcattataaaggatagaacttaatatagaaccagag

SEQ ID NO: 13035 - DNA, 416 bp, Homo sapiens
aggtacttttttttttttttttttttttgttctttatctggagagattccctcaactttattttccagactgtataccaaatacttttagcagtcttattttattttcaaagagatcttcttattctcagtcttctctttcttttcttgctttttaagagacagggtctcactctgtcccccaggctggagtgcagtggcaccatcatggctcactgaagccttgaactcctgggctcaagtgatcttcccacttcagcctcccaagtagctaggaccacaggcacatgccaccatgcttggctaatttttaaaaattattttgtagagacgggatgttgccatcttgcctaggctggtcttgaactcccgaattccctcttttaaaacccggttttaattttaaaaccccccaat

SEQ ID NO: 13036 - DNA, 433 bp, Homo sapiens
ccgggcaggtacttttttttttttttttttggtagaaatgggctctcaacctgttgcccaggctggtctcaaactcctggactcaagtaatccacctgcctcagtctcacacagtgctgggattacaggtgtgagccctggcacccggcctgcaggcactttttatggaattgtattacatgtatagtagggacattgccatcttggcatgtctatttattcaggtttatttttgtgtctgtcggaagtgtttaaagtttctcctatgaaggtattgcatatctcttgttgaagtttattcctaggtgttttattttttttcagttcagttgctattacatgggtgcttctcttccatcctggaatccaactggtagttgtttgtgcctttacctttgttcccccttcaacagtctacttacatggcaataca

SEQ ID NO: 13037 - DNA, 282 bp, Homo sapiens
ccgggcaggtactttccatttttcatctgtgacacagaaggcgggggttgcctctgatccttttgttatttggggcatggaaagtttgggttttccttttgattcagttccaggaagtcagcattaatcacccttaggtttcttgcctccataccctgttctcatacctcatttccccccgaaagacatgatcctcataaatctttatgggaggtaaagggattgatagtctttcttctgtaactgctttatgctgacctgaggcacagtccctacgtacct

SEQ ID NO: 13038 - DNA, 484 bp, Homo sapiens
ccgggcagttactttttttttttttttttttttttctttttttttttttttttttttgggaacaaaaaaccccccaaatttatttagctaaaacatttcccctgatctaaagaaaaagatggcaaaagatccctagcataatgcccaagccccccctcaaaggaactcaaaataccggaaaaaaaaaagggaaaatttttggtccactaaaaaaatttttttctttttaaaaaaagttttacaagggccatttacaagttttttttttttttgggggcccctttgggcccccaaaaaaaaagtttttttttttccccccccccccccccccgggggtcgtttttttttttttccccgacccaaaaggggggggggggttttttcaggaggggggggagaaaaaaaaaaaaagaggtttttttcccacaaatttttgttctctcccaaataagtcccttcaaaaatttttttttgaggagaaggg

SEQ ID NO: 13039 - DNA, 413 bp, Homo sapiens
aggtacaaaaaaaaaaaatacttttcttattttccagatatggtctaaatgttttattatccataatgatctaaactaataagattcaccaaaaagtaaaaattcaattttacaatatacattttttttttaactatttggctttacctttttaccttgggtctccttactgaagtcctctggctttcacttagatctggtttttgaaggctcttaattattggctgggcatggtgactcatgcctgtaatcccggcactttgggaggccaagggaggtgatcacttgagcccaggagtaaagaccagcctgggcaacataacgagaattcgatttttcaaattatagacattttttaatggaagtcttttcccgggtccgtaaccaaaggtagagggtctttagggccaaag

SEQ ID NO: 13040 - DNA, 512 bp, Homo sapiens
  misc_feature 474, 475, 476, 477, 486, 488, 489, 494, 495: n = A,T,C or G
ccgggcaggtacacgagaagctccgaggatggctgaagtccaacgtctctgatgcggtggctcatagcacccgtatcatttatggaggctctgtgactggggcaacctggaaggaacctggccagtcagcctgatgtggatggtttccttgtgggtggtgtcttccctcaagcccgaattcgtggacatcatcaatgccaaacaattgagccccatccatcttccctacccttcctgccaaagccaggggacttaatcaggcccaagaaagcccaggtaaactgtcccttttccctgcaatatgctttctggatgggtgttcaccttgctcctttccttgggggccttcattccaaaactggtattctttccttttaactggtttaatatctttcacccctgtaaatggtttggggacccaggggcaaatccctttctttccctttactataaatgggttgggaacctttaacnnnnacccaaagntnngtctnnttcttgggctggagagg

SEQ ID NO: 13041 - DNA, 306 bp, Homo sapiens
ccgggcaggtactttttttttttttttttttttttttaaacttggctaagttgccctttattaacgaaaacatagagctttcggtcaattccaccacggagaacacaaaccagaaataaaacccacaccaagggctatttcccaagctggggaatttgagaacacacgggcagagttcacgccacacaactacactgggctcgtccttgggaggcgttcacaggaagcaatcacgagcgccaagccacccacaaggcagtgcggcaaggctcccgggatccttacaggcatccaagcgaggtacct

SEQ ID NO: 13042 - DNA, 473 bp, Homo sapiens
aggtactattattttctaacaggaatttgctatttcaaatatattatctgagatatctatatatttatattttgagatactatacaaatttgagccaatgacatagaattttacaaatcaagaagcttattctggggccatttcttttgacgttttctctaaactattaaagaggcattaatgatccataaattatattatctacatttacagcatttaaaatgtgttcagcatgaaatattagctacaggggaagctaaataaattaaacatggaataaagatttgtccttaaatataatctacaagaagactttgatatttgtttttcacaagtgaagcattcttataaagtgtcataacctttttggggaaactatgggaaaaaatggggaaactctgaagggttttaagtatcttacctgaagctacagactccataacctctctttacagggagctcctgcagcccct

SEQ ID NO: 13043 - DNA, 460 bp, Homo sapiens
aggtacaagcatggcgctggtatctgcttggtttcctggtgaggcctcaggtaggattcagtcatggtgaaaggtgcagcagtggcaggcacatcacatggtgaaagtgggaacaagagagggtggaggtgccacacacttttaaacaaccaggtcaggtgtgaactcactcatcgccaagaagacggcactaagccattcatgagggatccgtcctgtccccatgatcaaaacacctcccaccaggccccacctctgacactggggatcacatttcaacatgagatttggaggggacaaatatccaaaacatatcaatatgtttcactatggaaactttacaaggttcaatcccaagatggctggagaggctccaagtatcacattcacccacaataatggctaaagactgaaaggagggaaaaggatttttcctttcctcattcctttttgtagatca

SEQ ID NO: 13044 - DNA, 445 bp, Homo sapiens
ccgggcaggtacagtggcacgatctcggctcactgcaacctgcgcctcctgggttcaggcgattctcttgcctcagcctcctgagtagctgggattacaggcacccatcaccatgtccagctaatttttgtatttttagtagagacagggttttcccatgttggccaggctggtctcgatctcctgacctcaaatgatccgcccaccttggcctcccaaagtgctgggatgacagttgtgagccaccacactcagcctgctctttctaatatttgaaacttgttagacaatttgctacccatctaatgtgatattttaggaatccaatatgcatggtttattatttcttaaaaaaaatattcttttacctgtcacctgaatttagtaatgccttttatgttacacaacttatcactttccagaaacaaaaacttctttccttgga

SEQ ID NO: 13045 - DNA, 441 bp, Homo sapiens
ccgggcaggtactttttttttttttttttttgagtaatctttttatctcttccaggcacaggactgatgcagcctgaaatcagacataaaaccaaatcctgcaggttgctgaattacaacgcaggttgaattcataggatctccaggtctcatatgcaaaaacatggctactgattagggaacaatgggaccttgagactaggaataggaacatcaggattgatttggatagatctgagcaccctaaaccccaaccctcactgagtttcccctggcagcagaagcagccctttttccccagtctatggggctggtcctgcctgacttggggaccctctcactgttaggctaaccttttcaagatccacccggatcatcttttgctgcctccagacccattactgaatttagattcctgtatgtcccaggaagtaaaggcca

SEQ ID NO: 13046 - DNA, 447 bp, Homo sapiens
ccgggcatgtacgcttcccttggcaccatgttatttcatctgtgctgggctgaatagtgtccccccaaaattgaataatgtccccccaaaattcgtgtataccctgaacattagaatgtgatcttacttggtattacttggtatagggtgttgtagaaataatcaaataaagatgaggtcatactgcatcagggtagaccctaaattcaatgaccaggatttttataagtgaaaggagaggcggattcagagaaaaagacacagacacacacagagagaagacagccatgtgaagacacaagcataaattgaagtgacacagctacaagccaaggaatgccaaaaattgctggtaaccaccaaaagtaggaagaggcaaaggggaattttttttcaaagaccttggcgggagcatggccatgccaacaacttgatattagacttgtg

SEQ ID NO: 13047 - DNA, 576 bp, Homo sapiens
ccggcagggactttttttttttttttttttttaatacattctaattaacagtcaacatacagtccttgctggctacagaaaaaaatggagacttttagtccatcaccttgtgtctattccttcatgctaaatatttttttaagattttgttatacaaaacatttgaaaatttgttcaaccctttattttatttttgctagaaatttgttttataaaaaactcctttgaagggtggcggtcttggaatagggttttcactccctgcttggacagttagatagtataccaggttgttgccaaatttatctttgtgaggaaattttagctagggaaaaataaaacacggtttttaaatgtttttttccctttttgtccttaagaatccccttaaattttaagggcctcttaaattaaattaccaaaattttacattttttttttttacttacaatttatgtcctttttgttttttgtttttcaacccaagttacttaaatttttaaaaaagaggatagtccaaggtgtttaacttttgatggttaacgctaaaatttgggttaaatttttcctataggt

SEQ ID NO: 13048 - DNA, 478 bp, Homo sapiens
ccgggcaggtacatacaagtcatccattaaaacaatgaatttgaatatagagtgccagcagcaacttagtattttctaaaaagaacatttattatttatttttagcctgtcattttaattcttcaagagattttactgctggtattttttaatgcactcctctttgtaatttcattcaagccatttgtctaaagtcatttctttgttttttgggagatggagtcttgctctgttgcccaggctggaatgcagtggcgtgatctcggctcactgcaacctccacctcccgggttcaagcgattctcctgcctcagcctcctgagtatctgggattacaggcgtgcaccaccatgcctggctaagttttgtgttttttttagtagagatggggttttcaccatatttggtcagggctgggtcttgaaactcctgacctttgggatacacctgccttaaccttccaaaagggatgagccac

SEQ ID NO: 13049 - DNA, 441 bp, Homo sapiens
aggtactctttccctttatttctcagactggccgacacttagggaaaatagaaagaacctatgttgaaatattgggggcgggttcccccgatacttttggacatatatccagtagtgggactgctggatcatatagaagttctatttttagttttctcacaaacctccatactgttttccataatggctaaactaatttacattcctaccaacagtatatataagttcctcttctctgcgtctttgccagcatttgttattttttgtctttttgataatagccagtctaactgaagtgtcatggagaaactccagctgggcccagagattctgcagcgggaaaatccaaggcttatttatgccaggctgagtggatttggccagtcaggaagcttttgcccgttagctggccacgatattaactatttggctttgtcaggg

SEQ ID NO: 13050 - DNA, 443 bp, Homo sapiens
ccgggcaggtacttttttttttttttttttttttttaggcggaaagtaatgctttaaggaggaagctacatatgaataaattgaaagtgtctttctaaggcaactgtgaaacctccaaaacaggaacttctttataacaagaacattctaaaaaagggtcagtatatgcttgactgggccttaaacccatggtttttctagaacaccaatgtttaaatacttggcgtttttgcggtgaaaagcgttgttcgtatttggaatactgactacaggggaagggaaatgtgcctgtaaaagcctccacttttgtgttatacaaaaactttgtccactctatatctaggaggaaccttttttttgaaagcaaatccgatgttaacgtttgaagcacccccaccctaaaattgggcacctcaaaaacaaattatcacctgtttaacaaa

SEQ ID NO: 13051 - DNA, 459 bp, Homo sapiens
aggtacatgtgatgattttcagtgtaaccatttacgtaatgattctgccaaatgaaatataatgatatcactgtaaaaccgttccattttgattctgaggttactctactaacaagcatcacatatttgtattttgccctgattaatatgttggcttcgctttcagggtttttaatgaccacaacaagcaagcatgcagcttactgcttgaaaggtgaggattggaaatgttgggactattataattgcagaatacatgatgatctcaatccaacttgaactctctcactgattacttgatgacaataaaatatctgatattctgcattcccatgtagcattttaattgaagtctgtaaatgtggctaaaagtcttgtcttattttttgagacagggtttttgcctcacccaagctagagtggagtggcctttgaagcttactacaaccttaaacttct

SEQ ID NO: 13052 - DNA, 458 bp, Homo sapiens
ccgggcaggtacttttttttttttttttttgagttttctttttatctcttccaggcacaggactgatgcagcctgaaatcagacataaaaccaaatcctgcaggttgctgaattacaacgcaggctgaattcataggatctccaggtctcatatgcaaaaacatggctactgattagggaacattgggaccttgagactaggaataggaacatcaggattgatttggatagatctgagcaccctaaaccccaaccctcactgagtttcccctggcagcagaagcagccctttttccccaaactatggggctggccctgcctgacttggggaccctctcactgttaggctaaccttttcaagatccacccggatcatcttttgctgactccagacccattactgaattcagattcctgtatggcccaggatagttaatgtcaaacctatggggagaaag

SEQ ID NO: 13053 - DNA, 178 bp, Homo sapiens
ccgggcaggtactttttttttttgttttttttttttgattttttttttttttttttttttttttttttttgtgtctgctcagttctttattgatgggggtgccgttttctctggaagcctcttaaaagaagaacacagtggcgcaggctgggtggagccctccccccatgaagtacct

SEQ ID NO: 13054 - DNA, 535 bp, Homo sapiens
ggagagtgacctatcactagttaggggaactgcacgctcccgcgcggtggcgggcgagggacttttttctttttttttttttttttttaagaatgtttttatggccgggatggtggctcatgcctgtaatcccagcactttcagaggccaaggtgggaggatcacctgaggccagaagtttgagagcagcctgagcaacatagtaagatgctgtctttatttaaaaaaaaagatcttctagagagatctagtaaaatattttatagatgatacaattggattctaaggttggtttcagaatcatcttggggagaagatgggcaggaatgtactagaggtaagtatggccatgaattgatcattgctgaagctggatgggcacttgggcgttcattatccagttctttctgctttcgcaaatgtttgagatttttttcaccataaaaagaaaacaagcaaatatttctggccccgaaatcaggcagaacactgacgaggaagcctgaggccttctgggagggagtggcttcagcac

SEQ ID NO: 13055 - DNA, 347 bp, Homo sapiens
ccgggcaggtacttttttttttttttttctttttgtggcttccgaaacttcttcaggtgcctgttcacatccaacagaactatcactccaagagtgatgtttctctccagtaagttggatataaatgtcaagcaggtgatcaaccactgccaataggctaggatatctgctctgaagaacctcattcagttctctcttgtccaggttatccaggtgaattttggtccaatatttgtctagcaaagtagcatgactgtttagcggtcgataccaatttcctccacagctcaagagtctcctggttgcaaaaaactgaaatccaggtgccactttcagacagtcacctt

SEQ ID NO: 13056 - DNA, 375 bp, Homo sapiens
aggtactttttttttttttttttttttttttgagacggactcttgctcttttgcccagactggagtgcagtggcgcaatctcgggtcactgcaagctctgcctcctgggttcatgccattttcctgcctcagcctcctgagtagctgggaccacaggagtgcacaattacactcggctaattttttgtagttttggtggagacagggtttcaccatgttgcccaggctggtcttgaattcctgagctcaagtgatccgcctgccttggcctcccaaagtgctgggattgcaggcgtgagccaccacgcccgcctggcctgctcttggtgctttacatgtatggactcattttttctgaccccgcgtaccttcccg

SEQ ID NO: 13057 - DNA, 488 bp, Homo sapiens
ccggccaggtactccatgttggttggtagtattttaaatctgaagcattttcagaggctaaggcaattcagactgcacagctgtcaactcaggagtcccattaaactgactctaaaaattcctaaaagaaggcatgatttattataagcaaatggctaacctggcttttttggtaatagaattctaaatgaaaataaaattatacaagatacacattgtttggatttttaaaaactctattaaatgtttaagtggttgtgaatatgaggaataattaaatgttaaccccagctgattagtgaacatataagaaaatggggggaactgatcccaaaagatcttctcttctaaggagaacttcacttgaggggcaaacactagaagatacaactgttattgtaaaacaaacactaatgagagtctgtcaaataattttaaacgaaaatagaacgcatttgcaactttaaaatgccatttgatacccaaca

SEQ ID NO: 13058 - DNA, 499 bp, Homo sapiens
aggtacagacccaaacttaagttttgtattattttcctgctgccctcaaacatcctggaatgtttcccaaagacaggtctacaggtaataaaattacctttgatttagtttctcagaaacagtctttattttgccttcatttttgaaaacgtttttgacagtaacagaattctaggttgcagggtttgttgtttatttcattaaggaatttagagataatactccattgtcttatagcttgcatagttctcaccagatatatgctgccattctttgttcatgtgtatgtattatctttttttctcaaggtgttttaaaagtatttttgtttatcaagtgcttttcatgaattgtgactctgaggggccctgctgtgatgtaaattatgtttattctacttcagggcatttgaggcttttgaatatgtgggggttttgttttcaccaattttgaaaatctttttccttatttttcaaatcttcttatgccttttattttt

SEQ ID NO: 13059 - DNA, 449 bp, Homo sapiens
aggtacagtgttaagcatctaaacgttagagtcccagaggaaggaggagtcccggacaggaatcatagcgttggtgtcactgtttttcatctaaatgaaaaataaaaacaagtcatacatgaaccctggggaagtagatattataattattttagaaatgaataaattaaaatttaatatacataaaagtcacagggaaccttttaaaattcagttccccaggactagagaactgcagtggatctggagaggccaaggacctagagtgataacaagcaccccagttgattgttgagacgtggtcccaaggtcactctctgattacttaggcttggcaatgcttttcaagatttgaagcaaatggcatttcagaaagaacaccttagggctgggcactgtgggttatgcctgtaattcccaacactttatcacttgagggcagcagttta

SEQ ID NO: 13060 - DNA, 510 bp, Homo sapiens
ccgggcaggtactttttttttttttttttatatttttttttttttagtagagacgggatttcaccatgttggccaggctggtctcgaactcctgacctcaggtgatccgccacctcggcctcccaaagtgctgggattacaggcgtgagccatcatgcccggcccaaagtcaacaatttttccaaatcttttttctcaaagttttaaacaaaaactttgaactgcccaagttggaaattttgaaagcaaaccgtttttttttaattgggggggaaccaaagggccccaaaaaaaaaaccgcgcccaaacccccttttttggtacaacaaaaggagaaaaagggtttctatattttaacccaaaaataaatttccccccggattttttttttttttttgctggcggtaatattattaggtttttacaaaactacacatccattatttactattatttcttttcttcctttttttaaaaactaatcgtccttccttgactgttactattttt

SEQ ID NO: 13061 - DNA, 672 bp, Homo sapiens
  misc_feature 144: n = A,T,C or G
aatgatggaagagaagtgtaacagacgtaattaggttagcgtgagtagggtctaacgggaacgatagaaagattaagtggggggtggactgatatagaggagttagggaattaaagtgagtagtgataataatatacaccagcncaggagtatgcgagcgaaatgactcactatagggcggaatggagggccaccacaggggggggggaccgggcaggaacaatatttttttttttttctgttggcgagattatgggatcactatggggggggggctgaactcaaatgttggacctcaagggatctttcttccacagcctccttaagggctaggattatatgcatgatacaccatgcctattggagaggattacattattttcaaaaggcttattctaagagccattaattgcctttggcctaaataactaaatataaaagtcttgaaacttttttagacaaaattttgggcatgatgatgagagaagggggtttgaaactttctaataaggaggtaacttaaagccctttaagaaagggaaaaaaacccagtttttgggaaaaacaaaagtaagatcaagggcaaaagttttggggcaaagaggaagagaaataaagaaattaggttggggactcagggggggctttaatttgggcttggatttctgaaaa

SEQ ID NO: 13062 - DNA, 397 bp, Homo sapiens
ccggccaggtacaacacttggcaaggtaactaatttctataagtccaggctttctcacctgcaaaattgaaataataatgatattgattgataggtattggctgattttattagggttctctagaaggacagaactaataagatatacgtatatataaaggggaatttattaaggaggattgactcacactatcacaaggtgaagcctcacaataggtccatctgtaagatgaggaacgaggaagccagccggagttcccaaaacctcataagtaggcaagccagcagtgccacctttaatctgtcggtgaaagtcctagagcccccgacgccctactggtataagtccccgagtccaaaatcttaaaaacttgggatctaaagttgaagggcagga

SEQ ID NO: 13063 - DNA, 460 bp, Homo sapiens
ggaaataccaattctgatattcgggcgaattgtagctccaccgccgtggcggccgaggtacatatcagttatttatgatatttttttttaattatttcattttttttcacgactttttctgccattgaattagcctttttctcgtgcactggtggtcaagaaatacatgccataataagatggcagttaaacttcatcagtattttttttttttaaataagattatttagccaggcacagtggctcgcacctgtaatctgaacactttgggaaggccaaggcaggaggatcacttgaggccaggagttcaagaccagcctaggcaacataatgagaccctgtctctacagaaaatgaatttgctgggcatggtggcattgtgcctgtaggaagcttaagtgagaggatcacttgagcccaggagttcaagaccagcctgggtaacataaggagaccctgt

SEQ ID NO: 13064 - DNA, 458 bp, Homo sapiens
aggtacaaatctttggcctttctcttgacattttcgtatgtcaaaaagcaaaaaaccttcatgtatttcaatctagtgattactttttgcaccataatttgtttttttacaccacaaaaggaggcactttcagtatctgtaaaaggtatttaatcctaaaacatacttacctagagaataattaaaacagaattcaatacaatctagtatctattaggaaattaagagttatcacttctaaaagtcatttgaaagtcaatgatgttatctggtcaatggcaggaaatgggaactggaacaaatataagaacttatgggatttcctacacggagacaaaaaaagatattcctttatgttgtttaaaagtggcagctgctctttctttattccattttaatcaatgaatattgatttaaagttttcctttctatttttccttatgaataagttttttaca

SEQ ID NO: 13065 - DNA, 461 bp, Homo sapiens
aggtactttttttttttttttttttttttctaagacatcttgttatagcatctctgcatttattctaattttatctgtgcacagaaccttagcttcaagctccttgaagggtagcatcgtgtcccagcctacactgtcacactcaggagaagcacccagtagatggtggctttgtatttacctacagagtgccactgaggagcacaggccttcaggtctgtagcccatcagctgagccttcgcatcagctcctagaacagtgcctggcttagagcaacacccagaaatcattgttaaatgaaattatccacaagggaggcacctagtgtctacatgatagaaattctttccctgtagaatattacatgaaagggggtgtgaaaaaaaccttctttttccccatactttcagatgccagaaagctttcacgttaacttgtcttccacaggctttttagctcc

SEQ ID NO: 13066 - DNA, 455 bp, Homo sapiens
aggtacttcccatgttaaaagacatttattatcttgttttcctgtcatgggagttccagaaaaagttaaaacagacaatgggccaggttactgtagtaaagcagttcaaaaattcttaaatcagtggaaaattacacatacaataggaattctctataattcccaaggacaggccataattgaaagaactaatagaacactcaaagctcaattggttaaacaaaaaaaaggaaaagacaggagtataacactccccagatgcaacttaatctagcactctatactttaaatgttttaaacatttatagaaatcagaccactacctctgcagaacaacatcttactggtaaaaggaacagcccacatgaaggaaaactgatttggtggaaagataataaaaataaaacatgggaaaggggaaggtgataactggggaaaaggggtttgcttgtgtt

SEQ ID NO: 13067 - DNA, 460 bp, Homo sapiens
ccgggcaggtactttaactcaagtgctggaagacagcaaatcttggaagtttattataaaaaaaaagatatttcggatagattcctttgttgtcatgggcaaaactgtatatccacacaggactgttagactcctagccaataaaatcagactaagtccatagggataaggtaagtgtaaataaatttccattggggaagacagggctcatggcccgtgtatcaaggtctcaagctgagcactggagaactccagggaacactgttcatacaggctatggtgtgaaggaattcccctgtaggtatgccatacttcagtctcttaagaagctgattagcatgaaagactggaagctgattatggacaattcagtttgaattattcctttctattttgctttgaactttcctcatacacttaagacatgagtaaatcacattgaaaaacatttgccaattga

SEQ ID NO: 13068 - DNA, 148 bp, Homo sapiens
aggtacaaaaccattttttcctacaaatagtttggtgtttgttgttgtttcttttttttgttttgtttttggttttttttttttttgcgttcgcggggttgtaaaagaaaagaaagcagaatgttttatcatggtttttgcttcagcg

SEQ ID NO: 13069 - DNA, 464 bp, Homo sapiens
ccgggcaggtacaaacctggaagaaggacttacttactagtcaaacaaaggcacattgcctaatgaaacgttaactttaatgcgtccaaaggttccatacctccaagttttatgtagtctgagctttttcatactgccaaactgggtatatttaaattcattctgtcttcatataacacaatacacctacctcctaagcaacagaagcatccaacctgcttatcaaatatggctatctactcaaaacgttaaagaatctaagaaaaagaaaggtaactagctccaataacaaaatatagatgttagttaaaatttttttgcttagaatctctttggaaaaacaaaagaaaaaactcattaggatgtttcctctttctatatagaatgataagccctaagaaatgtaggtgttttattttagccttaaactgatatattatcgatgaatgaaaacctactgggtt

SEQ ID NO: 13070 - DNA, 460 bp, Homo sapiens
ccgggcaggtactgctcccagtctactgatgttttaggatggtctcgggggataggcccactggaataaactgagtccaatacctgtacacagttatgtttaactgggctctctgaccccggcaggaaggtggcggtgtttaagcgttgcaaactatactggtaatgccgggatgtactcaaagcacgctttggtatctagctaggctaccattccttggctaatggtgtcctttggaatttattgaaatcaactcagcatagggggactttatgattaggttgtgagtaacaattaggttatttgcttcttgggctgacagggctattgctatcagggcctttggacatgggggccagcgtttggaaccctcgtttaattttatcgagagataggccacttggccttggacagggccctacagtttggggtaaaagtccaactggcagggtttttcttt

SEQ ID NO: 13071 - DNA, 465 bp, Homo sapiens
ccgggcaggtacttagagttttccaagtatgttctaatcacagaagtttctaaatggggccaaaattcagacttgagtatgttctttgaataccttaagaagttacaattagccgggcatggtggcccgtgcctgtagtcccagctacttgagaggctgaggcaggagaatcacttcaacccaggaggtggaggttacagtgagcagagatcgtgccactgcactccagcctgggtgacaagagagacttgtctccaaaaaaaagttacacctaggtgtgaattttggcacaaaggagtgacaaacttatagttaaaagctgaataacttcagtgtggtataaaacgtggtttttaagctatgtttgtgattgctgaaaagaattctagtttacctcaaaatccttctctttccccaaattaagtgcctggccagctgtcataaataacatattcttttgggttg

SEQ ID NO: 13072 - DNA, 464 bp, Homo sapiens
ccgtgcatgtactgtgtccttcatgtcccaactggctgtgtgtggcacctgacagtgctttgtgccactgtggagcaggtgttactccctcatacgaattttaggattattttatttatttcagtgaaaaatgtcaatgaaattttgatagggattgcattgaatctgtagattgtttggggttgtatggacattttaacaatattaattcttccaattcatgaacatgggatgtcttttttttggcacctgatctcagatatgggacagctttctaattatttgtatcttcaatttctttcacaaatgttttattagttttcagcatacagatctttcacttccttggttggatttatttgcaagtatttttttggagctattgtaaatgacattggttttcttgatttctttgttaggggattgaaatgctacagattgtcgtatgttaattttatatcctg

SEQ ID NO: 13073 - DNA, 464 bp, Homo sapiens
ccgggcaggtacttgcccccaggcccagataatttatttaaaaactttttttgtagagacagggtctcactatgttgcccaggctggtctcaaactcctggcctcaaacaatcctctacctcaacccccctaagtgctggcattacaggcatcagctgccatgcctggctacaaatcttaatgttttccccatggcttctttttctggcgttcttttctcaggtaatggaagtgggcagagaatgatcctttccctaggctccagtgtgtaagaattaaagaaagaggaaagaaacacaatggcttgatggtcgaggacaggtttattttaaagaaaacaaacccaagagtggcttctggctgagttagatcagaggcatgctctcttacagactaagagtttttaaggattcagggtgggagaatttaccagaggcttggactgcttctgtgtctctttaagg

SEQ ID NO: 13074 - DNA, 470 bp, Homo sapiens
ccgggcaggtacttgcccccaggcccagataatttatttaaaaactttttttgtagagacagggtctcactatgttgcccaggctggtctcaaactcctggcctcaaacaatcctctacctcaacccccctaagtgctggcattacaggcatcagctgccatgcctggctacaaatacttaaggaggttcccatggctggattgtttggccttcttaggtcagggcatggaagtgggcagagaatgatcctttccctaagctccagtgtgtaagaattaaagaaagaggaaagaaacaccatggcttgatggtcgaggacaggtttattttaaagaaaacaaaccccaagagtggcttttggctgagttagaacagaggcatgctctcttacagactaagaagtttttaaggattcaaggtgggaagaagttaacaggaggcttggaccggttctgtgtcatctttaggg

SEQ ID NO: 13075 - DNA, 460 bp, Homo sapiens
ccgggcaggtactttttttttttttttttttttttttattctcgtatggcttgaagcaagatgatactaataaaaaccagttgggatttagatgctatcacaagacagagcttctgaaattactgaaattttgccattaaaatccctcaaggaattgtctctatttcacagatgatgttcctttaaaaaaaaagcaaaacaaaatatccatttttcaccttgtgatctctccctttgtgttttgaatattgttaaaatgtagcatggccttagcctggtcatggggcttgatcacctaccctcagtttccctcacagtgacctccacccctgatcctgagaaattgctctggtccacaggcagcctgggcagatgctgtgggtagagtggaggcctccagttttcaaccttcacagcacattaggcctactattgggcaagacactattccaggcttcag

SEQ ID NO: 13076 - DNA, 466 bp, Homo sapiens
ccgggcaggtacgcggggcaaataaagccttggaattgaagaatgaacaaacattgagagcagatgagatactcccatcagaatccaaacaaaaggactatgaagaaagttcttgggattctgagagtctctgtgagactgtttcacagaaggatgtgtgtttacccaaggctgcgcatcaaaaagaaatagataaaataaatggaaaattagaagggtctcctgttaaagatggtcttctgaaggctaactgcggaatgaaagtttctattccaactaaagccttagaattgatggacatgcaaactttcaaagcagagcctcccgagaagccatctgccttcgagcctgccattgaaatgcaaaagtctgttccaaataaagccttggaattgaagaatgaacaaacattgagagcagatgaagatactcccatcagaatcccaacaaaaggactattaagaat

SEQ ID NO: 13077 - DNA, 339 bp, Homo sapiens
ccgggcaggtaccaccacgcccagctaatttttttttggtatttttagtagggacggggtttcaccatgttagccaggatggtctcgatctcctgacctcgtgatccgcctgcctcagcctcccaaagtgttgagattacaggtgtgagccactgcactcagcccaaagaatacttttgatgttcctctttgttcatatttgtttttgatgtcccccttgatcatgttctgtgtttaccctcatggccggcctctccatctcctaggcagcctggcatcctcgctacaacctcattgttgtgggccgatacccagatcctaatttcaaaagttgtacct

SEQ ID NO: 13078 - DNA, 463 bp, Homo sapiens
aggtacgctgggggcgaagttttgtgctggtcgttgtagtagcaagtggccatggggagcctcagcggtctgcgcctggcagcaggaagctgttttaggttatgtgaaagagatgtttcctcatctctaaggcttaccagaagctctgatttgaagagaataaatggattttgcacaaaaccacaggaaagtcccggagctccatcccgcacttacaacagagtgcctttacacaaacctacggattggcagaaaaagatcctcatatggtcaggtcgcttcaaaaaggaagatgaaatcccagagactgtctcgttggagatgcttgatgctgcaaagaacaagatgcgagtgaagatcagctatctaatgattgccctgacggtggtaggatgcatcttcatggttattgagggcaagaaggctgccccaagacccgagactttaccggctttgacttaag

SEQ ID NO: 13079 - DNA, 466 bp, Homo sapiens
aggtactttttttttttttttttttttgagaagattgagaagtatatgcaatgtaagtgtattttaaaaagaaaagcaacaggtttgacttgaagctatatttttcttttccgttttttttttttttttttaaaacagagttacactctttttgcccaccctggattgcaatggcgctgtcttggttgacaaaaacctatgcctgccaggtttaagtgattcttctgcctcactttcctgagtaaagaaactgggattatttgtgcgcaccaccgagcccagctaacttttgtttttttagtaaagacaagctatggccatgctggtcaggctggctttaaactactgacctccggtgtttgcggccatctttgtctcccaaagagctggggattcaagcaagaaccaacccggcctgccccgtgtttaataaatagagtgggtaacatccgtttagtttttattt

SEQ ID NO: 13080 - DNA, 469 bp, Homo sapiens
ccgggcaggtacttttttttttttttttttttgcttgtcaatacttctaacttaagagcaagcaaacatatttcaggtttaattttatggaacaaacactctgcttgtgaattgtccacaatatttccataataactaacacactatcactccatcaggtttcactacacaaagtattgtgaaacggaggtggaaattttttccaggtgtttagacaagtatttaatgaagctgaagcaatatgttctttgagcatttaaaaatatttgagattaatttcaccagatgatttcttaatcagtaaactggcttagataagaaaaagtcagaatattattaatgaacctaatgttctctcatgtttgagatcagccaacaggccacttacttataccctacttgccttaaggagtatgaaagaagtccagctttcttagtctaactggtagtttccaacaactgaaccttc

SEQ ID NO: 13081 - DNA, 466 bp, Homo sapiens
ggcatttctcccagggatctctgtgcttccttttgtgcttcctgtgtgtgtggatatttaaaggggctggaaatgtgcaaaaacatgtcactacttagacattatattgtcatcttgctgtttctagtgatgttaattatctccatttcagcagatgtgtggcctcagatggtaaagtcagcagcctttcttatttctcacctggaaatacatacgaccatttgaggagacaaatggcaaggtgtcagcataccctgaacttgagttgagagctacacacaatattattggtttccgagcatcacaaacaccctctctgtttcttcactgggcacagaattttaatacttatttcagtgggctgttggcaggaacaaatgaagcaatctacataaagtcactagtgccgtgcctgacacacaccattcttttgaggcccctttaaagatcccacagtcatatgact

SEQ ID NO: 13082 - DNA, 467 bp, Homo sapiens
aggtacgcgggttgaagtcaacttctatcaactttatgccaggcccgtggctcatgcctgtataatcccagcactttgggaggccgaggcaggcggatcacttgaggtcaggagttcaaaaccagcctggccaagatggtgaaaccccatctctactaaaaatacaaaaaaattagccaggcgtggtggcaggcgcctgtagaatcccagctactcgggaggctgaggcaggagaattgcttgaacctgggaggtggaggtttcagtgagctgagatcgtggcattgcactctaacctgggcaaccaagagtgaaactgtctcaaaaaacaacttttatcaatgtctgcaaaaagaaagtcttctgggatttatagatcaatttagggagaaatgacattttaacaattttgaattttccaattgttgaacatggtggtacctgcccgggcgggcgctttaaaaata

SEQ ID NO: 13083 - DNA, 459 bp, Homo sapiens
aggtacccatcttgtcccaagtgccaagctcttcagttgtttctgctacttaagaaagacaccatctaatctgccatatagagagcttaaatggagctgtaaatatttgggggaaagagtttggtagtgttagcctggcctgtcctccactgtattataagtagctgttatctgaaacaattgagaacacaggggaaaaaaagacccaattatgcaccaggaagtccagtgccccatttttggagaaggaaagtgagagggcattgagtttcattgattgggtctccgtggcaggccagctgccccccaggaaggcctggtattcctgtcctctccgtgaacctgcctgaaagggatataggagttattgggtaatcaggacttgtcagcacctcggttatgcaagatggttcaatccgataatgtgaatggaacctgtaataaggctgatgaaaagcc

SEQ ID NO: 13084 - DNA, 459 bp, Homo sapiens
ccgggcaggtactttttttttttttttttttttttagacagggagatggggtttcaccatgttggccaggctggtttggaactcctgacctcaaaatgatccatccaccttggcttcccaaagtgctgggattacaggtgtgagcgacgatgccttgccaagatatttctgctttcaacatgcttacctgttcaagactccactggaaactagagcttctttaggatggaaatatttgtgatatacatttctaaccacagcatctatgagggaaaaagagaaggaggtatattttaggttagaaataaattcgatattatagactcataccaattttgacctgaagggcaccctggaacttggttccaatccatctcgctttataaatggaagcagcccaagcctaggagggtcaaactgctgatgagaatgggacctttaaacacgcgcacacagcct

SEQ ID NO: 13085 - DNA, 193 bp, Homo sapiens
aggtactggcgcgtgtggctgatgttctgatgccaccatctttcttggaggggacgtgcccgaggagcactgtcagtcttctgctgaccccgcagccccagagcacaccttgtctcgttcagtccagttcacaggagggctgaacagtgggaccaggtcgttctgtgaatttcacacttaatttttctctctt

SEQ ID NO: 13086 - DNA, 436 bp, Homo sapiens
cgggcggttacttggtattgtattttttataaattatatttttatgtaaagcttagaatttgatggacagggaccttgctgcagtaaataccatctcaattttgtgccactggttcagctgttagcacagtaaaaaaatcatttgtatcaaaggggcaaatgctttattaaggtagtaaaagggaacattacttctgcttttaggaagttactgcaagcacaagcatttgtgcttttaagcaaattaaagtagtaaaagaaaaacttaagtgaaacctttgccatcttcatgttttataatataaagcttacccaacaccagttaagccatggttaacctaaatgcctcatgccccagttcagcaaaaggaggaaaatgtgcctgcctcacagtcatcagtctttttaaatctttttggttggtgctttaaggggt

SEQ ID NO: 13087 - DNA, 471 bp, Homo sapiens
aggtacttagggtaagcactaacaatattattcaaaatgttatatagagttcaactgtatacaatagagcatttattaaagtgtgtccaaagcgcttataaataaagcatcttcgaggcaggcggctcacttgaggttaggaggaaagcagactggccaacatggtgaaaccccgtctccactgtggtcccagctacttaggaggctaaggtgggaggatcacttgaggacaagaagttgaggctgcagtgagccaagtgtttgtgcaattgctctccagcctgggtgacagagcgagactctcaggaagccgcagtgttagttgcctctgatttttgacaagcatgggaagatgggggctgttcatacagggcaagcttcaagtgtcagtcaaataaaaaacatccttgcacgtcctttagggaactaccagcaggtcaaataatgacagttctctgggaatggggcatg

SEQ ID NO: 13088 - DNA, 435 bp, Homo sapiens
ccgggcaggtaccagggcagcaacccaatcagtgacatttgggctatccacgcgctgcggatcgtggctaagtatctgaagagggccgtcaacagcactgacaaatgaagaagaagaatgagtctcagggcaccttcctggagtggccctcgccatccagggaccagcgcgttgcctcccccggcgcttttacatcacatgagcagctgacagcgtatttattatgcctttgctgaaacagttgatgagaaatatgtttcccttcagttttcatttagaagacaagggcgtcgtttgaataacttgcctgatttttcttcctaccgagtagcatttctttttttttcaccatatctttccctaaggcagctccttattctgtaggaattgccaaggtgaatgggtaatggtagggatttatatcattacggggct

SEQ ID NO: 13089 - DNA, 124 bp, Homo sapiens
aggtacttttttttttttttttttttttttttttacttttttaacttctttttaagtagcccaaatgacacaagaccagtattgacacatctcacataaatacaattcttgacagatacacttt

SEQ ID NO: 13090 - DNA, 431 bp, Homo sapiens
ccgggcaggtactttttttttttttccttagagacatggcctcgctatgtttcccaggctgcagtcagtagctattcattcacaggcacgatcactgtgcactacagccttgaactcctgggctcaaaagcgatcctctcgcctcagcctcaccacatctggctactgtttatatttggtgtaaggacgggatgtttactttctggaaataagttagagttgttcataattgaagttgcagaatgaggaattattgtcaataataaacattaactcaaaatcccttcattaactgtttattgccttagaattaaaaggtgaaatgtatagttaaaaaaatctacacataaactgatgtgcaattccctatacttcacttaaagccctgttgcatcccaggagttaaagtataattacaaattcagtccctt

SEQ ID NO: 13091 - DNA, 474 bp, Homo sapiens
ccgggcaggtacccagtgaaacccaaccttcaggcctaaaacagcctgaaggctgaaagattggactgctggtcccagatgaaaaacacgacccagagggagaactgcccctgtttgtccaccctttcccaactgattctttctgaataatgcccacatgttgcactggaggaatggggtggagtgaccaggaatttgcaccttatgcagggggaggagtctggctcttcagctcatgtgtgggggcctgatatttcaatctgtgaaggggggaggccattggcaggacaccccctaatttgctgaaagtttttttttctttctttttggcccaaataaatttccattggccttaccctttaaaagtggtccccatgcctaattttttcctgggccgtggcaaaaaaaatcccaattttacctttaacttaggggccaaaatttttgcattgcttgggccaatttcggacctat

SEQ ID NO: 13092 - DNA, 536 bp, Homo sapiens
ccgggcaggtactaagagaaagtagaagtcttttttgacaaaattcagttttaaagttgagttaaaaactgttgatagatggagatctattttcttctaaagagtgggaaattcatcctctggttttgctaacttttttggaggtaagcaggaaataattaaatggggcctctttttgccagttaggaaaattttaaagtcagccattcaggatgattctagagattgagccttcctgacccttcttgaattctcaaactttttaaggaaatcccttgggggtaaaatgtaaaacctttcaaatgataccattttgaaccacaattttttgcccacccattgcactttatggttttttttttgttcccagggtgggagggcccagattaactggctttcaaaccctaaaggtcaaggcctttcaaccctaaaaggtctggtttatattttttaaggcccattgccttattccggggttcaccagcattttcttttcccctttgtgcttccaacatagggttaccccccccctttct

SEQ ID NO: 13093 - DNA, 408 bp, Homo sapiens
ccgggcaggtacacccagtggctcatatttaacttcccccagcttcccaattcaaactggggggaaaaaactaaatcattgggagttacttgccaacttggaagttgatatttctttacttttttcattctaagactttaaagttctctggcatgagtttatctgccatcataaactaaacaatttcctaaaccccaccccaccattcccaaccggaccagggccactggccaacttatttgccattatttggccctcccctttattataaacttttaagaagtcccattttttggaaaacttaacttttacatttgggccttcttcagcctttttttaaggtttttccgggaaggactggaatttgaacccaaaacctgcactgggcttgtcccttggcccgtttta

SEQ ID NO: 13094 - DNA, 483 bp, Homo sapiens
aggtaccaccacgcccagctaatttctatactttttgtggagatgggagtctctccatgttgcccaagctggtctcaaactcctgggctccagtgatctgcctgtcttggcctcccaaagtgctgggattacaggcgtgaaccacgtgcccgtccccaaaaatggttttaaatacatccaacgtatcatcctccctctttaactgcactcattaaattacgtttctttatttcaaaaagggaattcatcatttcctctccttccacttcatggcctaaaaacccttaactagcctaaagcctttcctaaataaggtaaaaaagatttttaacatgtggcctttttaacccctaaatttttttaaataaaaagcccgagatttaaacctttttccccaaaaggaaaattttttttgggggccactaaaaaaaaattttctaagggggggtttctcaaaagaaggccaagtttttttttgttggt

SEQ ID NO: 13095 - DNA, 565 bp, Homo sapiens
aggtacatttatttgctttgctctgtcaatatgcttgagttgcaaatgtagacattgaaatgatctgaaattccctctgacagagaggtttccaccactgatatacattttctccttgtatgttttagctgtgtgaacaaatacctttctttgtatcacacattaaggcctttgtccagtaggcatggtcatttatggccatttaatatacagaaattgttgatgggacattctccttttaatttctttggaaaaggataggcatgatggaaaaacaatttcttgagccttcttataaggccatatagttaaattacaaaaagaattttttaaaggacccaaacttgtcttagcttgatagattttttctttcaaagtttcaattcatattaataccatttttaaaccctctggggaggttaggaagcggtgttgcaattttttttgccatgggggaagccagggcaattgttgtcgttcttattcccaataagagaaaccgaatttgtgtagcagcaaaagtataagaggatcaatagtaaatgttgatgttggcgggtttcat

SEQ ID NO: 13096 - DNA, 455 bp, Homo sapiens
aggtacaggttattagaatagggaaggaacaccttgggcccaggagtgagtgtttcttcttttacaggtgtaactaaaaagctagttggtctaacttgtgtgtctttgtcctataagcctctgcaggtgtgcgagcaggattgcttctgcaacaatagcctccacccagccacatcttgggaaaagaatggccacttcttggggcacagtctttttcatgctggtggtatcctgtgtttgcagcgctgtctcccacaggaaccagcagacttggtttgagggtatcttcctgtcttccatgtgccccatcaatgtcagcgccagcaccttgtatggaattatgtttgatgcagggagcactggaactcgaattcatgtttacacctttgtgcagaaaatgccaggacagcttcccattctagaaggggaagtttttgattctgtgaaacccggac

SEQ ID NO: 13097 - DNA, 458 bp, Homo sapiens
aggtactttcacacggatgctaaagttattgtgctggccgagttaagggtcaggcatcaaaatggccgctcaagagaatgaagctttctctttgtgcagatgcaacgggtgggatggggtgcacaattatcacagtgctggttgtggtgttacctcgacattctgccttacagctgaggggggatttgtttcgtccctgctaatgaaggtgttaaataaacttggatgctgttattgaagcttaaaaaataaatggaagctgggtgcgatggctcaagcctggaatcccagcgctttgagagaccgagatgggaggattgcttgagctcaagaggtttaagaccagcctagacaacatggcaacaccctggctcttcaggaaattacaaaaggtatccgggcatgctgatgtgcgccttgaactatttgtacctgcccgggcgggagttctaaaacta

SEQ ID NO: 13098 - DNA, 413 bp, Homo sapiens
aggtcccctttttaagggcaaggcttttgttttgggcctatgggtaaaggttaacaaacccctgcccctaaggcatgagaatctaactttaagttgaactctagcactgttctccatgttacctgataagtgtcagagtgtcatcaatgtttcttagacaacccggcttatggtaaaaatgatccctgcctggtcacttccatctgaactgagtatctatgagctattaatgggaatgccatgctttttggcctttcctgagtgcagttgacacttgtaactgcatgttccctgtggcccctgaaagctacaattgttacaagaagaatttggtttctgtggggcattaggctttaagccaaagtaaatcctacaccttttcaatggggctcttactttattgtacctgcacc

SEQ ID NO: 13099 - DNA, 560 bp, Homo sapiens
aggtacacaaaatccattttccacttaaaggcctgagccaatgcccccaaccagcctatcttacttttattctttatgttagccccatatcgccaagtaggaacatggtccttctgcttagaaaacggaaataatgaactgtatgtttggttgtcattgtttttgaaaagagaataacaactccaaaagacacttcttacattctaagtacatatttaggttgcttagtttactctttgctttttctttccaaattatctctttcaagtctaccagtgagctttacaagcctttgggtcatctggtcatctgttataagttggattttgtcagaagctctaattatgtatgcttggtccctttcctcttgaaagaagttcttaaaaaaggcccccggaaattaaaagtaagtgtacttcccaaggttggccgtaggttttttattcatgtgtaatagtcaaaaacatgccatagatttattacctgtttttccatatcctttgaactcattaacattttttcaaccatcttttttaaataaagctttggatattagtcat

SEQ ID NO: 13100 - DNA, 324 bp, Homo sapiens
aggtactttttttttttttttttttttttggggaggagaggagcacgtcaaacatcacgtaatatcattactcagccagtcatctgaaaaagcatgataaaacctgaaatcttccaaggccagatccaaacaagccacggcatttaagattaaggctacaccaggcaccgtgctatctcactacagcatgggggagcacaacgttcattaaggattgcagaggctggctttgagtcttaaatcagcatctgacagctgtctgagcccagagaagttatctattatctgggcctggtggtgagcacctgcccgcgtacctgcccg

SEQ ID NO: 13101 - DNA, 467 bp, Homo sapiens
ccggccaggtacaaagatctgacatgtcacccagggacccatttcacccactgctctgtttggccgccagtcttttgtctctctcttcagcaatggtgaggcggataccctttcctcggggaagagaaatccatggtttgttgcccttgccaataacaaaaatgttggaaagtcgagtggcaaagctgttgccattggcatctttcacgtgaaccacgtcaaaagatccagggtgcctctctctgttggtgatcacaccaatttttcctaggttagcacccttcagtcaccatacacagggttaccagtgttgaacttgatgaaatcaagtttttttgccagtcttctaaaataatctgaatggtatcatttaccctgatgaggggattcgggtagcggttggtgcggtccttcattagtcacccgatggggatttctttttgtgcccacaaaagatctttttcatt

SEQ ID NO: 13102 - DNA, 660 bp, Homo sapiens
tctccctctcacacatctgtatcttcgactagatttgtttcgcatcaaatacttcttcaccatattttttcctccaatatatttacacaatctttctccccaaattattcttcaaattttttgcgttatatttttttagttgatgttctatacactacttttaggccaattggaacctccaccgcgggggcggccgccttcttgggtcatcgatgagcctcgccctgtgcctggtcccgcttgtgagggaaggacattagaaaatgaattgatgtgttccttaaaggatgggcaggaaaacagatcctgttgtggatatttatttgaacgggattacagatttgaaatgaagtcacaaagtgagcattaccaatgagaggaaaacagacgagaaaatcttgatggcttcacaagacatgcaacaaacaaaatggaatactgtgatgacatgaggcagccaagctggggaggagataaccacggggcagagggtcaggattttggccctgctgcctaaactgggcgttcataaccaaatcatttcatatttctaaccctcaaaacaaagctgttgtaatatctgatctttacggtttcctttgggcccaacattcttccatatattccgcccactcatttttaattttaagttcccgatct

SEQ ID NO: 13103 - DNA, 470 bp, Homo sapiens
ccgggcaggacccacacagtttaagcaaactaaaagaacactgacactttctcagagaacagggatgggaactttctatctgcccattagtatctaccccaagctacgaagacttccattcctcttattaagcattcagcaactacatttagtgcctactatgccagtgatgcaagaatggataagacagtccctacactcaaggataacgcctctagtaggtgagagacaaaccgattaattctgcataagggataagtgctgtatgtgggaagcaatccaatgagggctctgaggatggcaaaggaagggttcctggaggatttacatttaactggtgccttgaaaggtgtgtagaagttggcaagatcaaaagggagtagagtccaggtggagaagagaaaagagcagggcaggctggatggcatggctcacacctgtaatcccagcactttgggaggccatggagg

SEQ ID NO: 13104 - DNA, 630 bp, Homo sapiens
ccgggcaggtaccaagtgaaagggctgcaggtctgtcatcagacttttcacattagtgtagcctgatagatgcaaatagagacccctccccacttgaagcttccctcctcatcacttcctcaagctaaaaaattatttcgataatcctgatcatttgtgcctctcttgggacattcgtaatatagcacttgactacaaccccttcataaaaagactaacagctttcttccttccagtcttgaacttgtggagaaatttccacacgcaccaataacccatttttaaacccttgaaaatgaacttgctttgtgaaatgtaattaattaaaatggcttagttgctttgtaagtggtttatagcattgtataaaaggttaaacaacctctttgaaaataaatcttgcttcctgaccccaataaaataggggcaattttgcctttcctacctctggcgtccaataacaagtgctgctccaaacctcactgtacaaattcacaaacaagttgctcgtttacaatacacagaagaactttcaataaaataggctcctctaattaaaacctttaacaattgttggaccaaaaccgcggctattctccactcaagaaattgtatacttcgaaatcgtcc

SEQ ID NO: 13105 - DNA, 478 bp, Homo sapiens
aggtactacaggcacacaccaccatgcccagctaatttttttgtattcagtagacacggggttttgccatgttggctaggctggtctcaagctcctgacctcaggtgatccatcgcacccagcctcctttttttatgttgttttttgagacagggtcttgctgtcacccaggctatagcgcagtggtgcattcatagcttaactgcaacctcgaactcctgggctcaagcactcctcctgccttaaccttccaagtagttaggactacgggtgcacaccaccacacctggcttaccttttgagctcaagtgagccttttcacctaagcctatggaggtgggtggggaccacaaggtgcaagcttaccgtgccaggcttttttttttttttttttgaggggggggagagaaaggaattttaccacttcctgaacttaaggcattctttccccctttatgcttcccaaaagtgggggggg

SEQ ID NO: 13106 - DNA, 467 bp, Homo sapiens
aggtacggcaaagcagtggaatgttttctgttagctgatgttttttaaaaacttaagttccttgtctttctttttctcttaatcaggattccggagtttgaatccacctttgacaattgtccgaaagacgtttgaatcaacagaaaacccagatgacttcttgccctctgtaatgacttgtgtgaactatcttaagttgccggactattcaagcattgagataatgcgtgaaaaactgttgatagcagcaagagaagggcagcagtcgttccatctttcctgattatagcaagaaatgcagtgtctgcctgttacagcaaaagaaacaaatcatgatttcttttctaatgttatcacctgagtcaaggaaacatgttacgccttcttgttgtaggaaaaacggcttgcagattataaagagacatttgggtgatattcattaatggccccatggacttaaagtgatc

SEQ ID NO: 13107 - DNA, 472 bp, Homo sapiens
aggtacgcgggtgctggaattacggtgtgagccactgcgcccggcccttagtagcatcttttaatggaggtagagttgagatttcagtgactaacaactaaaggtatgaaaggtaggggtttatatgatacatgtgcattttagaaaactgatctaagctttaatgtgaagaacagattgaaatggaagggggagaagactagaagcagaaacattactcatttaagtaatctggaccatgaaactgaaaaaaagtatagggactccaaaagtcataaagaagtgaaagcaggatttggcaattaactgctacgacagggaagagttgaggggagtcaaagaggaaagcaaggtttttgagctggcaaacagtgaattgtatctctgttcactggatgaggcaaaccagtaggggctatttttaaaggattgagagtgatttgaggggaatttaggttgagacctggggggg

SEQ ID NO: 13108 - DNA, 444 bp, Homo sapiens
ccgggcaggtactttttttttttttttttttttttgggagaaggggtcagggagcaccttacctctagtggacaagggccctgagctttacacagccctccgtatttattaggcaaaagagataggagggtgggggggtggaagaaggggtccgttgctcagttcatattttgcttgcagggctgcattcttttgatggcccatttttttacctttgtgccagggtgtgattgtctgcagcaaaccttatgttggcaggagcagttctgtattttttcactttttgtttttatgatttccattttgctgtttgaacatatatcctacttcattactgctatggttggtctagtttccacagggccattgatttcctgaataatccccatttctgtttattggtctattgaaagagtgtaaagtttgttttggtggctctttatt

SEQ ID NO: 13109 - DNA, 451 bp, Homo sapiens
aggtacccaatgctgatttgtcatctctctagattctactttttcatattgaaattctttttttagtctattctcttgtagcttttgttacatccaatgatcatttgcctctctccaggcactaccaaactcattactgtggatagttgctgcctttacaggctcataattgacaaattgagagacacatttttttcaattctcaaaacaactagactctttccagcagatttgctaaggcacactacaagaaatgtaaaaatctcacattcttgttctagttaatacatgggagaatattactaatacatacatttgttttctacatttgtggctgccttatacattttcttcacgtttaattccttaaacacataaatatgagtcatgatatttaaagccaggctcatttaaacatatttgaaatggttggggggaaataaccttaaac

SEQ ID NO: 13110 - DNA, 487 bp, Homo sapiens
ccgggcaggtaccaaactaaactgacagtccttcgataatatgaaacattaatttacaaggacccgttagggcttcaatgatgctgagtctggaaaagggggggagacccttgggaggactccaggcagctgtgctcccagggctcatgttctctactggattagggatagtcacctctgaaatctccaccctgatgattggaatgaaacggagtgaacatgagcccaactgagagaggagcaggaatgtgtgaaaaacagctgctctccttgtcccagctttgtgattgagccctctgtcttgctctctttggctttcctgggtctttccttctcttaccaaaacatttgtttgcaaaagtaacattaccttccccagccacaggtatgtgggaataccggtgagggaaaatattttaatttttcaatctagtgtcccttggcccgttttaaaaactagtggaatccccccgggctgtgaggaatt

SEQ ID NO: 13111 - DNA, 502 bp, Homo sapiens
aggtactagggaggctgaggtgggaggatccctggagcacaggaggtcaaagccgtagtgagccatgatcacaaccactgcactccagcttgagtgacagagagagaacctgtctcaaaaaaaaaaaaactaagtctaaacttgtagatcatctcatgatagattcatagggaaatgatacagttgaccattgttctggcaggttccatgtgctgagtcctcgggtatatatctcacaggaagtgattctagcttgggtgggtcatctgcgttctctgttggccgagtaatcactggccgggctgcgggcaccaaggggagagagagtatgggcggtttttagtcttgtttcgctggtctttaaccctgcggaaccccgtgtattaccccggtttttgtcaacttgtctgcaaggattcccccgtttttttttggacagccccaaagaccttttcccaatcacccccaacggccctggttctgcttacttttttcaatagct

SEQ ID NO: 13112 - DNA, 816 bp, Homo sapiens
aggtactttttttttgtgtttttactagagacggggtttcactgtgttggccaggatagtcttgatctcctgaccttgtgatctgccctccttggcctcgtagctctttttgacctttatggttcagttcactgaaattttttgtttttgggaagctccattgtcttcttgtaggacaaggtcttatggtgagcctatgaagatgctataccagtgtgtgttattcaatacttctttttcctagacttgaatctcctcatgccccttgcttgacaccttgggaggggcttgggaaatcaaggccttatttcttccaatattttggggggtaaataaagcgggggcttagaattggtgtgaacaccttccacgatttctatttgtttgagccaaagaaatataattttccttgttataaaagtctcactgtaaagagtccttttggtaccatatgtgtttctgtgttttctttccgggagaggtttgggaaggtgtttgtaacccttgggacattaagtaatccacattttctgttccctcttcacgataaaatatttcaacaattctcttgctcttgtggtgtgacagctccatttaaaaataatgaatactatgatattagccaatggcggtgcgtcctaaagaggtgggcctttggagtggtgtttatctcttgtaaatggcctcctctgcttctagttttcttcttttgtaagtcactttgtggtcgcatttctttgggaccaaaagtgcatttgtgtgttctctttatattgtaacacagacaaaacctccttgtaaaatataataaagggg

SEQ ID NO: 13113 - DNA, 476 bp, Homo sapiens
aggtgtgatgtttgccccacaacaggggtcatttggcaatgtctggagacatttttattgttatagctgaacaggaaagtgctactggcatctgggaggaggctgctaaacatctcacaatgtgttacccgtcccaaatgtcagtcgtgttgaggctgagaaacatggtttaaatgagtcagaggctggccacagtggcacgtgcctgtagtcccagctactcaggaggctgcggtgggaggattgccttaacccaggagttcaagactagactgggtgatatagcaagacctctgtctcaaataaagaagcaaaaaataaatgaatcagagactagtaaatctacctcctctcaaatttaaagtcttagcctcagagctgagagaagaagaaatagggcaaggaatcagaaagaagcctgcccttcctggcttaactgctataacagagacttatagcacatgggcctcattaat

SEQ ID NO: 13114 - DNA, 441 bp, Homo sapiens
ccgggcaggtccctggttttaacattataccaaggaaggaggcactgaagagggtaggaaagacagtcttgaatggctgatgccacccctcccctatggaggagtgtggtgctgagagagaatctgtgcttgggagagggagagcacagtgactatggcactttgtattggaactcactgtttgttggtctgtctgtcggaatggaaagcaatgcagggcacaatttcgctggtgccacacagaggctgcatttagaacagccctagccagagaagaattttccatcctagcaattggaacctgagttccagctagcccaccgctgtgggctaaagtgatgtaagctcctaaatagatttgaaagataatctatgccacaaggactacaatttctgggcacatgctggaccctgggccgctctgaactagtggatacccgg

SEQ ID NO: 13115 - DNA, 441 bp, Homo sapiens
aggtacctcagggtctggtggcttctcttctctacccttttcttaagagtcactggtgtcataaagccccagaggatcaactctgtatatcagcctcatgagaactgaccttctcctgacctcattaatgctcttatttaaaagttctctaattaagctttgtattttgatataattagagactcacctgcctgtgtcttaaaaataactctcccagctactatctcacatgatctgtgggcccatcttgtgaagcctagtattaaaaaatatttttgtttttcagtggcgtgcattttaattctcaggccatagctcctaccattgaacagattgaccagtcttttggcgcaacccatcctggaggtaagccaagtccatctgattcctctggtcatcagtggcagttcatagcaataaacctgcccgggcgggcgctct

SEQ ID NO: 13116 - DNA, 437 bp, Homo sapiens
ccgggcaggtacctggttttaacattataccaaggaaggaggcactgaagagggtaggaaagacagtcttgaatggctgatgccacccctcccctatggaggagtgtggtgctgagagagaatctgtgcttgggagagggagagcacagtgactatggcactttgtattggaactcagtgtttgttggtctgtctgtcggaatggaaagcaatgcagggcacaatttcgctggtgcccacagaggctgcatttagaacagccctagccagagaagaatcttccatcctagcaattggaacctgagttccagctagcccacccgtgtgggctaaagtgatggaagcttctaaataaatttgaaagataatctaagccacaaggacttacattactgggcacattctgggaccttgggcgtttaaaattgttggatccg

SEQ ID NO: 13117 - DNA, 437 bp, Homo sapiens
cgtactccctttccctgactcagccttttattgatgaaggcagggatgggatggggagagctcacctggcaaagactccacacaggtgtgcagcacaccctgatggggccagaaaatgtcactgtgagccctatgggtgaaagacacagtgatgggcttctgggcaactaccaagtgtagagatcctgagtgcccatagagttaccaaccacttccctttcctgtgcagatcagtggaggccgattcatacccagtatgtgatggggagaaaaaaccggttttagatctccccgccctatagactttaagattattcccgaatggccacaatttttttaattgccccctttgggcccaaaggtggctctaccactccgtaattttttataaggggtcttagttccttttattaaatgggcattttggcttaactttc

SEQ ID NO: 13118 - DNA, 437 bp, Homo sapiens
ccgggcaggtacaatcagaggagcagaaccactaagataaagattatgtatatatgtattttaagggatttattatagggatctgaccgcatgccattgtgggagctggttaaacagtctctgtaaggctggtgaatttgcatctaatgctggagcttgaagtctgcagggcaagcactctggaagggaagatggatgtaaaagtggggagaacgaggacacatttgtatcccacgagcactagctggaacccacaaggattgactggaaccatctttaaactatcaccgccttcacctgggatgatgaaaggtgttctgactaataatctgtggcacctgctcacagaggccaatattcattgggtccatgaatttaaacaatctgaaacgatgactgtgcaaacttttctttttgatgggcaacccaccttttag

SEQ ID NO: 13119 - DNA, 432 bp, Homo sapiens
acgcacctgcaacgctttcttttacttagacatattataaaaattattaaaaagattttcatgtttgaaaacttggggaaaaaagatataacactgtcctaatctcatcacatttaactgactaatatgaatatttttcaacaaaaagcatttgactcttattattatttgaggcataaactaaactgcaaccaaataaaatgttgaatttcgcaaaaagcgggaggctaactagaggacaggaggaataaaccaacctgggcaacaaggcaaagccccttgcctgcccattataaaaaaagggattccccctgctggcagaaacctgtaatcaccttttctattccggctcacccagggggggccctggaccccagattggggacccttaagggagggaaaattgcacccttgggctacacgggataaacc

SEQ ID NO: 13120 - DNA, 436 bp, Homo sapiens
ccgggcaggtactatggaattaagaaagaaacttgtgtgttgtctggttttaaaactgttttttaaggcatgtaatgttgcttattttacctttttaattctccctgaataacattttctttcttccactcagtgaacatcccaaaatagaattttacttgaaaaactttacatcagccaaagatgttttgtttgccataaaggaagtaggtttcagagggggtaattccaatacaggtaagtagactttgatacctgggatgtaacataggagagggttatcagtgatcatacatgtaaaacagtattatgctattttatatgagcagatgtgaaatcctcctggaactgaaatcttggctaggtctgcatttgatcatctgagataaattttccatttattagggagtataccaaagtgttgaaatttcttatg

SEQ ID NO: 13121 - DNA, 438 bp, Homo sapiens
aggcactatcacgaggttaacatgtataccagaggggggaggcactgactagggtgagaaagacagtcttgaatgggtgatgccacccctcccctatggaggagtgtggtgctgagagagaatctgtgcttgggagagggagagcacagtgactatggcactttgtattggaactgagtgattgttggtctgtctgtcggaatggaaagcaatgcagggcacaatttcgctggtgcccacagaggctgcatttagaacagccctagccagagaagaattttccatcctagcaattggaacctgagttccagctagcccaccgctgtgggctaaagtgatgtaagctcctaaataaatttgaaggataatttaagccacaaggacctcaatttctgggcacatcctggtaccttgggcgctctaaaactgtgggatccc

SEQ ID NO: 13122 - DNA, 450 bp, Homo sapiens
ccgggcaggtacttttttttttttttttctttaggggcacagagctagcaaaagagccaggaatcaacccttattttgtcttattccaaatgatatagtgtttgtattctaccaagtcagataagtaggtggagaaaagacaaagtgacaaaacacaggagggacaaagagattatgccttcatgcttccccgctccttgaaaatgtagtatatgccaagttttcattgattcagtgggtaaggcaagggacactggcctggtgccagttcaaccactctttcagtctcttgtttattcaacaagctgttccactgggtcctggggaagagggaaatatttggggtggcagcccatggcatatgtcctgatgccacccatggcttttttttccaaccccttccagtgttgacccttttttgaaccggggccctattctcaagggacttcg

SEQ ID NO: 13123 - DNA, 435 bp, Homo sapiens
aggtactcagctgaaaacactgtttcagccccctctctggtgacctcagccttctccaggtgtatctcttgatgatcttggagaccagcagccacagctgctgctactcctgcaggagactgtcaggctgtggtggggggcaggggtgttggaggagaagttgaaaatccgtgtgttctctgcccctctgctcctccatcttatcttctggaggagttaaggcaccaagggcaccaagtcaggttggcagttttgctgcccttgcccaagcctccagcaaaactagctggtcccctgctttgctgggtcccagccaagtgtgatattggttgttggattatacccacacattgtttttgccggccctttttataaatggagggttccggtttgtgttggtattggatgttagacacagaattttccgctttttta

SEQ ID NO: 13124 - DNA, 428 bp, Homo sapiens
aggtactgtggcatggcgcagtgggtgacagatggccacatagcggtcaaaagccatggccagcagcactgtggattccatgccagataaggagtggatggcaaacatctgtagcagacaagcatcaaactggatggtagtggaattgaaccagaagatggccagcattttgggcatggatgaggtggagatgaggatgtcaatgcctgaaagcatgcaaagaaatatatacatgggctcatgcaggctgtgctcagtccgcacaatgtagatgattgtcaagttacctagcacagcaataaggtagagggagcacaatgggaaggccaaccagaactgagcctcttctaaaccagggaggcctattagatgaaagtatgtatcacttggattcatttgcttggggaaccaccatcatggagaacctg

SEQ ID NO: 13125 - DNA, 365 bp, Homo sapiens
aaatgtcagatttttttttaatttaatgaaattgttaatgaggaaaaatttttaatatagtcttgtctaccacacatccccatagatttaaggattttaatagaaagtcatgatgtatgtatttaagccacgttaaaagaaaaaatataactatggaccggtattcagtgaatacagtttcatggtttttaattctttcaaagcacattaaaaatggtgtgctgataaaccccaagtaaattaaccctttttccgtataaatccattttttgttttgaagaggggaaattatacttattgttgattactgaatccttggtgtgaaagcattatcacatatgtatgaactgctactgctgcacctt

SEQ ID NO: 13126 - DNA, 473 bp, Homo sapiens
ttagggcaattgggtccgacccccaccgcggtggcggccgcccgggcaggcaccaacgcctcccaggcacagccccccaactcttgatttttgatgtcactaagcggccctcaggggtccctgatcgcttctctggctccgagcctggcatcacggcctccctgaccatctctgggctccaggctgaccatgaggctgattattactgctgctcatatacagggagctccagtttaccttatgtctttggaactggggcctaggtcaccgtgctaggtcagcccaaggccaaccccactgtcactctggtcccgccctcctatgaagagctccaagccagcaaggccacactagtgtgtctgatcagtgacgggtcccaggagctgcgacaacggcccgtaaggcacatggcacccccttcaggcgggagtggagaccaccaaacccttgctactaaccactgcaagacctgg

SEQ ID NO: 13127 - DNA, 449 bp, Homo sapiens
aggtacatcaccctgctgagggacatccatgacaaggtcaccacactctacaaaggcagtcaactacatgacacattccgcttctgcctggtcaccgacttgacgatggactccgtgttggccactgtcaaggcattgatctcctccaatttggaccccagcctggtggagcaagtctttctaaataagaccctgaatgcctcattccattggctgggctccacctaccagttggtggacatccatgtgacaaaaatgggattcttcaagtttattaaccaacaaccacgctttcagcacccagccactttttacctgaattttaacaatcaccaaacctaccattatttccaagaacaaaagcccatcccgggcccctcccatttcccgaaggaaccaaaacgtaatatttgaaggtgcgcttaaacaaaatttttccaaacaccaag

SEQ ID NO: 13128 - DNA, 437 bp, Homo sapiens
aggtactttttttttttttttttttttgacggagtttggctctgtcactccagctggagtgcagtggcgtgatcttggctcactacaagttccgactgcctggttcaagcgattatcctgcctcagcctcccaagtagctggaactacaggcacgcaccaccacgcccagctaatttttgtatttttagtagagacgaggtttcaccatgttggccaggatggtctccatctgctgacctaatgatccacccttgttggcctcccaaaatgttgggattacagagtgtgagccactgcacctggccccatgtctcttcttataagggccttaatcccattcgtgagggctctgccctcaagacccaataaccttccaaagggcccaattccaagaaccattccattcagggtttaagctttcacatatgaatttggg

SEQ ID NO: 13129 - DNA, 434 bp, Homo sapiens
ccgggcaggtacaaagatgctacaccggagaaagggggatctggtgatcctaattttgtcaccagctttgaaatctttagctaggcatttcagccctataaaaatccattttctcacttgtaaaaagaagagttgaagttatgtttttccagggcttttttctctgacaaaccgaattgcagaacaattttatgactcaaccaacgtagcagagtccagagagagtttgaaaaaaacaccttacaaaacttataactgaagttctccctccaagggcacttaattttttcaagtgaaagcatgcatgcagattcatccatctgttaccctggaagaggacagagtgaatatactccattttatatgaacccaaagtgtgattgtttaaaatccccatgcacaattagaaaccagtgactgttctctggctatgt

SEQ ID NO: 13130 - DNA, 444 bp, Homo sapiens
  misc_feature 401: n = A,T,C or G
aggtacagttcagcccttctcgactggaggcggttctgcctattccgctccccacctggacacttagcaatgcctggagacatttttgattgttgtaaatggcatctagcaaggatgctgctaaatatcctataatgcacaggacagctgggaccctccccccgccaacaaggaataatccacccaaggtctccatagcactgaggcgccgacagcttgcagtggctcacgcaggaggaaggagcctggcgctttctagacgcctcctctgagaatattacgaatgcactacatgctaggcagaaaggattgtgcaagatcattatgctaatccgttgtaaccctgtgcactgtaaggatcctgggaatattaatattccccagtaaaaaatttcctccancctggttgggaatgtgttttgcgtcaacggttattggccgctt

SEQ ID NO: 13131 - DNA, 233 bp, Homo sapiens
aggtacgcggggggcatttccgggaagatggcggcgcacaagtcaggtccggcacatgtttccgcggagcggacccagcaatgacggatgatatcacctcttcttctctggtgagagtctgaggatagagacttttttctcaccatgaatgccaccccagaggtcaagagtcgtgggatgaagtttgctgaggagcagctgctaaagcatggatggactcaaggcaaaggcct

SEQ ID NO: 13132 - DNA, 436 bp, Homo sapiens
acgtgcacggggcctttctcattgactatgctgctggtggggaaaactgctgtctcatgacagggaagggttagatttcatagagaatgctctgaccaatcccatatcaagacggtatgacctggcatcctgtgaggcagacatggaggtcaatatatccttaacttacggcctaaaaagtgggactagttaccaggatcctctgtgcaaaactgcccagacatagctctttttgaccagtaagcctggtaaaccagacgcatcattttaggccctgccaaattcccatccttattcctgtggccttatgcgggaacattttatgaaagcaaaccactggctttcgtctgaggtcccaatgtgcactctttaccctggccagaatgaactatacttccaagataaaacagccaaacaccttatggctttttgtttt

SEQ ID NO: 13133 - DNA, 431 bp, Homo sapiens
ccgggcaggtacaccctagcttcttcagaggaaatggaaatatcttgaactaagcagcattccagggaatcccctagcaaaaatacatacaataatcctgggctgggcagttgctcatgcctgtaatcccttgggaggctgaggcaggcagattgtttgagcccaggagttaaagaccagcctgggcaacacggtaaaaccccatctctacaacaaatacaaaattaggctgcacgcctataatcccagcactttgggaggccgaagcagatggatcacctaaggtcatggagttcaagaccagcctgactaacatggtgaaatccctactaaatacaaaaaaaattaccagggcgtggtagcacatgcctgtaatcccaactactttggaagctgggacaggaaaatcgctttgtccttcgccgcttaaa

SEQ ID NO: 13134 - DNA, 437 bp, Homo sapiens
aggtacaatagcaaaaatcaaagagcacagactgtattttcaagaacagaaaaatctctaatgctgaaagatatagtagaaagcagatttctttggggacattaatcaattagtttataattcattatgaagatttctcttttttattccggggagagtctgctacatttgaagttaatgttccattcacaccattttctgcaaaaagaaaagaatccatgttactctcttttataaataaatgcaagttataatctttatatgtaaagataccttcagaaaagaaaatgtaaaatccaattcactcaagtgaaatttacttaccagtatttaaccaatcacaaaacctggtaacatttttaacacaatgaacggaaagtagcaaattaaaagaaaactactattaaaagcaaaaaaaagtgacagcacagaaactt

SEQ ID NO: 13135 - DNA, 678 bp, Homo sapiens
  misc_feature 156, 157, 225, 282, 291, 292, 341, 342, 343, 360, 361, 376,420, 421, 520, 565, 636: n = A,T,C or G
ggcaggtacagaagaactgtatgggtatctgaagaagtatcacatagacctagatccacacttcaacgatatcctgggacaacattcacggaaacgctgggaaaactttatccatagtgagaacagacaccttgtcagccctgaggccctagatcnnttctggacaaacttctgcgataccgactcatcaacagagactgactgccaaagaggctcatggagcancccataccttctacctctgtggtgaaggggagcagtcccggcccttgtgccagaccnaatgctgtnngctttccagtggtctcaaacggcagcaccgaatgaagaaactggaaagnnngacgggtaatggcggcnnattgatgccttgctncaataaaactcaaccaactctaaacaccaaactcttgaagggannaagctacagtgttgataaaaaaagaaaattcttaatcatatcccttctaaaatggcacaggaagaagtaaagaacctaaaagttctgtcaaaaaagcanagaaagaaaacttccccagtggctagtctccagggggagctgttncactgtggcagcattggggatgccacctagttcagggatctgaaggggagctctgccttttggaatgcatngggaagatagaagaacctcggaagttgttggtaacctcgggc

SEQ ID NO: 13136 - DNA, 416 bp, Homo sapiens
  misc_feature 159, 349: n = A,T,C or G
aggtcaggtttgggggctctttccagcctctactatgttgcccccttccccaaagcccttacaggggcagaagcacattccccgtgaccctgagtctggcctcatttgggaagtcttctgtggtgtatggatgcctgtgtgtgtgagtgagatggtggngggccacggctatctggctctagcacactcatgggagaccagctctgggaacaacaggatggggtgctgggatgggggtttaagaggtctctgctagatatttctgaactgacctccccaggtgcccaacctggccttgggaagagagtgcctagggcagcggggatggaaacccttgcctgcagcatangtccaggcctcatggccctacaccttgacctcttgactttgttgccctggccttaagtacctgcccg

SEQ ID NO: 13137 - DNA, 887 bp, Homo sapiens
  misc_feature 755, 756, 758, 767, 768, 779, 780: n = A,T,C or G
ggcatttctcccagggatctctgtgcttccttttgtgcttcctgtgtgtgtggatatttaaaggggctggaaatgtgcaaaaacatgtcactacttagacattatattgtcatcttgctgtttctagtgatgttaattatctccatttcagcagatgtgtggcctcagatggtaaagtcagcagcctttcttatttctcacctggaaatacatacgaccattgaggagacaaatggcaaggtgtcagcataccctgaacttgagttgagagctacacacaatattattggtttccgagcatcacaaacaccctctctgtttcttcactgggcacagaattttaatgcttatttcagtgggctgttggcaggaacaaatgaagcaatctacataaagtcactagtgcagtgcctgacacacaccattctcttgaggtcccctctagagatcccacaggtcatatgacttcttggggagcagtggctcacacctgtaatcccagcactttgggaggctgaggcaggtgggtcacctgaggtcaggagttcaagaccagcctggccaatatggtgaaaccccatctctactaaaaatacaaaaaattagcccagcgtggtggtgggcacctgtagtcccagctactggggaggctgaagcaagagaatggcatgaacccgggaggtggagcttgcaatgagccaaagaggtgccactgcactccagcctgggtgacaaaacgagactctctctcaaannanggagaaaannttaaaataaanngggtcccttgccgctttaaaactatggaaccccgggctgaggaattctatataacctatcgatccgtcaccccaaggggggcccgatccaacttttgttccttaaag

SEQ ID NO: 13138 - DNA, 633 bp, Homo sapiens
aggtacaggaggatggtgcccagatttgtatcaggcactggagaacctcccacctggtccatgcccggctcccggtgagcaccgagacccaaccttgtgcacagccagtcttgtcatcaacaaacagggtagtaaattataaaaaataaaataaggaaatgtagctgggcgtggtggcatgcgcctgtaatcccagctactccggaggctgatgcaggagaatcgcttgaacccaggaggtgaaggttgcagtgaggcgagatcgcgccactgcgctccagcgtggatggcaagagcgaaactccttctcgaaataataaataaaataaaggaaatagggccgggcatggtggctcacgcctgtaattccagcacttttggtggccgaggcgggcagatcacttgaggtcagaggttcgagaccagtctggccaacatggtgaaaccccttctctgctgagaataaacaattagccaggcatggtggcgggagcctgtaatcccagctatttgtggggcggagacacaagaatcgcttgaatcccggagacagaagttgcagtgagccgaactcgtgccactgcgctccagcctgggcgacagagcaggactccatcttaaaataaaataggc

SEQ ID NO: 13139 - DNA, 810 bp, Homo sapiens
ccgggcaggtacaacctttatctttttttcacttcagcaaacaaaaaatgtcaaatgacatgaaaagtggcaagtcttccgacaataaataataaattactttataatttttgcaatgcaagagcaaacaaaaaaagtttccttttttttcctttttatttccatagagagagaaaacagtcattttaaccaataactatacacatctttgggggaaaagttcttggacagacacaagtcaaacacaatcccgagacgcttgtggcaaaatagaggtaaccttgttgcaatgctttataagttggtttttaaatctgaattcaaaaacctttaaagtcgcttcagacttcttgataaaggatggatctcaaaaaaagtggggagggggcaaagtaaaaaataaaccagctacaggacaggccaagagacccaggatttcaattaaccccttgttaaagtcaactttaaacatatcaaaccaatgcagctccaccttcctgaaaagactctttcagccaaggaggccagtctctcttcctgcgcttttgctggagctccttgtttgcaaggcaatgaccaatatagaaacagcaccattcagattaagatggactaaaaaaatttctatttttgtttttctctagatgtgccatgaaatgaaaatgctttctttgagatcctgaatataaatccttacgtttaaaaacgttttttttcaataccttgggcgctctaaactaatgattccccgggctgaagaaattcatataaacctaatgattccgtcaaccctgaggggggcccgttcct

SEQ ID NO: 13140 - DNA, 447 bp, Homo sapiens
aggtactactatcatctctgtattgtttaacaaaatatttccacatttgacaataaagtcagtatttgaaaggagaaaaaaaaaaaaaaaaaaaaaaaaaaaaaaaaaaaaaaaaaaaaaaaaaaaaaaaaaaaaaaaaaaaaaaaaaaaaaaaaaaaaataaaaaaaaaaaaaaaaaaaaaagggccccccccatttttttggaaaaaaggggggccccccccccaaaaaaactttttttttccccccccccccctttttaacccaaatttttccccccaattctcccccaattttttacccggaaaaaaatttttaaacagaagggccccctccaaatttgcccggggttttttctttatgcaaaaagggggcttttttttaaattgaaaggccccttgcccctaacggggggaatttttaagggctataggggaaacctataag

SEQ ID NO: 13141 - DNA, 805 bp, Homo sapiens
ccgggcaggtactattaaaaaaacagtttatgtgcaaggtgtataagaaaagtaaaacatacctttggtaaaaagattataaaggggcataagaatgtggatttttacctacattaaaaggttaaaaacaattattgttttaaaagtttaagcaagttttaaaacgttaattataaagaaaattctgcgtgtaaacatattagctaaagttaaaaaggtatcatccagtttttctgtgaactggacattaaagtaaaaaatgccacaggtttttcttaaagcatcaacctgctctttaacaaaaattataaaaggttaaaaagagtctataaaatcttaccttatggtcaaacatgaaaaattggataaatatgtctacaaggttttattaaaattcagtttaaaattaataacacactaatataaaggtaaaatttagcttatctggtataaaaatcatacaagaaacattattaaatataaaatggtgtttagctttctttggtctaaaaactaataaaaattggtgctaaaggaaacattcattttactagaggatcataaaagttaaagacttaaaacaaactttggcaattaagacaggacgccaagatgcaagtgcctggctgaaatggatcaaatattccatctgcactttaaacaaatgcaaatgttatgcttgtgcacatggcatgccaaaggccctgattgtccccctttcactaaagtggtcctcagttgcccagcttgggctgaaggtacttttttcaggttctacacttggaatataatcatgccaggcttt

SEQ ID NO: 13142 - DNA, 443 bp, Homo sapiens
  misc_feature 281, 379: n = A,T,C or G
ggcgcagtggctcacacctgtaatcccagcactttggaaggccgaggtggccggatcacaaggtcaggagttcgagaccaacctgaccaacatggtgaaaccctgtctctactaaaaatacacaaaaaaattggccgggcatggtggcacgcgcctgtaatcccagctactcagaaggctgaggcaggagaatcacttgaacccgggaggcagaggttgcagtgagctgagatcatgccgctgcacttcagcctgggggacagagagagactctgtctcanaaaaaagaaaaaaagatgaggaaataatcaatcttcttctgatcaatttgtccatagttctggaaaagctactgcacagagcaggagaggaaactatntgctctctgtaatactgaaaaactgagagtgctattttaacttgtcaataactaaaaggtacct

SEQ ID NO: 13143 - DNA, 800 bp, Homo sapiens
  misc_feature 310: n = A,T,C or G
ccgggcaggtacgcggggaagggagagagctgtgcgagcgtgggggagagtttttcgttggaatatacgttgcacatttatggcgattctgagtgtgagggcagacttctgccaggctcacacagcattttcgctgacaagtgagcttggaggttctatgtgccataattaacattgccttgaagactcctgggcaccgagactggcctcagaaatagttggctttttttttttaattgcaagcatatttcttttaatgactccagtaaaattaagcatcaagtaaacaagtggaaagtgacctacactntttaacttgtctcactagtgcctaaatgtagtaaaggctgcttaagttttgtatgtagttggattttttggagtccgaaggtatccatctgcagaaattgaggcccaaattgaaattggattcaagtggattctaaatactttgcttatcttgaaaagagaagcttcataatgaataaaccagttgaatagaaaaaacactgattgataataggcattttagtggtccttttaatggtttctgctgagaaacatttcaagattattgaattttttttttacttttccccttaaaattaacacgccacccttaactttttatttcccttaatgaaccgtccacccccgtggagatctccttgaaaacctccttttcctattacctacaacctatccaatcttctttcaccaggtcaaagggacttaaaatttggatgaccaccttgttcgagtttgtatctccatatataaacctcgttaaaaaaaggatt

SEQ ID NO: 13144 - DNA, 209 bp, Homo sapiens
  misc_feature 113: n = A,T,C or G
tgcgtagactagtcagcttctggtgtgtgactagagctgggcttgtcgtcccctccagcttcagctgtgcatagactggtcagcctccagagtgaccagagcagggctgtcgntcctcagcagcagcttggtctcatctcaggatcggctgagttggatgatctgggtcttgctggctgttccacttgtcctgaactgctggtttcagc

SEQ ID NO: 13145 - DNA, 347 bp, Homo sapiens
ccgggcaggtacgtgaggaagaaacccggaaggggaagaggaaagcaaaggcgtcaggaatggttcttcctcagggtctattgacattcagggacgtggccatagaattctctcaggaggagtggaaatgcctggaccctgctcagaggactctatacagggacgtgatgctggagaattataggaacctggtctccctgggtgaggataacttccctccagaagtggggatgtgcccttgtggatctttgtattttctcttgtttctcttgggagttgcatccttgcttgactaaaatggaagccgtattgattttgaaatgaaaagcttcatgatgtagcatctg

SEQ ID NO: 13146 - DNA, 344 bp, Homo sapiens
ccgggcaggtactgggaactaaatggttgggggggtggtggggagtcaaaactattttgtgatatgttaaaatacatgaaatccacatttcagtgttaataaataaagttttattggaacagagccatactcattcatttatatatcatctatggttgctttcccattataatgacatagttgagtagttgtgacagaaactatgtctcacactttgggaggccaaggcaggtggatcatgaagtcaggagttcaagaccagcctggccaagatggtgaaaccccgtctctgctaaaattacaaaaattagccaggcgtggtggcgggtgcctgtaatcccagc

SEQ ID NO: 13147 - DNA, 346 bp, Homo sapiens
ccgggcaggtactttcttaaataaatgtggtcatgttatacatcattttaagcatatttctcacttttttttgctaatgacttattgctgtttatatttattttagactatggaaatgatgttagacaaaaatcaaatttagcgattttctgagttcaaaataggttataaagcagcagagacaacacacaacatcaacaatgcatttggcccaggaactgctgatgaacatacagtgccgtgatggctcaagaagttttgcaaaggagactagagccttgaagatgaggagtgcagtggccagtcatcggaaattgataatgaccaattgagaacatcatcgaag

SEQ ID NO: 13148 - DNA, 311 bp, Homo sapiens
aggtacgcggtggtgtcgcatgagcatatcgagaccgcttaccgcatctggctggagccctgcattcgtggcgtgtgcagacgaaactgcaaaagaaatccgaattgcttggttggtattggtgagcatatttggtaggagaatagatgaaaatagttttcataacatcgatgatcccaactgtgagaggagaaaaaagaactcatttgtggacctgactaaccttggagccacttgttatgtcaacacatttcttcaagtgtggtttctcaacttggagcttcggcaggcactctacttatgtccaaaca

SEQ ID NO: 13149 - DNA, 393 bp, Homo sapiens
  misc_feature 10: n = A,T,C or G
aggtactttnttttttttttttttttttttttgccttgtggttcttaactttctaaaggtcattgactccttgcagcatgtgttactagaaatggatattctggctggacacattggcttacgcctataatcccaacacttgcaaggccgaggcgagtggatcagttgaggtggatacattgcaaatagcctagcaatcatgacagatgcacttcatatgttaactgacctaggcgccatcatactcaccctgcttgctttgtggctatcatcaaaatcaccaaccaaaagattcacctttggatttcatcgcttaggctggaatacaatgacaccatcatggctcactgcaccgtcgaactcctgagctctagaaatcttaccctcgcaacc

SEQ ID NO: 13150 - DNA, 690 bp, Homo sapiens
gttttttttgttttttgttttgtttgtttttgagacagagtctcccccgtcccccaggctggagtgtagtggtgctgtcacggctcactgcagcctcaacctgccttcctgccttagtctttggagtagctgggaccacaggtgtgagctgtcacacctggctaagttttaaattttcttgtagagacagattctcgctttgttgccccagctgttctccaacgcctggactcaagcaatcttcctgccttggcctcccaaactgttgggattataggtgtgagccactgtgcctggtctccatgtctgttgtgtttatcactgtgtggctgacatatagtaggtgtttttttgtttgtttgttattttgaaacagagtctcgctctgtcacccaggctcgagtgtagtgttgtgatctcggctcactgcaacctccacctcccaagttcaagagattctcccaccttagcctcccgagtagctgggatacaggcatgtgccaccacacctggctaaatttttgtatttttagtagagatgagggtttaccatgttggccagggggggccttgaacctctggcctgttgaacccgccggtcttgggctccccaattgctgggaccacaggtgtgagacacccgacccggcctaattttaattttaattttattgaattacgggggtacct

SEQ ID NO: 13151 - DNA, 856 bp, Homo sapiens
accggtcaggtactaatgaaaggcactatttccatgaaacctcaacatattttatcttagggttgacatgttatttctcacagtaagaatctgcgctttagtggtttcataattaggtagaagcagatgcggtataaatgtaagacagttataattgttagaggtctatgccatcctccatgttcattacccagatttaaattagcttttcaagaaaaccctgatgataatgcaactatgtgaaaacccaccctagatctgagcctagaaacaggagttttcctatcttactatggtagcttggaaacaaaggtattattagtcctctggccaaaaagagaaaaataagccaggtgatattgaaacatccttgcacttgaagatgccgatcagatgcatgtatttgttggtggtgttaatcctactgctacatcattgtgagggctatgaactaccatgtgctgcaaataaatgatgctgttgactgactggaaattgaagaaacatgttttttaattggaacccacttcattttttcgacacacttggatatcatgattgagcaaaacgaggattatttaattaaaagtttaatgatcatgttagctcgattctggatttataatcgatgaaagatttagatcgattacgaatcctggcgaagattcaagagggttcatcccttgtggacgaaatatcaaggatcaagaattatgaattgtagaataattattgatcaatagttgaggatgaattaataaagcgtattatcgaatgatctataaaggtatcttcgagcatctttagtaataggagaacccacgatggacgtatggaattttgaattacggcttat

SEQ ID NO: 13152 - DNA, 786 bp, Homo sapiens
ccgggcaggtacaggtaaggcagaaggaaggaagggcaaagaaacaattccagggccctggtttctgggatgacaggcttcccaacactcatgccaggactattttccacctcggttcactatgggttttttttctttttttttttaatataatgaatttttaaaatgtgcgtttgttgcccagattattccagaaagagttgaagggaggaaaggtgtgcttggtgtgctggtgattctagcactctctccagcctgatttctagtttgtgtggtgcatccagacagctcacccaggtgcccgggctctttctggtatccagagccaacccatccagggcaggagggtgaagattaggaggggcaaaggttagcctggaggttgcaattaacaagaatcaaaatgggtttcaggattctcacacccaggtgctaatttcagctggtcctgtagaggtgacacgtagtaggacaacatggttttgggggcagtgctggggtgctggtctctgcttttctagggtagaaaggaatcatacattgaaaatgcttaaatcgatggaatgattttatgttcctaatgctttcatttctttttgggctgcctgctctatctgccagccccttacttggacagtcacccactctagaaccttgtctttggcatttcccaggagggaaaatggaatgaaggggaaaaaacttattctttgtccccaaacattgtgcaaaaaaaaaaaaaaaagtccttggcggtttaaaacaatggatccccggcctgaggaa

SEQ ID NO: 13153 - DNA, 435 bp, Homo sapiens
  misc_feature 144, 231, 308: n = A,T,C or G
ccggcaggtacattttcactcctgctctaaaacttgcctcagtctctcactgtgccttatgcccctcagctgaattctttcttctgagcaggcaggaattgaggttgctgcagacgtgtatgcatttgccaccataacatactntggtgccacatgactaggatatgttctctagtgctaacatgttcgtttacagttcttaggactccctgatagaaaaaaacacataanaacacaaaataacccaaccaaccaaacaaacaaaaaaaacacaggagtttctcccaaaaagaagtctgcagtgtctnttctgttttctctgaaggtatcccagggtgttagatttctgttgttttcccttatgtggcaccgaagttggcaagaagaatgaagtgctgatataaataaatagggaaatgaacagagagagtacct

SEQ ID NO: 13154 - DNA, 852 bp, Homo sapiens
  misc_feature 474, 701: n = A,T,C or G
tacgttgacgactcacttagggcgaatcggagctccaccgttgtggcggccgcccgggcgggtccccggggggatcaaaagaggaatcgtgaccggaatagagaagggagctataatcgtattagggatcgcagtcgatcaaaaaaaaaagcatagatcgtgaaagggaacgagagcgggaagagagaggaagaagacgaaagcgaaaacgagaaacggagcgagagaaagagcgagaggggaacgggagcgagaaagagaaaaagacaaaaaacgggaccgagaagaagacgaagaagatgcatacgaacgaagaaaacttgaaagaaaactccgagagaaagaagctgcttatcaagagcgccttaagaattgtgaaatcagagaacgaaagaaaacccgggaatatgagaaagaagctgaatgagaagaagatagaagaagagaaatggccaaagaagctaaacgactaanagaattcttagaagactatgatgatgatagagatgaccccaaatattacagaggaagtgctcttcaaaaaaggttgcgtgatagagaaaaggaaatggaagcagatgaacgagatatgaagagaggtaaggaggagcttgatgaaattaggcagcgccttcttgcagaatgtcattcaaatccagatgcagagcttcagaggatggaacaagaagctgagaggcgcngcagccccaaattaaggcagagccagaatcagaagagggagtagaagaaagcttgaaaagaagataatcgtgaaaacccctggaagagagaggagccaaaccaaagccttgctgaaactaattgaggccttagtttggtccatttgttcct

SEQ ID NO: 13155 - DNA, 1022 bp, Homo sapiens
  misc_feature 165, 166, 192, 201, 202, 230, 240, 242, 249, 250, 265, 274,284, 287, 288, 304, 305, 306, 322, 323, 334, 371, 380, 404,411, 412, 413, 420, 422, 423, 429, 431, 432, 451, 452, 453,474, 475, 490, 491, 505, 514, 515, 528, 529, 530, 544: n = A,T,C or G
  misc_feature 545, 607, 615, 616, 871, 910: n = A,T,C or G
aggtaccatcctgtggtttttgttcaaaaagaaaaagaaaagagggtaaaacagttattataagaattcttagaacagagcaagtaattggcaataatttttttagctctaaaaaagaaaaaaaaaaaaggtggtgtgtgagcccgaaagtttaaccgggcccannccacaaataccctttcagtagggaanatttaatannaaaatttgtggttccattttttatgaanacacaaacgntngcgagcnncagttttctttttcntttttttanagaaaatcanacnntttctgaaagcttctnnntcttaagaagttttcnnttctaatgagnaccaaaagaaaacatcttgcaagcattggaccacaanctggcttgnagtgaagcattttgacactttttntaacatnnntatttananngtaaananntaaagaaatttagggtaannnattagaaaaaaaaattcaagnnaagttagtaaaatannaaagcccaatgccnccttttaannaaaagtggtaaannnacccaacttctctnngtatattgaaaactacaagttataaaaccagagagcaaaccctttttttgggatggggttgnggtgtgcnncccccacacaaaaataataaaaaataaaaggaaataaaaaatgttactctgcgcccgggcgggcccgcttctaagaaactaagtggatcccccccgggcttgcaaggagattcgaatattcaagctttattcgattacccggtcgaacccttgaaggggggggccccgggtaccccaagctttttgttcccctttaattgaggggtttaaattgcggcgccttggccgttaaatcatgggtcaattagcttggtnttcctgtgttggaaaatgtgtaatcccgcttcaacatantcacacaacaaacaattaccaagccggggtaagcactaaagattgtaaaagacctggtgtgtcgcctcatatgaggtgaagcttaacttcacaattaatatgcggtttgccg

SEQ ID NO: 13156 - DNA, 347 bp, Homo sapiens
ccgggcaggtactagaagcaaaatattaatctttgtgattattacttctccaaactagaggagagatatccaaaaaccatttcatgaaaataactagttgattcaggggtatgaaaatcagtcaaactggatatggaattattatcttcgaaggaaccagaaaaccaatcaaatatcttgctttctagatgacagtgccaagatcatattcactgagcaagaaacaggtaacagtgactaggttacaggctgaaaataattaggtacaaaatgtgatatttgaggtgcttgatggctgaaccaaaaaaaacacacacacacacacacacacgcacacgaacaaaacc

SEQ ID NO: 13157 - DNA, 853 bp, Homo sapiens
  misc_feature 604, 657: n = A,T,C or G
ccgggcaggtacatgcagattaatgttgttttcatgcctgcaaacacaacatccaatctgcagcccatggatcaaggagtaattttgactttcaagtcttatcaagaaacacatttcataacactatgtatggctgccacagataatgactcctctgatgaatctgggcaaagtaaacaaaaagccttctaaaaaagattcatcggccaggtgtggtggcttacacctgtaatcccagcactttgggaggctgaggtgggcagatcacctgaggtcaggagtttgaggccagcctggccaacatggtgaaatgccatctctactaaaaaatgcaaaaatcagctgggcatggtggcgcatacctgtaatcccagctactcaggaggctgaggcagaattgcttatacccaggaggtggaggttgcagtgagccaagattgtgccgctgcactccagcctgggtaacagagcaagaccctgtctccccctaaaaaagattcatcattctacatgtcattaagaacatttttgattcatgggaggaggtctcaagatatcaacattaacagaagtttgaaagaattccaaccttcagggaagactntgagaggttcgacttctgtggaagaagtaatggcagatgtggtggaaaagcangagaactagaatttggaagtggagcccaaagatgtaactgaaatgctgcaatctcatgataaaacttgaatgggaggagagtagctttttaaggatgagcaaagaacatggtttcttgagatggactcttactcttggtgagatgcttggaacactgttgaattacaccaattgattaaaatatgacataatttag

SEQ ID NO: 13158 - DNA, 409 bp, Homo sapiens
ccgggcaggactcaccgtttctcttaggtaaagagctaagagtggaattcctgggttatgggatagatatatgtttaacttggtaggaaattgctaatttttcaaagtgtttatatcattttacacctccattaggaaagtatgagtgatcatttctcatctcaccaacatttggtattgtcaggtgggtttttttttttttcatttaattttggggaattctaatttatctgttttttgttgttgatgctgctgttgttgctgctgctggtgtatttgatattggatctaagaaattgttggctaatccaaagtcacgaggatttacacctgtgtatactcctagacgtggtatagctttatctcttacatttaggtgtatgaccccttggagttaactttggaacct

SEQ ID NO: 13159 - DNA, 408 bp, Homo sapiens
aggtactttttttttttttttttttttttcgtaaaaccgtagttcttgtcctgctttcctggcttcctccaactgcctcagggccattcgtagctcttgagagacaattcctggtgagtcccgctccttcatgatccagtccagggccatgtggctgcgcatcttttcatctagagaatactgagaatagtaggagatgacttcctgtcgggaacactttgtttcacgaagggcttttaggcttccattccagtgcaatagttggaagatggtcatcagctcctgaaactccagcatagtcttccccatgtttgactccagcatgtagtgataggccccaacactggtgctggggtcatctgcatcatctaaggtgccgctggtggaggctactgcttcctgaacact

SEQ ID NO: 13160 - DNA, 509 bp, Homo sapiens
aggtactgagtataaaacaatataaaacaatatgagaaggtctctctcttccctcaagagtgtatgactttgctgcccaggatgatcttgaactcctggcctcaagctattaatttcttcccaactcagcctcccaaagtgctgggattacaggcatgaaccatagcgcccagcttaacaggatttttcagagagaaaaagttttttaattttaatgaaatccaccaatttatctattttttcttttacggcatgtgcttttggtgtaatgtctaaaaactatacctacgcctaggttgtaaagatagtctgttttcagttttatagctttccattttacatttagatatatgatccattttgagttaagtttgtattacatgtaaggttggggttcctttgttttggtctttgacaaatggaagtccacaacatttattgaaactcttcttcctccattggttataagataaatccgttggccatacttctgaatgtctatttatgga

SEQ ID NO: 13161 - DNA, 537 bp, Homo sapiens
aggtaccatgaccctaatgttaatggaggaacagaattagaacctgttgaagggaatccatatagacgcatttggaaaataagttgctggagaatggcagaagatgagctttttaatagatacgagagagcaatttatgcagctttaagtgggaatcttaagcagctgcttcctgtctgtgacacctgtgaagacacagtttgggcctacttccgggtgatggtggacagtctggtagaacaagagatccagacatcagtagcaactctggatgaaactgaagaactccctagagaatatctgggagcaaactggacgttagaaaaggtttttgaggaacttcaagctactgacaaaaagagagttctggaagagaatcaagaacattatcatatagttcaaaagtttcttatcctgggagacattgatggtttgatggatgagtttagcaaatggctttccaaaagcagaaacaatctacctggacacctgcttcgctttatgactcaccttattttgtttttccgtacccgcccg

SEQ ID NO: 13162 - DNA, 607 bp, Homo sapiens
aggtaccagttttgtgctggttggcctcctgccaggaggtgacgctttcaagggagcaacagctgtggtagcataggaagaatcaggtggtgagcagggccctagaactcacaagagaatatgacctttgtcttcagctaccagggtgggtagaggaggaccatcaggttggggcagggctaggtgcgtctgagttcagactctctatgggcaggtcttgctgtggctgctgtaggggatgggggtggggttcccaggtcactagagttgtgtgcctaggaagattatggctacctctgctgagtcacgcatgttgtcagggaagtgggggaaagctggcagtcacaggcctcacccagctgccatgcaaactgaagggccagtcttacttccaccatggcccccaaaactgttgtgcccgagcgagttagaaaaatgccacactttgagatgaataaagagtcctttattagcccgcgaccgagagatggctaacgctcaaaattctctcggccccgaggaaggggcttaacttttatatcttggtttaagaaggggaggcgggggtctagttaaaacaattttacatgagttaagtacctgcccg

SEQ ID NO: 13163 - DNA, 843 bp, Homo sapiens
ccgggcaggtaccatgaaatacatatatttcataaggttcagttacaaaatggattgtttcaaatggcaatttcttacactaacctgattatgaaaaaaagaagtctgtatcatctgcttccaagtctgttatgtccaaatatattttaattatgcatttattttgctacttttataaatattagagatttcaccttaaattatttttgtaactagttctagaacatgttttccaattattatttttctaatggagacgtataattgacctatgtttatgcatatatgttctctacacagtgaaactttttttaaaaagaatagtaaagaaaatgcggaagctctggctctccaaggcaaagtcaaaaaaaaaagcggggggggatgcgaggaacattttattacacctcctgattttcactccttgagttttattttctccccttgtttatttgtttaatgctagaaactgtattcctaagagagcatacctctttcaggtgagcatgataattggaagattttgatacttagagtatgaacatataattaagaagtgattacctaataaagataacaatgtgactattttaattattttggtggccgggagttggttttacatcacccaaaaaaaaaaaaagccctggtttcaaattcaatggtaataaatatgctaactttctgaatcaaaatggagagcctctcaagaaaaagaactatgcagtcagcaatgacttaaaatagtcaggatacaggcatttggggtaaggctggttccaccaatttggtctcaccaccatataccagtgggaccccgtgggtaaccctggtttcgcatat

SEQ ID NO: 13164 - DNA, 842 bp, Homo sapiens
aggtaccagctaacgcatctgggaggcaacaaaacaatactctcctgaggttaatgtggaccaaaaactagatttcatataaaagagtttattccttctacttgaggtgtgacatgaaggaaagtaatggaaataattctgccctcccattctcaagggccagggggaattcaaatattgaacggaagtgattttggaattgcatggaattctcactgccatcccaaagaaatgctgatcttgtcactcttacctgtttcattccctgggggcagaacaaaaggacgcactccaaagatcggcatgaaccaagaactgggtttcatataaaatattttattctgtcctcttgagatgtgacatgagaaaagtattgagaatacttctatcacctcatcttcaagaatccgtaggaattctcccatggtggactttacggttaacctgaacaggtcttggaaaaaggactttaaacattctcctgttctgtggaataagtatacttttttctggacatacaccttgtcagtgagttccatgtgatactagagttgcatagagttttaacctttacgccaatgaagatctgaggcaaacattgcccctttttttagaggtttgcatttgtcactgataactggaataattgatcttgttgaaaagcctgggaaaagagaaactgatatggtacctttaccggctgcctcacttggaaaagaatccaatgaacacgccgaaaattttgggccttctaagcttgctgagaactttatatggcccttaacctggaagatccacaaaaggcgatccttacatgtggcatagaaaattggtgccacaag

SEQ ID NO: 13165 - DNA, 469 bp, Homo sapiens
ccgggcaggtaccgtgttatgcaaattaagcacttttcttctaaattcacatgaacttttagagacgtagactatgttattgaagtaactcatcctaagtgtctgtagtgattggagatattcttgcttatcaaattgaagtatttataagtgagtgacgtgatgtctgagatctatcttaaagtaatccagtagggcaaagataacttgagattggccagttcttgataatttttgaagtaggctgatgagtacgcggggcttccttttcgatccgccatctgcggtggagccgccaccaaaatgcagattttcgtgaaaacccttacggggaagaccatcaccctcgaggttgaaccctcggatacgatagaaaatgtaaaggccaagatccaggataaggaaggaattcctcctgatcagcagagactgatctttgctggcaagtagctggaagatggacgtacct

SEQ ID NO: 13166 - DNA, 705 bp, Homo sapiens
  misc_feature 473, 642: n = A,T,C or G
gcgatcactactatgggcgaatggagcttcaccggcgttgccggccgaggtcctaacaaatgcagtagccaacaagattaccatgcaatcattaaggagaaccaaagtaagagagccactcaaaccagattttgaacgctactaaaattaaagtagttctttgatgaatataatgagtagggaaaggattctttgtaatagtgatacctctgtggtaagagaagggtggtatgtgagttttagtctacagattatggcaaattcagtgacaacaatcaaatggtctaagattgacagtagcacagttttactctgtgaaggtaatgttcaggacaaatttcaagaaaactagaaaaccattctttacagctgaaatctttccctaaccattgttatttccacttttaagtcctcaagagatgagaaaagggaggtaaggcttccttatacatttcctgcacaatgaaacattnttcctcctccaggcaaagattcaagcagaactggcaaatatcttatcttgctcttctcaataataataatgttgttagataataaagttctatagcaatttaaccctagaatctttttgaaaagtaattctttaaagttgagaatcacaggtgtctagcaagcattttncttgggcacttgaagctgattattcaccttggtctttccttccaggggaaatgaatgaggcca

SEQ ID NO: 13167 - DNA, 649 bp, Homo sapiens
ccgggcaggtacttttatttcatgtaaactgcccctctgaggatttgggcatattttttggaaggtgcctaatgcttaggatagtctctagggtgatgcactgcacctgcttccttcccttcatgcggctgacccatttctgttgaacagatgtctcctgtgtgatgcccctgactcttacatttatctttctaaatcattttctgaagctgacttgctctagggtgcttcatcaccacttccatcttgcatcaccttataactgttctgtcttgttctctcccagcaatttattttaaaacaagggctagcttcaagcatgactgttaatggctcctctgtgacaaaacacaagttggaccaaggagaaagccctttggagaaactggaccctagttcagtttagatctcaaatataggctgaaatctcttaccaaagtgcgttccagataaaaatgagacttaaaagacagactggtctaatatgctcactggtcatcacattcagcttattcttacgtgccagtgaagccctaaaggctcagtgcatagcatacctgccactctggatggtttcctgggcttcatatctgaatggcaaggagggagcttgtccttagcagacaaatcaagcactttaagtacctcc

SEQ ID NO: 13168 - DNA, 787 bp, Homo sapiens
  misc_feature 414, 739: n = A,T,C or G
aggtaccctaaaacctagtatctttttctcttctatggaaaatccgaaggtctaaacttgacttttttgaggtcttctcaacttgactacagttgtgctcataattgtccttgcctttccagcttaattattttaaggaacaaatgaaaactctgggctgggtggagtggctcatacctgtaatcccagcactttgggaggctacggtgggcagatcatctgaggccaggagttcgagacctgcctggccaacatggcaacaccccgtctctaataaaaatataaaaattagcctggcatggtagcatgcgcctatagtcccagctgctcaggaggctgaggcatgagaatcgcttgaacctaggaggtggaggttgcattcaactgagatcataccacttcattccagcctgngcgacagagcaagactctgtctcaaaaaaaaaaaaaaggaaaactctgtgatggacatttgtttagtaaatcccttcagtatttatccctcctttccccacagcagctttctttcctgtcaactagaaaggagcaggatgtaataaatacattttggtgtgactaggccacaccaactcttaatcatcttccattttccttagacatttaaatttcaaggcatgtacgccgggggaactcttgcacctttggctgtggaaggctttggaaagtcttcaaagctggagtttgtcctctaagaaatttggccagtgccttagaacanaaaacctgatggcaaagtgactggcatgttccaggaaaaaaaatttgt

SEQ ID NO: 13169 - DNA, 784 bp, Homo sapiens
  misc_feature 313, 416, 767: n = A,T,C or G
ccgggcaggtacaattgttttagaagataatttgtttttctctcttcagtttcgcatattactaaagacaaatcatggtaggattggtttgtttattatacttggcctaactatttgtatacaatgcagcaagaatgattattttttacttaggcttttaagtaggctctgatggaactttgttccatagcaggaatctcagataagactttgtaaaacccgtaaaacccagccgagccatggatttatgccattaaatacccatgagttgggtgaaatttcctctccttttgagggcccaagataaacctgnggcgtctgcacttgtcaaaaagtgatattctttacttacacagtcagaaaccctgttcagggactgtgtatacagaatatgaggccagtttttccaagggctntattggctccgtaagtcaagtttgattccttataaggaaagcacatgattccagtcaaagccttggtaaaataaccaaattctccaaatgtgtccttgtacaaatgaaaacagattcttactgcacttatgcaaataactgtattaccataagttaaaaatactcccaaataggttccaaattctggattaatcagattgaaacaactttgccacaaattttgtcattagaatatactaaaatggtaaaatctgccgtagcttaaaagaaaaagcataagactcggaaacccaaacaaaagaccaacaaatttttggccaaaagtaaaaaaggatgggtaagcccatgcantaattccgtaattcccg

SEQ ID NO: 13170 - DNA, 781 bp, Homo sapiens
  misc_feature 46: n = A,T,C or G
aggtacttttttttttttttttttgctcccagtggcgggacacggnggcttatttttactcttatttatttatttatttttggagactgagtctcactctatcacccaggctggagtgcagtggtgcgatcttggctcactgcaacctccacctcctgggttcaagcgattctcctgcctcagcctcccaagtagctgggattacaggcgcatgccaccacactcggctaatttatttttacaagcagataaaggtttcttttattttaatggctgatctatgtaatcacggaggccagtatgtacattagttccgtccggaaaggcggagacagctcaaagcaagaccccctattgggggcttcgaagtaacaggtaggtgagagacagatggttgcattcttttgagtttctgataagtctttccaaaggaggcaatcagaatatgcatctgtctctgtgagcaagtggatgacttgaatagaatagaaggcagatttgccctgagcagttcccatcttggagggacccaagaaattttttttttcacattttccccttttctttttaacatctttggagaaagcatttttacaacagaatgaagtttcaagcttaagaaaggtcattgacctttcctgggtaggacgggttaatcccaattggtgggctcgaaagttatttttagcaggtgtgaagtcttatgcctgggaagaaaaaatttggggagaagggttgaaaaaatcacctaccaatgtctctcctttaaaatttgtatggc

SEQ ID NO: 13171 - DNA, 317 bp, Homo sapiens
acaacaggagtgagtggcaggtgagtgagcatcaccacccgagctctgcctcctatcagatcagtggcgacattagattctcataggagcacgaaccctattgtgaaccgcacacacaaggccagctccttatgagactctcatgcctgatgatctgtcactgtctcccatcacccacagatgggaccatctagttgcaggaaaacaagctcagggttcccactgattctacatgatggtgagttgtagaattagttcattatgtattacaatgtaataataataaagtgcacaataaatgtaatgcacttgaatca

SEQ ID NO: 13172 - DNA, 506 bp, Homo sapiens
  misc_feature 320: n = A,T,C or G
ccgggccggtacgcgggggggcttggaagcagctctctcctccttccccgctgcttataaacctcagccctgaggctccagctcactctaccccatctccttgccgggtcagccctgacaaaggttcaactagccccttgaggacaatcaacttttggcctcaagggtcctaattggccagcagaaaccacctgacaagagctagaaggaagtccatttgagaaccccgtggtcactcactctttctttccactcttttgctaagggccaggaagggctctggaaagggataagcccttcagccgttcaaaccgaatgtntcaaaaggaagcttgggttaatccccaaacaagtttagccccccaattcttgcctccaaggggaatgcctggggctttcttcttttgattggaggaaaggaatgtaaggaagcttttgggaatgttggaattccagtgaccttcgggaaggctccaaaggtttcaaattggagttaacccctcggt

SEQ ID NO: 13173 - DNA, 565 bp, Homo sapiens
aggtacatctacttaaaggactattatgtggaataatacatactaatgaagtattacttgatttaaagactacaataaaaccaaacatgcttataacattaagaaaaacaataaagatacatgattgaaaccaagttgaaaaatagcatatgccttggaggaaatgtgctcaaattactaatgatttagtgttgtccctactttctctctcttttttctttcttttttttttattatggttagctgtcacatacaactttttttttttttgagatggggtctcactctgtcaccaggctggagtgcagtggtgcgatctcggctcactgcaacctccacatcccatgttgaagtaattcttctgcctcagcctcccgagtagctgggactagaggaacatgccaccatgactggctacttttctgtattttttagtagagacagagtttcaccatgttggccaggatggtctcgatctcctgacctcgtgatccacccgcctcagcctcccaaagtgttgggattacaggtgtgaaccactgtgcccggcctgtgtacctgcccg

SEQ ID NO: 13174 - DNA, 396 bp, Homo sapiens
aggtacttttttttttttttttttttggatccagcgctggctaaaaaatgtcacgttaccctttttttcctttttgtggagatgggggcctcactatgttgcccaggctggtctcgaattcctgggctcaagtgaccctcctgcctctgcctcactgagtgctgggattacaggtgtgcgtcaccacacactatgcaaagaattttcttaacgaacccaaccacgtaaacagcattcagttcaacaaacagaacataaccagtccctagaagccccttttacatctcctccatcactataccctgcatatatatactatacatatacagtatatacatatacagcatatacatgtatacagtatatacaatatacatatacagcacatacgagatc

SEQ ID NO: 13175 - DNA, 144 bp, Homo sapiens
aggtaccactgtgatgcactagagccccatgctcaatcttctttttcatgtcataaatgtgaattgtttcatctttgctcccagtgaccacaaaacgactatttacagctactgctgacaaggaggcagtgtgagcatggtgag

SEQ ID NO: 13176 - DNA, 582 bp, Homo sapiens
ccgggcaggtacttttttttttttttttttttttcctggggggtttgtttgcttgtttccttgccagcttcacattttacagattctcataataattctaagaatagctctaatatggtttggctgccccacccaaatctcatcttgaattgtaactcccacaattcccatgtgtcatgggaggaaccttatgggaggtgattgaattatggagacaggtcttttctgcgctgttctcatgatagtgagatcagtctcataagatctgatggctttaaaaatgggagcttccctgcacaagctctctctctctctttgtctgctgccattcatgtaagacatgacttgctcctccttgccttctgccatgatttgaggcctccccagccatgtggaatggtaagtccattaaacctctttctttcataaattgcccagtctcagatatgtctttaccagcagcatgaaaaaggactaatacaaattccatcttgaatttgacaaccagagtaacaattacttgacttttctgtttcctttctacaacaaattttttaaattaatgagaatcccgcgtacttg

SEQ ID NO: 13177 - DNA, 465 bp, Homo sapiens
ccgggcaggtacttttttttttttttttttttgtccaggccacttttatttaaacagaagcagcggccccacagccacggggacatgtcttccagacagtagacacagtgcctgtggctgtaagagcctgacagggaagattcatgcctttcttcttgggcccccatgaccaaagaagaaaaattaaaatcacactcccgtacactgcttacacccatgtttcaccccctgctctattagtttgaactactgggaagggaatttcaatcaaggctcaaattctgaaaagagaaaagggttttaaagaaacacttttcttacacgttttcaaaaaagaagtggagcttgttccttgggcttgaggggtttattttcaattaaggcacccctatcatggttatggggacacttaatgggttggagttcattcaacccagcagggaaaggattgaaaaatatcttggg

SEQ ID NO: 13178 - DNA, 454 bp, Homo sapiens
ccgggcaggtaccatgagacactattctctcatgaaatagttttggcactcttgtagaaaatcagtaagccacagatgtatgagtttatttctagactcttaattctattccattgatctatatatttatccttctgacacagccactctatttttattactgtaacttctaaagtagtattggttttgaagtttggaaaaggtgtgaagccttcctaaccttttccctcttcttttatcaaagaactggtttttggcttacttctggaatccttggaattttccattactgatttttaaggagtcaggcttaatcaaatttcttgcccaaacaaaagccctagcaaagaaattttttgaatggttgatttgcaacttcaattctgttgaacctcaatttgcaaaagtatttgacattcttcacaatatttaagttctttgcaatccataaacg

SEQ ID NO: 13179 - DNA, 514 bp, Homo sapiens
  misc_feature 200, 514: n = A,T,C or G
ccgggcaggtacagacagaattaaagacctggagaaacagttcgtaaagcctgatggtgagaatagagctcgcttccttccagggaaagatctgaccgaaaaagaaatgatccaaaaattagacaagctggaactacaactggccaaaaaggaagaaaaggctgcttggaaaaggattttattttattgagcagggtttntcagggctcactagactaggcttctgcaagcaaaaaatctcagggggctgctaaggctaggaacactacttgcttctttaagcccaaagaaagattgaaatggggcttattcaaaaggaaagggattctaaaaaaatggctaaccttgaagaaaaaaaatgattgggccttctttgggttgcctggaagccttggtcccaatggaaaaaccaagggccccttagacccaatttggaaacctttccaaaaaagggaaaaggtcacggggcaggaaaaaggaaagaacttttcatttcttttcactttggtcaatn

SEQ ID NO: 13180 - DNA, 389 bp, Homo sapiens
ccgggcaggtaccactcagaagccttcactgtcaacttcggggacaccgaagaggccaagaaacagatcaacgattacgtggagaagggtacattggacatcctggactgattctgtaattttcgtatcttttttctcccatgttccctttatttgtcttttggttctgctttttgggagattttcttaacttgatctacctgaggctcagtcctcatctgtaaaatgctgataaaaggacctaccacctagcgttgctgtgaggtgtcagtgaaataaaatgtaaaatgcttagcacagtgaactttaataaatggtagttgtggttgcacataaaaaaaaaaaaaaaaaaaaggaaaaaaaaaaaaaaaaaaaaaaaaaaaaaaggt

SEQ ID NO: 13181 - DNA, 608 bp, Homo sapiens
ccgggcaggtacagaaaattagcaagagacattttctgcattgtgagaaatcaacatagacaccttaaagacccctttgagagtgtggctttttgaacttttcagattttgctcagtgacctgctaacacttacgtgagaggctccaggtgtaaatagaatctaatggcagaatctgtaagtgtaaacaagcatcttaggagtgagagatcaagaccacaaaatgtccagagctatgaccacagctatacctacccataaaatacgatactggagtagggtatttttgtctttttttcttacctaagagctagctaatcaggacaggtgatgcaggttctggagctctaccagggcagttctattttctttttttgagacagagtctcactgtcgccctgggctggagcgcggtggcacgatcttggtgcactgcaagctccgcctcccgggttcatgtcattctccctcagctacttgggaggctgaggcaggagaatcgcttggaggttgcagtgagctgagattgtgccattgcactccagcctgggcgacaagagcgaaactccattttacgggaaataaaatgtgaaaatataatgggtctct

SEQ ID NO: 13182 - DNA, 588 bp, Homo sapiens
ccgggcaggtactcaaagacgaatcatgaaaaagaaaaaaaactttatttcaaacaggttcagtgatatatgtgtgtgctacagcaaaggctggttgtggcaaagtttcatttcaaactgtatgatgtggcgctgggcaaggtggctcacgcctgtaatcccagcactttgtgaggccgaggtgggctgatcaccctgaggtcaggagagaccggcctagccaacatgctgaaaccccgtctctactaataatacaaaaattagccaagtgtggtggcgcgcacctgtaatctcagctactcgggaggctgaggcaggagaatcgcttgaacccggggggcagaggttgcagatcacgccactgcactccagcctgtgtgacagagccagactcaaaaacaaaacaaaataaaacaaacaaaaaaacagaactgcatgatgtataattttgacattatgtgggaattgttaacttctgccaaaatgtagattcaatccaacattatgccaaattttatattaattttagtttctaagtttcataaccccaaaaaaaaaaaaaaaagaaaaaaagttcctcgggccgtt

SEQ ID NO: 13183 - DNA, 485 bp, Homo sapiens
aggtaccggccctccaagtagtgtttgcgaatacacgtcctgttgtgaaagaggtgaggagaaaggagtaggaaggctcagaggacataacaggcaaaaagaaacaagagaggtaaataaaaagaattaatctaatggcttcacccggcttaggcgcagttttaaggggcctgacccaggcttcgggacccatgtttctagttgggctctgttggcctttttgttgtgggagtgatgaatccaagcaggaattccatccaccttcagaaccgttggcgtcgtgaggatgatggtgtgaggtcccttccaagcaggagtgagtccttctttctggaactttttaacaaacactaggtttccctggcttgaaacaatggcagggcccctgttggtcaggaactggattggaatgagctccttaaacaaggtggtaagatgatatcttgtaccttgcccggcggccgcttaaaaactaatggattccg

SEQ ID NO: 13184 - DNA, 499 bp, Homo sapiens
aggtactttggtatgtttttgtcttgaaaagacggttttctagctagaaattcggggcccataaggtcaaggctccagagatccccttctcatcatccttcagttgtctgaggagacagaggatcacatgtgtcacagtgagtgctgtttccccagaatctgcagtcttaagctctcctgctgacgcacacagccagctctctgcttcatattcatgtgacccactgtgaagtgacaggcagttgccaattctgttatataagaagcagctttgtccatgcaacttttgatagtttctgctctttttcatagacttgctcctttatggaaattatcacattatcacactggggtttctttaaattgatttcgtttgaatttttgttctgcccatcctctctttatacataattctttaattggctcttttacgggccatgatgcatgtcctcttcttttgctctagctctgtatttcttgatctattctttgttcatat

SEQ ID NO: 13185 - DNA, 503 bp, Homo sapiens
ccgggcaggtacttttttttttttttttttttttttttgatttttttatttttatttcgtagaaacggaggtccagccaagttccccaggctggtctcgaactcttggcctcaagtgatcctccatgcctgggctggaaaacataaccttatgggaaagttcctaaaaatggttgaagaacaagactgaaggctagaatatgaaagcttaaattctgattctgccccttcctagttgcatattcctgaacaaatattttcaactggtatttctaaaattgtgatctcttctctggcgtgcgcattaccatcataaaagatgatggtacaatatttaaaaatttgacacacaaccccattgaaactcaacatttgtcaaacttcacgtgaactactagtgggggaggtaattttttttaacataagaatggactttaatccctcgggtaaattcataatttttggggagcaggggttttcccggccctcttttaaaaaaaaaag

SEQ ID NO: 13186 - DNA, 465 bp, Homo sapiens
tggagctccaccgccgcggccgccgcccgggcaggtacagttcacattaatattcacatcccactttctgctacttctgtcagctatactctggagaaaaatacaaagaatggacttacacgctgggccaaggaaatagaaaatggtgtttatttgattagtggacaagttaaagatgaagattgtgacctatttgaaaggacagaaaaaaatcttctagagggaaatactcaagcaactagtcattcttttgatgtcagagtgctaacgcagttgctcctgaattcagaccacagatccacagccacagtccagatatgtagcggttctgtaaaccttaagggtgctgtgaaatgcagagcttatatccacagcagtaaacccaaagttaaagatgctgtgcaggcagtaaagagggatatattgaacacagttgctgatcgttgggaaatgctatttgaggat

SEQ ID NO: 13187 - DNA, 426 bp, Homo sapiens
ccgggcaggtacatgtaatttgatctttatcaagggcatatcctgggaatcagggagaacttctgttgcctcatagacacgacctaacccccaaggcaccctgcgaagaaggggaaggcttgttttgcggtatttgggaaagcatgccaattctctctcttgaataagggcaccatgcctgggggcacactactttaatctctgaccagggtttcatattctgtcacttctcatttatcaactgaaacccagatgtcccttgagggcactttttgttcgagaaaccatggcattttgaagccttgtaatataaccacatggactctccgtttacaccccaagaacttcatgattacctttgacaggcgaaccccgcacgaagaatgtaacctttgaacacttcgataattaccggcagattccctt

SEQ ID NO: 13188 - DNA, 419 bp, Homo sapiens
ccgggcaggtaccgaggtcattttgcttcctatagactgccaccttttggcaaaagctgttctaactccatctcagcatttacaattccatacctggtggtcagaggaggcccgcctgcaggctcagctaaatcgggctgatggcattccaattactcaggctcagctcacaggctccgataattactctgatactactgctcatttaggctttgatgctctcaccacggaacaagtaacaaaggtgtgtatgagagcttgggataaattacgcaccccaggccaagcttctgtttcttttactattgttaaacagggtcacaatgaattatatcttgattttttagctaaattacaagatgctgttgaaaaatctgtctctgatgagcacactcaaggtattcttcttcatatgttag

SEQ ID NO: 13189 - DNA, 265 bp, Homo sapiens; identical to SEQ ID NO: 4020

SEQ ID NO: 13190 - DNA, 412 bp, Homo sapiens
ccgggcaggtacaagtatactccgactctataaacttactcttctttaaagcagatcatcctatttatcataagattattaaaaatgtatacctttgcttttatttgccataaaaaaagctttctttggaataaaatagatttttatccaaagatgcagaactgttttcaagataaatccaatctgatcaatttgacagattaagactctcttcaatagtaattcctcaaattatttaaataatttatgaaacagtaaaggcttaaaatatgaattacatagccttaaaagttctagatccttcatggattttatttttggtttattattgcaggaaaattacatacaaatcttttgagaaaaataacaaaacccagactttttttcccaggttgctataagcgagctcaaa

SEQ ID NO: 13191 - DNA, 325 bp, Homo sapiens
aggtacagttattaaaaataaaaactcgcattttaggattagggaagtctggaaaaaaatttttttaaacttggagatcacatattgaatagctgtcaaaattcaaactgactagttttgaagaacttcaaaaacgtgttcaaatgaataaagaacaaaaatgatcaaaagaaacccatagctgcctaagagtcttaaaaattattaatgtgacactctcatctctcatcaagtgtatccaaaccacttctcatttgctctttccatttaaagactcacagtagcttcactacacatatatttatactgaacatgtacctgcccg

SEQ ID NO: 13192 - DNA, 489 bp, Homo sapiens
aggtaccctgctctgcaaatcctagccatttcagccttctttgaaccccaatctgcctcctaaattcagcaagatcgccaggcagaaagttcatcctagcgctcatccctttccagtctactaaggaaatgcttttattatcactctatagtatatcgtattagtcaccagtacaacaaatttagattttcagaagtgtacaacatttatttcaactaaatattaaagggctctactgtgttgtcaaggcaactgtctcctgaatatttggtagcctactagcaatagaaacccaaaccattaaaaaatttcctttccttttatagaaaattttaccctttctattgaggagaccagaatagagcacaagatcagcaccaaaactatattgttccagcctgattaagttacccctggaaaatgccttaaaatgtaattctgaaaaggcaccaagggcggaatacctcatttttttaatggctccttccg

SEQ ID NO: 13193 - DNA, 444 bp, Homo sapiens
aggtacgcgggggggcatcacggacctaccaatatgtgatgtcacccctggtggcccagctgtgtcatggagaaactccagctgggcccagagattctgcatcgggaaaatccaaggcttatttatgccaggctgagtggatttggccagtcaggaagcttctgccggttagctggccacgatatcaactatttggctttgtcaggtgttctttcaaaaattggcagaaatggtcgagaattcgtatgcccctgttgaatcttcctggctgactttgcttggtggcggcctttatgtgtggcactgtgcattatacatggtctctattttgactctttcacttacttggtttgggtattcggccatttgatgcttaaatttgttggatgtgaacatttatttatttatagttcttttctatgtttgaaaatctctataatttat

SEQ ID NO: 13194 - DNA, 415 bp, Homo sapiens
ccgggcaggtacagaaagctactatttatgtaaaaagctaaaatataaaaaaggtatactcacacacatagagtttggtcacagtggctatccctggagagtgaaaatggtaggagggagacaaacatttcactacatatttgtttaaaccttttgaatgttgtgatatttgcatatattatctgtttaaatatacagatacacacacacacacacacacacacacacacacacacacacacaaagattaagatttagttttcaggttggccttacgaggcagacaagctaattcgcaatattccccccgtttactgcatgggcttggaaacacagggaaacagacgcagagctaaattatcccccagcaacattgaccactggtcaggtgctgtgctgagccctctcgaaagtg

SEQ ID NO: 13195 - DNA, 824 bp, Homo sapiens
  misc_feature 138, 139: n = A,T,C or G
aggtacagtagtatttaacctggatgtgaggacgaaggaggaaattttctggtgaatacagaagagcaaagagcagcaggtcagcaggaatgactaatgtttttctatgcacgtttaatggaaaattcatgtagatannttttgagtaggtaacttggataactcagctatttataagctcgcattcctacttagtttgacttctcacttaataagacttgtcaagagatcctaagaattctgaaagttgatgataaaatgtccatggtgtatcaccatccaatgatcaagaagttaagcatccacaactatagaatggggacagaatgaacttaatggattaaagatgaatatctggagttgttctcttttaagggaatgatacttctccaatgacctgtgtgagtcacagcctgccagaaaagaagcgagcaagggagcatatgaaggcagcacaagcaaattcaggcctagagtgccctgcttgacttcatgtcataagtctgacttctaaaaaaacattttttgcaaaaaacactttgatttttttcccgcttgcagcctgcaaccaaacagaattccttttagcagggcttttttggggtctttctttaaacacaagcttttttttaattacccaaatggaaaaaaacaaaaaaagatccttgccgggcgggctgcttttaaaaactagggggtcccccccgggccttgaaggaatttttaatatttaaagcttttattgaattccccgggcgaaaccccctttctcaaaggaggagggggagggggagggccccccccctccgcgggggggagaatac

SEQ ID NO: 13196 - DNA, 908 bp, Homo sapiens
  misc_feature 142, 151, 160, 208: n = A,T,C or G
aggtactttattgatgatgtaaaaaatgaagctcagctcttgaagagctagaaaatttaagaagtatctttttttaaaccatataaaagatataatgactaagtccattatgatacatccttaacatggaatactctgtagnttatttaanaatgttatnagaaggtcatttaattgttatggaaaatatgttacacggaatatattntctctaaacaaagataaattacgaaatatatatgagaaggggtcttaattctgttaataattataaaatacgaagaagtcatttaaaattatataatattaaaaattcaaaacattgggttatcttctgggtaatttcattccaattccctctagtgagaattttgactttagatatcatatatatgatatattgaatttatttcggttacagttgtttatattgaatatagacatttggcgtttataaaagttagtttatatataggtggaataatacatctatttacgacacctaaaatatattggaatcttgtataggccactatattttacatttttgggaattgatagaatccttcttgtggagcgaaaaatgggccggaccttactactcatttttaacttggggttttttgcagcgatactttattaattaaactgtcccttaaattaggtgaaaatacagtggaaccatttaacttaggggagtatatttaatggggccgagggattttttacacctgtggtgtagtaattatagaagttataattgaatgaatatattgcttagtataataatactatatccataccatatattgagtagtgttatacggattataatatattatatatgtaatataatatattcaatatatttacgatgtgacatggaaagaggcgttatattgtattat

SEQ ID NO: 13197 - DNA, 439 bp, Homo sapiens
ccgggcaggtacaaagaagagcatccgttcgagaagcgccgctctgagggcgagaagatccgaaagaaatacccggaccgggtgccggtgatagtagaaaaggctcccaaagctcggataggagacctggacaaaaagaaatacctggtgccttctgatctcacagttggtcagttctacttcttgatccggaagcgaattcatctccgagctgaggatgccttgtttttctttgtcaacaatgtcattccacccaccagtgccacaatgggtcagctgtacgcgggggggcaaaaaaatcaaggtatttggtcccggaacaaagcttattattacagacaaataaaacaccaaaagctttaagttatttgatttgtggagcaacagaccttgttatgagcaaaatgaaccgggactggaaccctggtcttttgagaat

SEQ ID NO: 13198 - DNA, 783 bp, Homo sapiens
  misc_feature 730: n = A,T,C or G
aggactttttttttttttttttttttttttttcctaggatcatgatttttaatttgaattaaagcatttttttttgctttgttaagatgaggcaggccttcttgctgacattttaaaaagcaactatttttctttcatacactatgaggcattggctccaactgtcagcattgaaactgtcagcagttccctaccaggaaactggttccaaggtctagggtttccttaggtagaggctggcactgtgaaaataatggggctctttatccatgtcacctggaatggagttaataccctgccagtcttagttgatttgacatactaacaggatgggtctgaacgttttctatagtttactcatgagtgactttctttggcttacgtaaatggcaaggccagacaaattagcttatggacctagcaatcattcttggcccagactttgagacccttttcaaataaccataggtgctctaataccctgaatttgctgacagtgcttggttcaaaaaaaggtttagtttcctgggccaatttttttttattgggaacattttaattcttggttgcggggttaaaaagaaaggaaatttgagccagggcctggccttaactttttggggggaccccttggatacccatgagcttcttaaaatagggcctcgttgtgattcccccgaaaaaactttaaatttggacccgtgaaaggacccggggaaaaaataaaggntccttttttttttaataaaaaggccctcccaccaggaaaaaaaaacacctccc

SEQ ID NO: 13199 - DNA, 759 bp, Homo sapiens
ccgggcaggtactatatggacaccaacatggagcagaaaatgagggcagcagtgtccaatctcattccaggtgagaagttgcacagtgtccaataggtgcatacatatccttagtaagtagttgcattaacaatgaaatagaaatgaaaaatatatttttttatttatgtgtattatatttttcaagcagctaataagttggtaggacataatatttaattcgttggggacctaattattgataaatcgaatggttagatattacttttggcctaagccaccatgaaaaaatcactgacgcgctaagggaaacatgagctaagaagcccttctgagtctctgttttgtcaactgtaagaggaagaaacctgctccaccttactcttgcgattgctgaacggtagctgagatactgtgcaaaatggaccttattggtggcctacccaacatccattctctacttcctctactctgatggcacccggattaaattgtgggatctacccctttcttacatggctttaaaaagttgagttcagggaagcttcaagagcacgcttggtttatggaaagacaaatcccgttttatttggcaaagaccggttaagaaagggttggaacttaactcaatccaaggagacaccaaacgacttgcttgggggggactgagatcttttatttttgggaagtttctctggggcggtggggggttttttaaaagggaatttcccccacacaaaaaaaaaccttttttttggg

SEQ ID NO: 13200 - DNA, 403 bp, Homo sapiens
aggtaccgtttttgttggtttttttctccctcaaagtgaaatgagagactattgtagggttttgagccaaggagtgatattatctgaattctgttttaaaaggttcattatggctcctgtgtggaggcagggtagctacttagaaaccaagccatctcagcctcccgatttgtagagatgtggtctcactatgttgcccagactggtcttgaactcctggcctcatgtgatcctcccaccttggcctcccaaaatactaaaatgatagatatgagccgccacacctggccataagcttcagccttgagcagatactttctaaacactttatatagggaaaaaaaactaattcttgcgtagccaaagtgttcattttgccgaaaataacgtagcatagggttta

SEQ ID NO: 13201 - DNA, 416 bp, Homo sapiens
agggactttttttttttttttttttttttggcttttttgtgttttttgtttttgtttttcattttttgtgtgtgtttatttttttatatttttttttatttttattttttgcagccacaggagttttagccatttcagatgccttgctccccacaatttggaagattcctttggatttgaccaagtcaggaagagatgggagaaaagtgaaacaaccaccataaaacccccaaccttaaccaaccgaaagagtttagccaaacaaacaaatgcccaattcatttgattactgggtgttcttatgcttaggggaaattaaaagccgctggggggtaatcttacattttatttatttagggaaaatttttagacaaaacttttatttagctacttacctggaaataaaggttaagctg

SEQ ID NO: 13202 - DNA, 405 bp, Homo sapiens
ccgggcaggtacatggatgagagccgcgttagtgcctgggaggaggtccagcagaggcttttgaatgtctgcagtgaagcactaagttacttcctcactctaacatcagaaagtcatcgagaagcctggactaacttactgcttttgtttctaactaaagttctaaagataagtgataatagggtaagtatgaggcttcgaatccagccccacatttctagcccaattcgcattgggatgcggggtcccagagccgccgtgcaagagctcttagagatgaatcaagcagtgcccaggctgcactgctgcttgtgcaaagccaccagtggcctttgctgtatcttcctcagtccttgcttttctccccccttacccagctttgttcactaattaaccgttctttag

SEQ ID NO: 13203 - DNA, 407 bp, Homo sapiens
aggtacctgtttgttttacaactcaggcatgacattctttctggaaaattgaaatgcccttatgaaacagctgtggaattagctgctctctgtctacaagcggagcttggggagtgcgagcttccagaacacacaccagagcttgtgtctgagtttcggttcattccaaatcagacagaagcaatggaatttgatatcttccagagatggaaagagtgcaggggaaagagccctgcccaggcggaactctcctatctgaataaagcgaagtggctggaaatgtatggggtagacatgcacgttgtcaggggaagagatggctgtgaatattctcttggactgaccccgacaggcatattaatctttgaaggagctaacaaaataggcttattcttttggcctaaaat

SEQ ID NO: 13204 - DNA, 371 bp, Homo sapiens
aggtacctacaggttaagctatcttctaaagctctttagggaggacagctactttttgctttcccatttttgacttccagaaacacttttaattccttaaaaagtattctagttctgaaaatcctaaaaagctttgctacatattctactcacacaattaagctccatcaaagtatgcaagttgtgtttttacttatgcttgaaagttgatgctgcgaagtgaaaatacttcatgttgacagttaacactctgacctgattcaaggccaattctcagtccagcttttcaggaaaaagcactatgtggtgaggaataggagataaaaaagtggcaaacaaaacaaaacaaaaaaaaaaaaagtacctgcccg

SEQ ID NO: 13205 - DNA, 410 bp, Homo sapiens
ccgggcaggtacttttttttttttttttttttcgcattttattaaaacttgaaagctatggcttgccgccatcaatgacgcctattgggttccaatagcctcatgttcaaatctgactcgttagcaaatccacccaactcaacatcggtcatcttgacattgcaggatattcagcaagtctgaagtttttaatcgggaaggattttctaccgttactgaacaaataaaggttctttgtagcaatggctggaaatgcaaccccgcgtacaggaccagctcgggggggtgtggcaccgaatggaaatccatgagcagcacgtaggcaaacagcaggaggaaggcgatgtaaaagaccacattccaggagaagaccacgaaggggggaggtgaagaacgccacatagtacgcg

SEQ ID NO: 13206 - DNA, 412 bp, Homo sapiens
  misc_feature 377: n = A,T,C or G
aggtactctggttccagggctcagagtagcaagagtgctgggacctgtctgagaagcagtgctgggctgtggatgcttgcctgtggcaccagatgccttacagtggccaggaatgctgcgggacagtctactttgattgctttctttcctccatggctgagatctgagtgtagtgttaactgggcttaaaaatcaagtccgttgtatctgcatggtcacgtagttcggcacctcatggcttttgcacctagaggtgtgaaccataatacctgaaacacaatttcataacctggctccttgggcttagcctatatggtggaggttagggtctgtatatcatcaagactgtgtctttgcatgggttgttcattctgttnggaattgaactttcttatttcctgtaggcctaggt

SEQ ID NO: 13207 - DNA, 409 bp, Homo sapiens
aggtacgcggggggattatgtgtcttgcagttgacaacggcagtgaccagtgcctttttactagcaaaagtgatcctttcgaagcttttctctcaaggggcttttggctatgtgctgcccatcatttcattcatccttgcctggattgagacgtggttcctggatttcaaagtgttacctcaagaagcagaagaagaaaacagactcctgatagttcaggatgcttcagagagggcagcacttatacctggtggtctttctgatggtcagttttattcccctcctgaatccgaagcaggtaaaaaacttgattattatttgtgcttgtatctctcattcaaaggctctgctcttccttcctttccctaccccctctgtttctcaatatacgtagctaacatctaacatg

SEQ ID NO: 13208 - DNA, 372 bp, Homo sapiens
aggtacgatttcagctcactgcaacctccgcctcctgggttcaagcgattctcctgcctcagcctcccaaagtagctgggattacaggcgcccgccaccagacccagctaatttttttgtatttttagttgagaccagggtctcatcatgttctccaggctggtcttgaactcctgacctcaggtgatccacctgcctcagcctcccaaagtcccaacgtgctgggattacaggtgtgagccactgcgcccagcccacctatcttattttttaaagtgaacaattttaattctttcatcacatttccatcatactcttctctggtatagttcattagattacttctgtaaccatggggagttaaatttgctg

SEQ ID NO: 13209 - DNA, 378 bp, Homo sapiens
  misc_feature 292: n = A,T,C or G
aggtactttttttttttttttttttttttttttgggagacgggctcactctgtcagccacgctggagtgcagtgacatgatcttgactcatggcaggcttgacctcctaggctcaaggaccacctcccaagtagctgagaccacaggtttgccccatcacacctggccgatttttatttttttgtaaagatggggttgtccaggctggtctcaaactcctgagctcaagcaatgtgcccgccttggcttcccaaagtgctgggattataaggcgtaaaccactgcacgcagncctaccctctgcctttttaagatgatgttatttatttaatttttgccatcattgggtgcttcacctttcctgtgaagggaaattcc

SEQ ID NO: 13210 - DNA, 369 bp, Homo sapiens
aggtacgatcttggctcactgcaacctctccctcccgggttcaagtgattctcgtgcctcagcctcttgagtagctgggattacaggcgcgtgccactgcgtccggctaatttttgtatttttagtagagatggggtttcaccatgttggccaggctgatctcaaactcctgacctcatgtggtccacccaccttggcctcccaaagtgctgggattacaggcgtgagccaccacgctcagcctacaagcaattttttaaaaactgacacctattactgataaaatttctctgtttaaaattcctatttactattttaaagataagtatttagttttttttaaatacaattaattctgttattgataaa

SEQ ID NO: 13211 - DNA, 373 bp, Homo sapiens
  misc_feature 261, 311: n = A,T,C or G
ccgggcaggtactgactgctgatctggaggctgggacaaagacttctggtgcacaagcaaaaagaagccttatataccatttacctgtatccaaatttccagcagccaacgatggcgaagagcctcatagcagatgtggcagtggccgccacttcccatgacaaagggaggtaggcatgattcatctctagtgcatggggacggttgccttttgccccaaatcaactcaagacccctttccaccatatgtctgtatgtaanctctaaatgcatctctaagacttaagaataaaaagccactgctacctggncaagttggatgagggcaaaagagaaagacattaccccaaaggaactataagcactctgctcc

SEQ ID NO: 13212 - DNA, 373 bp, Homo sapiens
  misc_feature 287, 302: n = A,T,C or G
aggtacatctgactatattccactggctttacacggctcgctttagggattgccacgctcagccgcacaggcttagaccccagtcccactgctccctggcactccgtcagggctcgcttctgttccagttcatctgtgaatttcacaaaaccataacccttagacacgcctgtctggtccaaaaccaccttgcctccccgacaggaggggtagactttgacgaagaattcatacagcatgccatcatccacgtccggggtcaggtcccccacaaagagggaatactncagggctgttatctnggttgtttcccggtaagtggcatagtttcagtttaaaaacgtttcggccttggccaaaacattttccccct

SEQ ID NO: 13213 - DNA, 303 bp, Homo sapiens
ccgggcaggtactgattggtctttccatccttcttaagatgttacggggtgaaagcccgggacgtgctagcaagctgctccagtgcgggacacagagtctctatcacaggctgctccggtgcgggacgcggagcctctatcacaggctgctctggtgtgggacacggagtctctattacacagccttcttttgtttggggggctagttgttgttgctgctgctgctgtttttcacaatcctttaagaatgtaaagactattattagctgacaagtcatttaaaaaaaaaaaaaaaaagtacct

SEQ ID NO: 13214 - DNA, 394 bp, Homo sapiens
ccgggcaggtacgcgggggccagtgaccggaggcggcggcggcgagcggttccttgtgggctagaagaatcctgcaaaaatgtctctctatccatctctcgaagacttgaaggtagacaaagtaattcaggctcaaactgcttttttttgcaaaaccctgccaatccagcaatttttgtcagaagcttctgctcctatccctcacgatggaaatctctatcccagactgtatccagagctctctcaatacatggggctgagtttaaatgaagaagaaatacgtgcaaatgtggccgtggtttctggtgcgccacttcaggggtttggtagcaaggccttccagtataaactatatggtggctcctgtaactggtaatgatgttggaattcgtag

SEQ ID NO: 13215 - DNA, 423 bp, Homo sapiens
ccgggcaggtactttttttttttttttttttttttttctaaaatgaggatttggccattcaaaaaaaaacaacatcaaagcaaaaccccaccacatacaagaagaaaaagagaggcatgctttacaaaacagctatttcaaagtcatgatttttaaaaaaactatttcagaatgtggaacgaaggggaaaaaaagtctcatgtgggttgcgtcggcactgcagcttgctcctcattaaaggttcctctttacctccctctggggctagtttccagcaagaaaatttttttaaacaggaacatttgtctttcaaaccacactttttttctagcccttggggcctttttgtgcccccccatatcctgtaatggggaatgccctgcccttagctggaagcttttaaaaggtgggggaagcctgtct

SEQ ID NO: 13216 - DNA, 391 bp, Homo sapiens
aggtacaactgttcatagagttcagtttgacaattaacatgtatattagtatggttgcctgtgtttgtgttatgtttcactgtgtttcatcttcctgtgcctgggatcccccatgccctcctttcctatctctctcaaaaccagctgtttttccccatctgctgcattttggttatagatatttatttgtaggtttgctttaaaacaaaactcctctaaatcctacttgataaccatccatgctctttactctctcctgtcctgggagctctcttcctaactcctgcccttcattctcgacgcctgcctggcctccttttggttccttctctacagcattgcttccacccaccagctgtagtgcccctgtcccttaagagtatgggagtgt

SEQ ID NO: 13217 - DNA, 383 bp, Homo sapiens
ccgggcaggtactcagcaaaaagctgagttattagaaaatggacactagcctgtgcttgtgggcataaattctccatctatgagaaggcatgaattgaggcactatattgattacattatgttgtttattctcatataactctctattggtgaaatgatttctagccccatctttaagatgggaaatggaatcctagagagacttcatttttctcctatatttgtatttagcaattgctattgctgccataagaaaataacacagggtggcttgaacaacagaaatttattttctcacagttctggaggctggaagtccaagatcaaggtgccaagcaaggctggtttctcctgaggcctctatccttggcttgcaaatggcc

SEQ ID NO: 13218 - DNA, 368 bp, Homo sapiens
ccgggcaggtaccatctatggaaaaagcaatggaaaatgaagtgtcaatcaaataatgcacccttggctgacacaaattaattgaagctaaacctagaacccttctttctcaccaagatggcaacttctcccaattgttctaaatataaaatcccggttatctgtcactttacccactccccctctccccagtccgatctgttgccaaatcctgtagtttctacctccataacggaactcgcaatcatctccttccatttctctccattccaaatctagaagaaaaaagaaaccaaatacatttagtttcatcagcaagttagaacctttctgtcaaaaatttcaagtgctcatgccctgtaacccca

SEQ ID NO: 13219 - DNA, 383 bp, Homo sapiens
ccgggcaggtacgcggggagagaaggcccggaggggctctgcgtactgtagtggcgctgcttgggcccgtggcggattgtaagctgctggttttgcggctgggaagagcggcgagagggttcggcatttttcgtctggatccccgcagggtgactgctgccagagagtctcacccgcatggggtgaagcgttcagccttcccacacgacgatctgggatctagcaattgggaggcagcagacttgggtaatgaagagagaaaaccaaagttcttgagacttatgggtgcaggaaagaaagaacatactggtcggcttgttataggaagatcacagatcaacatcttacttccgaaccggtcagaaagttaagtgtaattaaaa

SEQ ID NO: 13220 - DNA, 421 bp, Homo sapiens
aggtacctcattttgtcccttgactttagtgtagtggtggggtcttttccaccaccccactaagccttggctacctcattttgtggccttattattaaagattgcttgttagtgaaaagggaagggcccagaatctgactggctgattctggctcctactctccctccttctttagtttaaccctcagggccgacaggaacaaagtttttcagaggctgttacatgacttttgggattaatcgattcctctttggaatataaaaatttacccggccaaagcctatttgtcttcttttggacatttattctgatccctgctttcttttttcttgatttccccttaccaacaatttaccgccccttgtctatggttatgttaacttaccttcaaaattacccccctccctgggaggcttgcat

SEQ ID NO: 13221 - DNA, 398 bp, Homo sapiens
aggtacccttcccctcctactccactttgagatatcccacctttttaggttaaaccaatatgtagcctcatgtattgatttatgactttgcctgtaacctctgccacgctgcctttaaaaacccttacctgtgtaagccatctgggagttcaggtcttaagcatgacctccctgatcctccttgcttggtgccctgcaacaaatgccccactttctctccctgcaatcccgatgtcagtgtgtggctttgctgctctgggtgggcagacccaagttcagcaagtaaccattctaaggagggtgtttacaccttcttcatgatcccttgtcactgtttcatcctaaatcctgattccaacccaattatctgttccttctcatcatcttccctctctttc

SEQ ID NO: 13222 - DNA, 398 bp, Homo sapiens
aggtacagaataatgcctgtcacatagtaagtatgtaataagcatttattattacttatcagggtatgatttatgaattgtggaacctgggattatgggagagtctggcttcaatcaagggctgaaattccatttccactgacatctcttccttccccatcccccgattctgtcctgcaacagggtaacaagaaggggcccttaggccgttgggactttgatacccaggaagaatacagcgagtatatgaacaacaaagaagctttgcccaaggctgcattccagtatggtatcaaaatgtctgaagggcggaaaaccaggcgcttcaaggaaaccaatgacaaagcagagcttgatcgccagtggaagaagaatagtgcaatcattgagaagaggag

SEQ ID NO: 13223 - DNA, 376 bp, Homo sapiens
ccgggcaggtactaataacaatacctgactacatggttaccacccgtgactactgcattgcagcttaaaacatgctttggtcaataaatttaaaagatatacatcaaataacaaggccagaaaagctgttttaagaatttcctgaccttaagcaaactttaaatacattgacatggcataaaaaaatatgatcaaatattcagaaaggtttctattttttcaaccatttggcattttatattattaaattcgctgtttaaaataatattttatacttctgtgcactgattatcattgctctccgaattaaaactaaactacaattaccttgctagaatgttcagtagcatatatattaattgttccttttgcattg

SEQ ID NO: 13224 - DNA, 367 bp, Homo sapiens
ccgggcaggtacagcctgtgtattcatatacccgacctgggctgatgattgggaattcaccaactactccaggtccttgaacttcttccacgtcacccttagcatttgttattctccaatagcgactggcccactgacaggccttctcaggaagtgcatcttttgacatttcaatcctgattcggtatgtgaagaaatagtggggtggatgtacccctccaagccggacaacccgggcgaggacgcaccagcggaggacatggccagatactactcagcgctgcgacactacatcaacctcatcaccaggcagagatatggaaaacgatctagcccagagacactgatttcagacctcttgatgaga

SEQ ID NO: 13225 - DNA, 372 bp, Homo sapiens
aggtacgcggaggcaccttccttctgtcaatcgatgaaacaaatacttcatcctgctctggaaaccactgcaatgacattattcccagtgctgttgttcctggtagctgggctgcttccatcttttccaagcccatgaagagaaggttcccactttcactgcttagttaaccacccaaacacaagtgcaaagggagattgtgaataagcacaatgaactgaggatagcagaatatacccctgccagaaacatgctgaaaatggaatggaacaaagaggctgcaccaaatgcccaaaagggggcaaaccagtgcaattacagacacagtaacccaaaggatcgaatgacaagtctaaaatgtggtgagaattt

SEQ ID NO: 13226 - DNA, 369 bp, Homo sapiens
aggtacggaaacaaaagagataataaactaatagttatttaatatgctgtaacaacaaattagaaacattgagaattaaagtgtgttttctttgtaacaaacttatcaagagtagtttgaacaagggttgcccttcttctggtataatttagatacatatcagagcaaacatcttttctgtggctttgcaagttgtcatactgtattttgtttggatcagcttccaacattttatcttttatgctttcagtattgtaaaatacctctcagtttctttagcatgcagttttttttttttgttagcgtctcttcctctaggacgttgtcattcttttcatcactcccactttcttcattgctaagttggcc

SEQ ID NO: 13227 - DNA, 430 bp, Homo sapiens
aggtactaggagaggtcctgtgacctttccagtgcctcaaagagtgagaatgggaaagaggagtggatgaagtatggcttaccctcctgtgggtcacctctcttccctgctgcttctgaaccccactcagacttcttttctctttcccagcaactatcccaaagctgatacatcgagtggcaaacgttaactgaagcttttagggatagtataagtggtccctttacaaccatttccttcccagctcagtgcgcacgtacatttaaaactgtggtcattgtaaacacacattgccaaaaaatggcctcctttcatgggggaagcttatcttgaaggtgccttggttcttctatccccaaaaggccttgtcttatgggccaataatattctggggaaatccacattttttcaacaacactttgggccccct

SEQ ID NO: 13228 - DNA, 390 bp, Homo sapiens
aggtactgatcgtgtaagccctgggacgctattgctggggctttggcttttactctgactaaaatgggaaccaccgagggcttctgagcagagaggcgacatgatccgtctcctgatttaaaagcacgacctggctgccgagttgagaaaagactatgggaagatttgggtagaagcatgggagccaagctgtggcaacatcccggtgggagatgatagtgatcctgacggggttcatggtggtggtgagagatggttagagcctggatacatgttgaagtcagtcagtaggattttcctgacagactggatgtgagctgtgagagaaggcagtggtcaaggttgagtttgattctgattgaaatattaagtaattttaaaaaacactat

SEQ ID NO: 13229 - DNA, 392 bp, Homo sapiens
aggtacacttagcaatgaggctgtgttgatgaggaagtgcgcagcatcatacttggtatagaagctggccaggagatagagcacaataggagagatgctgaggaacttgcgggaagaggtaaactggagcccatagtccatttgctcccagtgtgtcagtagccgagcctttccttggtcaggagtctcaaagggtgtccctttcaccgtatgaaggaagacatacgtagccaggttatggatgacgttggtcagggtccagacaacaggaatgctgaagaaggggatgcttgagtagaaccatatgcagcaaatcctaccaagatgatgtaggccagccagatgcctcggctattcatcactcgggtgttggggttttactttcgctgtgc

SEQ ID NO: 13230 - DNA, 387 bp, Homo sapiens
ccgggcaggtactgaatttctgtcagttaaggggttcactgctttggtggaaattggtggaaattgctagcaggttccacgatgtttatttttttctccatgttgtatatcattaccatttcacatacgcgtttctatttttcttcctcttcctccggatctccttaaaaatgaatctagagttggtggctttttccccctcctctttggccagttccacagttcagttcttcctgaaaacagggatgatgaacttgtaggatcaggacaaatgtgtgtttttcaaaaacttaaggctgggtgtgaaacaccttctgtggacaaggatttgtaaacttctctcctccctccagctgcggccccagcctaactgatagttacttgatt

SEQ ID NO: 13231 - DNA, 402 bp, Homo sapiens
  misc_feature 354: n = A,T,C or G
aggtacgatcttggctcactgcaacctctccctcccgggttcaagtgattctcgtgcctcagcctcttgagtagctgggattacaggcgcgtgccactgcgtccggctaatttttgtatttttagtagagatggggcttcaccatgttggcccggctgatctcaaactcctgacctcatgtggtccacccaccttggcctcccaaagtgctgggattacaggcgtggagccaccacgctcagcctacaagcaattttttaaaaactgacacctattactgataaaattctcttgtttaaaaatcctatttactatttttaaagataagtattaggtttttttaaatacaataanttctggttattggataaaattttaagggcattttcatttgccttttgg

SEQ ID NO: 13232 - DNA, 395 bp, Homo sapiens
ccgggcaggtacccagagtgcagagccgcatttccagcatgcaggggctgctcagcgtttagtcacatcaagaaatagaacagaattcagccatggccccaagaaagagaggtggacgaggtatttcattcatcttttgctgtttccgaaataatgatcacccagaaatcacgtatcggctgcgaaatgatagcaactttgcgcttcagaccatggaaccagcattgcccatgccccctgtggaggagctggatgtcatgttcagtgaactggtggtgagtcccagttttctatcctggcattggtggggagccagagaaggagaagaggagaggatgtgaatgagttggtttggtttgacatggactttttctttttagtgaaatggcccccat

SEQ ID NO: 13233 - DNA, 384 bp, Homo sapiens
ccgggcaggtacttttttttttttttttttttttttgactttttttcagccttcctatacagccccaggaataaaaaaatcatgactaaaatgggatagctccctaaaaagggactaggaaagaagtcccaattggaggctgaaaaaaatcaaaaaagaaaaggaatagggcatcctttttaggagcggtcactgtagagcctccaaaacccattccattaacttgggggaaaaaaaacaactgtatggtaaatcagcagcgcttccaaaacaaaaactggaggctttacatttattagcaaagaaacaattagaaaaaggacattgagccttcattttcgccttggaattctgtttgtaattcaaaaaaaatccggcagatgg

SEQ ID NO: 13234 - DNA, 449 bp, Homo sapiens
ccggccaggtacatagaatatgaacacatcacacacatgagagacgcaagtgccaaatgccttggcctgggcttaacgtgtcaagcccaacacagtcttaagaataagccgatatgagaaggagatgagaagtgagttccggccaatggcggaaattattgaccataaggttcataaacgacatgtgacccggatgtcatcacaggccagctttatgacagtcatgtgtgtatgcagtagggaattgggaacaggtatattaggagtcgggcaacaaagggtcaggctggcttgaatagaagaacagggaaagtggtgttgccaatcaaagtgtctaacacctccctgcaaccaaaaagttatgcccacacctaaattttttgggttggaacaccgagggtcaaacggttgaagggtaccaatcgggctcgtctctcgggacaagggat

SEQ ID NO: 13235 - DNA, 382 bp, Homo sapiens
aggtactgatactttttattcttttcagggaccgtttatctaaaaaatgttaaggcttatgctttcagatctcagtccaatttctagaaattaacaatgagtccttttatagcacttacctttctcttcctgccttccccacctccaccccaaacttgctttgggtgttctttaatctttcaagggagtgataaatgtcacaaactcttaaataaagggctgaaatggcagcgtatgactgttttgactgtctttaaagtagtattagtcttctagaatactaatctaattcttagaaacagaaaacagaggaagctcaatgttcgaaggggaagttaataataattgattcatcctggctacccaggaaatgcacagtaag

SEQ ID NO: 13236 - DNA, 444 bp, Homo sapiens
cgccgtgattatacactcagttatcactacgggttattgtaactcccccgcggtggcggccgcccgtgtcaggtacatcccctacatcagtatcagtactttatgaggacagtgacagtagcccgagtcacaaaaaaggagagagcaaacagcaacgcaaagctcggcacagaccacatggccctcttttgcctactattgaagattcttcagaggaagaagaattgagagaggaagaagaattattaaaggagcaagaaaagcagagggaaatagaacagcaacaaagaaagagttctagtaaaaaatcaaagaaagacaaagatgaacttcgagctcagagaagaagggaaaggccaaagacaccacctagtaatctctctcccattgaagatgcatctccgacagaagagttacgtcaggctgcagaaatggaggagctcc

SEQ ID NO: 13237 - DNA, 440 bp, Homo sapiens
gcagggtcgtgcaactctttataggccattgagcttaccgcggtggcggccgcccgggcaggtacgatcttggctcactgcaacctctccttcctttgttcaagtgattctcgtgcctcagcctcttgagtagctgggattacaggcgcgtgccactgcgtccggctaatttttgtatttttagtagagatggggtttcaccatgttggccaggctgatctcaaactcctgacctcatgtggtccacccaccttggcctcccaaagtgctgggattacaggcgtgagccaccgcgctcagcctacaagcaattttttaaaaactgacacctattactgataaaattctctgtttaaaatcctatttactattttaaagataagtattaggtttttttttaaatacaataattctgttattgataaaatttaaggcatttt

SEQ ID NO: 13238 - DNA, 388 bp, Homo sapiens
ccgggcaggtacttttttttttttttttttttttttttcattcttctccattacttaaattaaatgctgccaccattgagtatggcattgtataatcatattccttcagcggttaaaatagaaaaaaaatgcagatagagatgtgtataattggcatgcatagaaatacagaaccagttacatgacaaaagtaaacaaaactctaaaccttcatattttaaaaacaagattttccatttaacaagaattacattcattaaactggagagtatctcctatagagaaaacttttagagtcagatccaaacattactatattcatacttggaagcactttgacaactcaaggctgaaaaccccacactgggcttgttgtcagtccactgtt

SEQ ID NO: 13239 - DNA, 377 bp, Homo sapiens
  misc_feature 377: n = A,T,C or G
ccgggcaggtactttcttcctcatactgactatagtcatccacctccattcgagactccaagagagaaagaggatcactgcagcacaccccattttcatgaagcccctctgtataagaccccctattttcctcatctcgttttagctggatttttaattttgtagaactactgcctgatcctgagttaaatccattattaagctttgctacatagagattgttatcgttgtcatggtctttgcttaacttgatgcttattttggaagagttcattccatcattctcttggtcatttgttttgctgctgctatcatgacgcctacgaagagtcaatttgggaatcccagagttattttctaggattaactgtgcatcn

SEQ ID NO: 13240 - DNA, 382 bp, Homo sapiens
aggtacttttttttttttttttttttttttttgatatttttattttacaaatttttaattaaaataagtttatttaaaagttttatttttaatttataaaatagttaattttaaatagtctcagcaaaaaagaaggtgggcagaaaccctgctcgttctactttataaatagtagcttatcaaccggcagccagtgaaacactaaacccaaaatttgcctcattgtgtcatggagattatgctgcaagggagaaacctgccaagccctttccaagaggtgctgtgtgccagcccaatccccaaaccctgccaagccacggagtgctttctaggctggtgacaggccccagtgccagctagatgcccgtatgctcggggatgg

SEQ ID NO: 13241 - DNA, 383 bp, Homo sapiens
aggtactatcttggctcactgcaacctctccctttcgggttcaagtgattctcgtgcctcagcctcttgagtagctgggattacaggcgcgtgccactgcgtccggctaatttttgtatttttagtagagatggggtttcaccatgttggccaggctgatctcaaactcctgacctcatgtggtccacccaccttggcctcccaaagtgctgggattacaggcgtgagccaccgcgctcagcctacaagcaattttttaaaaactgacacctattactgataaaattctctgtttaaaatcctatttactattttaaagataagtattagtttttttttaaatacaataattctgttattgataaaatttaaggcattttcat

SEQ ID NO: 13242 - DNA, 375 bp, Homo sapiens
ccgggcaggtacttttttttttttttttttttttggcttttatcctgtttgttgttctctgagcttcctgaatctgtggtttcgtgtcacatattaatttagaaaaatctcattcattattgctttgaatatttcttctattcctttctctctttcctctccttctggggttccactatgcatacttacatcttttatagttgtcccactgttcttggatattctgttccttttttattcagtctttttccctttgctttcatttttggaagtttctcttgaaatatactgaagctccagattctttcctcacccacatccagtctgctaatgaggcttcaacaccatgcttcatttttgttagtttcttgacct

SEQ ID NO: 13243 - DNA, 470 bp, Homo sapiens
  misc_feature 470: n = A,T,C or G
aggtacttcattcctttttgtgctgagtaatagtcagttataaggatacaccacgttttgtttatgcattcatcagttgatgaacatttgggttgttttcactttttggctattgtgactaatgctgctgtaagtattccttgtatggagtttattgtataagaatgtcgtggttttaattccccttctggagtgtattacctaaggaaggaagaacctgcttggggttcgtaatgggtaaactcttatatttcaaaccatttttgagggaaaccaacccacaacttttttttcaaaagatgggctcaacaaccaaattttaacaaattcctggcttagccaaacgttatgaataaattcctaatttttcttcttgcattttccctaccccaaacacctttggccaattgtcttggtcctttttttttatttttttagccccaattcttttggtgggggtattgaagggn

SEQ ID NO: 13244 - DNA, 374 bp, Homo sapiens
aggtacattttgcttcttagaaagctaagtcctgggttccgtctgattttaggttccaggaacttcctgagaacacccgatcgcagagggtaattttctggagtttgttttgcagggatagctgggagtatggccaccctgctccacgatgcggtaatgaatccagcagaaggtaatgtttcatggtcccagggaggggcagtaggggatgttcaaaggggcacaaaaaatggttgtgggagagtggagaggactgaaggtgggcagagcggctcctaatctccagtcagagcagacaggagaattgaattttttactacgttatcaaaggcctcaagaaaggacgtgaacataagagtttttggtattcctgt

SEQ ID NO: 13245 - DNA, 375 bp, Homo sapiens
aggtacttttttttttttttttttttttgtgttttttgtttttgtttttcattttttgtgtgtgtttatttttttatatttttttttatttttatttttggcagccacaggagttttagccatttcagatgccttgcttcccacaatttggaagattcctttggatttgaccaagtcaggaagagatgggagaaaagtgaaacaacaacatttaaacgcggaggggggacaaacagaaagagttaaggggaacaaaggggggcacaggtcatatgattactgactgttctaatgcttaggagaaattaaaagcagctggtgggtaatcttatattttaatcattaaggaaaaattttaagacaaaactctaattt

SEQ ID NO: 13246 - DNA, 376 bp, Homo sapiens
ctgggcaggtacttactaaatatatgctctattttttcttttggaaaaagcatggttttttgcttttgttctgtggggttttttttttttttggtgaccgaccaaccattgaacctaaattatatgtgtaacaatttcttaaagtgtaacgttagtttgaaacacctaacaactttgccaagttaaatttcataccaattttagaattgaatatgggaaattttaagctaccacttattttgggaaaatgccttttgttttctattcctgtggcagattttcttctgagtgaatttaaaactgaaagattaggacatcggcaaccttaaagagtaaggtgatgatttttgtatgtaagttgagctgtatggacgtc

SEQ ID NO: 13247 - DNA, 380 bp, Homo sapiens
ccggggcaggtacttccctcacctggacataattctcaatatctgaaaaattcaataatgttatcatagcaaattcagaaacaacttcagtatctactaataagggaatggttaaatcaaaccacaaataaggaggagactactgttgttacagaaatagtcttcaagaaacaatagcatttcctagaagttataaaatttttactggttccagactgatcctaatatcaggtatgattatttcctttggagtaagaaaaaaaattttttaaggctgaaatttttgcacaaaagtcttagattaaatatggtatatgatttgggacacaaggaaaagcctataatttaaaatcttggcttcttatcacaagtccaatgtt

SEQ ID NO: 13248 - DNA, 407 bp, Homo sapiens
aggtaccccaagataggatcagggctattttaatgatcatgtgatttattaaaaacttgagatttccaactactctttcacacgtatgtggaagaaatgtattccaagaagagttgctataatcagtattaatctgtaaaatcacattgatttatcttagaaggataaaaagaacagaaacaaaactctaccagctcatataatttttctttgcaaaaattttttgcttctttactatactgaattagttacatcaattgttgtatcaatgaaataattaggtattattacctgtaactattttgaaaattaataaaagaaccaagaagaatagagtaatatccctaggctaaaactaaaacaaaatctcagcaacccagaactttcgggaaactgatgttcaggaa

SEQ ID NO: 13249 - DNA, 404 bp, Homo sapiens
aggtaccagctctgggcatccccagggtttatgctcaccggttagtgctggtgtgacatgatggctgagcaccggcactgtgtccagcgcattgctaggcactagacacgtgctctttcatttattcctcaaattgctttgtgctgtaaatgctacccagaaaggctcatgttcattactcaagtcacttcaccagaaagtgacagagccagaattcaaacccaggtctgccagattccaggtcccttgcttcttctgttgttgctcattgcaagggagtcttcttcaaggttattctcaggagtttgattaagatacaggctcacagctgggcatggtgtctcatgctgtggtctcagcactttgggaggccaaggtgggtggatcacttgagctcagaagtt

SEQ ID NO: 13250 - DNA, 404 bp, Homo sapiens
ccgggcgggtacgcggggagaaacaagcagctgctgcctggtggtaacagcaaagggtggaagtcaatagggtctctgtgagactgtttcacagaaggatgcgtgtttacccaaggctgcgcatcaaaaagaaatagataaaataaatggaaaattagaagggtctcctgttaaagatggtcttctgaaggctaactgcggaatgaaagtttctattccaactaaagccttagaattgatggacatgcaaactttcaaagcagagcctcccgagaagccatctgccttcgagcctgccattgaaatgcaaaagtctgttccaaataaagccttggaattgaagaatgaacaaacattgagagcagatgagatactcccatcagaatccaaacaaaaggactatg

SEQ ID NO: 13251 - DNA, 413 bp, Homo sapiens
aggtactttttaattttttttttttttttttggatatatagtagagacggggtttcaccgtgttagccagggtggtctcaatctcctgacctcgtgatccgcctgtctcagcctcccaaaaagtgctgggattacaggcatgggccgccacgcctggccaagtagatgctttttattgagctctgtgaggtaggatcccagatcatccaagtatgagggggaaggtgaatgggtagggtttttgtgaaaaaagaacattattgtgaaaaatgagaggtaaaactgacaaggaaacaagtgctgagtggcagctagggtccagtttaggctggaaactgtgaaattacagcagccgcgttatgtctagatgcgggaatttcctctaggaattccggtataggaaccaaaatgct

SEQ ID NO: 13252 - DNA, 400 bp, Homo sapiens
aggtacccaaacctaagagctattatccctaaatttcaaaatctaaaaaaaaaaccttagaacctcagatgatataattaacataaaagcccaggtttttgtataaatgaaaagggataaaaattcatacaaaatccattagtaacattcataagcacccgaaataaattatttagatgtttgcaagtcagctgcaaggtgttcttcctcctcaaatatcctctaaggatgagcttatagacagattaacttaacaacgaaacctaacattccaccagtaagaatcttgtttgtgtgtgaagctgctttttactaagttggaggtaagagctcaaagtagagttttacttaagaaaattggggcaaacattgattttagttctacagctataaaatgatg

SEQ ID NO: 13253 - DNA, 403 bp, Homo sapiens
aggtacagattaagcatataaaaaattagagactaactgggatttttaaaagattattccaaattaagagttgctttgttatgccttcagcaaatagcttcattttgccaatactgaataaaagagttatttctacatgtgaattagttttttcaagtcataatcccctaaaaaaactatttctagccagagcctttcacaataaaaatactaagattttacaaaaatactaagttttagaaagagcaacctagtttttaacctggtgtgtatcctgaagtgacttttaataacattgagattcttgcccactgcatagtcttctcctcagctggggattttttggattttttttttttctatttacttatctaaatgtttagcaatatcaagatgtaggctg

SEQ ID NO: 13254 - DNA, 407 bp, Homo sapiens
aggtacgcggggggagcggccaacatggcggaacgcagtagacacaagaagcggatccaggaagttggtgaaccatctaaagaagagaaggctgtggccaagtatcttcgattcaactgtccaacaaagtccaccaatatgatgggtcaccgggttgattattttattgcttcaaaagcagtggactgtcttttggattcaaagtgggcaaaggccaagaaaggagaggaagctttatttacaaccagggagtctgtggttgactactgcaacaggctttttaaagaagcagtttttttcaccgagccctaaaagtaatgaaaatgaaatatgataaagacataaagaaagaaaaaggtaaagggaaagctgaaagtggaaaagaagaaagattaaaagagccggaa

SEQ ID NO: 13255 - DNA, 465 bp, Homo sapiens
tgcggccgaacactctagaggccgatttggaactccaccgcggtgttggtcgaggaactcgcccccaggcccagataatttatttaaaaactttttttgtagagactttgtctcactatgttgcccaggctggtctcaaactcctggcctcaaacaatcctctacctcaacccccctaagtgctggcattacaggcatcacctgccatgcctggctacaaatcttaatgttttccccatggcttctttttctggcgttcttttctcaggtaatggaagtgggcagagaatgatcctttccctaggctccagtgtgtaagaattaaagaaagaggaaagaaacacaatggcttgatggtcgaggacaggtttattttaaagaaaacaaacccaagagtggcttctggctgagttagatcagaggcatgctctcttacagactaagagtttttaaggattcagggtg

SEQ ID NO: 13256 - DNA, 406 bp, Homo sapiens
ccgggcaggtactcctatgaacaaaatttgaagcatgtttatttctctgcctggttcctctagaatttggaaattatctgtctggaagctctgagtttatcttgggacctcaagaggagaggatcacccaactcacaggcaatcaaaactccaaatggtgctataaactgaaccacacatggacacgtcagtcttccgaggacccttagatcaaccccaggaggagccctagctgctgttccccattctacgcccctttccagcaggaagaagccagaagacatcgtctcccaaacctttaacagcagttatgcgcggcatctcacacagggggtgaatgttgaaggaagttaattgattaattattttaaggcttattaaaaggaaaaatggtgtccttatgaag

SEQ ID NO: 13257 - DNA, 402 bp, Homo sapiens
ccgggcaggtacagcagaactgcatgatcagctgtatggtagccttgaaaaccaacaggccacaatcacagtgaaaacctcaggttggcagccactggaggatacaaaatgagtttggatctccttcaatgccccattcccagagaactgtcattatttgacctgctggtagttccctaaaggacgtgcaaggatgtttttatttgactggacacttgaagcttgccctgtatgaacagcccccatcttcccatgccttgtcaaaaatcagaggcaactaaacactgcggctttcctgagagtcttactcttgtcacccaggctgggagagccatttgcccaaacacctttggctcacctgtcagccctcaaccttcttggtccttcaagttaatcccttcc

SEQ ID NO: 13258 - DNA, 391 bp, Homo sapiens
ccgggcaggtactttttttttttttttttttttttttttcaatgactcactcttgtcacccaagttggagtgaactggtgccattatataaagcttactgcagcctcagactcctacactcaagcagttctcccacctcggcctcccaaacagctggtattacaggcataagccactgtgccccaaccctactagccattttttaaatgctgaaaagccccatgtgactaggggctacaccattggacagctcagatacagaacatttctattcatctcaaagttctattggacagaattgctttaaggaattatcctcattataaaatgataagtatgctaaagctaaaaaaaattaactcattcagactttctgagattcccaaaacta

SEQ ID NO: 13259 - DNA, 410 bp, Homo sapiens
ccgggcaggtacatttctctggctccagccttggctaagttgatgacctgagtcgatctccacattcatctacatgaacgtgggggcgttggttttggcggccaggctgtaaaatgtagggcttgtctcactttgctatttaatcaacatgtggacattttagcagagaaaccccatagcaaataggaatgaaaagctacctgattaaaatgatgaaatgatagagaatgttttttggctgggacattttaaccaaagttgcacaactgaagctgattgccttccttgtaatttacttgaaatttgcattttgatattgctcttttttttttcctagagaaaattagattaaacttatatttagtatacttaattttataagtttaggaactttattatcctaaaaataa

SEQ ID NO: 13260 - DNA, 435 bp, Homo sapiens
aggtacaattacattattattgaatatagtcaccctattgtgctatcaaatagtaggtcttattaactctctatttttatacccattagccatccccaccttcccacaacaccccctgccgctacctttcccagcctctgataaccatccttatactctctgtgtccatgagtttgttttgaatttaaattccacaaattaggggagaacatgtgacatttggtctttctgtgcctggggtttatttcaacttaaccataatgatcccataattgttcccattcaatggttacttgaccatggacttgggatcttatttctttggttatgggcttgaaataggtcgtcccggttgtggtattatgtacccttgccccgggggcgggtcgtatcttaagaaacttagtgggaatccccccggggtctggtaggaaa

SEQ ID NO: 13261 - DNA, 389 bp, Homo sapiens
aggtacttagaaaacctagatactgcagtcagattttggaaactgccgtatagtcactgttttaaaaaccccggaggggctgtattaatttgtattgccccatggctgacaaaagccttttttttttggttttgatttttttttttttgtaactgttggggggaaaaaggctttttaacccatttttgaagagggtgaagtttggagaacaaatttaaaaaccatcagtcatgtgagcagattttttagaagggataggagacacacgcgcacacacacacacacgaaacttgaaatggctttgctttggctgtcgtcttctgccgtgtgccagatgagcttgtgatctgggaagccggggcacccccgttttgtttctctgggcggat

SEQ ID NO: 13262 - DNA, 401 bp, Homo sapiens
aggtacttttttttttttttttttttttttggttgagatttggtttcaccatgttggccaggctagtgtcaaactcctggcctcaagtgatctgccagccttggcctcccaaagtgctggaattacaggcatgagccactgcacccggcctgcttattaatcaagattttcaaagttagatgtttaattaaaggataatatgtctataccactcatccaacaattttcactgtgaagaccacattagccagctcccagaggagacacattctggtgagggggtggctgggttcaccatattcgcttctaccatcctccaatcccagcctttccctctacctgggggattcactggaaccatccatttggattccccacattttttgggttcttaaaccccg

SEQ ID NO: 13263 - DNA, 506 bp, Homo sapiens
ccgggcaggtacacggggaggcattgaggcagccagcgtaggggcttctgctgagggggcaagcggagcttgaggaaaccgcagataagatattttctctttgaaagatagagattaatacaactacttaaaaaaaaaataggccaaataaggtaactaaagatattgccttagcggttaaagtttttaaacgtaaattataaatagccttaaagaattttaaagagcaaaaatactgaaagaaccttaacaagaagttaacaatgaaggaaaaggaaaaaagaataaaaaagggctttcttaaaaaacaatgaacagggagagtatgaagaaatgaaaagctttcttttcaatgggaaaaaaaaaaaaatggttaattttaaaaaagaaaaaaatgtggagaagaaaaagggaccctaccaggaagctcccccgaaattaaaataacccaaataagaaaagggggccaaatggcatttttagaaataaaaaaaacggaaagggag

SEQ ID NO: 13264 - DNA, 649 bp, Homo sapiens
  misc_feature 153: n = A,T,C or G
ctagacaattctcgtatcatagactaatatatgaatttatactatagaaaatatattaaatacatctaatatacatggaaacatgaataaactcatcacataatcacatagtaactgagcatatcaaatataatcacatcatataaaagccancgggattcgcgaccacttaaaacaatcagacgaatcgttactccaccgcggcggcggccgaggtactagtcagtatgctgtagtattaatcagtaggtcaagttcagtgaagtaaaggagaattgaatgcttgaagttcacatttaggcaaaaatttggcgttttaggaggtgagtataagacatgatctttatagaaaacgctgatgataaaaacagcgctctctgttaggtgcctttatgcttgactccattggcatcttttcttaagaaactaaactcacgactgggtgcaatggctcatgtctgtaatcccagcactttgggaggctgaggctataggatcagttgagctcgggagttcaagatcagcctgggcaacatagctagacctcgtctctactaaaaaacaaacaaacaaaaaacaaaaaaaaccccccaaaaaaaccaacaaaccagcttggcatggtggtgcgtgcctgggggcccagctgctc

SEQ ID NO: 13265 - DNA, 423 bp, Homo sapiens
aggtaccccagccaggcgcacgatgtcgtgtaagcagggtattcttgtgccagcatttgcttctctgtgaaaacacagcgccgtcaacattttgcactttccagggcccttcggaattggaagtgcctgtagctaagctgtttcccctggagagtccagctgttctcctgatccggccctgcacacacacacccagccacaaattactaggatgtcaaacccaggtgatcaggatactctcacggactgccctgctcccccagggctctccctacagtgtaatcctaaagccaaacttcctttcagcagtggctgaagcaaactctgcagtcagaggtcatacccagcaggcttcaccatgcagacttgaatgttgatttgagggcctagctgctcagcacagggcatttgggaagacaatgt

SEQ ID NO: 13266 - DNA, 569 bp, Homo sapiens
ggaacatcgtaatcacttctatagggcaattgagcttcccgcggtggcggccgaggtacgcgggtaatcaggctttttaaatgatgtaattcccactttaatagcatagggattttggaagcagctgctggtggcttgggacatcagtggggccaatggttctctgtccctggttcaactgtgatttggccttcccgtgtctttcctggtgatgccttgtttggggttctgtgggtttgggttggaaaaaggcccatttgcctgaattgtacctggcttacttttccaaaggccctctcgggcgccttgttttaggtgtaattcttttgtacactgttggggttccactcttctttctctttatcttgtttttcaccccctaatcttccttttttgtatgtatgatgctcttttttataatataccgctactcccctatttcttttattatttatacatatattctctcttctttatcctctttatatagaataaaaaaacatgtgtgggtgggacatctgtctctatgatgtctcgtttgtgttttttttagaggagtatctctcgcg

SEQ ID NO: 13267 - DNA, 485 bp, Homo sapiens
  misc_feature 33: n = A,T,C or G
aggcttcgacgccattcgtaattcgggcgaatngtagctccacacgcgctggcggccgcccgggcaggtttcatgggactacattcacgccccacctttcccagctcatttttgtatttttagtagagacagggtttcaccatgttggccaggatgatcttgatctcttgacctcatgatccgcccgtcttggcctcccaaagtgctgggatcacaggcgcgagccaccacacctggccctctatttattctctttaaagagagagaaaactatgagaggccaaaattatttaattaaatctttaccttagcacaagggaaaaaaaatggaatttgcctaatataggtgatgaagcatacacaatgaattgaaacaatcacattttagtaaaaggcaaaaatttgagacttataagctttttgggagcttatttttgggtgggggaagaaatgagaaaaagaatttaaccttctcttactgggcg

SEQ ID NO: 13268 - DNA, 514 bp, Homo sapiens
ccgggcaggtacgcgggggcgcgcggcccaattcccttttccggtcggcgtggacttgcgagtggagtgtccgctgtgcccgggcctgcaccatgagcgtcccggccttcatcgacattattgaagaaagatcaggcctgcttgagcttccgtgcttaatctgaaatctaaagggagctgagaatttcagaagtagaacctcggaaaggtgggactttcatggttgaattcagcttcaaattatttgaagacctgttgatgttgtgtcttggaaggagagattgaataaagggtttagcaaaaatgggattttcttgacctgggaaatctttacccacttgaaaaaaaaaaaccacacccctttttaaagaactaacttttatgaaggcgacttggtgggatttgtaaaaaaaaaaatgaaaggcctgctttcaaaaaggtccatgggtggggaaattggcgtggggaaaggttcacaacaacaagggacaaaatgcctttcccaaagccttgg

SEQ ID NO: 13269 - DNA, 487 bp, Homo sapiens
  misc_feature 8, 10, 40: n = A,T,C or G
gcaccggncnattcgaccatatacgcatatcgggcgaatnggagctccaacgcgctggcggccgcccgggcaggttcgcggggaggactgtcgacttcggtgtggcccaggtgagaaaggcccacctgtgtcctggttgagggtctccagggttctttggggcccgaggaatttcagacctgaacaatcaggtggacaacttcttgtgactttgggtattctgaaattactcatcttgactctactgtgcctggatgtagctgtgtgttttgtgtgtatcctgttcatggtttgtagaatttcttgagtttgccgatggtggcagagtctacatagaactatgcttcgtggtgttctggggaaaacctttcgacttgttggctatactatccaatatggctgtatagctcattgtgcttttgaataccttggtggtgttgtcatgtgttctggaccatcaatggagccttcaattcaaaattcagat

SEQ ID NO: 13270 - DNA, 825 bp, Homo sapiens
  misc_feature 37, 49, 50, 82, 83, 86, 87, 89, 90: n = A,T,C or G
gaccaccggccaccagtgcgcacgcacatgacgtaanaccgcggcgaannagttagcgggcaaaaaagccagcggcggccgnncanncnngaggtttatacaaaagaaggccattttaccacgccgcctggggtctccgaaaccccgaggggaaagaggacatccaggaaaaggggaaacaggaaggagggaaccccaaaaaaagcgatggggccaaggaaaaaaccagaaatccctggacggcggggaaaaatgcaaaaacagaaaccgggggaatataccagaaacgctgaaaaaagaaaagctccaccaaaagtcggaaggcaacttaaccccaaagggaagaagggaaaaaaacaagaaccgaacgaaaaaagaccctatggaatggggccttgtccacacaaagaaacaagtggcccaaacacaaaaccaaaaaaaaggggaaaaataaccttggcgggaaccggaaaccaacgggaaggggccaaggccccaaaaagccccgggggggggaaggggaaaggaattaaaaccccaacccgcggggggaccaagaaagagggggggcccaagggcaagaaatccaaggggccacccctcggcccggggccaccaaaaaaacccaggatggcctggttggccaaataaaaaccccaaaaaaaaaccaaatcgagccaaataaaatgagaccaaaaaaccaccacctccaaaaaaaaccaaacaagcccccggcataggaaaaaaaaaaatcccggggaatgcccccctaaaccgggtaggaccccctatcccagtggaggcccccaaaaaacaaattatccg

SEQ ID NO: 13271 - DNA, 403 bp, Homo sapiens
aggtacatactatggaattcctttcttttttttttttagagggggtgtcactatgttgcctaggctagtcttgaactcctgggctcaagtaatcctcccacctcagcctcccaagtgctagaattacaggtgtgagccaccacacctggcctatggcattctttagggtagcatttgcagaaaatgtcatttctctgaatgaaatcctatatggaaatcctatctccccattctccacaaggcctcagtcaagctttacatagcagaatttagccgtaatctggtccctacattatttcccacaggagctctgctctggtcatgctagcttcattatagggctaatacatgccttgcttatgtcctgcaattatttggttgattcaatattttccctaaccta

SEQ ID NO: 13272 - DNA, 462 bp, Homo sapiens
aggtacatgatagggaggagtgaggcaggtgggcactggagggctgtttcctctggcacagttgaactagagggtcactttccactcataattggtttcctaggtctaagtcaccacacctggggctgaagcaagtcttgcctgtgcaccaagctgtggccttggaccctggagagatgcaaggctcagtatctccagtgttgaagtggaagggactcccaaactgaagggagatcttttctcttccccaccttccagcctctttttccctttacaaaattgaaccagtggtgtcaagttccgagagggcatgagtgcaacctttctgggtgcaaacttccaaccacagttctttaccagagaaacctcaatctttgggatggggaaccccaaaagccccaagccttttggcaattgaatgcaataactttatttcccaccccattcggaagggggcacccc

SEQ ID NO: 13273 - DNA, 421 bp, Homo sapiens
ccgggcaggtacaatcttggctcactgcaacctccgcctcccgggttcaagcgattctcctgcctcggcctcccgagtagctgggattacaggtgcccgccaccacaaccagctaattttttgtgtttttagtggagatggggtttcactatgttggccaggctgttctcaaactcctgaccttagacgatccacccacctcggcctcccaaagtgctggagttacaggagtgagccaccgtgcccagccccatatactttaaattatctttagattacttataatatctaatacaatgtaaatggtatgttaacagttgttatactatattgtttagggaatcatgacaataaaaaagtctgtatgtgctcagttcagatgcttaaaaaatatatattttcaattctcagttggttgaat

SEQ ID NO: 13274 - DNA, 519 bp, Homo sapiens
aggtactgaggtgtaaagggatttatatggggacgtaggccgatttccgggtgttgtaggtttctctttttcaggcttatactcatgaaatcttgtctgaaagcttttgagggccaaactgccaagtccctgaagaaaatagttagatgggaaagtttgtgggtttttttttttttaccaccaaatttgagggaaaaaccaaattgaaatttgtaatagccaaaatttgagaacaaattttcagcaaaattcttgtaagccaggttttgtaatgttttaagtatgggggttaaatgtaaagatatttttcagttttttagtgtattatgaattgaacactgtttatttatctttttcattaaccactcgaaatatctattttttgtatcaaaagtatatatgtattagggtattttgtttaacctcataatccatgtggtggaggaaatttatctattaatgaattatatttatttatctatctatttatcatatatattcatctttctatatattcat

SEQ ID NO: 13275 - DNA, 658 bp, Homo sapiens
ccgggcaggtactccctacaagtccggacaacccggagcgaggaacgcaccattcggaggacatgtgccagtatactacgtcattcgactgatgactactacaatcataccttcatacactcagtgctaaagaatattgtgaatactcgatttctatctccaattagtacaacttgaattttaaagaacacttctttcgattgaagtatgaaaagactaccattataacattgatttcacctaaaataccttcttgttctttgataagtaaccaccttgtctaaatggatgtaatgaaatgtgtgaatatattgtaagaacatatgtcatcattcttgagcacctatttttaccccactttttttgcaagcatccaattaatgtttacaatttggctgtttataataccggatggtatatttctcaacacgcattttcccttaccactatattgaccaattggcaaagataacaaccttgtagtgccttgaaaaatttttccttgcccatattggtatatattttcctgtttatgagtccaattaaaatattgggcaaatatataattggtttggatgtttttataaaaattttaaagaagtttgtatttgaaattgtcctatttttcctatgatatataaaataataatatcttaat

SEQ ID NO: 13276 - DNA, 416 bp, Homo sapiens
ccgggcaggtaccactatgcctggctaatatttttatttttttatttttgtagagacagggtcttgttatgttgcccaggctgttctcaaactcctatcctcaagccatcctcccatctcagccactcaacttgctggaattaccagcggaagccactgtgcccagcccagactcccttttacctagtatatcatgtctaatttctaacaaaaaattaaaaaaacattgtaagaggaaaaaaagaaaccctaaaacaaacaagcaaacaaaaaacccaaaacaacaaaaagtttcaagaaacagagctagctgacagaactatattcagatatggcaggtatattagaattatcagattggtaattttaaacaactatgactaatatggtaagagtgataatggaaaaaatagaca

SEQ ID NO: 13277 - DNA, 358 bp, Homo sapiens
aggtacgcggggctcttccggggacgttgtctgcaggcactcagaatggtccagcgtttgacataccgacgtaggctttcctacaatacagcctctaacaaaactaggctgtcccgaacccctggtaaatagaaattgttttaccttttataccaagaaggttgggaaagcaccaaaatctgcatgtggtgtgtgcccaggcagacttcgaggggttcgtgctgtaagacctaaagttcttatgagattgtccaaaacaaagaaacatgtcagcagggcctatggtggttccatgtgtgctaaatgtgtttcgtgacaggatcaagcgtgcttttccttatcgaggaagcagaaaatt

SEQ ID NO: 13278 - DNA, 357 bp, Homo sapiens
aggtacttccctgtgaaaagttcaggggccatatggattggtgtccccacaatgctgcctgacatcatggcctctggcttgcagaatcctaagtcagtgatcttggcacggttctgcttatccagcagcacattttttcagtttgatatcacgatggacaagtccctggctgtgcaggaagcggattccctccaccacatctagtgctatctgcaaacgtgtctccagggtcagcccagccttcagccctgtgtagagatcccggtgtagccgctccataatgaggagcacagcaatgctggagccaccaccatagttgtagtcaatgactgaaccatgggagatccaccaatcgct

SEQ ID NO: 13279 - DNA, 356 bp, Homo sapiens
aggtacaacccctttacttgctacgactacagctacagggagaaggaactagaagtgcaaaaaagtccactcttccctgtcctttatcccaggagagagtcaggaacaatgagctcctacataaagatcaaaaatgtggtttctcatttcctgctttcaagtgtcctctcctatcaaagactcaagcaacttttgctgcagcaactggactatgggctgcactaaccaccgtatcaaatccaagcagagcagatcctgtgacctggagaaaggagccggctgtccttccctgctgtaacctagagaaaagccccgcgtacctgcccgggcgggccgccatcttgggtcatcgatga

SEQ ID NO: 13280 - DNA, 351 bp, Homo sapiens
ccgggcaggtggagaaggacagctgcttttttatatagattaaaagaaatctcaatcttcaaagtttctatttactgtaacagtagatggtttcaaagaagcacttggccgggcacggtggctcacacctgtaatcccagcactctgggaggctgaggcaggcggatcatgaagttaggagttagagaccagcctggccaacatggtgaaaccctcgcctctactaaaaatacaaaaattagccaagtgtggtggtgcatgcctgtaatcccacctactcgggaggctgaggcaggagaattgcttgaatccaggaggcggaggttgcagtgagccgagatcatgccactg

SEQ ID NO: 13281 - DNA, 354 bp, Homo sapiens
ccgggcaggtacaatattagatattaaaaatggattcaagagaagttactaagaaatgctgacatactgtatatacaaatttttagttcaatatatgccattatataaagcaccaagagtaatgcctttataaatcaagccattttttatgactctgtttctaatctttgtaacccttttacatttgttccaatatacacacatcataaatgttacttgctcaacacttcaccgatttggtctcaacttaaaaatatatatgtaggcaaaaattaatgtcaaaaggaactgttctaacagttacaagagaaaatagtaaatatttggaattaaactgtcatgaacaaagaaaga

SEQ ID NO: 13282 - DNA, 625 bp, Homo sapiens
aggtaccaggcaccacacgaaaggatcactgaacgtctagtaggacatgagtaaaagggtaagatcagctactcaacagaagtcaattccagtagactcaagtagatactcatttatcactttgactcgttgaattacccgggaaaaggaaaaaggggaatttctttatttatggccaccagaaaaagggtcctaagttccattagaaggattttctccaattttggtaaagtaaggccattgtaaacaagggaaatgaattaatatctcaaagagggtctgaagtggggaaccccaaaatgtaagtaaatagtaaatgtttgtatcgatgaaagtttatttgggtataaaaaaggggcgtaaggaaaaaaagttattaagggtcgtaagtaaaaatattaatttttcctccccaaatacgttaagtaaaaactaataaggtaaatatgggaggtaatttatgttaaccaaaacctaaaaaataattggttaatttcaaagatataaaccccggtaatcctctcacatgttttgttaaggtaataaaaaggggtattttaaggcaaaaagtgggtaaaacgttaaagctataataatatggtcctatatataaatgcccaaaaat

SEQ ID NO: 13283 - DNA, 492 bp, Homo sapiens
aggtacctgaacaaatcccatcaaggacagattctcagtcttgaagaggcagcacagtaaaggggaaagatcatgagttttggggccaggttcccttggatattgtggggcccccacacttctggatgatgttggaaaaactctttgagacttaggcttcacattctgtaaaatggaaattacttatttttttaatagtttgtcataaaacactcaaatgaatctgactataataattaacccctaattccctaactgggctcaatttgaaactcaagcctcaaactggtcccacatctgtgttgggaatgctcctatcccacaagagggggcgtttaaaaataggggtatcccccttaatagaaaaccccctagcacaaagcctctttaccaccaattcccttttggccattaacaacaccaattttttctgtttactgaaaaatagtaaaattttccctagtgttaaaaaggggtgtaaaacaccttaaa

SEQ ID NO: 13284 - DNA, 425 bp, Homo sapiens
aggtactgtttaaaaagaataatcataattttatattatacaattgaaacatgtattcaatactgtttactgaatatctcaagtatacttatttacttagaaacaaaggaatcaacggatatctgttatataacgtttaaattactaaaaatactttatatagcattgctccataaatgctagtgtaaatgctgacgaaagtaaaaatgtcattccctacatttgctaaatatattgtgacacattataagtgttttttaaaacatatcactaaggggcaaaagaagtttgcaaaaataattgtaagtattttaattatggaaaaatttagaacacagcatagtattcatgtgaaggaaggattttaaatggaacccaaaaaatatcagcagcaggaagtttctattatactttaagattgggaa

SEQ ID NO: 13285 - DNA, 554 bp, Homo sapiens
ccgggcaggtacctcatcaatatgtgcatttattatttgccaattaaaataatataaaactctttaaaaattaaaaaccatatatattccctagtattttctgggatgtatttttttattctcaatgcactttttgagtaaatgctctttgctattgtatctcaataccctttggataattactccaatacaatctacctggtttggtgtaatcacctctattctgaaaattgcaattgggtacccagcaatgttgttttccctatacttcattaatatatttctcattattctttgaaataaataatttttcctattaccagcatttaattggaaaaattattctctatattaaatgggaaaaacccacacgttattaaaaaccagtgtaaatctcaatttgtaatgttcttccattaacaccaaccctttttatggcaattgtttagacccttggaaagggtaaaacctcttattttaatcttccataatgcggggaaacttcttgcaaaaaaccacccggttgattgttttcttgccgcccctgaccgtct

SEQ ID NO: 13286 - DNA, 490 bp, Homo sapiens
  misc_feature 26, 36: n = A,T,C or G
gtaacggcagtggaagccttcggtantccggcgaanggtgctggacaacggcggcggccgaggtactatggttaaaatatagtaagttagggacgaaactaattttcaagtgataagtcaactttaggatggcgtgacaagaaaagacttcactaagatagcgactttagaattaaacactgtaataagcaaggaaggcagccatgcagatattgggccgagggaggacattcaagcagaggcccaatgagagccaagaccgcaagaccttattgtgctatagcaaggggagaatacaattggaggtaagtgaaggagaagacagttttaaaagatgaggtcagtgtgataaaagggaccgtatatttagagtcatggtaagaattatggctattccaaaaagaactgtgaaaaacaattgggggcttttatcctaaggaccaaaattaaattttatgttttcaaaaaaaggctttccagtttaatttgg

SEQ ID NO: 13287 - DNA, 413 bp, Homo sapiens
ccgggcaggtacgcggggacgtcttccgttttctttttacatcaatgcagagtccctctgtgaatttacaacacccaacacccatgagtttagtccttaagaaggaaaattgagcaagtatttaattggttggacattgcataaaagaggtccatatccaggctaactttagaaattttattctcaaacttagttggcctcttttttttctgtcagaggaccattcttagtggcactggggaaatcttgggacccagaagaatttaactgcgctcactgcaaaaatacaatggcctacattggatttgttgaggagaaaggagccctgtattgtgaactgggctatgagaaattttttgcccctggatgtgggcgatgcccaaagaagatccttggagaattcattattgcct

SEQ ID NO: 13288 - DNA, 417 bp, Homo sapiens
ccgggcaggtacatttgttgggggcgtgacattaacatatataccacttagagtggacatgcatttagagaaaatttaatgagctggaaccaagctgggaattccaacatgtataagttaaacacatgaggaggagccatctaaggaaacagaaacagagcttccagcatgtggggggcatttggaagaaaacgatgccatataagccaagatgaaatatacatcaaggagaaggaaggtgtcaatagttttgaatgctatgaagaaagataagaataggttaatagtccttatatttttataacagatgtcactattgatcttgatgaggggtttcaatatataggtgggattatataccctgccttgaatacaacctgaaggtttggaggggcttcataatgtttacaggcactt

SEQ ID NO: 13289 - DNA, 396 bp, Homo sapiens
  misc_feature 152, 165, 166, 169, 171, 173, 177, 189: n = A,T,C or G
ccgggcaggacttaaattttaaaaatttagatttcagattattgtcttgcaaaaggggcagactaggtgcctgatgactataatcccagcaatttggaaggctgaggcgggaggattgtttgagcccaggagttcgagaccagcctgggccncatagtgagactnnatntncncccnaaattacccacngcggctatgctagtctatagtctcagctactcatgaggctgaagtgggaggaccacttatgcccaggaaaccaaggctgcagtgagccatgatcataccactgcactgcacttcaacctgggggacagaacaagacagaccctgtcgccccacaccttccctatacccccggaaaaaaaaagtgcaaaaaaaaaaaaactagggggg

SEQ ID NO: 13290 - DNA, 406 bp, Homo sapiens
aggtacttttttttttttttttttttttttttcgggacacagggtcttgctgttgcccaggctggagtgcaggggcatgaccatagctcactgcagccttgacttccttaactcaagcaatcctcttgcctcagcctcctgtagcactgtaggcacacacaactatgcctggctaattttaacatttttctttcacctttttgacccttatcttctatacccggctaattttttgtagagacagggtcttgctatgttgtccaagctggtcttgaattcctcgcctgaagcaatccttccaccgtagcttcctgagtgttaggattacaggcatgagccactgcacctggcccccaacaggtaattttagaacatttttccctctacactaattaccctcctatag

SEQ ID NO: 13291 - DNA, 405 bp, Homo sapiens
aggtactcatggagggcaccaccaagaacttcctcttgaatttctccctgtagccgcccacaccagccctggtcttggaggctgctgaaccacgattatgctgccatcagtgaaggaagctgaaattgtgaaagtgaaacaccatggctggtcatgtgccaaatgatgttgtgttctgcaaagtatctccaatcctgggttggatccagtaggtgcacttgggcacccaaaccggaaacagggattcttgttccttaaacacaagacactccaatgagaaagctgctctcagatgagttgcagatcaggcaggaggagaggaaggctttctcttaatttccttataaatacatttttttactccatgaaggaagctttatttgatccttccccacgttttaaaca

SEQ ID NO: 13292 - DNA, 430 bp, Homo sapiens
aggtactcagctgaaaacactgtttcagccccctctctggtgacctcagccttctccaggtgtatctcttgatgatcttggagaccagcagccacagctgctgctactcctgcaggagactgtcaggctgtggtggggggcaggggtgttggaggagaagttgaaaatccgggtgttctctgcccctctgctcctccatcttagcttctggaggagttaaggcaccaagggcaccaagtcaggttgggagttttgctgcccttgcccaagccttcagcaaaactagcttggtcccctgctttgcttgggtcccagcccaggtgtgatttttggtggttgattagtaaccccccctttggtttttccccaccctttttcattaatgggagggctttggcttgggtttgggtctctggttagttctaaaaaa

SEQ ID NO: 13293 - DNA, 412 bp, Homo sapiens
ccgggcaggtacgcggggatgcgtgaaaggtgctgtgaccgccctccgggttgtggctggtggccttcggtgtttcgggtttggcagttcactcaccaaggtgatctgatggagtgcacttcgcacgattccaaagaagggagaagacagaggagaatgccagatgaagacagaaacagagattgaagttatgtggccataattcaaggattgctggcaacaccagaagccaagagaaagatgaggaagaattctcccctagacctttcagaaggagcgtggcccagccaacaccctgacttcagacttctggcctccagaactgtgagaataaattcttactgttgtaaaacaaaaaccctcctccaaagaaacactttaaaaaaaaggttcctcggccgctctagaacta

SEQ ID NO: 13294 - DNA, 449 bp, Homo sapiens
ccgggcaggtacttttttttttttttttttttttttttttgcatgtatttatttctccttgcatatttattggtttttcctcttctagttttccttactaatacctactctagtaaacctggcctccaataattcctgccgtcgggggtccaggctatgcaattcttccatcatttctggctggcagagcgtctcccgagactaaaggtgctctgggatccccaagacctacataattttaatcagttatggctcacttcactgaaaaatagggttttacagagggtcctaatgctgcccatttgggggaagccatgggaaacttttttattattttattgcccccccttaggaaaaaaaaagtttttattaaaagcccccagaggttttgggcctgggtttcattctaaaaaaaataactttccttaagccaacctttcaaaaaattg

SEQ ID NO: 13295 - DNA, 372 bp, Homo sapiens
aggtacgcgggatgtctcttgtcagctgtctttcagaagacctggtggggcaagtccgtgggcatcatgttgaccgagctggagaaagccttgaactctatcatcgacgtctaccacaagtacgcgggagatcccagaggctgaacagctcgaccttctctgcacagcaggtccagcatcctttgaagcatgagttcttaccagcagaagcagacctttaccccaccacctcagcttcaacagcagcaggtgaaacaacccagccagcctccacctcaggaaatatttgttcccacaaccaaggagccatgccactcaaaggttccacaacctggaaacacaaagattccagagccaggctgtacctgcccg

SEQ ID NO: 13296 - DNA, 419 bp, Homo sapiens
ccgggcaggtacaaccaagtagttagagtagttcatttattatggtaggaaataacaagagagaaacagattttgagtgggaaggaaaataagtattcttgtttagtcttgttagtttaagatgcatattaaacatccaaataaagacatcaaagaaacagttggatgtataggtctgaagatctatggtcaagactaactgtagagattttcatcccgaataaaatcatctagactattgcagatattaaggaaataaaggggttgaagatcaatccctgggaatctccacaaataagaggtgagggggaggactcataattcccaaggaggcttaagaaacattccttgactggctgatgccaaagaagcccaaagaagaaggtattttatgacagagcacaactgggccaaatact

SEQ ID NO: 13297 - DNA, 410 bp, Homo sapiens
ccgggcaggtacttgcaggtggtttggcctggaaaatctagatgagtggtttttaaatatacatgcttattagactcaccaaggaaattgaaaaaacaatactgattactgagaccagcttttctagattcttcattcattatgagtcaggaaaggccaatgaatgtgtattgataaaaaggttcctggccaggtgcagtggctcacgcctgtaatcccagcactttgggaggccgaggcaggtggatcacctgaggccaagagttcaagaccagcctggccaacatggggaaacgccatctgtactaaaaatagaaaaattcgtcacgtgtggtggcaggggcctgtaatctcagcttcttgggaggctgaggccaatagaattgctggaacctgtgaggcacaagttg

SEQ ID NO: 13298 - DNA, 479 bp, Homo sapiens
aggtacttttttttttttttttttttttttttttatttatttagagacaggttcttgttctgttgcctgggctagagtgcagcggtgcaatcctaattcactggggcctcaaattcctgggctcaagtgatcctcctgccccaccctttggtttgattggagctactaggcacacactcaccatacgctggatagatttattttattccttatattccgtagaaaacggaggttccagaccaatgttctccctaggcttggtgcttcgaacatctttgggcctatatagggtataccttcccatggccatggggcgtggtaaaaacaataaacccttattggtgaaaagattctctaaaaaaatgtgtttgaaagcacacaaggaccttgtaagggctgagaaattatgaaaacgctttaaaattttctgtatttcttgcccctctttccctaagtttgccattatttccttggagcaa

SEQ ID NO: 13299 - DNA, 455 bp, Homo sapiens
ccgggcaggtacttttttttttttttttttttttttaataaagatgtggttttgccatgttggccaggctggtctcgaactcctgacctcaagtgatctgccaaccatccataatatttaaataagcatattgacttcttcttaaactaaagggttaaatataaatattttattttaatagttcaggtatcatgtaatctcatatcttaatgctcaagttaataaattcctattttgctatacaatttatgaaaatagcgcttataaaatgtgttttaagtaattaaataagatatttttaaatattttaattaataataatagataattttatttgggaatactaaacctctggaaaaaatttttcccaaaattatcaagcaaatatggaatttcaatgccacaaaagaaatgcttcatttcccaaattgatccaacttgggagaaatagcccg

SEQ ID NO: 13300 - DNA, 414 bp, Homo sapiens
aggtacggtggctcacgcctataatcccagcaatttgggagtgccaaggtaggcagatcacttgaggtcaggagttccagaccagcctggtcaacatggtgaaaccctgtctctactaaaaatacaaaaattagccgtgcgtggtggcacatgcctataattccagctacttaggaggctgaggcaggagaatcacttgaacctgggaggcagaggctgcagtgaaccgagatcgcaccactgcgctccagcctgagtgacagagagaacatctcacacacacacacaaaaaaatccatttctttccttctgtaaatatcacatatatgcaaatccacccacccatatttctgtatatgttctattacccccctcaaatattaaatggtaaaagaaacacttatgtggtattat

SEQ ID NO: 13301 - DNA, 465 bp, Homo sapiens
gagacttgactcgtgacaatactgaaatacgtcgaattggtgctccgccgaggtcgcggccgaggtacatcacatttctcagcttcagtttatttattgaggttcgagcaatagaacaatcataatgcacatgcctatgctttatcctagatgtgttactttagaattttggaggtggtagctggataagtgcattgtggaaaagcttcttcatgtattgtgacacactcctttcatgaagaggcattgactataccataaaccctagaaatacgttattggcaatgctactgttttaaaggagagaaaggcatctttttgtttttgacccataatggcattgcctataacaggtgaaagggaataatgctattgttacaggaatcaacattatccatttttgaagagtttcattaaacaggcaatatttaattggttgtctgttctacgttaggagcttttaat

SEQ ID NO: 13302 - DNA, 418 bp, Homo sapiens
aggtaccaggcaccacacgaaaggatcacgaacgtcgagaggacatgagaaaagggaagatcagcaccagcagaagcaatccagagaccaagagaaccattacactgaccgtgattaccggaaagaaagggattctcataggcacagagaggccagtcatagagattcccattggaagaggcatgaacaggaagataaaccaagggcgagggaccaaagagaaagaagtgacagagtatggaaaagggagaaagatagggagaaatattcccaaagagaacaagaaagagatagacaacaaaatgatcagaaccgacccagtgagaaaggagagaaggaagagaaaagcaaagcaaaggaagagcatatgaaagtaaggaaggaaagatatgaaaataatgataaataccgagattgg

SEQ ID NO: 13303 - DNA, 378 bp, Homo sapiens
ccgggcaggtacaaaggccgcagacaagttgtcagcaacattagataactcagggaatatcattcccataaatcttaaggcaatctacttatcagacgaatgagtaacatacaatcaaaatgactggatgatgactggggggacatcaacataaagactatgatgtgcattcaatatttacacgaagaactaggataaatgaaagatgagagagagaaagagagagagcaaacagtatataatggctctgtgctccaacaatgtgggaacaaccttataaagaatgtgtaaggacaggaagaacatatgcaaaaatgtcagtggtaacagtgttgggtggtgttattctaagaatgctttgcgtgtgaatagtaatgc

SEQ ID NO: 13304 - DNA, 386 bp, Homo sapiens
aggttcttatgagaagcggttttcattcccttgtattctacagagcagtttattagagtgaatgcattttaaggccttgcatttgatatgtcatccagttcataatcaagttgcctttttctggctaaaacataatgattatgtatttttctcatttgggcctacaggctgctggccctttgtccctccactgtgggaatcagatctagagcaggctgagcctgcagacacagcagtggccaaaaggtcactctaagtgttttgtcttgactccttacttgaagtccacccagctagcacacatctggtttatactgaagccccctgcctagaaatactcatttcaggaaccaccagtaagcatctgtgaccacacaggctttttg

SEQ ID NO: 13305 - DNA, 380 bp, Homo sapiens
ccgggcaggtacaacaatgacatcacctaacagggcatttctcagaatgcatcccatcattaagcaatgcacgacggtattatacgctgtaaataactgtatgtgctatacttctatgactggcagcacaggtgtgtttacattagtatcactacaaacatgaatcatatgttgcgctatgatgtcataaggtagcaagtttttcagctcaattatattcttatgggaccactgtcgtagatgtagttcatcactgaccaaaatgtcgttatgtggtgaatgactgcggtaaaattcagggcccacgatgttttagtgcaattagacaattacaagagataaagctatatcttttattcctttcctcattatggataaat

SEQ ID NO: 13306 - DNA, 374 bp, Homo sapiens
ccgggcaggtacttttttttttttttttttttttttttttgagacaggtctcactgtgttgcccagtctggagtgtagtggctattcacagacacgatcatgatgcactacagcctcaaactctcaaactcctgggttccagtgatccctccacctgagccttccctagtagctgggactacaggaacaagccactgcacccagctaatcccattcaattttccaattaatcacttactgctttgaagtgtcatctctgatactgctattctaccttttacatttctattttcccaactatttagtaagcttacccttaaggataagtaaggcctgtaattttttgcacatccaggcattttgtaccttggccg

SEQ ID NO: 13307 - DNA, 566 bp, Homo sapiens
aggtactcaaagttcaaatggagcccagcaagccagatctcctttacttctaggttccctcaacagttatctcctctgctttagagactgccttgaaaatatttcttgtacctggctgtatgtgtttttggcctttggaaatgatggggaatgcaaacttcaaatggggtccttacccccccaaggttagaatcagaagataaggaaaacaggcctgggaaatagttcaagttgcaaaaattcaaagatttcaatcgttcactatccttacaagggaaattgcttaaatttcaagaaggtgcttcaaggatgggggcccttgggaaatgttgcttttgttttaaacaattgaactacaaaaattggtgccagattccaggttattgtggagtaccccctgccttgaaataccacaatcccggactcctttaataagattttaatggggaaatgaatttcctggttttaatgacctgaattaaacagaaaaacctgtaagggcctatattaaaaagattctggtaaactcttggcaccaaaatattccccccctttgactagtaaaa

SEQ ID NO: 13308 - DNA, 594 bp, Homo sapiens
aggtacttaatgtttgttctacataatcactttgcttcttcgtaaataaatactatttaaaaataagagacaatatgaacttgatccgagtctctatttgtagatctttctaggaatatatctttcctaattaggaaaatgttcaaatattgtcttctccccccttcttctcttttaaaaacagtataccaattatattattcttgggcattcaagagctttacaagcctaaaaaaatgaagtagaggtttaaatttgaagatgtttatccaagtgttagggtcaaatgttcatcccatttgccccagtaaaaacccaccttcagtctatctccctccactagtatcaaaagattctgtaaaactggctctttaagataaaaatttctagtccttggcctaaccccttttgggtagtaaagcattagaaaccatacccctggggcaaatctatcagggccagatctttgttgaaaggatagtaatttaataagtttggcctgggaagtagtaggggttcccctgggattttggcccttttagtcctttgccttgcgtttgacccttaaggggaaaaaattaacctagaatccct

SEQ ID NO: 13309 - DNA, 516 bp, Homo sapiens
aggtactttttttttttttttttttttttttttttatcatttacagctacctgttaaaatattcttttatgtagttgttttgatttttaacaaatattttcttttatttcaggagaaactgttttctcaaaaatttaaccctaaaacccggaatcctaatgcatttaatccaaaatctgttcttccttttctctcttgaaccaccttatatggaccaaaaatgatttacatgggcaacaaaattttccattggcgttgacatcaagcccagattttcttgttttttgcccacggaaatatttatcattaccatatttctcaatggagaaaattagctttagacacccttcttaagaaaaaacctttcacatttggtatttttggttgaatgttgaaaaaacctatttaaggggctttcaaaattttcaacaaaagccaaagttattgccataaaaagggagggcattttacaaatgggttattaggtaaatttcattaaattttaccatttttgaa

SEQ ID NO: 13310 - DNA, 414 bp, Homo sapiens
aggtactgtgcgctgaagtgattaatttacatattcattcttgctctgtgatatttaggtgtttgtttttggttagtgcatttattctgttaaaatttaaaatacatttgtgttttttatcctgttttaagtatatataacgtggaatgtatatataggatgtatacacagacacactcagacacatattttaatttagatttctagaagggaaattttaattaaaaataggtgaacattttaaatgacctaatacatatttagtccacattgaaactttggcattttgtcattgccattaaaattttgatggcattaaaatttgatgccattaaaattttgatcagtaggtagcatttttttcttagctacaattgttttttttaattataagtattaaaaattcatgaagat

SEQ ID NO: 13311 - DNA, 385 bp, Homo sapiens
aggtacttttttttttttttttttttttttttgatcaaggaattacaaagctacttttaatactttggggtgagccccacaggaataaaaaacactgggaaggggtaaccccctcacccccgggagtggcccatggggagagaggctacctgaggggaaggaagcacaaaagggacccgctgcagactcatggcaaagggaatgccatcggtgctgggacctgtgagcactacaggaggaaacgccagcctggtgggactggctccatgcccacaggccatgggcatgagggttggacacgaagccacaaagctacttgggttcctcctttttactcatggcctttttctgcttatgctgcatgaactcccagttcctgtgcttg

SEQ ID NO: 13312 - DNA, 418 bp, Homo sapiens
ccgggcaggtactttttttttttttttttttttttttttagtatactatttgtatactattgccatctgctgatgtcgatatagaactacaaatatgtaatccaaatgggaagatttcacctcacagggttaagagcagcacactcataacttggaaaatagttgagattttattttcaaaagtaattattataaaaaaatccttagtggatgaagtttaaaaaaacctctacaatgtttgcaagaatttgtgtgctccatccatcctacataacatagaagttggattactcatcttgattcaatgtaccattggtggccaattgatttgatggtaagggagggattcgttgacctcgtctgttatgtaaaggatgcctagggatgggagggcgatgaggactaggatgatggcggg

SEQ ID NO: 13313 - DNA, 467 bp, Homo sapiens
gctggccagcgcttgcctttttgtgctggctcaggcccctttcttgctccaaaagcatgaggggctccctgccttactgacttgcggcgctcctcgaactggctctgtattggtcgtgcagtgaggggctggggccaattgcaaaacactgagctaacctgatacacagagtgctgggtgtggactccattatacaataggatatgcactcatggtcattggtactcatgttacttgataatattaaacaaattgaataaagacttaaaaaacaatataaaagtaagaataacaataatataaataaaaatttataacataacacatatattataatattgtaataaaaaaaaaaaatcatattaaacatttactagattataattaactaaaatatacttaatatcaaaaatttatgaaaagagaaataaacaagttaaacaaacattaaacaataaaaaagtaaa

SEQ ID NO: 13314 - DNA, 418 bp, Homo sapiens
ccgggcaggtaccactttgtataatattcaaaatctatacagcacattgctaagcagagtatacactcaagaaatgtagaattggtaatattatactagaaaatgaacttccagtattgctattattttactaatttgcatagtcactgacctgtgaagagtgaacagtatgtagaagtgcctttgagataggaaattgtgagagtccctaacttttacatacatattagattaatttgagcctacataaaaagaaaacaaatttgtgaggatttgaggggggaaaatcaggggacttcctgtttgcagctcttatcattgggagaacagtaaattagatctagactaatatatttggtctctctaatttatggcaatttgttaactttgtcattgaagtggaatgctgaacaaaatc

SEQ ID NO: 13315 - DNA, 399 bp, Homo sapiens
aggtacttttttttttttttttttttcttagcatttttttttaagctgttttggggaaaaaaaatcacattccattttttttccccatgatatggataataaaggctggatgtctctgacctagggtgactgcagtctcaatttacatcttatgtccggacgtcccattcaatgtcgcattcattccagacaaaagcgtcccagtttagatgacagattatatgactgcccttttttgtcctcaaggtatgatccaaagggaagcatctttctctgccattgctgtttcccacgcgggccaactgctcagatgttcaagtggagtcacggctcggttatccaatctggctccaaagatgtcctttttggcgagatcaattccagaaacaacttttactc

SEQ ID NO: 13316 - DNA, 409 bp, Homo sapiens
ccgaggtacgcggggctgcagcgggagctccaggtttatcctcagtgttctgtgtcctgtgcttatagaggcccgtcctctgtggccgtgtgacctgcaagtattgggagagccacagctaaaccccgggacccctggaagcctagaaatgttatgagttctcattttgtccaagacctttggccagagaacatacaaaattctttccaaatagggatgctgagaagatatgaagaatgcagacatgacaatttacagttaaaaaaaggctgtaaaagcgtgggtgagcataaggtgcacaaaggaggttataatggacttaaccaatgtttggcaactacccagaaagaaatatttcaatggggttaaattggaaaagtctttcattagtttttaaaattcaacccct

SEQ ID NO: 13317 - DNA, 472 bp, Homo sapiens
  misc_feature 51: n = A,T,C or G
tgccccatgaattcgacgctcaatctgtatatctggcgaattgtagctccnacgcggtggcggccgaggtacttttttttttttttttttttttttttgctgaattgaatctgactaccattatgcaagtagggggggagatacatatacaggagtttctgagtgttctttcctaaaacttgtgcacattatgtttgtatatgaaatagaggcagtgtttagaatgaacgtggctgtgctatacttcttgatttcagtgttacaacaaagattagattaaaggaacaacaaacagcatgttacaagaagcattccaattttccagtaagaactgagtcatgcaagagagaccatacaggttccacaattaatctaatgcaaattttaaaagaatataggactcccagacatgaagaaacttgagccacagatttagtccaatgacttcagaaatatttccaggaaaacccac

SEQ ID NO: 13318 - DNA, 429 bp, Homo sapiens
aggtacttttttttttttttttttttttgagaaagggtctctcgctctgttgcccaggctggagtgcagtggcgtgatctcagctcactgcaacctctgcctccagggttcaagagattctcccaccttagcctcccttagcctgggaccacaggcacctgccaccacagccggctaatttttctattttttgtagagatggagtttcaccatgttgcccagggtggcctcgaactcctgacctcaagggatccgcccacctcagtttctcaaagtgctgggattacaagtgtaagccactgctccacatttaactccaatgacgctgagcacaacccagcactctaattacaaaaatttgttttgttataactgaacattccctttctattttagactttcttggctgaacatctctttccccccgcc

SEQ ID NO: 13319 - DNA, 452 bp, Homo sapiens
aggtaccaaggtcctaaagccttcaattcttcgaaaggaattagaaagaaggccagtttggcttcaatgtgtaaccatgagggaaagaggcaggaggaagagatcaggcaggccctggtaggccatgttagatgagtgtagtttttattttaagtgcagtggaaagccagataagggtttttttgtttttgtttttgtttttattttgagacggagtatttctctttcgcccaacctgtatttcatgtgtcttgttctttgctctttgtatctctttttcttttgggttttaagccaattttcttggcttatttttttgtttttttttttttagtattggtgtttctttttttattttttatttgtctttgtttatttcatttttttgaacttctttatgttatttttatttatttttagttttttctttttttatattttgtttattattt

SEQ ID NO: 13320 - DNA, 411 bp, Homo sapiens
ccgggcaggtacatggttcttcctcagaaagtggttcttccttaatgtgtttctttttaccccttttcttcttcttcttcacagatgtttcttcttcttctgccactttttcttcttcctcttcttcaactgaatagggtaagtgtaaaggcacaacaaattaacactgtatcagatctcattccttccaaaaacgtttgagtcctagtttttttctgccattctcatcaactacccaatgtttgttttgtttattttataattgggaaggttctccaaggcctaccactaactttaacgaatgatatagatagagctcagagcaatcttctcacgatcatgaagtcatgtataaaaatcaggattaaaacaaaggtcatctgatctccaatcattattgggaaaaaagta

SEQ ID NO: 13321 - DNA, 392 bp, Homo sapiens
aggtacgcgggggggactacaggtgcccgccaccatgcctggctaattttttatattttttagtagagacagtgtttcaccgtgttagtcaggatggtctcgatcttctgacatcgtgatccacccgcctcggcctcccaaagtgctaggattacaggcgtgagtcactgcactcagtcaggttttcaggtgctggctccatggctcttcctgagccgaaaataaggaaactccatagaccttgtccactggaactcgttcccatctaccctccactctatccagggtgatggatctctgcagtaagtggaagagttcttcatggcccccaaggttatatccatctagaacttcagcacgttatttcatctggaaatagtgcccttgcggat

SEQ ID NO: 13322 - DNA, 389 bp, Homo sapiens
aggtacttttcttttttttttttttttttaaactctttttctttttaaagataaaaatgaatgctttccttcactacccagaaaacgacttccagccctatacctgtgagtatatactgggcctctgcaggtcactgagcatgagatttacagtgtataatgttttctaaaaagttacttattgttatttttttaattgtaaagaatgttcattgaagtgaacttgggaaacatagggaactcaaacaaataaaatcagtcactctttttttaattttattattattattattttttaccacacagaagtagccaccattagcattttgggtctttttttctttactgaattgagagcataatatactgtggttttgtgtcctttcttt

SEQ ID NO: 13323 - DNA, 393 bp, Homo sapiens
ccgggcaggtactttttttttttttttttttttttttttttttttctgtcgttgttgctgtttgttgggtttgcttgtgtgcttttgtcctgtaactactcaataaataacacaaaagataaaaggctttgagaaccttaacttttttttctattggcttggggtgtaaatccactgcaacaactattactacttgaaaagatatgctagagtaaatagaacaatacagttaaattcacctgaagtctttaaaatcttttttttttccgggtatttttaacccatgtggcaaaaaggcattaccatacaattttagctgttggtaacaaattatctcttttacattgctttcccaactaattctgcatagcactttcatattttactagaata

SEQ ID NO: 13324 - DNA, 394 bp, Homo sapiens
aggtacttttttttttttttttttttttttaaagacaaggtcttgctctgttgtccaggcctggacaacacagcatgtgcagtggtgtgaacatggctcactgcagcctcgacttcccaggctgaagtgatcctcccgtctcagcttgagagtagctggaaaccacaggtgtgtgccaccatgcccagctagtttttaaacttcttgtagagatggggtcttgtcatgttgcccaggctggtcttgaacttctgggctcaagcgatcctcctgccttggcctctcaaagtgctgggattacaggcgtgagccactgtgctacaccaaatgttgacaaggctgtgtgcaacctgaattgtcatacatttgtggtgaaaggataaaatgatccaat

SEQ ID NO: 13325 - DNA, 405 bp, Homo sapiens
aggtacttttttttttttttttttttttttttttttgctgttgttgatgttgttgttgttgttgttttgcctttttttgatttttttggggttttttcttttggctttttttgtgtttaatgtttaagtttttcatttttagggtgggtaatttttttatatcttatttaattttaattttttgcagccacaggagttttagccatttcagaaaccttgctcttgaacttgctgcttgtttcctctctggggctccattcatagcacagttgttgcactgaggcttgtgcaggcctagcaaggttcaaatctggactctaatggagcaaaccagttcaacctttgtccacggttgtgccaggcacccgattttttcaaaaaaccaacctaaatcggcttcttgaa

SEQ ID NO: 13326 - DNA, 389 bp, Homo sapiens
  misc_feature 389: n = A,T,C or G
aggtacagcagccggatctcagctcactgcaacctccaccccctgggctcaaccgatcctgccacttcagcctccagaggagctgggaccacagacacgcactaccaggtcaggctaagtttttggtttttttggtagagagggggtttcatcatgttgccaggctggtcttgaactcctgagctcaagcgatcctcaggctcccaacgtgctgggattataggcatgagccactgtacccagccaaattgcttcattttttattactccatacttcctacataagatacttcctacacctggccaaattgcttcattttttaaaaatatattttatttaatgtagtctcactctgttgccctggctggagtgcagtggcatgatcttn

SEQ ID NO: 13327 - DNA, 498 bp, Homo sapiens
aggtacttttttcttttttttttttttttttctcccgactcagcttcccaccctgggctttccgaggtgctttcgccgctgtccccaccactgcagccatgatctccttaacggacacgcaaaaaattggaatgggattaaaaggaattggaggtgtttatcatgaactttggaatgaattctttttttttgacatagtccttactggctaattgaaaatatgtgattattgagataacacgaaatatgttattaagaaatatttgggtttaagcaaatgaaacattttcataatatttatctttaaactatagaataccttgttatcgtgtaatgtggtctctagtgttactaaataaaaaagtcaataaatcgaaattacaagaaattctattattaaaatatgatttagaattttattttattactagtgcaattcttaattattacatgtagaatgttatggagtaaaatattttagttatataagttagtaaa

SEQ ID NO: 13328 - DNA, 358 bp, Homo sapiens
ccgggcaggtacttttcttttcagtcctacccactttctattcccctgggactccaatgaaataaatgttagatcttttgttactgttccaaatgcccctgaagctctgtttgttggttggttggttttcttcccccagttgattttctctctattgttcttattgggtaatttctattttcaggtccactgattctctcctctccccactcccttctgctgttgaatccatctactaagctttttgttttggctactgtatttttcagttgaaaattttctactttttttaaatcatctatggctttgctgagacttttctatttttggcttgaaacattctaattttctacttggt

SEQ ID NO: 13329 - DNA, 482 bp, Homo sapiens
ccgggcaggtacttttttttgttttttttttttttttttgctaaaaatgccctgagatatccttggagatactgaattggacttagtttggggcttcaatatgcctattctgaatactagacttatctcctagggaaaaaattttttgcttttaagccaatacctaaaaaagaactttcattttggtcccaaagacaatctttttcttaaggacatttttttttagtcaacagggggcatttttggaattgcttttaaaaaggttgcacacaaggtatagtcaacccttaaaatgggtttttaagtttttaaaaaatgtccatgatttccttgaatttttcatttttagtgtttgtccgtagggataattgtgcccttccagggatgttcttggacattttctcttttaacaaaagtttccctctcagaaattgcctttggtttggcttgagtttggggtttcccaacaataaaccccaact

SEQ ID NO: 13330 - DNA, 352 bp, Homo sapiens
  misc_feature 290: n = A,T,C or G
ccgggcaggtacgcgggggaaaacaagatggaggattcggcctcggcctcgctgtcttctgcagccgctactggaacctccacctcgactccagcggccccgacagcacggaagcagctggataaagaacaggttagaaaggcagtggacgctctcttgacgcattgcaagtccaggaaaaacaattatgggttgcttttgaatgagaatgaaagtttatttttaatggtggtattatggaaaattccaagtaaagaactgagggtcagattgaccttgcctcatagtanttcgatcagattcagaagatatctgtttatttacgaaggatgaacccaattcaactcctgac

SEQ ID NO: 13331 - DNA, 367 bp, Homo sapiens
ccgggcaggtacattttcctttgtggcatggtggcctgaaaatactgtgaggtttaacaatgaaggcaggtgactggtgaggagagttccagccactggattctccctcagtcccctgtgctgtggcccttggtgacccctaaatttcagtgcccctgcctgacactggagtccctctataaagaagcccctttctagctagctagctgttccatcccgcacacccccacagaagccttttgctgccattagtaagcacgccctctattttctcacctgtgattgattcatgcatgatttgaggttttggtcttattaaaagcaacttgtttaaagtttactaaaaatgggcaccaaaaaggaaaat

SEQ ID NO: 13332 - DNA, 540 bp, Homo sapiens
ccgggcaggtaccattcttctagtgggggaggagcatgacatttttgtggtattcacccccagaacaggttggtatggctgggccaccctgttccaggttctttggctttccctgggtgtctgttttttgttggtgactttgcctgcattgaagaaaattactgtgggcactccaagttttgggtacatttataagtgaggccaatgaaaaaaatcctcgtggaaactacacatgttaattatccatttagctttaaagatcactagagagtcctcctaaaacccaaataataacactttcctttttagatcataaccctttttaagaagatcctttttcgaattaaggtcgaacaataattattgtttttttgtacattaaaagatcgtatcacaatttggtggattttaaacaagaggtgtaatgttaaaaaataaaaaatttgccatttttaaccctccaaacttttggtcattgggaaaacatggtgattcttcaaaaatcctatgaaaaaggtttgaaactttaaattctcaata

SEQ ID NO: 13333 - DNA, 511 bp, Homo sapiens
ccgggcaggtactagatacccagtaaagtgcttaactaattctatccctttgtcatctacccaagtgttagttcagtccaaaagagtcaatacattctaaaaaggtttaaatagatttttggattcgtgatcacttttctagtttcttaaagaaaacactgttctcccatggggtgtcctgttaatgcatgtaatacaggcagcaaggcacattaactccaagtggcacttttcagttaaacaaggtgctcacttgggccagcatcttatgtttcagggctttttctccaggtcctcattttcatggattgtaagttctaataaaaattcaataaaagcttccttaaaaaagggggcctataaccaccttacctggaaatcctcccaattgggaaagtaaaaatgggcctttaattatttaaaaatggaactttccttgttaaaaaatatccgggggctaaataaaaaaaaaatttcaatcccacaatttgaatttttatatttttttccg

SEQ ID NO: 13334 - DNA, 393 bp, Homo sapiens
aggtacaatcttggctcactgcaacctccgcctcccaggttcaagcgattctcctgcctcagcctcccgagtagctaggattacaggtgcccgccaccacaaccagctgattttttgtatttttagtagagatggggtttcactatgttggccaggctgttctcaaactcctgaccttagacgatccacccacctcagcctcccaaagtgctggagttacaggagtgagccaccgtgcccagccccatatactttaaattatctttagattacttataatatctaatacaatgtaaatggtatgttaacagttgttatactatattgtttagggaatcatgacaataaaaaagtctgtatgtgctcagttcagatgcttaaaaaatatatatt

SEQ ID NO: 13335 - DNA, 459 bp, Homo sapiens
  misc_feature 43: n = A,T,C or G
gccccgtcccattcgacgcatatactgactatcagggcgaatngtagctgcaacgcgctggcggccgaggtactaaaattgtgttgggagcagggatttggaaatttctgagagatgtgtagttaatttagtaattctgtttcatgagatatgatctgttatgctagtggtttaataggcttgctatgtaagtagaacgtggctcaactagatatctttatatgtatgggcattactcttagtgatatttgtttcctgtcctttgttgctcatgctgtttaagtgcaggccgagacccagcctctttgtaagtaccaaaatgatgcaagaatgataagtaaatgtgtaaataatttgcagaggagcgttttagggtaggaatggcgattgctaaaaggtaaatttaataaaaaggtgcttcctttcctcaaatagtttcgcacccctcatcggatcatt

SEQ ID NO: 13336 - DNA, 506 bp, Homo sapiens
aggtacttttttttcttttcttttcttttttttgatacagagtcttagtcacccagactagaggtcagtggcaggatctcaactcactgcaacctctgcctcctgggcttcaagagaccagcccacctccgcctccaagtagcctggggactacaggcgatgcgccaccaatgcccggctactttcttgaaattttattgtaagagaacggaatcggtaaccataatttctttaggcttgggccttttaaactttctgaagcttcaaaggagaatgccaccttcccccttcaaacccttctccaaagatagcttggggaattacaagtgccgggcccaaggcacctattttttcaaatttttttcaaagatatttggccaataattcaattagtggaaattaaacaatttggtaaaaatcccttttttgtataatttaaagctaaaacatggttaagtaaaaattccaatttttcttaaattgaaaataaattctttaaagggttt

SEQ ID NO: 13337 - DNA, 407 bp, Homo sapiens
aggtacttttttttttttttttttttttttttaatagagacagggtttcaccatgttagccaggatggtctggatctcctctgacctcatgatccacccacctcagcctcccaaagtgctgggattacaggcgtgagccaccgcgcctggccgggtcaggctctttctaatctgtttaaaaccatatcacccagaaggtattcagtatatacttatttaaatgaattgaaagtcatatgagcagcatggacttactactttaaaaaccacattattagaaacctaacaccttggaagctctgcatattctgaatgaagaatatactaaaccactcagagggaaatagttattaaccattttaccacagacgactaaacaactaccatggcccttcccttgtttcagt

SEQ ID NO: 13338 - DNA, 406 bp, Homo sapiens
aggtaccttctctctcttctttgcagaggcctttctgggcttcggctgtggctttggaggagcaggtttagcagacaaccttgtggatcttctctgcagttcctacttaaccttggttttatctcctttagcatccccttcagcctttctctcgggcagggtggcagcgacagtggtgggacataggcactgggcagtggagcacgggctttggtcggtctaggggtcatcgcctcttcttcttcacactgctctgctttgtgcatttctattcttttttgtagccagagaagtaaatgcatatctttgcaactaacacttccagactcatctgcaaaatcaagtgcactaaataaataaataaataaataatcaatcatgggtcctttttagatagtgtttcccc

SEQ ID NO: 13339 - DNA, 425 bp, Homo sapiens
aggtacgtgaaagcgctttgaagatcacaaacccatttagaaatatgtgggttgctcttcctcaaatcttagaaagctgcctactactataaatacattcattcatatctttccctcattcctttcagtaatttaaaaatgtataggtatccaacttacatgtaagcacttttgcaaacactcactgatttactatgaataacaatcctactatatgcacaattatcatttcccccctttacagaaagaggaaactgaaggcacacaagatttaatcattgtaagcaggaattcaaacttcaaggtggtactgggcctctacttgacccttgtttctttaaccctatgggcacatcctttcagtataatccaaggtattcttgtcccacttaataccactcccccatttcattcatcacgataag

SEQ ID NO: 13340 - DNA, 378 bp, Homo sapiens
aggtacttttttttttttcttttttttttcggtttggttcaacatttcttatctgctttctgtcataggaagaacacattgagtgtagtattggtaggatccttcagcaccctgcttctgttatggaagctcaatgggaaaattcctctctccccagcccttggcagacagagctcatgatggtagagttttgaatgaagatgtggtatgctctggtaatgagcatccaactgctgtgtggaatgttagtgtcttggcgagaatgttcataatacctaacttccagaatccctttgggcctcacacattttccagaactacctcccaccaatgtgcagactttttattctaccgggaatttcctttcttgcttgggac

SEQ ID NO: 13341 - DNA, 385 bp, Homo sapiens
aggtacagggtgtgaacaatgaaaaattataaaggcatgtaataaaaatgttccataaaaacaaagatacctcaagcaggtccacctatacctctagtttagtttagaaactaattcagtattttaagaatcatataattttaaactttgcactaagcctaacctttttaaaaaatggtcagggccaggtgcagtgcctcaagcctgtaatcccagtgctttaggaggctgaggtgggaggactgcttgagtccaggagttcgagactgcagtgagctgtgattacaccactgcactccagcctgggagagcaagaacctgcccattaaaaaaccaaacaaaaatgggcaggtgtggtgtctcatacctgaaatcccaacacttt

SEQ ID NO: 13342 - DNA, 393 bp, Homo sapiens
aggtacaaactctgtttagataaagaattaaacaaaacttccatttttattaataattcaagtataatccataatatgattattaggtgttataactaataagttgttattttatatcttaatgtaggtaaagagaactggtcttgtggtggtgaaaaacatgaaaattgttggtctccactgttctagtgaagatttacatgccgggcagattgctcttattaaacatgggtcaaggctgaaaaactgtgatctttatttttccagaaaaccatgttctgcttgtttgaaaatgattgtaaatggtaagtgcagaaaagggtttgttggggattaagagtatttatctgggatgggcgtggaggtttatgccctccatctcagtctcttttc

SEQ ID NO: 13343 - DNA, 408 bp, Homo sapiens
  misc_feature 408: n = A,T,C or G
ccgggcaggtacaccaaagtctttatctgacaggagctgagccagcgatttttcaaggcaagacagtgaccagctgaactcctgagataatgagtatatcatttctccttggcaaaggttatggaattaaagagaataaataacttagttcatacttcctccctcaaagttaaaagatattccctttgcagcgaaaaatggagctttgaggctccttcgagaaacgctccttggggttgtagaaaggaggaagaggttagcatgattttaaagcaactggcatctctgcagctaaccaagttggagacattagggcttcttgtggccattaacttttgtgtatctcacatctccttcagaacttacgctggaaaaactccaacagcttcatatggacagatggacttn

SEQ ID NO: 13344 - DNA, 392 bp, Homo sapiens
ggcggccggccaggacccggggagagcacataactgcgttagaagcagctggtcaggcctcgtagaggtgggctaggacgactgtttactgctgtcaggtctatggggcctttagcaaaatcggatatactttcgtttaaataaacacaaatatattacaggttgaccatccctaatctgaaaattcaaaaccctacgaaatttgaaactttttgagtgccaacatgacacctcaaatggaaaattccacacgtgacacctttgcttctgatgggtctctgaaccatcataaacactgtttatttcaagaacaaaattattttaaattttgtataaaactggtcgggtgtggaagctcatgccttgggatcctaacacttttgggagaccca

SEQ ID NO: 13345 - DNA, 403 bp, Homo sapiens
ccgggcaggtacctgtctcatatgtggcaactacgtggggcagcacactcaaggaatgaaggaagtttcagtgaatgacaactttataaagacagtgttgaggcagcccagtgcagcggtttgggagccaggaacagcgtgtgggccggagtgtggctgcaggacaggaggtcaaaaataagggttgagggtggaataggaagaccccggaacgtcatcctgggagcttgagattttattctacatttctcttgttcttaactatttagggtgatggatctctgcaataattgtaagagatttttaatggctcctcaaggttaatatctcatataaaacttttgcgccgtactttcattttggaacatagtgcacgtgtgcgggattttgggtttggtaaaac

SEQ ID NO: 13346 - DNA, 396 bp, Homo sapiens
ccgggcaggtacaactttgctatttattagctggtccttgacatgaccaggttagcaaggtagaaagattacaaaggttggcatgaagaaggtaggcttgtatgagtgatggtggatgataacaaatctggggaaatgaaatgaactacagacaggacacatgcgatgtgcttcagagtatgcagcttttccaatcaaggaaagcttcgtgcaggaggccaaacagaacctgaacgctgcagtatgacctcagggactcacatcactttctgaaatatctaacaaaaatcgcatttctgctgttgcactctgaattcctagaacctgtgcgtgaaccatttcactgcattcattttccccatgttattctttaaccagccttctttcttgatcaca

SEQ ID NO: 13347 - DNA, 407 bp, Homo sapiens
ccgggcaggtacatctctagatgatcacgaatgtcaaatatcacactacactgtgatatggggattccccttgggggttttcatgtgtatagggtgcctgcagctacactaaacatcttaaagctaccacaatggtcacttcatatttatgctttctataggctttcttggtctcctcctatgttcccatcattttcttgctttgaatctgtaagaatcgagttgaatcttctccattataaattttacataggctgagaaactgtttagccaagtttggataaaattgtatccaaagtaagagtatacaaactatgggcaagtccaaaaatcaagctgtttacaggaccatgttctctctaaaggttctaggagagaatcccttattttcttccaacttttgggtg

SEQ ID NO: 13348 - DNA, 413 bp, Homo sapiens
ccgggcaggtacgcggggaggagaggcgtgaaggctcccaaaaggaaatgctggcacctgggcccagaagccagggcctctaactcctggggttgatttcttcagtgaagttgcaccctacaaagggaatatggccaaagcggcactcaactgaaggctgatatcaggcgattagacagccatgcattctgcgtttgtctggaatggattgtagagagatggacttatatgaggactaccagtccccgtttgattttgatgcaggagtgaacaaaagctatctgtacttgtctcctagtggaaattcatcttcacccggatcacctactcttcagaaatttggtctgctgagaacagacccagtccctgaggaaggaaaaaaagttgctgccacgaacagtgccacataaacc

SEQ ID NO: 13349 - DNA, 446 bp, Homo sapiens
aggtactgggaagttgagcattgctatgaacatacctgaaaatgtggaagcacctttggaagtgggtaatgggcacaggttgtaccactttgtagagcttaaaataatacaggaaggcctgcccccggtggctcatgcctgtcttcctcagcactttgtgagtctgatgtgggcagatctcaaggtcaggcatattgactaccattgctggactaacacttgtgataccctccatctctactacatgatagcgcttttaatatatgacaatagggaaagaaaattggaaagagaattgtaacccgggtgttgagtggcaatggccaccctatggatccatagcatgcatggaggaaaggcttttgaggcaggagagaaatttgacttggagacctccaggaatgaccagaagctcggtcgataacaatcgaagcattcttttttgg

SEQ ID NO: 13350 - DNA, 432 bp, Homo sapiens
aggtacgtatcatgtagaccgcaggcagtcttaattttgtagctggtctgacaatcttttccttttaattggagttttttcagtccatgctatagtttggatatggtttgtctgtctccatcaaatctcatgttggaatttgatccccagtgtggggtattgggagctgaggcccatattggatgtttctccttccatttactttataatcatctttatatatatatttcttattaccacacttctagttcccagttattatttactcttctatctccattattattttccctccctaatggatccttattacattttttctaacctctcccttacttcatctattaactttctattactatttttattattcattaaatcttaaatataaaacttatgcattacttttatttattttttattgcgggggtc

SEQ ID NO: 13351 - DNA, 442 bp, Homo sapiens
accggccaggtacgcgggattgtcaagtggaagatctaatcatactgaatattcattcatgccttgctttgccaatagggaaaaaaattacaaggacaatcggatattctctcagatgactgaacctttctttccatctacctgaaggcgacgaaaggaggagggagggaggcttggacagctcatcctgcaatgagttgaaggcctgcccctaggggcactagcccctcttattaaattctttcataaagccatagagggacattgtgccaatctcactgagatttacattgactccaattgtgttgaacaagaaatcttgggtaaaattgccaaattggctgtctccattctgccaaacttattctgtgaaaaatgggccttcaccctttgaagccttttttaccaaaaacctccctttttaaaaaaaggtgtattggtc

SEQ ID NO: 13352 - DNA, 596 bp, Homo sapiens
aggtacacgcagtcctaatccgttaaatatttctagctaacaatgcacgtggggctcttcagctctgcatacagtcatgttcttgctaaagtccatgcaagatataaaccaccttctgccctgctttttttgagggggaggggaatcagtaaattgccctaccatggggtttttaccctcaaaattccccttcatgccggacaatatcaaagtggctcctctgcgcaataatgcttaaagcccccttagggtgggaatgccttcccgctaaatcacaattttacttcttagtggcacccatgggccttcctactttaaacttggtggaagcccttgggtggaaagaggattgttccaaaaattgcaagtaaggagtttggtcttttccaagcctttttccaattctgggttgccaatttttatagatagatggggaaacccctaccacaaaccttattttttggaaccttttgttatattcaaagagttggtattaaggaaaaaaaccttttattaagtcccccccaataatagtctccccccgtggccttggtatagctaaaattgtgtctcttaacaatgtgagggaaagtggg

SEQ ID NO: 13353 - DNA, 384 bp, Homo sapiens
ccgggcaggtactttttttttttttttttttttttttcccattttatgtccaaggttggtggctcagcctaaaaaaacacatttcaaatactcaataattatcacatgtggctagtggctatcataccggcacagatctcaacattattttaagtcttaaataaactgatggagaaagatacctcatatgagagaaacacttaaaagacaactactgaaatgtaaatgaaatggtaacgacaggagtaaagaatctaagatggtaaggaaaaggacagcaaaccatttaattgaaatcgtcactgagaaatgaaagctctcctcggataagcaataggtttctggaaaatcaaagttattttccattataactggccctcaaaa

SEQ ID NO: 13354 - DNA, 377 bp, Homo sapiens
ccgggcaggtactatttaagccaattaattaaccatgatcactcaaacttaggcaatatgatacttatcatcttcatatacaaagaaaaatggataaactgcctataacaatatagcattaaaaatcctattgatgttcaatattctgtggctattaacactgtggggtgtttttaaaagtcaaaaatactgaactgtttagaaaattctgcatagtagtagtattacattgtgaattttattttcaaatttgatcaataaagatgaaaataataaaattaagcagtcaaaagaagtagcaaaaacaagatagtcattcatatatacagaacatatagattcatttctagttgattcaatcctatttatgtatttaa

SEQ ID NO: 13355 - DNA, 474 bp, Homo sapiens
aggtacaggtagcttccaaatctaatggaaatattatcatgacatactttctagttcgtttgagattcatgggaaatggatgtcgcatggtatagacagtgaaacccctccacagtcccggggttggtagaccttgtattaccccttgttttattgacttactctggttttatcaatgatttttcttgaagtgacgttattttagcattggttgtctttaaattaactttgacgacatactagtacagtggtgtacttcatcaaacttgatcgctatatggctgatgttcttgattcttactattctaatatttacactctttcagatggttatatacttagaaaacagttacgaaaattatcattataattatgtacaactccaataatgttttttccttctgatatatttatttcaaaaaaatgtacctcctctactatgctctaccactacatttatcctccacaattctc

SEQ ID NO: 13356 - DNA, 437 bp, Homo sapiens
aggtacgcgggggggcatcacggacctaccaatatgtgatgtcacccctggtggcccagctgtgtcatggagaaactccagctgggcccatagattctgcagcgggaatatccaaggcttatttatgcctgtctgagtgggatttggccagtcaagatgcttttttgctcggttagctggccaccatatcaacatttttggctcttgtcaggtgtttctctcaaaaatttggcataaagtggtgatgatatccttattgctcctgtttaattttccatgggctgacttgagactggtgggtggtactatatgtggtcccatcttgatgttttactaattggtcttcttttatatgattcccttacaacacatcgttgtctttatggttgataggatcaatttttctttctaaatccatagcctctctattggtaaag

SEQ ID NO: 13357 - DNA, 411 bp, Homo sapiens
ccgggcaggtacctgtctcatatgtggcaactacgtggggcagcacactcaaggaatgaaggaagtttcagtgaatgacaactttataaagacagtgttgaggcagtccagtgcagcggtttgggagccaggaacagcgtgtgggccggagtgtggctgcaggacaggaggtcaaaaataagggttgagggtggaatacgaagaccccggttcgtcatcctgggagcttgagattttattctacattctttttgttcttaactatttagggtggttggctctttgcaattagtttcatatcggtttttttgtggctcctctggtatttttgtctattgttccttttgtaacttttttgtctttttcaatattgtcgtctttttctctttatcttatatggtttgcattttg

SEQ ID NO: 13358 - DNA, 385 bp, Homo sapiens
ccgggcaggtactttattttcaaaacactcatatgttgcaaaaaacacatagaaaaataaagtttggtgggggtgctgactaaacttcaagtcacagacttttatgtgacagattggagcagggtttgttatgcatgtagagaacccaaactaatttattaaacaggatagaaacaggctgtctgggtgaaatggttctgagaaccatccaattcacctgtcagatgctgatagactagctcttcagatgtttttctaccagttcagagatgggttaatgactagttccaatcccgcgtacccagaaaataagatagggggttccaaaatgaagaatcgctccttttgcaaaccttatggtaacaaatataatatttattaatgg

SEQ ID NO: 13359 - DNA, 404 bp, Homo sapiens
aggtactttttttttttttttttttttttttggttgcctctataatcattttgactttaaaatgttttctgcagatcctttaataactgcaaatgtagaagtatggtgtaacaagtaattggtatgactaacactaaaaatgtatgggaaataaggatactattgtaaagaaaacaagaaaaacctggggtaggggagcagtattgattctctcttaggattcctaaaattttttgaccaaacccttttaccatggaacattctaatggggttataagtgtaaaaaaccagaggaactgtggcagtaacttaatcattattaattttcttttttttaacatagattatattattttaaaaataactaaaaaactttttaaaattgtgcctcctaaatacagcat

SEQ ID NO: 13360 - DNA, 503 bp, Homo sapiens
ccgggcaggtacatttcaatacagatgcaatattttttctcaaatactttcagtccaaagttcgttgaattcactgatgtggaatcaacaaatatggagggccagtggtgtattttataaaatcacttgtatcaaaagaaaacaatttaagtatgtatgggtttggtcgtgaaacgtaaatttgcagttttttgtccatttaaaattgcccaattttaaaaaacttgttgaattaactttttttgcacgaaacgcttctaattttccaacttaactagaaatctaccagttttccaaaattcaacctttaagtacacaaactccaaaatgttaaaaatctaaattgtgggtatggagttttggtagtcggtttagctttttttttgggaatgaatctgggaaaatttaggtacttatacttttaacgacaaagtcacgcccccattggatttttattatccaataaaccatttgtccctaattcctggaccagtcaatcttgg

SEQ ID NO: 13361 - DNA, 392 bp, Homo sapiens
ccgggcaggtacacatctattattaccatggctgtgagatcatttaagaaacagacaaatgtcatttagaaacagactatagaatcaaatcacaactaaagagaatgctttatgatagctcagacagtggtaggaaatcaaaggcaaattcacatttttgattactcaccctaaaatatgctgaaattgaacatttgtgacccaagtaactaaaaatacattgaagaaaactataacttaactacatattgagttcatttcaatcgcagtagtctattttaaaaacaacctcccataaggaatacaggaatggaatccattgaaagcaacagctgtcaaaaactctgccaagaaactcagagtaacttattgcatcataaaaggtgaggtga

SEQ ID NO: 13362 - DNA, 386 bp, Homo sapiens
  misc_feature 301: n = A,T,C or G
aggtacacaggccgggcacagtggttcacacctgtaatcccaacactttgggaggctgaggcgggtggatcacaaggtcaggagatcgagaccatcctggccaacatggtgaaactctgtctctactaaaaaatacagaaaattagcccgtcatggtggcacgttcctctagtcccagctactcgggaggctgaggcagaagaattacttcaacatgggatgtggaggttgcagtgagccgagatcgcgccactgcactccagcctggtgacatgagcgagtaccccattctcaaaaaaanaaaaagttgttatgtggacaggctaaccattaatataaaaaaaaaagtaaaggaaaaaaaagagagaggaaagttaggggacaaa

SEQ ID NO: 13363 - DNA, 513 bp, Homo sapiens
ccgggcaggtacagtgataaatggagagacgggagtttaaaatgaaggataagccgcaaatgaggatgaagttaatggatagagaaaagatgggaggaagaggtctctctctttactcgtaagctgcccatcttttttatttacaactcttatcatactgggccttttctttccttcttaacttctccacttttttacactatatccttgttttctcccttttttttaacaccctgttcactttttaatctttttgtccccccttttttcatttgctctcctaccttattttcccttctcttctctcttttttacactctgtatttcttcttctttacccctcttttttttctcctctttatttcttcttcttatttctccttttttttcccttctttctctccgctctattctcaaccttctccattcttactccctcctgctccttccctatattccatttcatccttttcatttctctttttatccttttttcttactctctattcttct

SEQ ID NO: 13364 - DNA, 412 bp, Homo sapiens
ccgggcaggtaccttgggtctgaaggggtcactcaagcgctctgctatctctgcagctaaaacgggtgtcaggttttcagctgctactaaagataatgagcataagcgttcactgaccaagactccagccagaaagtctgcacatgtgacccggtctgggggcaccccaaaaggcgaggctgtgcttgggacacacaaattaaagaccatcacggggaatttctgcctgctgtttattacccccattttcaagttgaccaactgtagggcaacggcaagacctcccagtcttccaattaaggaacacccaggtgttttggaatctttaaaagcaaagttttgttccttcgttcccccttcaaactaatgaaacccaccacaaatagggaaaaggctattaaaccattggggg

SEQ ID NO: 13365 - DNA, 401 bp, Homo sapiens
  misc_feature 269: n = A,T,C or G
ccgggcaggtacgcgggatcctgaaccatccaggccaaataagcgccggctatgcccctgtattggattgccacacggctcacattgcatgcaagtttgctgagctgaaggaaaagattgatcgccgttctggtaaaaagctggaagatggcccctaaattcttgaagtctggtgatgctgccattgttgatatggttcctggcaagcccatgtgtgttgagaggcttctcagactatccacctttgggttcgcttttgctgtttcgtngatattgagaacagacagtttgcgggtgggtgttcattcaaagtcagttggtacaaagaagggctgtcttggagcctgtgcaaggttcaacccaagttcttgcccaggaaaagcctcaagaagggctaaaat

SEQ ID NO: 13366 - DNA, 400 bp, Homo sapiens
  misc_feature 259, 288, 329: n = A,T,C or G
aggtaccatgttttactatcctcagaaaattcccaataaaccagagtttgaggacagtaatccttcccctctaccaccggatatggctcctgggcagagttatcaaccccaatcagaatctgcttcctctagttcgatggataagtatcatatacatcacatttctgaaccaactagacaagaaaactggacacctttgaaaaatgacttggaaaatcaccttgaagactttgaactggaagtagaactcctcattacncctaattaaatcagaaaaaagggaagccntgggtttttaccagtaacccaaagggcatatcagaagaatnttggttggtttatgtttcaattgattgttcatacccagggattccaagccaaaaagttgattgtgaaaggg

SEQ ID NO: 13367 - DNA, 375 bp, Homo sapiens
ccgggcaggtacatgggactacaggcacgccccaccatgcccagctcatttttgtatttttagtagagacagggtttcaccatgttggccaggatgatcttgatctcttgacctcatgatccgcccctcttggcctcccaaagtgctgggatcacaggcgtgagccaccacacctggccctctatttattctctttaaagagagagaaaactatgagaggccaaaattatttaattaaatctttaccttagcacaagggaaaaaatggaatttgcctaatataggtgatgaagcatacacaatgaaccagaaacaattcacatttttagtaaaaggcaaaaatttgagtacttataaagctatatgggtagctta

SEQ ID NO: 13368 - DNA, 368 bp, Homo sapiens
ccgggcaggtacgcggggtcccagagagctcgtaggggaggacagtcaagggactcaagcgtctctcttgactccccttctctcgctgtgcagtggcggcgccgaggggtcgacgctcagggctaatctctatgagtcaccctcgaagccccggggtaatattgggtggatcacaagaactaatctttcatgatttggaaaccggaaggaaagaagcacttttgtagctgacttacctcaatgacatgaccagtgtctgagcctacaactgcgctatcttccctggatttttcttcaccttttccttactcatgagccaggtatgtgtttttagttccataaaaaagagccctagccaggcgtggtgg

SEQ ID NO: 13369 - DNA, 439 bp, Homo sapiens
aggtacgcggggatactaagccagggcagaatgcttgtgaagtagcaactaaagtggcagtgtttcttctgaaattctcaggcagtcagactgtcttaggcaaatcttgataaaatagcccttatccaggtttttatctaaggaatcccaagaaaaactggggaatggagagacagtcaagggttatgtcagaaaaggatgagttatcgtgtttcaacatcatgtgagcgtgtggagcttgctttgttctttaattttttttgctttaatcctttaccatttttggaccaatactgggtttattttaaaaaaaaccattttagaattttccgcctctccttttgcattgaaaaaacctggtatagaaggtctaatggggtgttaaaagtatctaatgcccttttccgataaatttttgccccaattgtaccactttacg

SEQ ID NO: 13370 - DNA, 369 bp, Homo sapiens
aggtactttatttttaaggttaaattccagaaacacatatttttccttttccttttgccccacccctgctcaagatgggctcttggtatgtcacccaggcaagattcaaactgctgagctcaacccatccttctactttagtcttgagtacctcgaactacatgagtaagccactactcctcactgattatcctatttctcatttgcattcttacttcaccataaaattcctataaggttagtcaactgacaacagttttctgtaagtcgcaatactcttgtcattaaaattgtttcctggccaggatcagtggactcacacctgtaattcccagcacactgttggggagtgccgaggcaggccggatc

SEQ ID NO: 13371 - DNA, 360 bp, Homo sapiens
aggtactttttttttttttttttttttcagagtattttctttcttgtccagattagctaaattggattgttctatgctaaattcacttaatcactactctattatttttgaattttttagttctgtttttttcacttggttctttttttaaaaaaaacttctactacctttctgagacttctacttttttacttttttcaagaagctttataattacttgctaaagcatttttaccatgactgtttttaacttcttcagataaccacaacatttggttaatcttgaggttggcttggttaactgtcttttctcatcctgcttatgattttccttctaattgtgatttttccggttcttga

SEQ ID NO: 13372 - DNA, 491 bp, Homo sapiens
  misc_feature 316, 436: n = A,T,C or G
aggtactttttttaattttttttttttttttttttttttttgagacagtgtttcactcttgttgcccggctggagtgcagtggctcaatgttggttcacggcaacctccgcctcctgggttcaagcagttctcctgcctcagcctcccaaagtacctgggattaacaggcatgccgccaccatgcccccactaatttttactagtagaccagggttttcttccaatgtttgtgtcagtgcatggtcctcaaaaacttccccggaccttctatggtgaatcctggcacttgacccttccggcgctttccacaatagnttgccttgaagaatttaattaggggcaattgtagactcaacaccgtcttttctctggccttaagtaaattcctttcacaccaattggagaaaagttctttttgtgagtgggggtaaccanccactaacccaattggtttaggttccttattatgtccccttataacctttctttc

SEQ ID NO: 13373 - DNA, 391 bp, Homo sapiens
  misc_feature 266, 279, 280, 281, 296, 297, 298, 309, 310, 325, 326, 368,369: n = A,T,C or G
aggtactcaacaaataatagctgacaagtttgatagccagaaaacggcaaagctgggatgcaaacccaagcagtctgactcccaagcctcttaaccattcttaagagaccacctacctccattcttcttcgaacacatgtttttcctggttgccacctgaatacgtggaaccaccatccacccagctggttaaaccagaatcactcagaaatctacctctccttcatattattcataactgccagtgttaaaattctaattggctngggccaggcacgnnntggctcatgccagtnnnaatcctagaannctttgggagggccgnncggcaggtgggatcaacgagggtcaagggaggattcgagacnncatcctggctaaccatggtgaa

SEQ ID NO: 13374 - DNA, 438 bp, Homo sapiens
ccgggcaggtacttttttttttttttagagaaaatcattagtcccattcttcttttgaatgctacttttccttctctaaaaactgaccatgaattatattctcattcatcaatttcttatttctttgtcagaaaagcagttagcattttttaattattattgcaagtttttcaacattcattgtaaaaaaaaaaaaaaccaaacaggcatgaactttaaaaaaagaaagttatacagaccttttttcattctatatccagggaattggtctccttggctttatattttgagtttttctttttggcaaccaggtatgaaggccatattagaaaccattggcttaaggaagcctttgggaacctgtaaaaatttggacaaaaggttttctttggaaatacttttttcttaaaattcttcaaatttttattcttccccctg

SEQ ID NO: 13375 - DNA, 451 bp, Homo sapiens
gcggccgggcaggtacgtgccaccatgcctagctaattgctttcttatttttgatagacacagggtgtcactgtgttgctcaagctaatttcaaactgtttatctgaagcaatgtccctgcctcaagcctctcaaaagcggtgggaattataggccatgaggccagagcttctattatttctaagactgccgggcctgtaatttcagttgggattacaaataggtgatggacgtgtatttctaggggcataagccaagaaaagttaatctggcagaaaatttatttcaaattaaaattttttattggaagggggttttctccattaacaggaggaatattcattggatttaaagaagaattgggaggaaattaatacgtgttaactaatgtaagtggacacctttgggccgtctttttcccaaagggcctttggtaaaagggccaattctt

SEQ ID NO: 13376 - DNA, 388 bp, Homo sapiens
aggtactttttttttttttttttttttttcttttcttttttttttaacttgtttacattttttttaaagatggagaggctaacaaactttgcaacctttccaggtaaggattcatgagacctgagcagccagccagcccctgaaatggttggaacaagagaaagaagaagagcttgacagataccctgcctgggctggcagctagctgcaccacaagtctggccaggtgacaacgggcacatctcccttcattaccccaagtgccttttcttccccttcttgggaaaaatgggagatatggctcgagaaaggtttttttcaggctttatcccaagagaaaagccttctttcagccttaacctaaggccttgtataaaaggggccctac

SEQ ID NO: 13377 - DNA, 445 bp, Homo sapiens
ccgggcaggtacttttttttttttttttttttttttttctttttaaataacaaatttatttttcacagttctggaggttgccccaaaaagcttttattatctaaattagggttaatgcacttttaaatcataatgttaacattttttttttttaataaagacagaatttagccttgttgcccaggcttgaccttgaattccttgagctcaaagtgatccgctccacacttagctcttcaattattgcttgtggatttacaaggctatgtagcctaccattgctccatgccctacgattaaacattttttttttttgaatgaaattttccttctcttaaaacccaattcccaaaggttagaaaaggtgtgggctattttataacagtgtcctctatttattttatttttatctttttttatttgtatattatattatctacccatg

SEQ ID NO: 13378 - DNA, 395 bp, Homo sapiens
  misc_feature 311: n = A,T,C or G
ccgggcaggtactatgtcgattcgacagaacattcagaagattctcggccttgccccttcacgagccgccaccaagcaggcaggtggatttcttggcccaccacctccttctgggaagttctcttgaactcaagaactctttattttctatcattctttctagacacacacacatcagattggcaactgttttgtagcaagagccataggtagccttactacttgggcctctttctagttttgaattatttctaagccttttgggtatgattagagtgaaaatggcagcccagcaaaccttgatagtgctntttggttccttagattgatttttaatcaaattaagttggattggattagtttaagttttcaggttaatggtttatgttaatgat

SEQ ID NO: 13379 - DNA, 362 bp, Homo sapiens
aggtaccatcctccaaaagaagtcaattttactgtataataacttttaaaaacaagtatacattttttttaaagatggagaggctaacaaactttgcaacctttccaggtaaggattcatgagacctgagcagccagccagccctgaaatggttggaacaagagaaagaagaagagctcgacagataccctgcctgggctggcagctagctgcaccacaagctggccagctgacagcgggcacatcccttcatcacccagtgcctttcttccctcttgtgaaaatggagatatgctgagaaggtttcttcagctcatccagagaaagcttcttcagctaactaggctgtagaaagggcctaa

SEQ ID NO: 13380 - DNA, 370 bp, Homo sapiens
aggtactaggaaggcagacggctcgggacttgcccagcatcctcaagctggcaccataccagcgtgactagagtcacctcccttggctccttgtccactgccctttgcatctcatgcgggtctccagaagaccccgctcctgctgtgcaggctcccacgcataccttagacactgctgtggtgttgggtggccacgtgacccacacaggccttttctagttcaccagttttctgcaaggatgctggttagggagtgtctgcaggaggagcaagtctgaaaccaaatctaggaaacataggaaacgagccaggcacagggctggtgggccatcagggaccaccctttgggttgatattttgcttaatctgc

SEQ ID NO: 13381 - DNA, 464 bp, Homo sapiens
aggtacgcgggggggcatcacggacctaccaatatgtgatgtcacccctggtggcccagctgtgtcatggagaaactccaactgggcccaaagattctgcagcgggaaaatccaaggcttatttatgccatgctagatggatttggccaatctaagaatcttattgtcggttagatggcccacgatatcctactatttttggctttggtcaggatgtttttctaaaaaaaattggaaagaaattggtggagtaatcctttgttgcaccccgcttgagaatcttcctgggcttgacttaagcatggatgggtgagccctcaatatggtagcaccctgggggcacttaataaactgggagttctttttttgtacaacgacaaatacattctcctgtgctaaagtggatccttgggtttattttcgcttgccactaatttttatgcttggtaatgagaaatcctcac

SEQ ID NO: 13382 - DNA, 382 bp, Homo sapiens
aggtacagtagtgcactcttggctcactgtagcctcgacctccggggctcaagtgatcctcctgccttagccccacaagtagtgggactataggcacacaccaccatgcccatctaagtttttgtattttatgtagagaccaggtttcaccatgttgcccaggctgatcttgacctcctgagctcaagtgatctgcccacctcggactcccaaaatgctgggattataggcgtaaaccaccatgcctggccttaaatcaactttagagtcaacatctcttatcactggagcttctagagaaactccatcacgtggtgctctctttcctgatgtgttgtgcccaaatagcttgttctcattagatgacttatttgctatgata

SEQ ID NO: 13383 - DNA, 386 bp, Homo sapiens
aggtacttttttttttttttttttttttttttttagcagattgaacgcctttatttttctcaaatataaaatcagagtctcctgaggcagcacatgaactccagagagagaatcaacaacaagaatcacattgctaaaaagaacaggccttatttcttaattccagaattgcttcaatagttattctctgaggctccagtgtcttttctgtccaagctactgtcaggcaagtgcccaaaagcaccactcatcacatgtgcgtaataccgaagaatgtatacaggtttcttttgtgttccattgctttttagtctaaatttgcattgcattggcttttcaatattggttccattaggagaaaattattattgtttaagagaaaaagc

SEQ ID NO: 13384 - DNA, 374 bp, Homo sapiens
ccgggcaggtacagcactgtaggcaagtaaacgaaaccaaaggctggctcccctggccgaggcctgggactgatgcaagacagccagccagtcacctccgcctcccatgaacctcttggaaaacttctcctgtcccacttctgccaccctccagctccttgagagagccagagttgagaagaaaatgagcctgaagttgaaagggaaagttcttgcctgaaacagtgctgggaataagtccagaccatttccctcaagagccacctcttcactccttaagccagaggacaccacaaagacacagtttaatggcctctcatgccactcctcaggtggcttgtgagggcagccagtgagggactgcaggatttcag

SEQ ID NO: 13385 - DNA, 398 bp, Homo sapiens
aggtactttttttttttttttttttttttttttagagatggggtcttgctgttttgcccaggctgatcttgaactcctggcctgaagcaatcctcctgtataggcctcccaaaatgctgggattataggcatgagctactgcaccctgccttttgtttttaagattgatgcctaatgctaacagaataagctattagccacatttctacaaaggtgatttttaagtcaggtttattctctaaaaatgagaggcatttaaaaacaatagatagtttctttaacaacaatcaaaactaataaatttaaaattttttttgcctggtttacttttatgaattagggttagaaagggcaaacattttaaattttttattggctttttttttctattggatttt

SEQ ID NO: 13386 - DNA, 375 bp, Homo sapiens
ccgggcaggtaccaaattttgtaacataaaaaaatactaaatgatcttaaagcttcctaaattgtgaaaagggtatgtgctaacatctcagaactttagacctgcttgttgtcatctttaccgatctctgatgataaatgcagaagggatctgagagtttttaaagcaagtagagtcaatcagagttttgaacatcatagtaatacttccgtgattcagagttagatcatataaatcaaagtaacaatttggattttttttaaacaacaatatcataactgtcataaaacagatggtccaaccccaggagcagataataacttgggcagcttctgtggggaacaaagacggggaaaacaactgttctaactgccc

SEQ ID NO: 13387 - DNA, 408 bp, Homo sapiens
ccgggcaggtacaggcatatgctcttcagcaaaaatggatttggccgggcgcagtggctcagcctgtaatcccagcactttgggaagctgaggcaggcagatcgcttgaggtcaggagttccagaccagcctggccaacttgatggagccccatctctgctaaatgcaagaattattagctaggcatggtggcgggttcctgtagtcccagctgcttgggaggctgaggcagccagaatttcttgaacccaagaggccggaggtttgcaattgagccaagaatcgtcgccattggcacttatagacctggtgtgaacaaggaggcaaaaacttccattctcaaaaaaaggaaaaaaaaagaaaaaagttaggattggggcaacaagtgggcctcaatggcctggttaa

SEQ ID NO: 13388 - DNA, 388 bp, Homo sapiens
ccgggcaggtacaaagagtagctgccccttctcagggcagatgatgctttgagaacatactttggccattacccccagctttgaggaaaatgggctttggatgattattttatgttttagggacccccaacctcaggcaattcctaccttttaacctgaccctgcccccacttgccataaaacttagctaagttttgttttgtttttcagcgttaatgtaaaggggcagcagtgccaaaatataatcagagataaagcttaggtcaaagttcatagagttcccatgaactatatgactggccacacaggatcttttgtatttaaggattctgagattttgcttgagcaggattagataaggctgttctttaaatggctgaaatggaac

SEQ ID NO: 13389 - DNA, 390 bp, Homo sapiens
aggtacagttttatgtgcttaattaaagactgtaaaacgtaaaggatcattctgactttttttatgagttttttttttcttttcccctgtctaaattgtgtgtgggcttccccagttttaaactcctatctttttctttagtgataccttacttgataatggacttgggaataggtttaacccagtttgcattctccaaatgtttccagtgatatgttttcctgggaaaagcaaatctgcctgtaataaatatttttaatctaaataaccaaatctgggtgcccaactttttgttgggatttatgctgctagtaatacattccataatatacttttgaaaagaaaaattaccattgtgtattgtgcttgtgcattaacttgtccttttct

SEQ ID NO: 13390 - DNA, 406 bp, Homo sapiens
ccgggcaggtactagggcaggtggagttggcatgaacttaacagcagcagatactgtgatttttgttgacagtgactttaatcctcagaacgacttgcaagcagctgccagggctcatcgcattggccaaaacaagtctgttaaagttattcggctgattggtcgagacactgtggaagaaatagtctataggaaagcagcctccaaactgcagctcaccaacatgatcatagaaggaggccattttactctgggtagcccagaaaccctgctgccgatgcttgaccctccagtttgaggtgaggattactcaagattttgggtttgggataaaaactgcctgggccttctggagggggatgcacccatgggaattgaaataagaccctgggaggtccattcctgg

SEQ ID NO: 13391 - DNA, 419 bp, Homo sapiens
ccgggcaggtacttttttttttttttttttttttttatttatttattttctgcggagatctgggagtctctagaccgagaataaaaatggtcaatatttaatgacagtatcaaatgcccaacatttttccaggggcttttcatggataatctcataggaggttcattccaggcctatgggggagttattgttattattcccatgatgagaaaatcccaattgagaagaatgcctaaggcgttaagatggcaatgaatgggaactagggcttttgtaagccagagtgtgcctataatggccccaattggctgggcccttttttcatttaagttgcccccaaaaagaggcggcaaatttgttaacctgttgaaaccctttaaacattttttgaaaattttgggtggaaaaaatccctatgg

SEQ ID NO: 13392 - DNA, 390 bp, Homo sapiens
aggtactttctccttgctgtttttttttttttaagacattcctcccagaatactccagggggcagtgttttataacacattttccccactgggtgattgaaggatggaggatttttgaaaatttgacagctacatgaaacatgagaaaacattttcctcacttctgaagtcggtttgcagctggtaacttgttcatccagaaaacattctaaagcaatgagactttgtgagctgtgcttacagtttgggagaatcatgaagattctttctatattttgcatttacttcccagtgcttcatagcctgcatttttgtttgtaactaaagacagaaagaaatttcgtaaatccttggaaattgaaaaaaaaaaaaattgggttttttaaagaa

SEQ ID NO: 13393 - DNA, 379 bp, Homo sapiens
aggtacgatcttggctcactgcaacctctccctcccgggttcaagtgattctcgtgcctcagcctcttgagtagctgggattacaggcgcgtgccactgcgtccggctaatttttgtatttttagtagagatggggtttcaccatgttggccaggctgatctcaaactcctgacctcatgtggtccacccaccttggcctcccaaagtgctgggattacaggcgtgagccaccacgctcagcctacaagcaattttttaaaaactgacacctattactgataaaattctctgtttaaaatcctatttactattttaaagataagtattagttttttttaaatacaataattctgttattgataaaatttaaggcatttt

SEQ ID NO: 13394 - DNA, 379 bp, Homo sapiens
aggtacatacaaacaatgaaaacaaatcacatccttaggttccatgattaccgagatgatttcccctgccctaagtgctttattatatttcttaaaaaatataggagcagcagcttatcacaagtctccacaagtgcattaatgatggaatcaaaacaacacaacagattcataaggatgagagaactgcagaacaaccagaagtcagttttatgcttcttcttgttctggataattcagaattttgcggtgtgcctgtcgtaaatattgctgctgtttgaagtaaactttaaatgctccttttatggcaacaaacgcaattccaccctaaaataaaaaggaaaattagctttttataatgcagatttagagaaacaga

SEQ ID NO: 13395 - DNA, 378 bp, Homo sapiens
ccgggcaggtacagcaaatgtgccacttgaatatctagtatgaagctggtaatgaagaaattgccatttctgaagcagatatgaaatatgatctgcttaattgttaaggcaactgacctttcaaaagtgcagagtcttattaaaagaggggaggggtagaagcagaataatagtcatatgtctaacctgccccagttaactcctcttgttaaattataagccagttattttttttagatagtatttttgtcacttggataatcacaggaaatatataagaaaagagcttggactaacttgagaagttggacatggaaagcaagaccaagttccagttgggtttaattttccctcttggttattttcggacacaaaggg

SEQ ID NO: 13396 - DNA, 384 bp, Homo sapiens
ccgggcaggtacatgggactacaggcacgccccaccatgcccagctcatttttgtattttagtagagacagggtttcaccatgttggccaggatgatcttgatctcttgacctcatgatccgcccgtcttggcctcccaaagtgctgggatcacaggcgtgagccaccacacctggccctctatttattctctttaaagagagagaaaactatgagaggccaaaattatttaattaaatctttaccttagcacaagggaaaaaaatggaatttgcctaatataggtgatgaagcatacacaatgaatagaaacaatcacattttagtaaaaggcaaaaattttgagacttataagctatatggtagcttatttttgggtggggg

SEQ ID NO: 13397 - DNA, 379 bp, Homo sapiens
  misc_feature 322: n = A,T,C or G
ccgggcaggtaccctgtctcgttgaatttttacaaaaaactgaaagagttagttttgtgttattactacctccatctcaaagatgagtcttggaaagcttaagtaactttaggtcacattgtaatcagtggcagaactgggacttaagaacataattcatgactgcattttcttttctttctttctctttctttctctctctctcttttttttttttttaaagagatagcatctcactcactatgttgcccagactggtcttgaactcttgggctcaagcaattcttccacctccgcctcccaaagtgttagggattatagnggcatgagccctcatggcctggccccttgcattttctatttaaggtgatcttgaagt

SEQ ID NO: 13398 - DNA, 373 bp, Homo sapiens
ccgggcaggtactatatggacaccaacatggagcagaaaatgagggcagcagtgtccaatctcattccaggtgagaagttgcacagtgtccaataggtgcatacatctccttagtaagtagttgtgattaacaatgaaatagaaatgaaaaatatatttttttatttatgtgtattatatttttcaagcagctaataagttggtaggacataatatttaattcgttggggacctaattatttataaattgaatggttagatatttcttttggcctaagccaccatgaaaaaatcactgaggcgctaagggaaacatgaactaagaagcccttctgagtctctgttttctcaactgtaagatgaagaaacctgc

SEQ ID NO: 13399 - DNA, 398 bp, Homo sapiens
aggtacggaaacaaaagagataataaactaatagttatttaatatgctgtaacaacaaattagaaacattgagaattaaagtgtgttttctttgtaacaaacttatcaagagtagtttgaacaagggttgccttcttctggtataatttagatacatatcagagcaaacatcttttctgtggctttgcaagttgtcatactgtattttgtttggatcagcttccaacattttatcttttatgctttcagtattgtaaaatacctctcagttttctttagcatgcagattttttttttttggttagcgtctttttcctctaggaacgttgatcatttctttttcattaacctcccaactttttcttcaattggctaaatttgggccttctacaccattt

SEQ ID NO: 13400 - DNA, 396 bp, Homo sapiens
ccgggcaggtacacggattttagattctactaatccaacccactctagatggttttcttctgttgatgcgctggcagtcaatactatataatgtctatacttttgaaagaaattcggtggctcaagtagtttggaccaatctgactttccttgaagaatttcatctgtgactgcaagaccttgtttaaattcttctaccattactgttcgagttgatgtggacacattatacgtagaattctgttgtgggtaggcaggggtgattatgggcatgagatgatacctaatctgatggaatttaccccgaggaatcccaggacagggcaaaattcaaaattgcctttctttctgggttgctttcagccagccacagggattttgggccattccccactc

SEQ ID NO: 13401 - DNA, 429 bp, Homo sapiens
aggtacctttttttttttttttttttttttttttttgggtttaaaaaaaaaaaaaaaaaaaaaaaaaaattagctattctggtggatgtgtaatagtatctcattgtgggtttggttttcatttccctagtgactaatgatgttgaatgtcttctcagtgcctattagttgtgttacttattcaaaaatcttctgtgaaaaacctgaccttgggaaggtaaaatcttttgtcaatttgtaatttaaaaaaacatatttttacaatgggtcaaaggagttctttatattttctggataccagtcttacgtgagatatgtttttgtgagtttttttttccaacttattcattttgtcttacctcattggctttaaaggttttcttttacaaaaaaaattttaactttatgatgaaaattttacaatttttg

SEQ ID NO: 13402 - DNA, 387 bp, Homo sapiens
ccgggcaggtacagtagtgcactcttggctcactgtagcctcgacctccggggctcaagtgatcctcctgccttagccccacaagtagtgggactataggcacacagcaccatgcccatctaagtttttgtattttatgtagagacaaggtttcaccatgttgcccaggctgatcttgagctcctgagctcaagtgatctgcccaccttggactcccaaaatgctgggattataggcgtaaaccaccatgcctggccttaaatcaactttagagtcaacatctcttatcactggagcttctggagaaactccatcacgtgggtgcttctctttcctgaatgtgttgggccccaaatagccttggttctcatcaggatgaacttattt

SEQ ID NO: 13403 - DNA, 387 bp, Homo sapiens
aggtacgcggggctctttctgatctctttttcatgctcctccttgctccaaagaaaagccggatggcagaagagcccagaacctattggtgagttccacgaactgacaaaatcaagtcacggcgcctacaaagatgaggggcagattctggctgccttttaatttcgtccttcacctgatatctgtgccagagaatgataaaaatcataataaaggaaataatggaagaggagacttatgttactggggacatctaacataattattttcctgattcagtggcatggttcagtcttccaggagttctgctacagagaagagagtaacccccatccatcatggccaaagcacccagtcaggctccgctctggatccagcccgacaaat

SEQ ID NO: 13404 - DNA, 340 bp, Homo sapiens
aggtacctgactcatcaactcatctgtcgcaggtgctcagtcgaaatttgttaaataaatggaggcgcttagttaagtttgcctttttcttttgtagcaatgtgaaagctaagggtggaagtctagagtgaagctgagttttcagcttgggcagaggcttaaggaataaaagatggaagagtaattaaggagtgggtcgtgctgtgggaagtgctgtgtcaagacacctgaggatggaattggtagccctctgttttgggactggttcagatggtgttttgggttcctttctatgacctttatctctgaaacttgattgtcttaaaatgtattttgtggg

SEQ ID NO: 13405 - DNA, 328 bp, Homo sapiens
  misc_feature 80, 85, 86, 107, 109, 110, 140, 147, 156: n = A,T,C or G
ccgggcaggtactttttttttttttttttttgaacatattataattatttcaaagtcccttgttaattcaaacatctggnatcanncttgagggtctcctttcccgntnnatctgctttcttccatttttttaagctaangtccccntgcctcttnggccatagcttatttttaaattggaattgaatagaacatttggttatttaaaaacctgtaagggattctaaaccggaaggtttaatttccccccaaaaaaggaccctttttttttttttttttttttttggggagaaaagggataaaaaatttttttacttccaaaaggggt

SEQ ID NO: 13406 - DNA, 342 bp, Homo sapiens
ccgggcaggtacctcatcaatatgtgcatttattatttgccaattaaaataatataaaactctttaaaaattaaaaaccatatatttccctagtatttctgggatgatttttttttctcaatgacttttgagaatgcttttgctttgttctcaaacctttgataatctccatcattactggttgggtatcccttatctgaaatgcatgggaccagaagtgtttcagatctcagattatttcatatttgaaaatatttccatacagataatgaaatatcttaataatggaaaccaagtataaacaggaattcatttatgtttcatacacaccttatgcatgta

SEQ ID NO: 13407 - DNA, 324 bp, Homo sapiens
ccgggcaggtacttttttttttttttttttttttttacaattaactaaacttttttttaaattaactaaagttggtatttcactaggacgatttagcagatgaaatgggttttaagtttagaacaccatttcttcttccttattacatttccctttttaatgttagccctctacaaacacacacatatacacacacacacacacacacactctgcatcaaaaaagccttcctacattaatacttgagcatgataaccttacaatgaaaggtaaatcattagttgaatcatgaaacattttcttccccttgtggagaaaaatcaa

SEQ ID NO: 13408 - DNA, 344 bp, Homo sapiens
ccgggcaggtacctttgtctgaagcctgtggactgtgcggttgttggtcaaggccacattagtttattgttaagtgcaaggtttctggtaacagaaataaagaattcaattgattcatcatcaagaccaaatatatttactaaagatctaccttaaattcattttttagcaggtattatggcattgtggttaagaatttacatttgtgaacatttaccagctgatgaccgaggtgagcttctgtttcctcctgcataaacttgagattataaaaatcccctagttggctgggcacagtggctcacacctgtaatcccagcactttgggaggccgaggcaggcat

SEQ ID NO: 13409 - DNA, 340 bp, Homo sapiens
aggtacttttttttttttttttttttttttttgtttctgttgagtgtgggtttagtaatggggtttgtggggttttcttctaagccttctcctatttatgggggtttagtattgattgttagcggtgtggtcgggtgtgttattattctgaattctgggggaggttatatgggtttaatagatgactactcaaaaccatgccgaatactggaacctccctactcctcctagacctaacctgactagaaaagctcttacctaaaacaatttcacagcaccaaatctccacctccatcatcacctcaacccaaaaaggcataattaaactttacttcctctc

SEQ ID NO: 13410 - DNA, 345 bp, Homo sapiens
aggtacttcccattgtaaatcacatttttagatagtccagtggccaaagcccccagacgaacaaaaacactcgtatcagccaagacatgccagaggcctagtgattgtttcccagtagctgagggcagaagccagacctctttcaataaggttgatctttcactgtattaacactgtatataaaggacttttataaaagcttgtagttatggtgttattgtcatcatccagtttaatgccctcttttttccagtaagaaaagaaaggtctgggataatcatgttaattgatttgtttacattttcattttaattagtagcacaactgagagtgaaaatggaaccc

SEQ ID NO: 13411 - DNA, 494 bp, Homo sapiens
ccgggcaggtacaatttttttaacaggagaaagtttataaactagagctcaggggggaaaaaaagccgagagagaaaggcactctggacgctaatgagtggggacggtggtggaaatgcctttctgatgtgcatgtatttgatgtacttgacttgtacttataactatatttatataactttggtgtgaagaaaatattgattttaactgtaatattaactttatataattggaattttcatatagatgattatagttctattcattgtagataataagtttttcaacatataatttttagtttttcgaatatttcttaattagtaatatttgtttttgtgtattatttgtagattatcaaaatttctttgttttttacaatttgtataaatttttgttaatttttatcaattttttcagtttttttatcatttatacttttgttaaaattctctgtctattgttatcaatttttatttaatttaaaaattttg

SEQ ID NO: 13412 - DNA, 412 bp, Homo sapiens
  misc_feature 44: n = A,T,C or G
aggtacacgcagccctaacacatcaaatattactagctaacaantgcacagtggaggctgctgtcagactcgtagcatacacgtgcatagttcctagctaacgtcacatgccacatatcaaccaccttctgcctgcttttttgagggagggatcaacaagcctactgggatacacaagtgctgcaagcgacatacaaggctctaggcataacttaaccctacaggaagctccatatccattctctaggacctggctcactcactgagagcatgggaaggtctcaaatgagacaaagctacactttaataggtcgttaaagaggaaccacaacctcttgacttgatcaggtgaaaagaaactcgaactccataaccacccgcatgttgcaatgttcttcagatgaatgccgcg

SEQ ID NO: 13413 - DNA, 403 bp, Homo sapiens
ccgggcaggtaccaggaacagtcaaagtcactgaaatgcttggtgagacatatgatcatttgctttctgcaataattgccatagacttatttcttagtccccctaccccaaatgctaaattgaaaccctacctttttttccagaatattcctgattatgaacttgatgaaagataccatgaaggtatcttttgaaggcaaggtggcgtcactcagacttaccataccaatcaaaggaaaaccattcccaatatgtaaatggaccaaggaaggccaggatattaactatgcgttgccatgatttgcgaccatttgaaaacacaccacttgagctttggtgattcaaaagaaatcagtacagggggtgatttctgggcactttatgaaccctggtttcttgggac

SEQ ID NO: 13414 - DNA, 381 bp, Homo sapiens
ccgggcaggtacatatcaagcaattcagctttttcttgtgatgtcataactttccctgcttcttggggagcagttccagcatcactaatagtgctttgtttgggccacttgttatttaaggtttataataatcgcactaaacacaatgaaaaacaaaggagaacattgagagatcactttaactttttataatcagtttatgtgtattttatggtagtaaatgataaaatagctagtatctacatacagtttatacatttgtggcatacctttctcttaatttttaaggtatttttaggctacttggctcatctgagtttttcaaagtgttgcgagtctccaaaaacttctcagtgggtttactgaaaatttatgtgtcag

SEQ ID NO: 13415 - DNA, 385 bp, Homo sapiens
aggtactaaaacaacacatacctgttaaaagtgtcaggttttaaccaagcgattttccattaaatattctcccagatgctctggaagttttttcgtgtatctaacaaaaaaagtaaatttcaaacgatgcaacagttcctattcctggtaatcaacaggtttactcctttagtttggaaactaagcttaactaagctcttacctttgcatcttcagagctgctccactgtgccacttaagacagcgccattgttcctgcgggaaatcggtatttaagcattctcgcagaaatgtcacactccaagggcgtttttccacacaaaacccttcccctttattaatcccaattgcacacaaacgcccgtcttcgaacagcttagtttca

SEQ ID NO: 13416 - DNA, 407 bp, Homo sapiens
ccgggcaggtactggctgcaaatataccatgaggtgtgtcaactgtataattccaggctcgtaggaaatatccatcctctgtgaacactaatatctttgggatgttatcccctctctgaaggtatacaaaaaataacttcttaggatcagccttaaaggaaaggtaatctgtatcttggcgaagaaaaaaaataactgagaattttactacaaaaaccactttcaaaatctaacatatctttcacattcgaaaccaaaatacttgagaccaactcaaaaataaattgcacaattagcatgatataaacgcatatggttcagttactacagcaagacaggaagggctgttacttcctttggtgttcataatttttttaaattctctatttacttaacttgacctaatg

SEQ ID NO: 13417 - DNA, 383 bp, Homo sapiens
ccgggcaggtactggacttgcctaatttctaggcatggagttggggcttgtaacaatggtgggagatgggcagtgctttgggaatgtagctgaccactgcatgggtgctaactagcccagggatcttaaagaatttgtgtaggccatgaggatccactccagccactgaatagtcatagaattgaatctaggacatcaccgtatgctactaccatgcagttttatcccttctaagaatccaaatgccctagtttaatttctaaatttttggtttgattattttcactaaagcaacatgtttagtggactggtgaggggaagctggaattcattggctgggtccttaatatttggaatatttctttatagggctccatgtgggc

SEQ ID NO: 13418 - DNA, 382 bp, Homo sapiens
aggtaccttctctaattccaatagatgaaaccttaatacttgtatggcttgaatcatcaagttatccagttctggattagaagaaaatagaggtttttctgcgcgaatctgtttggcgaacacggctatatcttcattgaatgactctgacgagcagacgtccccgcccgccacccccggctcgcggggggtacagcccaagacgttatgaatacccagggtttagcctgatttggtaaaagtgattgagataaaatgtgaacaacaattgtgcatgacatttacttggcattttccagtttccagggggcctgttctcggtagctgtcttcacgtgaaagcactttgaactcgcggagggtaacaggacagtgggtaactg

SEQ ID NO: 13419 - DNA, 393 bp, Homo sapiens
aggtacatttgcttttaaaccaacagatactgggaagggggcactgaatacttacacactgatagaactgcccacgctgacctccagtcacaaagcgcttcccatctggattccaagccacacttgtcaaactgtcttcatgagactggctcatttttgtccttagttctcctgtctataaggaaataaaactgtaaatgagaccttcaagatacccctctaaaggaaatatatgagaaaaaaaaaaataactgggatgtctggctggttatcccagttgatttttaaggggagtaatgaatttaagtgacccctcaccaaaataaagagacaatcagccctcattaatgagaaatttaaacaaactttgccgtaaaaaaccccttgaacctg

SEQ ID NO: 13420 - DNA, 499 bp, Homo sapiens
aggtacatgtcagtgaatcaaatatctttgtgtttaagcacagtaagactgtcattgaatgtgataatgctgcctaaaataaaacttttaagatgtgaagatccatggtagatttccgtgatgctccctctaatattaaacctgtttaaagaagaccacagttaattaccatatgatgcaaagtttttttttcaatgcaccaggcaatttactttgttattatttctaatcagccacaaaataatttattatacttagttggatctgggctaaaaaatataatggtaaaccccaaataaggttttattttgggtttaccttgggtctttttgtgttaagaattccccattgtttattaactcccccaataatttcaaccatattcaacccttggtaaaaccctttcaggaaaatggtaaaattcttttatttttggggaaaaattaaaagttagattttaccttttaaaaaattggtaggggttccaataacctggggg

SEQ ID NO: 13421 - DNA, 369 bp, Homo sapiens
  misc_feature 302: n = A,T,C or G
ccgggcaggtaccaatgaaaaaactcttctcagtcattaaaacatgagtaacatgacaactacaaagctttctcaggagtaataatagaatggataagatttagagccaaacaagtgactatggggactcacccattttctatttatattgtatagaactcttaaaacaaagcaaaataaaacaaaacctgatttactctttaattcccagaaaaagctttccttttcttccactcatttgtatttccttaaacagctgtaaatcagcttcttgtattgtgctgacagagaaaataaacagntgattgccattactgaaatttaaagttaaatattaggtatttacatgagcttttatgaagaaatggg

SEQ ID NO: 13422 - DNA, 370 bp, Homo sapiens
aggtactcctggctggccccaggcagtctaatgatagagacagctgggtgaccacgggtgttctaatgggagagactcctggtcaaccccaggcagtctaattattaaagacacctgggctaccccagacattctaatgggagcaactcccgaccaaccccaggcagtctaatgatagagacatgtgggccatcacaagaattctaatggaagaggttcctggctgaccccaggagagacaccattctaatgggagagactctgggccgtttccaggctgtctaatgatagagaaacctgggcgactgcaggcattttaatgagagcggctcctgtccgaacaccagcagtctaatgatagagacacctg

SEQ ID NO: 13423 - DNA, 370 bp, Homo sapiens
ccgggcaggtacctggctcagcacgaacaccttctgctcaacacaagcattgcatcgcctgctgactcgtcagagttgctcatggaggtgcacggaaatgggaagaggcccagtccagagaggtgagcagatgagctttgctgtccttgccttcctggaaccgcactggtcctcccctttgcttataaaagagagagaatttgattgctgtggttgtaatgtctcaaactttttttgagacaaggcctggctctgtcgcccagactggagcgcagtggtgcaatctttgctccctgcagcctccatctcctgggctcaagcgatcctttcacctcagcctcctgagtatttgggattacagggcacgtgc

SEQ ID NO: 13424 - DNA, 403 bp, Homo sapiens
aggtacgatcttggctcactgcaacctctccctcccgggttcaagtgattctcgtgcctcagcctcttgagtagctgggattacaggcgcgtgccactgcgtccggctaatttttgtatttttagtagagatggggtttcaaccatgttggccaggctgatctcaaactcctgacctcatgtggtccacccaccttggcctcccaaaaagctggaattacaggcgaaaaccacctggtctcagcctacaagcaattttttaaaaactgatcacctatttactggataaaattcatctgtttaaaaatcctatttaactaatttttaaagattaaagtattaggtttttttttttaaattacaataaatttctggttattttgatacaaaattcaaggccattg

SEQ ID NO: 13425 - DNA, 579 bp, Homo sapiens
aggtacccccgaatctaaaataaaagcagaaattatatgaaaaaactggggtgggagttggaaggaactttagatatgtaataaattttgtattgaataactgataattttctcattgcctttctattaaaaaaagtatatttatcccttcaaagaatatccctcaaaaattcttttcacctttaagggaattgtaaatagttgtcattctagaaattttccaacgtataggttattgtggcctattaatcataccctttgacaaagattattatctaaaatatatgttgtgtaatttattatcacaatatatattctttttaaataaaccatctctctcaactcatgaatgaagttgtatatactctctatacatataacctttctatttagtcttaattataactctattatatatagtaaatccttttatctataattctcatatttctatatacataaattcttctcggagatcggtccatttactatggataaaaaaatagcttcctaatatagatctttatttgtattataaattcataacaaacatctatatatatgtagctatatctggtc

SEQ ID NO: 13426 - DNA, 387 bp, Homo sapiens
aggtacctgcacaattattacactatgatttgtttgatggatagttcatgtctgctacttcctgtggcacagatatagcttcattaattacctattgatcatctccatcagtcccaaatccagctgctgcagcgcggtctggaacatcaggctcatccccgcgtacagagtgtaaacacgcattctttctgaggcttccggcgctgatgcgaatacagctcacagagaaacgcatgtgctattggagaacagggctttgtggagaactaaaggcagggatttgatttcacagggaggctctaatctctgtgatttacattgggtccttcaaaacctcccaacccaaagtgaagaaaaagcggcattgcagctgaaatggagcatccg

SEQ ID NO: 13427 - DNA, 372 bp, Homo sapiens
aggtacgtaacaggacatcaataaatattagttgaatggaagattaaatcaacaaaatgggtgatggatctctgcagtaagtggaagagttcttcatggcccccaaggttatatccatctagaacttcagcacgtaatttcatttggaaaatagggcctttgcggatataagttaggtaaaactgaagatgagatcatactggattaggatgggatctaaatccaatgaaaatgtcttcataaaaaacaggaaagaacccatagaaacacaaggaagaaggtcatgtgaagatggaggcagagattggagggatgcaaccaccggcccaggaatgccagcagccacccagaagctggaaagaaatgagggaa

SEQ ID NO: 13428 - DNA, 385 bp, Homo sapiens
catcttgggtcatcgatgagcctcgccctgtgcctggtcccgcttgtgagggaaggacattagaaaatgaattgatgtgttccttaaaggatgggcaggaaaacagatcctgttgtggatatttatttgaacgggaattaccagattttaaaattgaagtccccaaagtgggcctttcccaatgagaggaaaacagacgagaaaatcttgatggcttcacaagacatgcaacaaacaaaatggaatactgtgatgacatgaggcagccaagctggggaggagataaccacggggcagagggtcaggattctggccctgctgcctaaactgtgcgttcataaccaaatcatttcatatttctaaccctcaaaacaaagctgttgtt

SEQ ID NO: 13429 - DNA, 388 bp, Homo sapiens
aggtacatggtggatgattttaaatcaccctagtgtgctgagaccttgagaataaagtgtgtgattggtttcatacttgaagacggatataaaggaagaatatttcctttatgtgtttctccagaatggtgcctgtttctctctggggcttaaaagccttgggaatgggaggttggatggtttaaagtgtgtttcttaccgccctcctttttcctttaatcttatttttgatgaacacatatataggagaacatctatcctatgaataagaacctggtcatgctttactcctgtattgttattttgttcatttccaattgattctctacttttcccttttttgtattatgtgactaattagttggcatattgttaaaagtctctcaaa

SEQ ID NO: 13430 - DNA, 405 bp, Homo sapiens
aggtacttttttttttttttttttttttttttggaatgtaaattgtttttaatatatttaagagcacacagaagtcttgatttataaaaaaataaatatataacatgacaaatttactgatgatcctggagctctgaggtcaaactttttttaaatggaccagtgaaaaccttaaaacatccaatgatcctgtttaacaccacacagggagcattattccagtttgttaaaaaaaaccaaatttcctttgaaggcctctagaaccgaacaaaaattcagtctttatggcagaaagcacatccaaagctaggcaatgaagttcagcctgggccacgtgaacctttcaccagccagcctataacctatggagccaggacaggaaagcatgatccttcagctcatgac

SEQ ID NO: 13431 - DNA, 396 bp, Homo sapiens
aggtaccaaagagggcataataatcagtctcacagtagggttcaccatcctccaagtgaaaaacattgttccgaatgggctttccacaggctacacacacaaaacaggaaacatgccaagtttgtttcaacgcattgaagacttcttcaaaggatcttcctttggcatcgaccacattcaggggcaaagaatttctcatagcacagctcacaatacagggctcctttctcctctacaaatccaatgtaggccattgtatttttgcagtgagcgcagttgaattcttctgggtgccaagatttccccagtgccactaaaaatggttcctctgacagaaaaaaaagaaggccaacttagtttttgagaattaaaattttcttccccgcgtacctgccc

SEQ ID NO: 13432 - DNA, 375 bp, Homo sapiens
aggtacaagtcaaagggtcaacatgatacaaatgatcatccatagaatcaatgtttctaaatacaaagacaagaagcttagatttatctcactgttccatagaacttatacattcattgtcttctagcttgtaaaaaccaattggtggttttaataaaactggaaactgggaagattgagcaagactgctgtatagaatccaatcccaagtcatctgcccaagggtagattcagtttttctctagcgtttgataagtcaggctgatcttaaaggtagaagttggaaattttttcaaggcagtggttcttaaagcataagttcccaaaacaagcagtattgggcctcacctataaacttgtttagaaatacaaatt

SEQ ID NO: 13433 - DNA, 370 bp, Homo sapiens
catcttgggtcatcgatgagcctcgccctgtgcctggtcccgcttgtgagggaaggacattagaaaatgaattgatgtgttccttaaaggatgggcaggaaaacagatcctgttgtggatatttatttgaacgggattaccgattttgaatgggaatcccaaagtgagccttaccaatgagaggaaaacagacgagaaaatcttgatggcttcacaagacatgcaacaagcaaaatggaatactgtgatgacaggaggcagccaagctggggaggagataaccacggggcagagggtcaggattctggccctgctgcctaaactgtgcgttcataaccaaatcatttcatatttctaaccctcaaaacaa

SEQ ID NO: 13434 - DNA, 374 bp, Homo sapiens
aggtacttttttttttttttttttttttttgtagtaaaagtgatcagactgtttcctcttttaagaagaaaaagaaagcagaggtcaatattaagcttccaattaatgcttattcatcacaaatagtaagtaaataatgaccgaaaaaaattcccttagtcaccttttttgccaccttttggttttatttttaacatttttcactatgtgagatttccaagatttgttttattttctgtttccctctaactgcaatacaagctcttgtggactggaaccacacctgtcatattcatgctgaatctcacctgtcatattcactgccaaatcccacctgccataattactgccgtatcccacctgtcataatcaca

SEQ ID NO: 13435 - DNA, 544 bp, Homo sapiens
  misc_feature 263, 284, 286, 291, 318, 328, 341, 373, 384, 423, 491: n = A,T,C or G
aggtacagaaaaggtgaatctgtgttctgtatattctgcctaaggcaaagaaatgtttagctctctttaaaatagttccataattttttctaaaaagctttgcttgaaaactgtaagcttcccatatctggagcatttcactttaaaattttgggataaaaatatgttattctttctttacttgggaacatttttcatgttgtttttaggggaatttggtcctttcttaaaatttcttttcccttaaatttccaatattaagncttgtcctaaaaccacttttncncccgncaaggaaggttttaaaaaactcaattnttaaccaagnaattaattggaanaaaattaaaaaaggaaaaccctttaattttgnaattttttggnaactttttaaccttttttttaactttttggttaaaaaanaacccctttttcttgggaagggttggtttaattaaaaaccctttcaattttttaaaattccttttttnccaaggccaattttttaaccaaggttttttccaaagggagggttttttggttg

SEQ ID NO: 13436 - DNA, 378 bp, Homo sapiens
ccgggcaggtacagatctgggaactaaatattaaaaatgagtgtggctggatatatggagaatgttgggcccagaaggaaccgtagagatcagatattacaacagctttgttttgagggttagaaatatgaaatgatttggtttttaaacgcccaattttaagcagcagggcccgaatcctgaccctttgccccgtggttatctcctccccagcttggctgcctcatgtcatcacagtattccattttgtttgttgcatgtcttgtgaagccatcaagattttctcgtctgttttcctctcattggtaatgctcactttgtgacttcatttcaaatctgtaatcccgttcaaataaatatccacaacaggatctgttt

SEQ ID NO: 13437 - DNA, 381 bp, Homo sapiens
ccgggcaggtacttttcattatttaccgtttataatttggaggtaagaccattagacccaaagaacttttgtcttggtgtgttcttgtttaaatatggaatttattttacaaaatagttttgttttgtatacatgtctagtcttaaggggcaaagtgaaattttaatgagtctacagaatgttctaagtggactgggtggtgcagcagcttcctcccatcgtgatatttacaagaatgccaggtctctcttgactgataggtcaatggctgtttgatgtgcagcggccaattgtctactataactacagaatgaacctgtatttatgtgtactgctcgaactagaaaatttagccactctctgctttaaggctttggaaat

SEQ ID NO: 13438 - DNA, 579 bp, Homo sapiens
  misc_feature 352, 478: n = A,T,C or G
aggtacagtaaaaatagaatataaaaaaatgctacacatgtgtagggcagtttcattataatttgtccatctttgactgaaacattattattcagcgtatgactatatatacaagaaaacatacacacacaacacacaccccacatttcccccaccctttttgggtttattttttttttttgaagaaatggaagttttttcaaacttctttgggaaatggccccaaaaaagtccttgggaagaatggccaaaattggggccgtccggaattcctttccgggtctttccaacttgggcaaaacactttccttggccccttccccccaagggttttttcaaaaggacggaaatnttccttccttttggccccctacaaggcccccttccccaatagtttagggccttggggggcaattttaaccaagggggcaaccgggccaaccttaaccccattggtctccccggggccttaaatttnttttgtggttaattcctttttaggttaggaaggatgtggggggttttttcgccccattggtttgggccccaaggccctgggttccttcggaaaccttcctg

SEQ ID NO: 13439 - DNA, 385 bp, Homo sapiens
ccgggcaggtactccaaagattcaggtttactcacgtcatccagcagagaatggaaagtcaaatttcctgaattgctatgtgtctgggtttcatccatccgacattgaagttgacttactgaagaatggagagagaattgaaaaagggggaacctttcagacttggtctttcaccaaggaactgggtctttctatctcttgtaacttttattttttttttttttttttttttttggggcacggaagaaactgtcctcgggttggagcatgggacctttattcgttaagacatcaggctccagatatgaactttcagcagaagcgcttgccgggagcaaagggacagaaaagctgaaatgaacagtgcctggcagcaatcacagcc

SEQ ID NO: 13440 - DNA, 381 bp, Homo sapiens
aggtacacattttaaaaatactaagtatccctccattaaataagcattttctggccaccgtgaggaccatgggaaagtatactgtgtagacaacatgaacacatatgaaacaattaaagggcagtgcaaagcagaaaacaattaaagggattcaattcaacctggcgaaattcactggcctagggtttttggccaataaaaataggtaagtgtttgaactatattttcttttgatgcttttggagtggtgtttttatttcatttcttaatatatttttcaagagaaattatctaatctagtttatctaaatcttttgagacatttcctatccgccttctcccttttccctggcaaaggagctcaacctgtgaaagtgcaaa

SEQ ID NO: 13441 - DNA, 376 bp, Homo sapiens
ccgggcaggtacgcggggaggcattgaggcagccagcgcaggggcttctgctgagggggcaggcggagcttgaggaaaccgcagataagtttttttctctttgaaagatagagattaatacaactacttaaaaaatattgtcaaataggttacttagaaattggtttaccgttaagtttttaacgtaattttattagcttaagattttaagagaaaatatgaagacttagaagagtagcatgaggaaggaaaagataaaaggtttctaaaacatgacggaggttgagatgaagcttcttcatggagtaaaaaatgtatttaaaagagaattgagagaaaggactacagagccccgaattaataccaatagaagggc

SEQ ID NO: 13442 - DNA, 419 bp, Homo sapiens
ccgggcaggtacagcattattagctggggctttcactgaaaaccccagggtctctttctattgtccccatatggttggagtcacaagagtgggagagatggccaagcttctctgcagaggatcctggcaacaacctgaaacccttttggttactttccttaaggggaaaaaaaaatcaaatatttacccccacgagcttataatattacagagaactccaccatcctgccctgcaaaatatccctgggatttgacttaatacttaaagcctgctttttctagttccttggaatgaacttaggaagggaaagaaaccaaaaagccttggacctcccttgcaatcaggtgaagttctcttggccttttggatttggccaccatggaaaacccattaggggttcaccgtttaaattcccaca

SEQ ID NO: 13443 - DNA, 442 bp, Homo sapiens
aggtacaaaaagtatatgccagataaacttgcaagattggatccaagactattttgtaaggctttgtttaaagctttgggcttaaatgaaaatgactacaagtttgggttaaccaaagtattttttagacctggcaagtttttcaaaatttattcaaatcttaatttttacctgaccacttaccatagtttggttaaaagagttcaatcactggctcacatgcagttcgctggaagaaaagttcagttggtgcctcacttctcagttcatttaaaatttgaaaaaaaccaagaattataaaatatttcgagactttgaaacccttggcattttaaaaaatggccaaaaaaaaacctaatttcgcaaatgttgggccttttgccaaagtaagggagtaacaccataaaccctttcggcatttggaatgggtccttggttttag

SEQ ID NO: 13444 - DNA, 382 bp, Homo sapiens
  misc_feature 317: n = A,T,C or G
aggtactgcaccactctggaaaaaatgccttcaggttccttcccatcccccaaggcagcagcaaatccttcgtgtcgtctcctactggccaaggcagccaaagatttgaaagtctttggctcgtagatggccagatccgctagggacctttcctggttgagcttcccctggcacttaactaaattcccaatgagcgctggatacttcagtccatgttcctggctagcagctgtaattcgattaatccagagggtcctcatgttctttttcttcaggtatcgggctttggtgcatttcacaaaggctcgaatcacggnttctgaccgccaacctgtagcagcgatttttccttccccggaagtgcctggcgtgcttcagcacc

SEQ ID NO: 13445 - DNA, 333 bp, Homo sapiens
ggcattcatgacacggagctatgtgcttccttttgtgctctctgtgagactggacattcaaggggactgaaaagtaaataacaagacacaatgaatgaggaagtatcctataataaaaactttaaaaattagaataaaataaatacgaatttaaataacttgataaaagttatcaaaatttgcaaacttttagagattccttggatttataaccaaaaattgttccatgttaaaaaaaaatgcaaatcctttaaaaaagtgtaaaactaagtccaaaggaacatgcaatgatcatgattgttaaaaaaagataaataccgcaaatttttaaca

SEQ ID NO: 13446 - DNA, 398 bp, Homo sapiens
aggtacactgtgcagaataaacaaacctcagtgtaatagctcagccaagtcggttaacaaataaggaaacaacacaacaagcagcagtccctggaagaggggagggaaaatcagtattccgagttgctacaaaatacttattttaaaatggccaagtttcaccacaaaattttgaggcatgcaaataaacagaaaagtttgacacacagaaagaagggaaaagcaggcagcagaaattgtccttgaaggcccagatgtcagacttagtagacaagacagcaaagcagctattataaatatgtttcaaaggaactaaaagggctgaatttctagccactcttggaaaaaaaaaagggactaaaaggaaaaatcatgcctttaaaaatacccaaaaaatg

SEQ ID NO: 13447 - DNA, 454 bp, Homo sapiens
aggtacaaaacagccaggcaaggtggcgcacacctgtagccccagttactcaagggtcttgaggtggaagatccctcaagcccaagaggtcaaggctgcagtgagccatgatcacgccatgccatggcacttcaacctgggccagaaaagttgggaacccgtttttaaaattaaggtaaaatttttaaatttaaaacagcaaaggtgggaaacttcagccatttcaaggttaactttgtagaagcttaccccaacttgcttaaaaagcaagtggtgaatcccttttggtgcttcttaaggaattcactttttgggtattcttgcttcaattttttccctttttttggtccttacccccttattaaaaggccaacaaaaaaattcggagttgggggtttaaaaaaaagttaattgaaaaacccagccaaccttgttttcctaactttttctttag

SEQ ID NO: 13448 - DNA, 399 bp, Homo sapiens
catcttgggtcatcgatgagcctcgccctgtgcctggtcccgcttgtgagggaaggacattagaaaatgaattgatgtgttccttaaaggatgggcaggaaaacagatcctgttgtggatatttatttgaacgggattaccgaattgaaattggaatttcccaaagttgagcctttaccaatgaagaaggaaaacagaacgaagaaaattcttggatggcctttcacaaggacatgccaaccaaacaaaaatgggaatacttgtgattgacatgaagggcagccaagctgggggaggagataaccacggggcagagggtcgggattctggccctgctgcctaaactgtgcgttcataaccaaatcatttcatatttctaaccctcaaaacaagctgttg

SEQ ID NO: 13449 - DNA, 555 bp, Homo sapiens
  misc_feature 258, 313, 314, 320, 337, 342, 349, 353, 382, 431, 530, 532: n = A,T,C or G
catcttgggtcatcgatgagcctcgccctgtgcctggtcccgcttgtgagggaaggacattagaaaatgaattgatgtgttccttaaaggatgggcaggaaaacagatcctgttgtggatatttgtttgaacgggattacagattttgaaatgaaattcaccaaagtgaggccatttacccaattgagaggaaaaaccagaaccgaagaaaaaattctttgaatgggccttttcacaaagaaccattgccaaaacaanaaaaccaaaaaattgggaaaattaaccttggttgaaatggaaccaattgaagggnncaaggnccccaaaggccttgggnggggnaaggggnaagnaattaaaccccaaccgggggggtccaagnaaggggggtttcaaggggaaattttccttgggaccccccttgccttggnccctaaaaaaacttggttggccggttttccatttaaaccccaaaaatttccatttttttttattaattgtttccttaaaacccccctttcaaaaaacananaaggcttggttttgtttaaatta

SEQ ID NO: 13450 - DNA, 522 bp, Homo sapiens
  misc_feature 491, 492, 493: n = A,T,C or G
catcttgggtcatcgatgagcctcgccctgtgcctggtcccgcttgtgagggaaggacattagaaaatgaattgatgtgttccttaaaggatgggcaggaaaacagatcctgttgtggatatttatttgaacgggattaccgaatttgaaagggaaatctcaaaagtgagccttttccaatgagagggaaaacagaactagaaaaatcttgatggctttcacaaggacattgcaaccaaaaccaaaatgggaattactggtgaaatgacaattgagggcaagctcaaagccttggggggaagggaagaattaaaccccacggggggggccagacaaggggttccaaggggaaatttccttggggccccccttggccttgacccctaaaaaaacctggttggaccggttttccaatttaaaaccccaaaaaaattccatttttattccaattaattttttttcttaaaaaccccctttccaagaaagacatnnnattgcctttggtttttggttaaaattaat

SEQ ID NO: 13451 - DNA, 636 bp, Homo sapiens
  misc_feature 136, 142, 162, 306, 335, 370, 407, 452, 521, 534, 558: n = A,T,C or G
gcaatcttgcatgactacccggcgcgccggcgtcaaattggggggtcctgaaacgctgtgaccacactatcatattacagacactgaatggcttgccacccattgggtgccaattgatcagttatttttatttggncttagnctttccaaaaaattgtgggnaaccaattatttttggggcccttatattgggttggggggccaaaccctttaaaaccccttttaaattggggggcctccggttgggggttttttaacccccttacccccaagtaaggtttgggggaccttttaggggaaaccaanaattgggtttttccccccttaattggttntaattggacaccttggggggtccaacaaaagggtnaccgaaggttaaaattttccaagaaccccttggctcnataaaactccagtcaaaaaaccctttttttttcatttttaaccanattcttttgtttggggaacaacccatttttggtttattttcttaaattggttaattggaccccaacttntaggtcttttcanattcctttttggttaccccttcgngccccgccttcttagaaaactaagttggggaattcccccccccggggccttggcaggaaaattttcgaataattcaaa

SEQ ID NO: 13452 - DNA, 388 bp, Homo sapiens
aggtacccatcacgtgccagacacgttatctggagatagagatgtaaacaagacagagttcctgcctcaagcaacccaccatctagtaggcggaagacagactataaatacataatgcaagataatttctgatggtggcaagtgctcccaaagacaatatgacagttaaacaaagcaactgagtagagggagagggaaaaagcaactggggagaggaacatttatggctgagagatcaggaaaggcttctttggcgaaaagacactggagctgaagcctgaaggaagaaggctgagtggtgcggcagggctgggagttgcaggaagagctgacagcaagccccgtttgatggggggaagctggtgaaggatggcagagtccatgcagg

SEQ ID NO: 13453 - DNA, 379 bp, Homo sapiens
aggtacttgattttttatcagatggcctggaaaacccagtctcacaaaaatatgaaattatcagaaggattatagtgcaatcttatgttgaaagaatgaactacctcactagtagttcacgtgatgtctgacagatgttgagtttcattgtgtttgtgtgttcaaatttttaaatattctgagatactcttgtgaggtcactctaatgccctgggtgccttggcacagttttagaaataccagttgaaaatatttgctcaggaatatgcaactaggaaggggcagaatcagaatttaagctttcatattctagccttcagtcttgttcttcaaccatttttaggaactttcccataaggttatgttttccagcccaggc

SEQ ID NO: 13454 - DNA, 868 bp, Homo sapiens
  misc_feature 147, 153, 188, 192, 196, 200, 318, 341, 365, 455, 515, 560,591, 594, 619, 667, 845: n = A,T,C or G
aggtacttttttttttttttttttttttttttttcccagtcattgtgtcccaaatatctttaattaacctccaataatataaaagtagctttcctatgtcttatactttggtgtatagttccacaatttctcacaatgccctgcgcnttatgngaagaaaatattacccccccaagaaaatgtgggcnttanaatntttnaattaaagagggggaaaaaaaaggagagggtttttttaaaaattgtggacaccctttaacacccaaggttttccccttgggcccaatttttggccctttgggggggggaaaagaggcncctccttttataaggggaaaatnaaacaccctctttaaaccaacaanttcccaattttgggggtgttgggggaaaaaaagggggcacccaatatggtggttaaggaaaaaaaggtttttaaggtggggccaaccccnccttttttcccttttttaccaacacaaggggggggtacacaagggggataataatgaatnttcggtggataagtttttggcgacgtcgcggataacaacatgggncctaggtggtggtggataaaaaaattttggnccnccaacaaaaagttggtccttttttnaaccccaaaaaaaaaacccgccaaattttcgaaggagaaattcccttncacaattggggccgggaaacccttttcccaaccctttatattttttacccccaaaaggagaacaaccctaagggtcccaagggggggggtggtgggggtaaaaaaaaccttttgggccccccccccccccaaatttggtgaaactcttccacccaaaaatttatttaaatgtgggtgnacttttaaaccaacctttggggg

SEQ ID NO: 13455 - DNA, 386 bp, Homo sapiens
aggtacgcggggaaggatgaccggaatggagacttctcagagaatagagactgtgacaagctggaagatttggaggacaacagcacacctgaaccaaaggaaaatggggaggaaggctgtcatcaaaatggtcttgccctccctgtagtggaagaaggggaggttctctcacactctctagaagcagagcacaggttattgaaagctatgggttggcaggaatatcctgaaaatgatgagaattgccttcccctcacagaggatgagctcaaagagttccacatgaagacagagcagctgagaagaaatggctttggaaagaatggcttcttgcagagccgcagttccaagtctgttctccccttggagaagcacttgcaaagcat

SEQ ID NO: 13456 - DNA, 383 bp, Homo sapiens
ccgggcaggtacaagtgaagaaacaaggaggcacttcctgtaggagcactgatgtgccttgtccacactcccctctgagctttactggtaagagagctccgactgaacatgctgagcagttgagcacttttccatcagcaacaacagcgaggatggaaatggaaaggaaccgaactaaaacgcatttccctttgcagggcagagagctaagctcttaggaatagtgttatagaaataagcaccctaacttcaattcctgaaaatgttggttaatggagagaattttggagtttcacttaatattttcccatcggtcgccataaataagtcttcaggcgctcctagaagagtcccagcccaaggctcgattaaggaccacactg

SEQ ID NO: 13457 - DNA, 456 bp, Homo sapiens
ggcaatgacgcttatcgctatacggcgaattggtgctccaccgaggtgccggccgaggtactattcagtctttaaaaagaatgttatcctgtcattatctcatagatggaactgtaagttactaagtgaaataatccaggcacagaaagacaaattttgcatgttctcacttatttgtgaaagccaaaaattaaaacaactgaactcatggagatacagagtagaatgatggttaccacagagtagaatgatggttaccaaaggctgggaagggtaatggtggggagagaagttggaatgattaattggtaccccgaataccaggcacacaaggaggcgaaagaccacgaaccaccaccttgagcaggcccacctagccaattgggcgcattcttccagggtgccggcttccccttctgggcccttcccgcgtaccttgcccggggcggttcgatt

SEQ ID NO: 13458 - DNA, 387 bp, Homo sapiens
aggtaccaccacacccagctaattttttgtattttaagtagagatggggtttcaccatgttggctaggctggtctcgaactactgacctcaggtgatccacctgcctcatcctcccaaagtgctgggattacaggctgagccaccacgcccagccaactgctgttaatcattttagaatctaagctcccacactgatagggagaaaaggcataaaggaggagttagtgttgacatgtgtcaaatgctggtaagtcaagacttttggtaagaggaacagaccattggatttaacaacatggaagttactggtgactttgactagagctgttttgatgggatgatggatgcaaaggtctgactgcagttgacagaaggaagagtgagag

SEQ ID NO: 13459 - DNA, 399 bp, Homo sapiens
ccgggcaggtactacaataatcctcaagatactgaaagtaatgccaagtgaaagaccaagggggtgggtggagggctaatgggctggacgaaatagccacttgattgctagttcatacaagatgtggcagcaactccttttctggctggagatcttggatgtcacatcttagaatcaggtggcaaagcatctgtgaagggcaatgtggcatcccagacagtgggtggtgagatcaggaagaaaaaatggaaatcaacagatggtggatcctacagctgagaactgattcttcaatttgacgtggttggcataaacattttaaatggagcttggtaaagatcaggttattttgccattgaccaagctcttggcttttaaaaagtcctaaatttttgtttt

SEQ ID NO: 13460 - DNA, 478 bp, Homo sapiens
  misc_feature 281: n = A,T,C or G
ccgggcaggtacccctccaagccggacaacccgggcgaggacgcaccagcggaggacatggccagatactactcggcgctgcgacactacatcaacctcatcaccaggcagagatatggaaaacgatccagcccagagacacttgatttcaaaacccttttgatgtagagaaaagcacaagaaaatgtttcccagaaacttcggtctttgaagaaccctcgcaatggtggatgatggggaaaatgagtactatgcttctcctggactcattttccttattntttcaggccccaattaatttcaatccgtgtaaaaactgagaaaattccaccccaattcctaacccaattgccatgtcaagcccacctgtggctggaattttctggcaaatgttttttcccttttgttcaattcattggtattataatggtggtgttttaaaaataaaagttattcaatgccataccaataaataaaa

SEQ ID NO: 13461 - DNA, 554 bp, Homo sapiens
ccgggcaggtacataggccttcctctgtatgagagggcttctgattcttattctttcttatggcggaagagggtgttgagaggggttcccttgctgttggttctgttgaatcagtgagcattaaatctatttttgtttattctttggagacataatttccccattcttgtcaatcctaagggctttggagtcgcagatggttgtcagttctacaggctcttcttggcaaacacttacacccttccctgtggattttaaggccggaatttcttccttgtctctccagacttctctcacgaagttaagctttggtggattttattaggactacccttgtttctactcaactaccgctgggcccttaatatttaatctgggaaataatttttaatattgtgaataattgttgtgggttctttctatttctctatgtatatgggttctactaggcctgggtttcctcacttaaatttttactatggacacctttgtatatatgattaacaaccccattgttccttggggtctaactacccattaaatctttcttttct

SEQ ID NO: 13462 - DNA, 403 bp, Homo sapiens
ccgggcaggtacaagaattgctggaacctgggaggcggaggttgcagtgaaccaagattgcaccactgcactccagccggggtgacagagtgagactccgactgaaaataaataaataaataaataaataaataaataaattttatggaatggtgaagggaatggtatagaattggagagattatcttactgaacacctgtagtcccagctttctctggaagtggtcgtatttgagcaggatgtgcacaaggcaattgaaatgcccataattagtttcttagctttgaatacactattaactcactggctgaaggaggaaattttaaaaggaagcctactaaaagatttaattttaaaaaacttcaaaagcattaactaaaaaaagttaattttcctttttgt

SEQ ID NO: 13463 - DNA, 409 bp, Homo sapiens
ccgggcaggtacaccgggaccaccaaagggccatgaactctttgtcagtcaagtcccaaggtcccatagagagcagatggccactttaatgtcacctcaagcccttaggctgtttttagacatccatctccttagtggatgctttttatagacccccatccaagacctcacacatcttgtaattaaatttcatctggtagtattttgactttttttccagcctgtcaacaccttctgtgttcttacttgttgtatctcaaatatttgatacccttttcagtgttgtattaatctaaaatttgttgtttgtgtttatgttttcatgaagttactgttaaaaaatataggaagaagagaaggttaagatttgagcccttcagtgtatagttgagcttgtcctggaagacat

SEQ ID NO: 13464 - DNA, 419 bp, Homo sapiens
ccgggcaggtacgatcttggctcactgcaacctctccctcccgggttcaagtgattctcgtgcctcagcctcttgagtagctgggattacaggcgcgtgccactgtgtccggctaatttttgtatttttagtagagatggggtttcaccatgttggccaggctgatctcaaactcctgacctcatgtggtccacccaccttggcctcccaaagtgctgggattacaggcgtgagccaccacgcttagcctacaagcatttttttaaaaactgacccctactactgataaaattttttgttaaaaaccttttttactttttaaaagaaaagtttttttttttttttaaaacacaatattttttgtttttgaaaaaattagagggcttttttcgttgcctttagaaaatttacctcatacg

SEQ ID NO: 13465 - DNA, 422 bp, Homo sapiens
ccgggcaggtactttttttttttttttttttttttttcttttcttttttttttttttttttttttttttttttttttttttttttttttttttttttttttttttttttttttttttttaaaccttggaaagccagaaccctttttaaaaaccccaataatcccaaggaacacggggaaaaaattggaaaaaaaaaccaaaggggctaaaaccatggggggggggggggaattttattaaacacaaaaaaaaagggggcaaaaaaaaaaaaagggcccaaaaaaaaaccccaaattcacaaaaaaacaaaaggaggggcttaaaaaaccaaataaagaaaaaaaaaaggggggacatccccaaaaaaaaaagaggtaaaaaaaaaagagttttggggggggagaaaacaataacaaaaaatc

SEQ ID NO: 13466 - DNA, 416 bp, Homo sapiens
ccgggcaggtacgcggggtaatctcagttacttgggaggctgaggcagaactgcttgatcccgggaagtggaggttgcagtgagccaaggtcgcaccactgaactctagcctgggcaacagagtgagactcagtctcaaaaaattaaaaattggaacgactgacaggccatcttccaatgttctgatctcccctgactctgtgggtccaacaggaccattctgagcaggtcgcatttctgggcctggacaagtttgactggtcccatgccagttttttctctgcttttactcaatgccccaatgcatctttaggtgttcactgtggtatatgacagcataaatatcatctagatgatctaactgatacctgtaaaaaatagagcctctttatatttatatgtgattctattttatg

SEQ ID NO: 13467 - DNA, 411 bp, Homo sapiens
aggtacgtaacaggacatcaataaatattagttgaatggaagattaaatcaacaaaatgggtgatggatctctgcagcaagtggaagagttcttcatggcccccaaggttatatccatctagaacttcagcacgtaatttcatctggaaatagtgcctttgcggatataagttaggtaaaactgaagatgagatcatactggattaggatgggatctaaatccaatgaaaatgtcttcataaaaaacaggaaagaacccatagaaacacaaggaagaaggtcatgtgaagatggaggcagagattggagggatgcagccaccggcccaggaatgccagcagccacccagaagctggaaggaaatgagggattctctcctagaacctttagagagaacatggtcctgtgaac

SEQ ID NO: 13468 - DNA, 404 bp, Homo sapiens
aggtactcagtctttgcttaaaataaattttacgtttatcaaagtaaaatttaccagctttttttcctaaagaggctagtcatatctcatcagtggttacaaagtatccttacaattgaacctacatttgttaatcctgttcagtgtgtatgaaaatcacttggtggccgggcatggtggctcacgcctgtaatcccagcactttgggaggccaaggcgggcagatcacaaggtcaggagttcgagaccagcctggctaatatagtgaaaccccatttctactaaaaatgcaaacattagtcaggcatggtggcaggtgcctgtagtcccagctacttgggaggctgaggcaggagactctcttcaacccgtgaggcagaggttgcagtgagtcgagatcatga

SEQ ID NO: 13469 - DNA, 382 bp, Homo sapiens
gagcgccgtatcgctcctatgggcgattggagctcaccgcggtggcggccgaggtactttttttttttttttttttttttgggtctttgggtggggtatgtaataagaaaaagcctgcaggcttctgaggtaggtagtgggttggaggcaggtgtcctcacccactaaagtgaggactgcgacagtccggcctctgtgccctcctctggaatggaatggggagtggcgaccatacagcctcaagagcatgctgttcaccaagacccttgcgccctgaaaaaaatgccttagcaccctggaatgggccatggacaccaatataataaattataatcagcgtatgaatatctttttgtaaaacaaacaaattaacaaagttatg

SEQ ID NO: 13470 - DNA, 294 bp, Homo sapiens
ccgggcaggtactttttttttttttttttttttttttttttctttttttttttttttttttttttttttttttggcggaaaaaaaaaagattttattttaaacagctaaaataaattttaaggggcattaaaaaaactacacattccaaaggaaactcagtctttcaaattttattcaggattaaaacaaggccccccccaggttaatcccttaccccgaccatggttgaattacaaccccgggttttaagccttccccggaaattttcccactcttgaggacaaaacccttat

SEQ ID NO: 13471 - DNA, 370 bp, Homo sapiens
  misc_feature 71, 108, 109, 114, 118, 119, 120, 121, 122, 123, 130, 131,132, 133, 168, 169, 170, 171, 172, 176: n = A,T,C or G
aggtacctgactcatcaactcatctgtcgcaggtgctcagtcgaaatttgttaaataaatggaggcgcttnagttaagtttggcctttttcttttggaggcaaaattnnggggntttnnnnnnggggggnnnnaaaaaaaaaaaaaaaaaaaaaagaggggggggggnnnnncccntttttttttttttttataaaaaaaaaaaaaaaaaaaaaaaaaaaaaaaaaagagggggggggggggggggggggggggggaggtagaaattaattttttgtggggggggggggggggggggggggggagaaaaaaaaaaaaaaaaaaaaaaaaagaagtttttggttttttttttaataaaaaaaaaaagagga

SEQ ID NO: 13472 - DNA, 352 bp, Homo sapiens
ggcatttctcccagggatctctgtgcttccttttgtgcttcctgtgtgtgtggatatttaaaggggctggaaatgtgcaaaaacatgtcactacttagacattatattgtcatcttgctgtttctagtgatgttaattatctccatttcagcagatgtgtggcctcagatggtaaagtcagcagcctttcttatttctcacctggaaatacatacgaccatttgaggagacaaatggcaaggtgtcagcataccctgaacttgagttgagagctacacacaatattattggtttccgagcatcacaaacaccctctctgtttcttcactgggcacagaattttaatacttat

SEQ ID NO: 13473 - DNA, 353 bp, Homo sapiens
ccgggcaggtacgtatcatgtagaccgcaggcagtcttaattttgtagctggtctgacaatcttttccttttaattggagttttttcagtccatgctatagtttggatatggtttgtctgtctccatcaaatctcatgttggaatttgatccccagtgtggtggtattgggagctggggcccagagggtggtgtctgggtcatgggcatggatgcctcataaacagattaatgtcctccctgaaggtgagtgagttctcactcttgagataataaattagctctagaggagatgaaagagttcctggaagagtaggttgttataaagccagaccatctcttaggtttccctct

SEQ ID NO: 13474 - DNA, 363 bp, Homo sapiens
ccgggcaggtactacagaggacatagcagtattaagggataatgaagtcacagcttcagagcctccatcctttctttagcaagttagctctacttgtatctgttctgttttatataatatggttgcatctaactgtttttaaaaaaagttctgttcttcaaaaaaattttaagctatgaaaatcactgattaagtcaaaccctcattttacaaaagaggcaacacaaactcagagcacttatgcctcaccataggtcacaaagccaagtagctccaggccagaaatgggctttaggtcttccgtctgagactggcatttgatgccagtgatttcctccatatttaggagaaatgtatagattt

SEQ ID NO: 13475 - DNA, 361 bp, Homo sapiens
  misc_feature 59: n = A,T,C or G
ccgggcaggtaccatacacaaggacatagcacctttgattagaagtatgttcaatacanttattgtgaactacactaaaaataatgattttttcatagcaaaatttctcagagtaacctgcaaaaacatccacccagatgaactggggtggaaacaattaaacagttccctctctaatgcaagttgcttctcagtattgggcaagttttctgtcttggggtttaagtaaaaaggcatctttaattggtgttaattcctggcaaacatagtgaatgttgtgagtagtaattttcactactgcccaaacaaaaggaaattaaacttttttagttaatgcttttggagtttttcaaattagatc

SEQ ID NO: 13476 - DNA, 356 bp, Homo sapiens
aggtacatgtttttctacatcaaacaattcttcaactctctgacaaactgggagtagatgaaatcaataaaattctgacactaactcctggagttagtccagaccctaaaggttaaggacttcatcccaggagcctaccccacatcagagatcagccacaaatagggccccaggcaacccaaacttcttcccagctggctaaacaattgtgggagggggtcccagggccttctcctaggtttcataatttcctagaataactcacagaactcacaaaagcactttaactaatatttattgggttattataaaaagacgcatttcagaaagagcaaattaggatgtgcatgaagccc

SEQ ID NO: 13477 - DNA, 350 bp, Homo sapiens
accggccaggtaccatttttatcgtcataatgctgtaaaccatcagtagaagcagtttagatttggactgcatggtaaaatgaaaagtattaaccctccaaccacaacctagtcagggtattaataattatatgtagcatgagaactaagaagataatatatattgaaaaaatggagatgtcctcaaccagtttcatatttgaaggatctgagttgtattcttattaaggaaattttttttctgaatactgacttacaaaatgttaacattaagatctgaatcagaggactctgattggaaaagaagttggatccctgacacctatggctttgaagcgtgtgtggcccat

SEQ ID NO: 13478 - DNA, 519 bp, Homo sapiens
  misc_feature 363: n = A,T,C or G
aggtacttcccataagtttaccttattttttaggaaaaccccattgattttaagtagaattcatgaagttgctttgtagcttggcttcaggatttgtttggatttgttatatattttttctttaatataggcaggcacaattttaatttttctaataaccaatatttattatttttaaaaatgttaactctattgaaatgtttgtgcttcttttcagcaaatattcacttttatattatgcattccataaggttaaataatttctttgcaaataaaaatatcgtttgattagttgtcaaccaatgcttaaaccaaggtcaaatggttggaagtgaaatgttaacgaattagatagaaacaggnatattttctacccctaatgctgaaatttgtggaaattaaaattctccaattacctattttgtgttttgaaaagccacaagtatatagcctattaccactcgaattaccttttaaaaaaaagggttgaagagaatttggttatcaacatttttcctt

SEQ ID NO: 13479 - DNA, 373 bp, Homo sapiens
aggtacgatcttggcccactgcaacctctccctcccgggttcaagtgattctcgtgcctcagcctcttgagtagctgggattacaggcgcgtgccactgcgtccggctaatttttgtatttttagtagagatggggtttcaccatgttggccagactgatctcaaactcctgacctcatgtggtccacccgccttggcctcccaaagtgctgggattacaggcgtgagccaccgcgctcagcctacaagcaattttttaaaaactgacacctattactgataaaattctctgtttaaaatcctatttactattttaaagataagtattagttttttttaaatacaataattctgttattgataaaatttaagg

SEQ ID NO: 13480 - DNA, 395 bp, Homo sapiens
  misc_feature 19, 48, 67, 68, 72, 98, 99, 104, 251: n = A,T,C or G
ggtgcgcgcgacaacgacnccttagggcgaaacgagccccaccgcggnggcggccgaggcccttttnngggnattgtccggcccccccgacggaaacnngcccngacacccaggctggagggcaaaggggcgggctcagccgactgaaacccccgcctccggggggcgagattctcctgccccagccccccatttagctgggactacatgctcccaccaccacacccgggggaaaaatttggatttttagnaaagacggggaaacactacgttggccaggcggggctcgaactcctgacctcgtgatccacccacctggggccccccaatctaatttgctttacaaggcctgcgtcagggggaactttccctgaccactgcggccccccccccca

SEQ ID NO: 13481 - DNA, 378 bp, Homo sapiens
aggtacttttttttttttttttttttttgaatttatagtagagacagggtttcaccgtgttagccaggatggtctcgatctcctgacctcttgatccgcccacctcggcctcccaaagtgctgggattacaggcgtgagccacccatccggcctaacgagacttatttttactcaactagatggcgttcattcatttgcttactcagctgtgccaggaattaagttgggcactgggaattccaaaaccaacaagacattctctgtcatcagggaactcacagcctagtttgagagataaacaaatgaacatgaaattataattcagtaacaaagaatgagtgttatggcagagggaatgtgtaagagcttggcagggg

SEQ ID NO: 13482 - DNA, 409 bp, Homo sapiens
aggtacccacctcagggacagaactccacactatagtgggaaagcttcagggacccctccttttagtgctcagggctcacctatgctactggtccttttggcaaaaaaggaaaatgatagagccagggttgcccctgatgtatcagccttactgtggaggggccaaagctggtgttcagagctcacccaaggagggaggtgataaggtgtcatgcgttctgctgaacccactggctggtatgaacatgaggcttggggtgagggaaaccaagtaggggttggagaaggagcagcacctttgtaacacctggctacccatagctagctttttgcccttaaaaacttaacctttaagggattcaggctaaacaagccaaaagcaacaactgggtgcctggctggacatgga

SEQ ID NO: 13483 - DNA, 345 bp, Homo sapiens
aggtacacagatctctgcttaattcatttgaatgttcttctgtagtattcatacataatttatgttatcattttcctgttgaagaataggtaggtgttttccagttcttcagtattgcaaacaccactacattgaacatctttgtatccatgtgcaaatattcccgcaacatactgtgctagctgttcggccacatcacctttatgaaattctcacaggaacctgtgaaggctataggtaatttgccacattccacagatgagaaaaaggctaagagagcttacatgtcttgcctgaggtctcacaactcataaatgacggagcctaattgaagtaaagatctgc

SEQ ID NO: 13484 - DNA, 428 bp, Homo sapiens
aggtacagctttacccaattgctctttcctgtttgtgttttttgttgttgttgttgatgtttggccactttacacaactcacctccaaacacacactgcatcatcaagggagttgggtcagagcgacattgggacactcactctgctgtgacctaataaggtgatggtgctatacttcagacgcaaggaataacttccattttggttcaggccttcacttccagctggttgaatataaactcaatcacaacatcatcttcaaacccaaggatttccgttactctttttgttatccaaggctttataaccttcaaatttacttttgttcatgttcacctttttttctaggcatttctgcaaattttatcatgctttattagttttttctgttatgttgtttatctcgatttctctgttatgtcacttgt

SEQ ID NO: 13485 - DNA, 517 bp, Homo sapiens
aggtacggtggctctatcttggctcactgcgagctccgcctcccgggttcacgccattctcctgcctcagcctgccgagtggctgggactgcaggcgcccgccaccacacccggctaatttttttgtatttttagtagagacggggtttcacccttgttggccaggatggtctcgatctcctgacctcgttgatcccacctgccttgtgccctccaaagtgcttggaattaacaggcgtgaagccacccgcgccccggcccttatattgattatttcttaaagcaataaaaagttttactagtgttgtcccatattttgcccattatttatttgaaaaaacctttggggataagggattaaattttgtaaaacataggttttttgaaggtttaaactggaaaaataatgggaggatttgtaaattttattaccgtctaatttctttgtgtgaaaaaaggtctttggccttaaataaaggtattgaatttaaaaacttttttgctttcctttaaaaaa

SEQ ID NO: 13486 - DNA, 426 bp, Homo sapiens
aggtactttttttttttttttttttttgaaatttgcttttatttacacgtttgagtcaattacatgcatgttttatttttgaggagtgattagcaaaatgcattaaaattttaaaatagcaattaaatatacaaaaatatagcttacaaaaaactggcgaatgtttaaaaatattctgctgcagaatttttagtgtacaaagacgtttatgaaacctgaggttcagcattttcaataaacctttttttgagggagttacacaatacctagtgaggaaacccgagggcccaaactacaagacgaaaaagtgccccgttcctggcaatgatgtcagaagaccaagaggcgatagttaccagcaacactctaggaagaccagctgtcaccagaagggagttcctaacacttgccacacctgctcccccg

SEQ ID NO: 13487 - DNA, 429 bp, Homo sapiens
ccgggcaggtacttagctaggtgttttctacagtatcttatataattgcatcttacagcatctttacatgcgaaatagtttatcagttatcttcaattgcatattacaaaattctgattaaatttttcttaaataagaaaactatcatttcatatgacaagaaatcctaatttaatgttactccaaggttggttaattcagtggctcagtgataacaccaaagactcagtttcttgaaatttttttgctctgccatcctccatgtttatcctcacgccagttcgcctcatggtcccgatatggctactgtaattctgggaaggaaatgctggcagaaccgtgtttggccaaagagagacagatttttttggggccctttaaagccagggaagttctttcccttgaagcttccagcgaatccggcctatg

SEQ ID NO: 13488 - DNA, 428 bp, Homo sapiens
aggtactaacaaatgcagtagccagcaagattaccatgcaatcattaaggagaaccaaagtaagagagccactcaaaccagattttgaacgctactaaaattaaagtagttctttgatgaatatgaatgagtagggaaaggattctttgtaatagtgatacctctgtggtaagagaagggtggtatgtgagttttagtctacagattatggcaaattcagtgacaacaatcaaatggtctaagattgacagtagcacagttttactctgtgaaggtagtgttcaggacaaatttcaagaaaactagaaaaccattctttacagctgaaatctttccctaaccattgttatttccacttttaagtcctcaagagatgagaaaagggaggtaaggcttccttatacatttcctgcacaatgaaacatttt

SEQ ID NO: 13489 - DNA, 396 bp, Homo sapiens
ccgggcaggtacccagaaaaccaaaatgagcttaaacattttgaaagatgtcaacaaagttatgcccttggaaataagtttggtttatgtaagagcattgttcctttaatgtaaagacacaataagtttggctcgcattgtaaaagtttgaaatctcatttaggttttgtaatccagagtagaagatatgcaggaaaagattctgatgcatttggtggatatgggagatcatgcctccatatcaagcgtgacaaaactcttactggagttaaataccatagatgtgttaaacccagcagccctaaatcacagctcaatgacctacaaaaaatttgtgcaggagggaaaccacatgaatgcagtgtgtgcgggagagccttctccaggaaagcacag

SEQ ID NO: 13490 - DNA, 404 bp, Homo sapiens
ccgggcaggtacattactcatgaatggtttagcaccatccccttggtgataagtgagttcttactctgagttcacacaagatctagttgtttaaaagaacgtggcacctcctccctctgtgtcatgggaggaacccagttggaggtagctgagtaatgggggcagttatccccatgctgttcctgtgatagtgaatgagttctcatgatatctgatggttttataaggggcatttccccctttgcttggcacttctccttcctgctgtcatgtaaagaagaatgtgtttgcttccccttgcatcataattgtaagtttcctgaggcctccccagccatgctgaactgtgagtcaattaaacctctttcctttataaattacccagtattcaggcagttctttat

SEQ ID NO: 13491 - DNA, 1000 bp, Homo sapiens
  misc_feature 992: n = A,T,C or G
acgattactttgtattctatatttttttaaatttggttttatatactgataatttaatcatttatattaaaactgtattatatgaaatttagttaaaatagtttatattttttaacataattttatatttttccttattcttccccgatgttcattatcgttaactatttggcgaattgtagctccaccgtggtggcggccgaggtacaattcagtggcctaagtaaattcacagtgttgagcatccatcactactcttcatctctagaatcctaaacagaaactctatacccattaaacaacttccccattccctccatttcctccaagctccttgggttaaagacatttttatgataagataacaaacgtgtatactaggttctttcttagttattaattttttgtcctcttaattttaattaaagaggctatccgtcttttatattattaataataattggaggaaactcctctatattaacccacaattttgttctaattaaatgcaactttctttgttagacttggtttcatttggtactaccaaatttttgtgttaatcattctcaaatattataacacaaatggttcttgttttcctagaagtggattctcttatataattaaatgtgttatagttaaatgtcccactttaatgtacttacaatgtgatattttttaaccatttttccccgttttttttataagagtggtcctagaaaaattaaatttattgttaccacttttgttaaatagttaattattgtgctcaactattttttttagatttttatttttctattttttcatttcttaaacataaaatgtgtgtgaccaatatttttgttgttattgattatcttcctctaataccatattttgttggtatccttaacaattgtgttaagttgcaacaccaaaatctttatcttaaatttcatattttatttctaagacttattttttttgtacggttttcattttataanatataaat

SEQ ID NO: 13492 - DNA, 403 bp, Homo sapiens
accggcccggccctttgcagcatgatgcacccttgcacaaaaatgcttttctttagatcccttcagacagaaattgtggtcaaaaccattgagatggaagtcctgcaggtgttttccaagctccactggctttctcaggtcgaatgcagtgccttgcactggggcaacttctcctgtaggaatcagggtttcatccacaggcaaataagtatccgcttctatggtgacttcatggtcatttatatttggggaagcctggcctgccaggttgaagtaagaatggttggtcaggttgactggtgtggcctgactggcttgtgctctgtagttgactatgagctctccgccatccagggtgtatgtcacccagacttttaactctcccgggtagccttctttacct

SEQ ID NO: 13493 - DNA, 408 bp, Homo sapiens
aggtacagtagtgcactcttggctcactgtagcctcgacctccggggctcaagtgatcctcctgccttagccccacaagtagtgggactataggcacacagcaccatgcccatctaagtttttgtattttatgtagagacaaggtttcaccatgttgcccaggctgatcttgagctcctgagctcaagtgatctgcccaccttggactcccaaaatgctgggattataggcgtaaaccaccatgcctggccttaaatcaactttagagtcaacatctcttatcactggagcttctggagaaactccatcacgtggtgctctctttcctgatgtgttgtgcccaaatagcttgttcttatcagatgacttatttgctatgatatatatacttcaagagctgctatatgt

SEQ ID NO: 13494 - DNA, 400 bp, Homo sapiens
aggtactccatgttggttggtagtattttaaatctgaagcattttcagagtctaaggcaattcagactgcacagctgtcaactcaggagtcccattaaactgactctaaaaattcctaaaagaaggcatgatttattataagcaaatggctaacctggcttttttggtaatagaattttaaatgaaaataaaattatacaagatacacattgtttggatttttaaaaactctattaaatgtttaagtggttgtgaatatgaggaataattaaatgttaaccccagctgattagtgaacatataagaaaatggggggaactgatcccaaaagatcttctcttctaaggagaacttcacttgaggggcaaacactagaagatacaattgttattgtaaaaca

SEQ ID NO: 13495 - DNA, 401 bp, Homo sapiens
aggtacctgtaacatgcagaggtgtttgtgagctgcatcactattgcatcatttgcatctttcgaacaattgcctttgggatccattgagatgacctctgtctttattggaggaaagataattccttgatcaactccgtttttattattctcatgtctgacgatgcatctgtgttctttgtccattgacttttctggcaccgtggaccacctaaatgatcatgtatgggtcgaatagtcttcatggtgttcccctcctgggatcccagaatcgagttgctcttcttttcttgccaatgcatcttagtaacatcgcggaaaaattcctcaagaggacaaaggtgtgccccatcctcctggagctttgggccatcgcttgaaggaagaaaattaaagcgcttg

SEQ ID NO: 13496 - DNA, 405 bp, Homo sapiens
aggtacagtagtgcactcttggctcactgtagcctcgacctccggggctcaagtgatcctcctgccttagccccacaagtagtgggactataggcacacagcaccatgcccatctaagtttttgtattttatgtagagacaaggtttcaccatgttgcccaggctgatcttgagctcctgagctcaagtgatctgcccaccttggactcccaaaatgctgggattataggcgtaaaccaccatgcctggccttaaatcaactttagagtcaacatctcttatcactggagcttctggagaaaactccataacgtggtgctctcttttcctgatgtgttgggcccaaatagcttgttcttatcagatgacttatttgctatgatattatatacttcaagagctgct

SEQ ID NO: 13497 - DNA, 400 bp, Homo sapiens
aggtaccaaaattcattcaagaagaaatagataccagcctgagcaacatggcaaaatcccatctctacaaaacatcaaaaaaaaaaaaaaattagtcgggcatggtggtgcacacctgtaatcccagcttgtcaggaggctgaagtgggaggatcacctgagcccagggaggtcaaggatgcagtgagccatggtctcaccactgcactctagcctgggtgacagaatgagaccccgtctcaaaaaaaaagaagaagtagataatctgaatagccctatatctatagaaacttaatagtgctgggagatataggtattattatcctcattttacagatgtgaaaattgaggctcagagaagtaaagtctattgctcaaggtcatgtggctagaatatggc

SEQ ID NO: 13498 - DNA, 399 bp, Homo sapiens
aggtacattgaaagattttactgtgaatagttgacgaaaattggttaagtccattaagacatgcttcctgcccctcacaactcacccacgctgttctagtctctccgtaagtgtcaattctgaaggtcacaacttccataacttccatatcttctcagtattacatttcaagatgaatatattgtgctttactctggcaacatgtcttccataagatgagaatacacatcataatgtagaatccgtggaaactctgagcttatttttctgcaactagatggtctcatctgggggcaaagtgagacagtgacagatcatcaggcattagtttctcatatgaagcacacaacctagatccctcagatgagcagttcacaatagggttcatgctccaatgag

SEQ ID NO: 13499 - DNA, 390 bp, Homo sapiens
aggtacagccatccttgtcttcaagcactttgagaacattttagccattgatgtttacatgtggcacccacccatgcaagataggtttctgtatttatacattaaaataccaaaaaaaaaagtatgaaatgccttcaaaaatgttcaaagcttgagagaaaagcttttttcattagtcaaggtgttttgatatggtattaaaataatatctaacaaaatgaaaaaaaaattctcttttctccatgaatgctgacactggggagaatggcaattttaggctgtcaagagcatactaaataagtaaaatatctagaaatgcaatcgacttgcacgggattatgaaaattactggctttcagtcacttttggctatttcatactggccgaaag

SEQ ID NO: 13500 - DNA, 390 bp, Homo sapiens
ccgggcaggtacgatcttggctcactgcaacctctccctcccgggttcaagtgattctcgtgcctcagcctcttgagtagctgggattacaggcgcgtgccactgcgtccggctaatttttgtatttttagtagagatggggtttcaccatgttggccaggctgatctcaaactcctgacctcatgtggtccacccaccttggcctcccaaagtgctgggattacaggcgtgagccaccgcgctcagcctacaagcaatttttttaaaaactggcacctattactgataaaattctctgtttaaaatcctatttactattttaaagataagtattagtttttttttaaatacaataattctgttattggataaaatttaaggcattttta

SEQ ID NO: 13501 - DNA, 407 bp, Homo sapiens
aggtacctagaattgtgtaggaaggaggagtagcaatgactagatttaaacctagaaatacaagcaggaacctggctgtaaaaggctacactttatctaagagacagtgagatattaagatgtagagtgtatctgtttgtaaaaggtttaaacaggtgagagtttatctcatgtaataggaagtccaggacattggaaaaggaagtggcgtaagcagtccaaagctctaagcagctcaacaatgtcgtcatcgacccaagctctttctctctttctacttcatcatccttagcatgtagcttttattgtctttgtcataaaatggctgctacattgccatgactcaagttttcattccaggcaggaagaaggagagagaacaaagggtaaaacaccttgtgctcatg

SEQ ID NO: 13502 - DNA, 397 bp, Homo sapiens
gccgaggtcccccctctaagccactagtaatcaagtgttttaaaaagtagttaaaaaaaaaaaaaagggaaagctcaaattaacataatcaaaatgtttttaaaataaatctatgtaatgagaggtgaccagcaagcctgtatctatgccagagtgtggtagaagagaagaaggcactctcactgaattttataagtatactgaagtcacctaacctcttagtagacatggctcttgccaaagaataccacggaaagagctcttctcttccatgacatcctcaccatatcctgttcttaggtcactgccaaccaataaagcaaagctcccagcaagttgacaaaaagaagggggaggtctgggggaaaaggggaggagacgaaggacaagagcagaa

SEQ ID NO: 13503 - DNA, 441 bp, Homo sapiens
  misc_feature 317: n = A,T,C or G
tagggccgtatcactactatagggcgattgagctcaccgggggggcggccgaggtccttaatcagtataccatgctggtataaagagattcttgcctccaaagggactcagaatatttcagggaacctgtattagtccatttttacactgttgtaaagacactaccccacactgggtaatttacaaagggaaggtgtttaattaattcacagttctgcatcgctggggaggcctcaggaaacttacagtcatggtggaaggcaagacagaagcaggcaccttttttcacaaggtggcaggagagagaagtgagtgcnctgaataaaaaaaaaaaaaccacctactcttaaaaccatcagatctcctaagaattcactcactatcatgaggataacatgaagtaaacttcttcgacacatggcgattacaggtccctctgtc

SEQ ID NO: 13504 - DNA, 415 bp, Homo sapiens
ccgggcaggtacccgatgctcacaggcaccagcaccgatggcatgacattagacctgagattgcatcgagctccaattacgagcatccttacgctcaggaagcctctatcccaatgggccagtcccagaggtgagggggtatagcccgataggaaatgggacctgatgaatatgaagagatggaagaagaggaggaggaggaagaggaggaagacgaggatgatgattcagcaaatatggatgaatcagatcaagatgatgaaaaggagacaccgagggaaaagtctaaattgttaacaattcccaaaaaaccagtttctcacacccttttttacaaaaaccgtaccagattatggtaaaacactagggatgaactttagggctgctaaaataataattttgccaaaaagggaaa

SEQ ID NO: 13505 - DNA, 386 bp, Homo sapiens
aggtacataagcctgacgatatggtcttgaggggtcatcctaaggctgttagaccgaaattaaaacaaaccttaccagtagatctgtgtttgtaagacagttctatttagcaggaccatgctgattataccaagagataagccccacagaatgtaagggtgatcacttcaccaaacatgggcatggcattgcaatgttctagtatttcacctcacagaacagcacagatctcacaatcacttcgttaaatagcagcggattcctcaagacatacagtccgcggtatgcatgatcctgagtaagaggttgactttaattttttcagccttgaaaataagaaaagttaaatgctcacgtatataattggttcaattatgactagaata

SEQ ID NO: 13506 - DNA, 403 bp, Homo sapiens
  misc_feature 147: n = A,T,C or G
ccgggcaggtacactagacctagagctctgggaacaagtgggaagaaatcttaaacgacgtgcgcaagggcagtaggtcccagtaacatcttaatgttatggtcctaatagggttgctttggccctgctcttcatagaagagcccanaaagataagggaagaggaaccactacccactttaatgcctcagcctccctcagccttgccgtcactggctaaagataccaaagaggagacggaggttttcctccccctccccccaatgaactgggaagaagacaagcgatatactacagttatgggaccctgccttaggcaagcagcattggaaggggaactcttggcctgcccagtgatgcaagatcaacaaggcaattgggtgcatgagcccattacattgaac

SEQ ID NO: 13507 - DNA, 406 bp, Homo sapiens
aggtacttttttttttttttttttttttatttttttttttttttttttttttttttttttttttttttttttttttgggggagcaagtgatttattaaagcaagacgttgaaacctttacattttgcagggaaaaacagggggtcattgaaagaccgtgggaaacccggatgaaagtttttacatgtcacacactacattttttcaatattttcaccaggacttccgcaatggggcttcttttttgaagggacatttgatccgggcattttttcactcctaacttgggtgcaacagcttccgggggggcatcaaatttggcaagacttaacttgaacagaggttcactaatgaaaaaaaagtttaacagctcaaaaacaaaagctgggtaaaactcggcattgggc

SEQ ID NO: 13508 - DNA, 380 bp, Homo sapiens
aggtacttcatttaatttttgcctcttacagtctgatatcctgttgggcattctggacaacttggacccagtcatgttcttcaaatgcccttccccagagcctgccagcctggaggagctcccagaggtctacccagaaggacccagttccttaccagcctccctttctctgtcagtggggacgtcatcagccaagctggaagccattaatgaactaattcgttttgaccacatatataccaagcccctagtcttagagataccctctgagacagagagccaagctaatgttggtagtgaaaatcgaggaaagcaccttctctaggcccctcagaagaatgagtcaaccctggaatttcattggtctcagatgaaaggat

SEQ ID NO: 13509 - DNA, 342 bp, Homo sapiens
aggtacttttttttttttttttttttttttttggtcttcatggtatcacatcaccaggtcttatataacttgaacctgtattcatgcaacacttttcttactggattcccaaactctttatatctttctccactccatattacaaattaattttctatgacacaatttttttaaatcaaaacttcaatttcactctcttttactcagtatttaaacctcaaactacagcaactggtaattttaacacctttcctagaaagtcctaacaaatcttacctcccacatgggaaggagggccaacctgttaaactcactgtcccaagaatcccgcgtacctgcccg

SEQ ID NO: 13510 - DNA, 379 bp, Homo sapiens
  misc_feature 289: n = A,T,C or G
ccgggcaggtacttttttttttttccttttatcatctgatgatgaacttaatgtttccatttgtattaatggaatactaagtccctctgtgatttctgaaccaagctattcctaggcctgagttttattttgttgacacagaaataaattagaaggccaagcgtggtggcatgtgcctgtagtcctagttgctgaggtaagaggattgcttgagcccaggagttcaaggctgcagcaagctttgattgcgccactgcactccagccttggcgacagactaagacgctgntctcaaaaaaaaaacaaaaacgacaaaataaaaaacaaaacagtaaaaaaatataactaagggcaattgacagttccctgggcaaaatgg

SEQ ID NO: 13511 - DNA, 383 bp, Homo sapiens
aggtacagtccacaacacaacccctaagatcctttgtcactattcgactaatccttattatattcttatttttcatatattcaaaaggaatatttgacaatgaaacgtctaatatttatagaatattctctggaatcctttctataataattatgcaaaaccattataaaattatatatacaggcaagggtaattactcaaatctaaagtgccatcacacatttaaaaagccctgacaattactatgacattccagatcataagatgcttcacaatttaagacatggtaggcatgtgaagaagttgaatccatgaaatataaaaaattaaccttaatcgactgattgcttttacccacttttcacttgcatttcattaaaata

SEQ ID NO: 13512 - DNA, 389 bp, Homo sapiens
ccgggcaggtacagcagtagcagttcatacatatctgatatgctttcacaccaggattcagtaaacaacaataaatataatttcccctcttcaaaacaaaaaatggatttatacggaaaaagggttaatttacttggggtttatcagcacaccatttttaatgtgctttgaaagaattaaaaaccatgaaactgtattcactgaataccggtccatagttatattttttcttttaacgtggcttaaatacatacatcatgactttctattaaaattccttaaatctatgggtgatgttgtgggtagataagcacctatatgtaaaaaattttttcctccattaaacaatttttcaattaaattttaaaaaaaaaatcttggacattttt

SEQ ID NO: 13513 - DNA, 371 bp, Homo sapiens
aggtactttttatttaaatgtttataaggcagatctatgagaatgatagaaaacatggtgtgtaatttgatagcaatattttggagattacagagttttagtaattaccaattacacagttaaaaagaagataatatattccaagcagatacaaaatatctaatgaaagatcaaggcaggaaaatgagtataactaattgacaatggaaaatcaattttaatgtgaattgcgcattatcctttaaaagctttcaaaagaaagaattattgcagtctagttaattcagacagtgttaaatggtatcaggataaagaactgaagggcagaaagaattaattttcacttcatgtaacacacccaggatttacaa

SEQ ID NO: 13514 - DNA, 210 bp, Homo sapiens
aggtacgcggggacctcattcatttctaccggtctctagtagtgcagcttcggctggtgtcatcggtgtccttcctccgctgccgcccccgcaaggcttcgccgtcatcgaggccatttccagcgacttgtcgcacgcttttctatatacttcgttccccgccaaccgcaaccattgacgccatgtcgggttattcgagtgaccgagacc

SEQ ID NO: 13515 - DNA, 396 bp, Homo sapiens
aggtactttttttttttttttttttttttttttctttttttttttttttttttttttttttttttttttttttttttttttttttttttttttttttttttttttttttgggggggggccaggaaccccttaaaatgggaaggccaaagggcccacttaaaaaaaagcccaaggcggaaaaaaaaaaagttggaaaaaaaaagtttctaccccccaaaaaacccgggccttttcccccccaaaaaaaccaaacccccccaaaaggccaaatccaaaaaaaaccccggggcccaaaaaacgcccccccccaaaacttttacccggaaaatccaaaaggggacccccctttaaacccccccccccccaattaaaaaaaggaaaaaaatccccccccca

SEQ ID NO: 13516 - DNA, 445 bp, Homo sapiens
aggtacttttttttttttttttttttttttttttagcctttgatctctttgtctcatacttcattcagaatgatttacagagaaaattgaggatatcagatggaactttactcaaactcctcctgccacatttgcacaccttcccttctttcaagattgcttacctgctgagatatttaatcgccttctgccaatagcgcttttaccccttacaatagaacctggaatcccacactggctagcagtcaccgtgttaaagcttatcgtacctataaggctcctctattccttctcccaaacactttcacacaccctcctcttgccaccacagggtgtttcttttcccaacccaagcctttttaaattaataaccattgcgttcaaaagcggacttacccgggagtctccctcgaaacattactaaacccccaactccttttttgtg

SEQ ID NO: 13517 - DNA, 404 bp, Homo sapiens
aggtactttttttttttttttttttttttttttctttttttttttttttttttttttttttttctggcaagaacttttaataaaataaaaacggagaggtgagcaaatccagcatataaaaatgtgtctgaaataagctttttttaaaaaaagtttcaaaaagggtttataaaattgagttacaaacatgctagctattccacaaaaaagtgtcctttttttacccggacatgcaacttgactacatttcccagtcttccttgtagttaggggcagtcatatgacaaagttttggccaatggaatggggccaaaaggtttgaggccttttaaaaactggccccataagcccctcccactcagaagccttaattctcatccatgtctctccgagaaatggggaaa

SEQ ID NO: 13518 - DNA, 400 bp, Homo sapiens
aggtacgtcttcattaaaaacaggtgaagaatttgaacaaacatttgcaaactaaaatacaaatgaaatacactcaacaccattaaacaagaaaataaaattatgagatattcactaataatcactacatatgcaccacagtgattaaaaatttttttaagttaagccacgtgacccaacaaggtgcattcactcaagagaaacgcaaatatatgtccactcaaagacttgcacatgaatgttgagagcaggtttatactgaatagcgcaatgtgaaaaaaccccaaaatctagcaaaggatgaagggagaaataaactgtggtatatacatacaatagaacactactcaataataaaaaggattatattcctgatacatgcaatatgggtgaaccgtaa

SEQ ID NO: 13519 - DNA, 417 bp, Homo sapiens
ggatcattggcagactcgtgtcttaagagccgagctccccgaaaaagaaattcttagcccttttaagggcttacaactctaaggggtctacatgaaaaagtcataatagatcaagtaagcgtgagaaacatgactgggggctacatacatcagctaacagaacaaaaagttttacagtattttctcatacagtgtctggaatttacagataacaccaatagtctttggtcaggggtttaataaatattatttatttattttaagccaccaggggcccaggtggtgggtggccaaaggtccgtcttagcctaatttaaatctaacctttcggtttttcttttttcaaacttttttttggctttttcttcccctttttctttcccggtccttaattaaaaccctagggggaaaaaaggg

SEQ ID NO: 13520 - DNA, 399 bp, Homo sapiens
ccgggaggtaccagatcatgaagtcaaaaagggtgaagtccagtttgaaccaggcagcctaagtccagacacatggcatttggccagtcctctccctgcatccaacctgccctctcaaatccttgtcactcaggccgatgcccctgctcactgtgcccttccttttgggggttccttgtagaccacagctagaccagtgggtgccacaatcactgtgtcaagtatagaaagggcagctgagatcacatcaaagattccagaaagaattggcacaggatcattcgggatgcatctctcccttgcccctgttcctggctttccttacagctctcgacttcctcaaaggagtcataaattcggaatttggcttctcttcctgttgaggaagctggaaactgt

SEQ ID NO: 13521 - DNA, 402 bp, Homo sapiens
ccgggcaggtactttttttttttttttttttttttttgcaaaattaacacaaagctaataagctgaatacacaatgcaaagcatcctaaatcttgggcaataacaaaatctaagatcctaagatcatgatatttaaggtaggaaaaaagtaattagactaaactgggcgcggtggctcacgcctgtaatcaatcccagcactttgggaggcagagatgggtggatcacctgacgtcgggagtttgagaccagcctgaccaacatggagaaaccccatctttactaaaactacaaaattagccgggcgtggtgccacatgcctgtaatcctagctactccggaggctaaggcaggagaattgcttgaacccaggaggtgaaggttgtggtgagctgagattgt

SEQ ID NO: 13522 - DNA, 395 bp, Homo sapiens
aggtacttagggtaagcattaacaatattattcaaaatgttatatagagttcaactgtatacaatagagcatttattaaagtgtgtccaaagcgcttataaataaagcatcttcgaggcaggcggctcacttgaggttaggaggaaagcagactggccaacatggtgaaaccccgtctctgtggtcccagctacttaggaggctaaggtgggaggatcacttgaggacaagaagttgaggctgcagtgagccaagtgtttgtgcaattgctctccagcctgggtgacagagtgagactctcaggaagccgcagtgttagttgcctctgatttttgacaagcatgggaagatgggggctgttcatacagggcaagcttcaagtgtccagtcaaata

SEQ ID NO: 13523 - DNA, 394 bp, Homo sapiens
aggtacatgaattcctacaggagctagccagctggttctctatccctgggaaattcccaagtcaccaccgatagctttgccctaggtcatgaggacagaggggttcccaacagtttggtggtcagcagattgtcagaggggtgaagggagcagagcagcattcccacctttttttgaacggagtcttgctctgttgcccaggctggggtgcagtggcatgatcttggcccactgcaacttccacctccccggatcaagcagttctcctgcctcagcctcccaagtagctgggaatacaggcgtgccccaccatgccctgtaatggctttgtatgtttactggagacggggtttcaccacgttggccaggctggtttctaactcctgacctcaag

SEQ ID NO: 13524 - DNA, 374 bp, Homo sapiens
ccgggcaggtacgcgggggatcgcttcctggtcctcgcctcctccgctgtctccctggagttcttgcaagtcggccaggatgtctcagtgtagacccttgtctgagaccgagctatgtggggcgacctctggctcctcccgcctgcctctgccaatccgggcactgggacagaggctgagtttgagaaagctgcagaggaggttaggcaccttaagaccaagccatcggatgaggagatgctgttcatctatggccactacaaacaagcaactgtgggcgacataaatacagaacggcccgggatgttggacttcacgggcaaggccaagtgggatgcctggaatgagtctgaaaggggacttccaaggaagat

SEQ ID NO: 13525 - DNA, 402 bp, Homo sapiens
aggtacttgggaggctgaggcaggaaaattcttgaacccaggagacggaagttgcagtgagctgagatcacaccactgcactccagcctggtgacagagcaagactccggctcttaaaaaaaaaaaaaaaaaaaaaaaaagagagagagagagaataaatagaaaagaatgtggctgggaattgtgaatcaaaagattataccccccaattgtttttcagtccccttttctcaaataataaattagttaaatcagtttctgagttatgccactgggctgatgaaaaagttgagaagggtctctttgcaagaaatgaatcttatttggtttccgtttatgtgggctgtgcttctgcgattttaaaaaaaattaaaaaagaattggtttttgaaggcaatgtgg

SEQ ID NO: 13526 - DNA, 430 bp, Homo sapiens
taagacttcgacactactatgcgaaagagctctaccgcggtgccggccgcccggccaggtggagaaggacagctgcttttttatatagattaaaagaaatctcaatcttcaaagtttctatttactgtaacagtagatggtttcaaagaagcacttggccgggcacggtggctcacacctgtaatcccagcactctgggaggctgaggcaggcggatcatgaagttaggagtttgagaccagcctggccaacatggtgaaaccctcgcctctactaaaaatacaaaaattagccaagtgtggtggtgcatgcctgtaatcccacctactcgggaggctgaggcaggagaattgcttgaatccaggaggcggaggttgcagtgagccgagatcatgccactgcactctagcctgggcaacagagtaagact

SEQ ID NO: 13527 - DNA, 380 bp, Homo sapiens
  misc_feature 330, 339: n = A,T,C or G
ccggccaggtccagcccatatttgtttactttttctgtagctcatatatctattattactggtggtttcttagtggaaatttttctttcactctcactttggctttacctccaagtgctttcttctcttggctgcaattgagcactataatttgtggctttccggagggggagccttggtggtcaggtggaggaggcaggccacattccaaaagtggagtggtaggtgttccagacagagtgctgattcaagagtgagtaggggtgtagggtgaaagttggctactaattcaagcctcacctgaggcagtgttgtctcaaaacagaaaangtgccctcntctaattaggctgcgcccccatatgcgcctttagattaatg

SEQ ID NO: 13528 - DNA, 139 bp, Homo sapiens
aggtaccaaggcaatgtaacttttgattttcggtcaatttaagttcttttgtcaccaaatattaataaacagttttgacttcaaaaaaaaaaaaaaaaaaaagaaaaaaaaaaaaaaaaaaaaaaaaaaagaagtccct

SEQ ID NO: 13529 - DNA, 374 bp, Homo sapiens
aggtacgcggggagaggtgagagtcgcgcccgggagtccgccgcctgcgccaggatggagttcgtgaaatgccttggccaccccgaagagttctacaacctggtgcgcttccggatcgggggcaagcggaaggtgatgcccaagatggaccaggactcgctcagcagcagcctgaaaacttgctacaagtatctcaatcagaccagtcgcagtttcgcagctgttatccaggcgctggatggggaaatgcgcaacgcagtgtgcatattttatctggttctccgagctctggacacactggaagatgacatgaccatcagtgtggaaaagaaggtcccgctgttacacaaactttcactctttcctttaccaaa

SEQ ID NO: 13530 - DNA, 381 bp, Homo sapiens
  misc_feature 8, 9, 10: n = A,T,C or G
aggacctnnnttttttttttttttttttttttattagaggtggggtttcaccatgttggccaggctggtctcgaactcctgacctcaaatgatccacagccatgagtcactgcgcctggcctaaaagaactaaatcttgtagtaggaagttgtatgtaattacactgctatattacctacagctttgtgtatgtgatctgatctttctttgcagggcaaatgcaagaaaataggagacaaaggacaaggtagagcaaatcttcaagcacacagaaataatgtggggagtaaaagctgaaactacaggcaggagtaggggggcacataaatcaaagcttgtctgccatttgatcaatcttgggatagggttgaactgagact

SEQ ID NO: 13531 - DNA, 471 bp, Homo sapiens
gcccgggcgggtactctataaatctagtggaaacatttctgcacaaactagattctggacaccagtgtgcggaaatgcttctgctacatttttagggtttgtctacattttttgggctctggataaggaattaaaggagtgcagcaataactgcactgtctaaaaggtttgcgcttattttcttgtaaaaattgaaatattgcatatttgaaaatttttgtttaattgatctaatgaatgtttttttctttaaaaatttaacacaagcttttcgtaaaattagaattttttcctttaaaataaaaattgcccaattttgctggcagagaatttaacacaataattataataaactaactttttataaaaaaaattctttagagtattataatcactgggaaaattttagaaccccggtaatctaataacttcctgttggcagacacttttataaaacttttttttgggttt

SEQ ID NO: 13532 - DNA, 402 bp, Homo sapiens
gaggtaccagtaattgagtaatggtggaaatgtgaaagtcagtcacaggactctcattggtgccagtgtcatagttaagaaagaaagaaagaaagttttatatatcctgtaatctagactggaagctaaataattgctaggaagcaaacttaagtgatagctgttaagttttttggtttgtttttgaccagagatgatgaagtaggtgatcttttcttggtttgctcctagactcttccattttaacttatatttttagtttggtgcaaaagttaattgctgttttgggaccatgaaattgtaagttcatttataactagggttcaacactaaatgcttttattatattaaaaatagggaacccatttaccgattcaaacaccattgttttggcccaatgaa

SEQ ID NO: 13533 - DNA, 370 bp, Homo sapiens
  misc_feature 370: n = A,T,C or G
ccgggcaggtaccaccacacccagctaattttttaaatttagtagagacggagttttgtcatgttggccaggcaggtctcgaactcctggcctcaagtgatccacctgccttggcctcccaaagtgttgggattacaggcgtcagccaccacgaccagctaacaaccatattcctaacacatatgctactaggactgtgtgattttataactacatcattaaaattcatcttgcctttggggagcttacaatttaatggaaatactgaattaaaaataacacacatatacacatgtgaaaacagctctaacacaagcacggtaaagatgtatgcagctagaatggagcctatgaaacatttcaatttatn

SEQ ID NO: 13534 - DNA, 383 bp, Homo sapiens
gccgaggtcctgctagtaaaaccaatgaatgtttaactccttcataagcaaaattatttttatgtgatctctaagaaattcctcctttcacatttttctgttttcatacaggtcctcatgctgataccgccagtggatgccagaatttgcagtgtggttttcgagcctgctgccgctctggcgaatgacccttgacttctgatctttgtctacttcatttagctgagcaggctttctttcatgcactttactcatagcacatttcttgtgttaaccatccctttttgagcgtgacttgttttggccccatttcttacaacttcagaaatcttaatttaccagtgaattgtaatgttgtttctcttgcaaattatacttttggt

SEQ ID NO: 13535 - DNA, 377 bp, Homo sapiens
aggacaaaactcccccattatattagaaaataaataaaaggttaccataagtaagctccagaaaaacaacatattgccgacctcacggatttttaccaaccactcgctttccctgtggccttggcacactggcatgctggtctaggatcctctacgcacaacgcctgctcgcctcctccgtgtggttgccaagccaagccgcctgctaccttcatcaccaaattgcactcgctccttcctggaatcctttttcctagattcaccaccaaatcgttagcgctccttccttcttcctagcttccttcaccaaatcgcactggctcctggactcttttcctatcttcaccacgaactgctgcttgctcgcttgctcctca

SEQ ID NO: 13536 - DNA, 392 bp, Homo sapiens
  misc_feature 264, 272, 292, 298, 306, 307, 336, 337, 358, 359, 371: n = A,T,C or G
aggtacaaagagtagctgccccttctcagggcagatgatgctttgagaacatactttggccattacccccagctttgaggaaaatgggctttggatgattattttatgttttagggacccccaacctcaggcaattcctacctcttcacctgacccttgcccccacttgccataaaacttagctaagttttgttttgtttttcagcgttaatgtaaaggggcagcagtgccaaaatataatcagagataaagcttaggtcaaangttcatangagttcccattgaactatantgactnggccacanncaggatcttttgtattttaaggggattcnntgagattttgcttttgagcannggattagataangggctgtttcttttaaatgta

SEQ ID NO: 13537 - DNA, 372 bp, Homo sapiens
aggtacttttttttttttttttttttttttttttttataatcaaatttttttttatttttctacagcaaaataaaaacattattttaaaaagcaatattctacattaaatacattaagatattgacaattttataaatacaatcattttaaacagtaaacatgataaatttctgatacaaggttttacatacgttaattgtgaaaatgtaaaaactttacacacttctcttaaaaagcattcaacgtaatcaattttacaaaattatcaatttaaaaagtgttagatatgcttctattttgttccattattaaggcaatgatagcatatcagatcttaaaaaagaaatggtgaattagggcctaagacatca

SEQ ID NO: 13538 - DNA, 478 bp, Homo sapiens
  misc_feature 61: n = A,T,C or G
tagttccgtaaacactactatagggcaattgagctccccgcggggggcggccgaggacctncatgttcttttttttttttttttttattttgttttttttttttttttgggcaaaattttttattatgaagatacagatctaagaacagaaggataattatgtgctagcttatatatagttccttgtaaaaataatgatacatgaaaaatttggtgaaaaatgaaaatctgcagttatctgatatctgaaaatgttaagcaatttcccctgcatcttaaattctaaatgacttttgcaggaattaatcaaggcatattttgggttgagagaggagtatttaaatggatttccatatttttaattaaataggggtacactgttgccgctatcaaaagtctttggtcggtaaatcttttttaaggaagtcaattttgtacaatttgtcatgggcattaaccttttggatagaagttgcct

SEQ ID NO: 13539 - DNA, 387 bp, Homo sapiens
ccggccgggtacttactgtgctaggtgctggaaacacgaagatgaagagccagagcctttgcttttcagaagctcatggtctgttggagcaatagacttgaagaatgtgatgaggagggtattaattaaaagttgtaagccaggcgtggtggctcacacctgtaatcccagcaccctgggaggccgaggcgggcagatgacgaggtcaggagatcgagaccatcctggctaacacagtgaaaccccatctctactaaaaaatacaaaaaattaaccaggcgtagtggcgggtggcctgtaagtcctagctatttcgggagggctgagggcagggagaattggtgttgaaaccctaggagggagattcgcgcccaactggcacttcca

SEQ ID NO: 13540 - DNA, 429 bp, Homo sapiens
tgaggcgccgctatcgactacttggcgaatagagcctcacccgcgggggcggccgcccggccaggtccaatagcctctgatgctaacatgtagcaaaagtgcctgaaggcaaaggcgaagttaatttctaagtatttgtattttattattattattattttttttattgagacagagcttcgctttgttgcccaggctggagtgcagtggcacaatcttggctcactgcaacctctgccacctgggtccaagcaattctcccacctcagcctcccgagtagctgggactacaggcaccctccatcgtgcccagctaatttttgtatctttagtagagacggggttttgccatgttggccaggctggtctcgaactcctgacctcaagtgatccacctacctcggcctcccaaagtgctgggaccacagg

SEQ ID NO: 13541 - DNA, 382 bp, Homo sapiens
gccgaggtacaaaacagccaggcaggggggcgcacaacctgtagccccagttactcaagggtcttgaggtggaagatccctcaagcccaagaggtcaaggctgcagtgagtcatgatcacgccatgccatggcactccagcctgggcaagacagtgagaccccgcctcaaaataaagtaaaatataaaataaaaacagcaagtgggaactcagcattcaagttaacttgtagagctacccagctgctaagagcagtgtgatccttggtgctcttaggatcactttggtatctgctcattttcctttttgtctaccctataaagcacaaaatcgagtgggtaaaaagtatgaaaccagcactgtttctactttcttagaggtc

SEQ ID NO: 13542 - DNA, 380 bp, Homo sapiens
aggtactggtggagtatattttaatatatagaactataatatatagtaacaatagcacaaagcatggaaaggggtaatcgaaatatactacagtaaagttctgacattttacatgaaatgtagaatattatttgactatagactataagttaaagatatatattgtaaaccctaaagccacaactaaatatttaaaataaagatgtatagctaataagggaataattactatgcaatagattaataaaaaattctcactctgaaagagaaaaaaagaagaaaagaacaaacagagcaaatagaaaacaaatagcaagatggtaggtttaaacccaacattattgataattacattaaaggctgaatattccaattaaagg

SEQ ID NO: 13543 - DNA, 488 bp, Homo sapiens
gccgagtacaaaaggacaatataattttcacatgaacccttggctgtagttgcctttcctagctccactctaaggctaagcatcttcaaagacgttttcccatatgctgtcttaattctttttactcattcacccgttcttcccaatcattctggcttgggcatccctcacaaattgaagttgaaagactgtttccttcctaaaaaacaaaatccttgacatttttatttatatgctcaaaagtccaataaccaattcccttttggaaatttttattattctgccaattaaaattttttaccaagtgagaaaatattgtattcaaaaacccctttcaatattgtttaaaaaccctttcttctatcttcctttttggaccaaaaaaacgtttccttttaaaaaaaaagggaattactcgaagaataaaatatttagcgctataaaataacccctttccaacttccaagtgaagggttaaaaaacctcca

SEQ ID NO: 13544 - DNA, 375 bp, Homo sapiens
  misc_feature 345, 353, 354: n = A,T,C or G
ccgggcaggtaccttcattgcgatcaaaccagatggggtccagcggggtcttgtgggagagattatcaagcgttttgagcagaaaggattccgccttgttggtctgaaattcatgcaagcttccgaagatcttctcaaggaacactacgttgacctgaaggaccgtccattctttgccggcctggtgaaatacatgcactcagggccggtagttgccatggtctgggaggggctgaatgtggtgaagacgggccgagtcatgctcggggagaccaaccctgcagactccaagcctgggaccatccgtggagacttctgcatacaagttggcaggaacattatacnatggcagnntgattctgtggaagagttgca

SEQ ID NO: 13545 - DNA, 375 bp, Homo sapiens
aggtacttttttttttttttttttttttttttttttttagtagacacggggtttcaccgtgttagtcaggatggtctcgatctcctgaccttgcgatctgcccgcctcggcctcccaaagtgttgggattacaggcgtgagccaccgtgcccagccccacctcaattttataatataattttctacacagagaacacagaaaatagttgtcttttgtttacaatagagaatcaacgtttttttttttactacttatagtttagaactaaagtttcagcttcacaactattggggatgctttgtaaatgtctcaaattactgaatttgtgaaaacctctcatgtttctttcacatgtgagttacaagaagattatt

SEQ ID NO: 13546 - DNA, 374 bp, Homo sapiens
aggtacgcgggggctggaatgctgaggagacaggagtgaagtaaaaagacatggttccggcaggaaacaggcaaggagagccttgacttgacggagtctggctatatcgccaggctggaatgcaatggcgcgatctctccccactgcaacctccgcctcccgggttcaagcgattctcctgcctcagcacctcgagtagctgggactacaggcgcgcgccaccacgcccagtaagaggaaataactctacattcaaatttgagcagggcacttggtgacctacttagacatgacattccttggcctccctttcagcaagatgagaaaactgaggcacagagaggtgaaataaggcccccagaatgctcttctcc

SEQ ID NO: 13547 - DNA, 373 bp, Homo sapiens
aggtacttgtatggggctgtcactgacttgacatgctgctgcagttccttggtcaactgatccttgtcatgggacaggaactgtggggtcaggacaataaaggccttcaccacccagaggcattaatgatgtcatcactcctccccaggaaacaaatgtagccctcttcatccatctttcctctgtccccagtgttgtagaagtccccacattccactttagctgtcttctctgggtcaccctcatagcacatgaagaggctcacaggcctgacaggtttgattctgatgccaatgtttccttctgtgttaggtggcaggatgctgcccttgtcatcaatgacctggacgtcatagggtggagtggccttccc

SEQ ID NO: 13548 - DNA, 385 bp, Homo sapiens
ccggccaggtacagagaaccatgggctgagccttacttttcagccacaaaataaaaatactatcattaaatcttagaatctgagttggcagataaccttgtctaatacccttctaactaaaactattccacagaattcctcaatcaactgacctctgttttaagtaatgacagacatctgatagctttagaggtggcaggttcttatgggtaggaacactttttattagggagatgtgcattatattggatcaaagccttactcctttttatatgaaatccgttattaaaagttctaggcttctgaagttaatacctaggatcattggccttcctacattttgccattcatggtgtttaaagaaaggtagcaacgcttttctatg

SEQ ID NO: 13549 - DNA, 389 bp, Homo sapiens
  misc_feature 180, 181, 183, 367: n = A,T,C or G
ccgggcaggtaccatgctgacttcttggtatcttttaaggcctaattttcccttccttgagattactgtagtgtgttccagctaatttctatttggaaacgagttggaacagctgaaaactaggtattattgaaggcaaagcagcctcacgtcagttttttatcagctcatttgggaagnncnttttttttttttgttttttttaattaattagaaagtaggctgggcacgggggctcatgcctataatcccagcacttggggaggccgaggatctcctctctggtggatcacttgagggcaggagttaagagaccatcctggccaacatgatgaaaccctgtctctactaaaaatacaaaaagtanctgggcgtggtggcatactctt

SEQ ID NO: 13550 - DNA, 408 bp, Homo sapiens
aggtactctgtttttttttttttttttttttggggcttttatcctgtttggtgttctctgagcttcctgaatctgtggtttcgtgtcacatattaatttagaaaaatctcattcattattgctttgaatatttcttctattcctttctctctgtcctctccttgtgggggtccactatgcgtgcgtacatcttttttagttggcccactgcccttggatggtccgttccttttttattcagtcttgtcccctttggtttcatttttggaggtgtcctcttgaaatatacctggagcctccggattcttttccctgaccccacattacaggtctggctttttggaggggtttaaacaacgcgggggctcttatttttttgtgtagttttccttgaacccgctagaaatg

SEQ ID NO: 13551 - DNA, 387 bp, Homo sapiens
acgtactttgtttttttttttttttttttcgccaaagtcaacatgttgtaatgtaacatatctttctttaacatctggtaaggcacagttctccattatatcaacggccttggaatctttatggctgtaattggatgtctgatcttccatatctatggtagatttagctgactacattccctccttaatttcgccaatattttgaataggatcttatcgaatacatcgtctgtcttaaaatgagtccccttttgcttattgcaagaaatgtgtttccagttattcgttaccacaaataaggtggaaataagctttaacagtcactacttctctcacaatacaattctaggaattatatttcacactgtgtacaggggtatagatatt

SEQ ID NO: 13552 - DNA, 385 bp, Homo sapiens
aggtacttgggactacaggcacgccccaccatgcccagctcatttttgtatttttagtagagacagggtttcaccatgttggccaggatgatcttgatctcttgacctcatgatccgcccgtcttggcctcccaaagtgctgggatcacaggcgtgagccaccacacctggccctctatttattctctttaaagagagagaaaactatgagaggccaaaattatttaattaaatctttaccttagcacaagggaaaaaaatggaatttgcctaatataggtgatgaagcatacacaatgaattgaaacaatcacattttagtaaaaggcaaaaaattttagaattattagctatatgggagcttattttttggggttgggaaaaa

SEQ ID NO: 13553 - DNA, 449 bp, Homo sapiens
ccgggcaggtacagatctgggaactaaatattaaaaatgagtgtggctgggtatatggagaatgttgggcccagatggaaccgtatagatcagatattacaacagctttgttttgagggtttgaaatatgaaatgatttggttatgaaacccacaggtttatgcaatgagggccagaaatcctgactcatgtgcccacgaggttagtctccttcgccatcattggcttgccgtcattgtcatctacaggtattggcatattgtgttagggtgccatgtccttggtgaaagcgcatcaaagattcttcttcggtctgctttatgcgtcttaatatggctagatgtctccactgtttgtagaccttgcatctatcacaaatcctgccaattgccctggttcataattgaaattatcccaccaacaaagcgatgctgtgtttgtccttgccc

SEQ ID NO: 13554 - DNA, 408 bp, Homo sapiens
ccgggcaggtactatagattatttgtcttgaagaagagctttgatatgtttcaaaattcgacgttggctttggaaggaaactgtaaatttacagatctttgtccttccccacaaagagccttaatctcacaggttggattatgtggaactcactgctatttttcagttctcctttaagtgactaaggaacatccagatactttcaaaaaaaaaaaagtctaagtttttcactttgtccattgccatttaattatctttctgcatattttaaagcatttcctgtgaacataaagtattgcccattccagaaaattttgcgtcctacatttgaattttaatggtttaaatgaaaaccttgtttcttcttcaaagttctttttatttaaatcaccataaaccttaagtatt

SEQ ID NO: 13555 - DNA, 394 bp, Homo sapiens
  misc_feature 148, 150, 161: n = A,T,C or G
aggtacgcggggacatactcattgcctactttaacacctgtcagagaaacgtgatatggggtaaggaggtgcttttttaaaatcgttcatagacttctgtaaaatgcaagataaattaaagttattataacagtgattctttcaaaananaaaaacacganaagaccaagaaaaaaaaaaaaaaaaaaaaaaaaaaaaaaaaaaaaaaaaaaaaaaaaaaaaaaaaaaaaaaaaaaaaaaaaaaaaaaaaaaaaaaaaaaaaaaaaaaaaaaaaaaaaaaaaaaaaaaaaaaaaaaaaaaaaaaaaaaaaaaaaaaaaaacaaaaaaaaaaaaaaaaaaaaaaataaaaataaaaaaaaaatttttctcctcgggagcttccccccatatgttt

SEQ ID NO: 13556 - DNA, 395 bp, Homo sapiens
aggtactgtgtaacacatggcctttcagtaagaaaagcgttgatggcattgcctggcagaaggaagtagagagcagaggcttaggggctgtgtgccagatggcattttgggagaaggagaacatctcacttctttgaaggcttgagatctcaggtccaaaggagactgagtgtgtgggaggagtggtagctactgaccaggaagttgttgctggctgcacttccctcctgatagggaatcctggattgcctacagaggggtctgaggcaattgtatctggtttggggttctaccaagtgaagctggagatttgtaaaagcttgtcatctattgatcgttggtccttgtacttaagtaatccaaagctcgatcctgatctgcatgaattagtatca

SEQ ID NO: 13557 - DNA, 400 bp, Homo sapiens
aggtactttttttttttttttttttttttttgtttttcatttccctggggacactaagtgatgcctcttcggattatctgaaaatgtgggcactctgtatggcaagatggaactggctgtctttaaggaaatagtttcaactgttcatgcctctgtttctcccttcataaagttggttactgagcctgcattctaaagtgcctgttgtggccgggcatggtccctgtaatcccagcactttgagaggccaaagtgggcagatcacttgaggtcaggagttcgagaccagcctggccaacatagtgaaaccccgtctttactaaaaatacaaaaaattaactgggcatggtggcgtgtgcctataatcccagctactcaggaggctgaggtgaaagaatcg

SEQ ID NO: 13558 - DNA, 386 bp, Homo sapiens
aggtacaaataaatgttaagacatgatccctgttgaaatccaaaagataaaaagcccttaagttttcttattttatattataaatggacaaggcagcaaatggtattaaggatacttttggtaagagaatagtttttatcagagcaggctgcaggtagaatatttctcaattactatttacagctgagtaacttttttcctatggacataaaaatatacactctgcaaatgattttttaatgaaaaatgacagcctattttctgcaacttggttttttacataataatcatggacatacatctaagattgcatatgtagatctcctgttttgatgatcacctagaattctgttttgtggttgtgcctttaattgaccaatgtcttg

SEQ ID NO: 13559 - DNA, 401 bp, Homo sapiens
aggtacttttttttttttttttttttcctttttcctttttcttttttttttttttttttttttttttttttcctttttttttttttttttaattttttccttttctgaaaaaaggtcccctggggcggaaaacaaaatcccaggggaggggcaaagggcaaaaggaaccccccgggaaaaaaaaaaacgcccccggggggcccccccccaggggggggcccccccccccggggggggccccccaaaaccggggggcccccccgcaaaaaaaaaaacccccccccggggggggggccccccccccccggggggggcccccccccccacgggggggcgccccccgggggaaacaagcccccccccggggaaggggaaaaacccccgcccccccgaagaaaaaa

SEQ ID NO: 13560 - DNA, 386 bp, Homo sapiens
ccgggcaggtacacatatactaagctgtaaatagtctgccttccattagtttggtctctaagcactataaatatgtcgacttcatatcagtctatgagacccagtgacccccttttcagaggcatcggtaatacatttggcaaatgtcttgaaacatgaattgtaaattaacataggtagaaccttgataataagagtcccaaatatgtatttttaaaaatgttaacattaggaaaaaaatattataatcatcagctctatttcctgaaaaagttcagttgaggtaacctctgcaagtcacagctccacatttacatactgttctgaccctctttttggctgggctgtggtcaatagaatctgaagatatatctccagaacctttt

SEQ ID NO: 13561 - DNA, 399 bp, Homo sapiens
ccgggcaggtacataacatcaaaaactactgtgtgaaacttgagaatgtctgattaaagatttcaatgtatatctaaaaactaactcaaatcgttgaccagcactttcccagtatcataacaatgcggctgaccctcttctgccttcactttacaccccatcatagcacattatttgtgcacaactagtgaggtctgtgcggctcatcatccccataaccaagtcggtctgtgttgagtcatatcattctgtgctggttttagaagtcaccataggaaacatgaagtcacatcctggtcaaaaaactgtccatttctcaaaaacagagaaaaacctgagatacgaggcagcaactagcgacacttacaggaagggaaagaacaatgacaacacccgccc

SEQ ID NO: 13562 - DNA, 390 bp, Homo sapiens
aggtaccaggagtgggatgttctgaaaagatatctgaaaatgtggaaacgactttggaactgggtaataggcagaggttggaacagttttgagggctcagaaaaagacaggaaaatgtggaaaagcttggaactttctagagactggtgaagggctttgccaaaatgctgataatgatatggaccaataagacccaggctgacgtggtctccgatggagctgaggaacttactgggaactggagcaaaggtgactcttgttatgttttagcaaagcgactggcagcattttgcccctgccctagagatgtgtggaactttgaacttgagagagatgatttagggtatctggcagaagaaatttctaagcagcaaaagcatttcagaggtg

SEQ ID NO: 13563 - DNA, 464 bp, Homo sapiens
  misc_feature 259, 288, 289, 290, 305, 308, 316, 317, 332, 348, 350, 351,363, 366, 389, 413, 414, 415, 436, 437, 452: n = A,T,C or G
ccgggcaggtacaccatttcattaataattactatgttgataacatgttgaaatataacattttggatatattagattaagtaaaatgtgttcttaaatttcacctgcctgtttcctttttattctttttttttttgaggcggagtttcgcttttaatcaccccaggcttggagttgccagcggcgccgatcatcggcttcactttgcaacctccgtcttcctgggggttcaagcgagttcttctttgccttcagcccntcccaagtagcttttggaattaccaagcnnnatgtgctcaccatgnccnccgtctannatttttgtatttttnaaccctggagaacggngnngtttcacccacnctnatgttggcttcaggctttggttnctcaaacttcttctgaccttcagnnnatgatccctgccctgcctccnnagcctcctcaaaagntggttttaggat

SEQ ID NO: 13564 - DNA, 396 bp, Homo sapiens
aggtactttttttttttttttttttttttttttttgaggcggagtttcacctgaccttaggtgatctgcccaccttggcctcccaaagtgctgagattacaggcgtaagccactgcgcctggcctcaattctttttaaattctttttaatgtaaaacaatagaattaggaatccaaaaaagaataaagaaaactggactgacataacaaagacaggaagaaaacaaacagaatgcataattatcagtataaaagatggcttaaaatcaaatgtagcagttattacaaaagagagtcaaattcccctactaaaaggtaaaaactctagagttaaaagacaaaagctatttgagacaatgtacctgcccgggcggccgcccgggcaggtacgcggggg

SEQ ID NO: 13565 - DNA, 482 bp, Homo sapiens
aggtacttttttttttttttttttttttttaagggaaaacatcttttttattattattatttttatttatttatttagagacaggttcttgttctgttgcctgggctagagtgcagtggtgcaatcctaattcactgtggcctcaaatttctggggttaaaatgaatcttccttgccccaccctttgatttgataggacttacagggtacacacccaccataccgtggaataaatttttttatattttattttccgtaaaaaaacggtagggttccagtccaagttttcctcccaggccttggtccttcgaacttctttggaccttcaagttgaatacctttccattgcccttggggctttggaaaaaactattaacccttttattgggaaaaagttatctcttaaaataaatggggttttgaaagtaaactaaagtaacttgtaaagggccttaggaaattattgaaaaagccctttatat

SEQ ID NO: 13566 - DNA, 826 bp, Homo sapiens
  misc_feature 643: n = A,T,C or G
ccgggcaggtacttagcttttatcaaatatataagtatttgataaaatactcacgtaagttacaggaaacacttccgcatatgttgtataatcaaggtcactgtctactttgtaattcagtgactattaagttcccaatagaaaatgaaagaattgctgggttcctactttctgataagaacagttccttgatttccccttttttcttggttgtcaggaagctccacagaaaagtctgtctaatcacagcaaccgtaataattatcatggcttagaaattcatttcttcattctaagatcataattttctattttcattttataaaccagattgttatttgaagcagcttcaaatctgtttgaaaaagagctgctaagatgatgcaatgtctgtgctgaaccaaaaagatattaactaaattttacaaagcaagcttttactgaataccagctaagtggtatataaataaaacaaattaaaagattaaccttgaacttgccaatctagtcatctttttaaaaaactactttgtagcattagactcctgtgactgattaaatatggcctttgcagctcttctcatcaagagatggaatctcctttcttatcccttgggtctgtgctgtccttatgattcgcttntgacgaacagaatgtggagaaagtcatgtgtgactcccaagccccagtttcaagaggttttgcagcttctactctcaatctcttagaaccccaagactacctgcttctgaaggagccttttttgaagtgagacccggtgttcccgctatttgaatcttgggccccaaaattgggattacagct

SEQ ID NO: 13567 - DNA, 501 bp, Homo sapiens
ccgggcaggacaatatggattgggatttcgattctctcatacctgtgaggcaatcagttcaggtcagtttttaaaccctgagttgttataatcagaagttctctacagttttaattggaagtttgggatatggcatacttttaaaattaaaccattttgttgaaatttcatttttagtgatgccaacttttcaaaagtggaatatgaggtacaaaacttggggttccgtcctgggatgagccaaaacttaaaaagtccccgtcttggcagtagacccagttatttcctctagattcccataagcatgaaatccttaagtactccacttttctggttaaaatttctacaggaggaaagcccctttgaggaagcctacaacggttcctttaaccgttcctggcttccccctcaggtccaaggcgggaaaaattaggccttaaatttaaattatcctggttcttttcaagatccaaaggaaaagctttggccccagcctggacg

SEQ ID NO: 13568 - DNA, 795 bp, Homo sapiens
ccgggcaggtacttattttttttttatttttttttttggccggggatgatccacaatttaacaagtttaattacatatcaagttttgttatcaagttctatacactttacaatcaattagatgttaattcttttatagaaatcttatatcagaatcaagttattggctctcctacagatttgcctgtcccagagaactcctagctttgcaacttaataactgtgtaacgcagaagtcacttaaaatctctggcatccaaatttcctacaaggttgctataaggatcaaacaagaagatgtggtgaaagcaaagaagcaccatgccttgcatttattagaaattcaataaaaagctgaattcatgtcctttcttcactctaaagaagccaaaaacaaagattgatgcaattaaccttattgctttaacctacattcttggcaggaaatgcttaccgaaggggttaacaggctctatttactgattattactttgggagaagaattctgtaaaacctttttaaaatcaaggctttaaaagaatgcaggaaacctttattgttctttgaacctgtttggcaattcaggaaccttgaagaaccttccgttgttgttaaaggaatcagcccagtcaagggcatacagggtggcggcttaatcacaactgaaagggggggatgttttgtgggaaaaactttttttttcaggaagaaattaccttgactccactgggttcccagcaaaaaaccttttggggtgggcacgaccctaaggtaacctctaatttttttttaaaag

SEQ ID NO: 13569 - DNA, 813 bp, Homo sapiens
  misc_feature 602: n = A,T,C or G
ccgggcaggtacgcggggacagctgtgtttggctgcagggccaagagcgctgtcaagaagacccacacgcccccctccagcagctgaattcctgcagctcagcagccgccgccagagcaggacgaaccgcaatcgcaaggcacctctgagaacttcaggtaggagaaaagcaaactccctccaacctcttacttcgggcttaaggcagagaactcgcctccccagaatctcctccctccatgatcccccgctattcctctattttcttttccgcggacctgcagccttgggtcgaccctgccctaggggtgactgcaggagagcagggaggatggtcaggcgtcaccaacaaccccatcacccagtaacaagaaccttgactctctcagtccctctgcatcaagacacttacccatttcccacctcatgcctgctaacttgaatgaaacaatcgctgggaaagcattaagagaattaaggctgggcactgtggctcatgcctgtaatcccagcactttgtgaggctgaagcaggcaaataacttgagcccaggagtttgagaccagcctgggcaacatggcaaaaccctgctcttccaaaanaataccaaaattagctaggcgtgctggtgtgcctgtattcccagctacttgggaggctgaagtgggaggattgctttcactggtgaagccgaagctgcatggagccaagactgacccttgcacccagcctgggtgacaaaacaagaccctgcttttaaaatgaatgaaaggagggagaaagagagagaaagggagtggggaaaaataaaat

SEQ ID NO: 13570 - DNA, 503 bp, Homo sapiens
aggtacgatgtgggaagacctttatatttggtttctaccttactgaacaccagagaatttacactggtgaaaagccctattaatgtaaagaatgtggaaggcctttattcgtagagggaatcttaaagaacatctgaaaattcattttggtttaaaaacccttatgacttgtaaagaatgttgggaaagtcccttttagtcggcggtggggcagtatcactgtaaccatcaggaaaattccataccggggtgttaaaaaccattacaaaattgtaaaagaattgtggagaaaggccctattaagtccgttaggtgttagtactccttaaaaaaataccattccaaaaggaaatttccaataccttggattgaagaaaaacccccttaatgaagcttgtaaaaaccaaattgttgggtgtaaagggtcccttttaagaacttttaaatttctaccaaccttttaactggataccaattcaaggaagaaaatttccaatcacctt

SEQ ID NO: 13571 - DNA, 493 bp, Homo sapiens
  misc_feature 332: n = A,T,C or G
aggtaccccagctgatgatgttccacaaaagagcaaaacatacacaatctggttccactctacagaaatcctggaactggactacaaagggaatagacagggtgtggcaggagggggttcctcacggttggagtgcgaggttagggacaggaatagaaggtaggtaataaacattcatgtggtattaacttagggcagatgtgtcaatgtatttccaagtttagcataatataggtataaaaattaaataaaaagtttatatgtgtgtgtatatatgggttaatacacaacacatacctcctagagtcattacctgagaggttctacaaganaagacagcaaattaacaaaaaatacacccagaatcaagatttgagttttggttcctttcatagcagaatggtatgcaacatttcttggaaaaatggctaatcctagggcttggaaagagaatataggagtaaagtctacaatttctcatggtacctgcccg

SEQ ID NO: 13572 - DNA, 383 bp, Homo sapiens
aggtacgcgggggctcagtttgggcttggatggtaacgtttattttccttggcagagaagctgatcgtcgaagggcatctaaccaaagcggtagaagaaacaaagctttcaaaagaaaatcagacaagagcaaaagaatctgatttttcaaatactctgagtccaagcaaggaaaaaagcagtgacgacactacagacgcccaaatggatgagcaagacctaaatgagcctcttgccaaagtgtcccttttaaaagatgacttgcagggtgcacagtcagaaattgaggcaaagcaagaaatacggcatcttcgaaaggaattgatcgaagcccaggagctagctagaacaagtaaacaaaaatgctttgaacttcaagctct

SEQ ID NO: 13573 - DNA, 521 bp, Homo sapiens
  misc_feature 491, 493, 494, 495, 503, 508: n = A,T,C or G
ccgggcaggtacgcggggatatgaggggttccgtgactgaggttctgagctgctgttgatgtgctatacctccttcaattctcagctctcaaaggggaaaacaactgcagaggatgggaaatgctatactgccatgcctggaaacacccacaggaaaattaccagttttgagcttgctcaactgcaagaaaaactgaaggagacagaagcagccatggaaaaattaatcaacagagtgggacctaatggtgagagagcacagactgtgacttctgaccaagagaaacggttgctacatcagctccgagaaatcaccagggtcatgaaagaaggaaaattcattgacagattttctccagagaaagaagctgaggaggccccttacatggaggactgggaaggttaccctgaagagacttacccaatttatgacctttcagactgtatcaagcgtaggcaagacacaatcttggtggattaccctgaccccngnnnagggaggnagaanaaaaaggtccctt

SEQ ID NO: 13574 - DNA, 378 bp, Homo sapiens
aggtacgtgaatgtttgcctagaagtcctgttccctatataataatactttgataatcatttcaaatgccaacccttccttaatataaaagttttgcgttatgttaaataaactatttttttctttattcttttcttttagctttatcttcaagccaggatgaagggagactgggcaagactcttacgccccacactgcaatttggtcttgttgccgtatccatttatgtgggcctttctcgagtttctgattataaacaccactggagcgatgtgttgactggactcattcagggagctctggttgcaatattagttgtaagtatacaggtcaacagcctacatcttgatattgctaaacatttatttaagtaaata

SEQ ID NO: 13575 - DNA, 389 bp, Homo sapiens
aggtactggcatcaacaagataaggtttccatggagctgccataatttttctataacgctgcccctaggccagaattggttggtctacaggtagatacctgatccaaactatgacaaccacaatattccagcccttgacaatgattgactcttccaggacgggcacttaactcaagctaggccaatcatagtcatttctcaactagatcctgccccactggtcatagctaattggtgcaggactggaactggatgcaagctgactctctggattgagaactagaggtcagaccattccctgtcccatgtctgaaactgaaatatgcagcactggaaaactgctcatgctcatggccatggggatcagccttccccttagcctcagaagg

SEQ ID NO: 13576 - DNA, 384 bp, Homo sapiens
  misc_feature 365, 384: n = A,T,C or G
aggtaccatttgcctcccgggctcaagcgattctcctgcctcagcctcccaagtagctgggattacaggcacctgccaccatgcccggctaatttttgtaattttagtagagacagggtttcaccatgttgcccaggctggtttcgaactcccgacctcaggtgatccacccgcctcggcctcccaaagtgctgggattacaggcttgagcccccgcgcccagccatcaaaatgctttttatttctgcatatgttgaatactttttacaatttaaaaaatgatctgttttgaaggcaaaattgcaaatcttgaaattaagaaggcaaaaatgtaaaggagtcaaaactataaatcaagtatttgnggaagtgaagactggaagn

SEQ ID NO: 13577 - DNA, 252 bp, Homo sapiens
aggtacttttttctttttttttttttttttttttttttttttttttttttttttttttttttttttttttaagggcaagcgaccctaaaacaggcgtagccccggggggaacccggggcccaaagggccttcaaagtgtcaatgatcaatgggtcctgcaattaacattaattttcgcaactagctgcgtttttaattgacccacaagccgggtgatccaccgttaaaagtggcccgcgttcctgcccgggg

SEQ ID NO: 13578 - DNA, 390 bp, Homo sapiens
ccgggcaggtactttttttttttttttttttttttttttttagaagagatggggtttcgccatgttggtcaggctggtcttgaactcctgaccttgtgatctgcctgccttggcctcccaaagtgctgggattacaggcgtgagccaccgcacccagcctatcatttcttaagtgggtaacaagaggcaagtcatccaaaaagacaatgacactactgttgtcatagaggaatagtaaaaccacagaaaatgtagtgtgctccaattcctctgagtcagcatttaagaggaattttaggtcatcaaggacttgtggtataggctgaaaactatggctttgactggggcaaaaaaagggaaagccaatatgccaaccattaaaatattatc

SEQ ID NO: 13579 - DNA, 394 bp, Homo sapiens
aggtactatcaataaaattggctgcttgggcggttttagttaccaccttagcctggttttctgctactgttatttatcatcgtaggttctgagttgctcattgtggttgctctttggaccaataaaaatggcaagtatgagatgaacatgataaaagtatgtttatataacaggaagaagctgggcgcggtgctcatacctgtaatcccagcactttgggaggctgagttgggtggatcacgaggtcaggagttcgagaccagcctgaccaacatggtgaaactaaaaattcaaaaattagctgggcgtgggtggtggcgtggtctggtaaatcccaggctactttgggaaggctgaggcagggagaattcacttggaccccagaggggggagg

SEQ ID NO: 13580 - DNA, 393 bp, Homo sapiens
ccgggcaggtacgggtgggaagcagaagcaatgaatcagaaaggagcagagcaacagaagtagacaggaagggtaggtgtcctctgtgtgtaggcagacgaaaaactagcaggaacaagagataagcgttaagggagagagacctcgggggcccagggagggcaggggtcacgggagtagtattggagctgcacaacctgctgcttctgctgatcttagattctgaaaggtggagaagaggggagagacgcaatgactggggagtcctcctacctaaatgatctgaatgatatgaatccttatgtgcctctacctgtattcctctttttttttggaatttgggaaaaaaattggctccacaatgttgtaccaagcctgttttcataaaattat

SEQ ID NO: 13581 - DNA, 386 bp, Homo sapiens
ccgggcaggtacagtgcaatgctttcatctgatatgccagtgtggtaagaaggctttccctggaggtagagactcttttatcagaaggttgggggtctccagaaggttttccccaccaggaattggatttgatggctggaatttagagcctacacatttgggtctcacaatcagggcagggcaggtaaggctaatggtgcaaactgtgtctctgcacaggcagtcatctaggggaaggggtgtggtgcagccagtaaaacctggaacctgcaagtggttcagaactttggtggccagtaagggaaaaactcctcaagcatgctacaatattgaaaggttcaaaagcactgacaaagtgttgttttgcccccggtgcagcacataat

SEQ ID NO: 13582 - DNA, 383 bp, Homo sapiens
aggtacagtagtgcactcttggctcactgtagcctcgacctccggggctcaagtgatcctcctgccttagccccacaagtagtgggactataggcacacagcaccatgcccatctaagtttttgtattttatgtagagacaaggtttcaccatgttgcccaggctgatcttgagctcctgagctcaagtgatctgcccaccttggactcccaaaatgctgggattataggcgtaaaccaccatgcctggccttaaatcaactttagagtcaacatctcttatcactggagcttctggagaaactccatcacgtggtgctctctttcctgatgtgttgtgcccaaatagcttgttctcatcaggtgacttatttgctatgatat

SEQ ID NO: 13583 - DNA, 399 bp, Homo sapiens
  misc_feature 327, 350: n = A,T,C or G
aggtacgatcttggctcactgcaacctctccctcccgggttcaaagtgattctcgtgcctcagcctcttgagtagctgggattacaggcgcgtgccactgcgtccggctaatttttgtatttttagtagagatggggtttcaccatgttggccaggctgatctcaaactcctgacctcatgtggtccacccaccttggcctcccaaagtgctgggattacaggcgtgagccaccgcgctcagcctacaagcaattttttaaaaactgacacctattactgataaaattctctgtttaaaatcctatttactattttaaagataagtnattagtttttttttaaatacaantaattctgttattgataaaatttaagggcatttttcattgccttttgca

SEQ ID NO: 13584 - DNA, 400 bp, Homo sapiens
ccgggcaggtacacgaataccgagagtgaatgctgaagggaatgatccccattggtggtgaccctcaggtgagactagggtgcctgtgtttcagcaaagcctgggcaattggaatgcagggctcctaagattccatgacacccctaccttctaattctgttattgcaactgcagacggttacctggcacgctggccacaatctacctcactcttatcagagtctgagcagtgctttcagctctgagttgaggcacctcgaaccttgtttttgtggtgaaggatcctaaagtgctgtgggggagtgatcacatttttcacaacattaagttaagaattttcagttactgacattcccttcagttctgattaaacctattttgatttcaccagttttttaac

SEQ ID NO: 13585 - DNA, 408 bp, Homo sapiens
aggtactcaaagctcgtgcatccagggaggggaaaccggagataggggtcttcgggccccgggcagaccctctgtgccgctgcaaaccgttgcagcctgaggctgtcaggtcctcccccagacacctgcggaccctccctctcctggcttccccgtctggtcatggcgagattctgggtctgcgtagccggtgctggcttctttcttgcatttttggttttgcattcgcgtttttgtggctctccagttttgaggaactttacttttgcagtttcctggagaactgaaaaaaattctttaccggctggatgtggggtttggccctaagcaccccagaaatatttttaccgggaacaacatttttgtgtttgccaagttgacttccccttaaatggaattggggtttat

SEQ ID NO: 13586 - DNA, 519 bp, Homo sapiens
tggaataccgctactactcctattatgcgacttgtagcagctccaccgcggtggcggccgcccgggcaggtacttttttttttttttttttttttttttttgggatttttagtagagacagggtttcaccatgttggccaggccagttttgaactcctaacctcaagtgctctgcctgcctcggcctcccaaggtgctgggattacaggcgtgagccaccatgcctgaccactgtttttcattcttttatccttttttcttcttcagattgtatgatttccagggggccttgtcttctaattaactaaatctttttcttcttgctttgatggtacccctggtgggttggaaaccccctttatttggaatttttttcaagttccaagttattacctattttccttccaacttcttatagaatttacctgggttggggaaccccttcgggccggctcctaagaaaactaggtgggaattccccccgggggcctggcagggaaattttcggattattcaaag

SEQ ID NO: 13587 - DNA, 401 bp, Homo sapiens
aggtacaagttgtgcaaagtgaggaagattactgagggagtgaaagggaatccctcacctggtgactcatgatgctcgaaccatccgctacccagatcctgtcatcaaggtgaacgatactgtgcagattgatttagggactggcaagataataaactttatcaaatttgatacaggcaatttgtgtatggtgattggtggagccaacctcggtcgtgttggtgtgatcaccaacagggaaagacatcctggttcttttgatgtggtgcatgtgaaggatgccaatggcaacagctttgccacgaggctttccaacattttttgttcattggcaaaggcaaataaaccttggaatttccctgcccaaggggaaagggcatttcgaatttactggtgctgaa

SEQ ID NO: 13588 - DNA, 394 bp, Homo sapiens
aggtacttttttttttttttttttttttttcaaaattgtaaaattttattttccacacatcaatattcttattaacacagcttgattgaaagaattctgaccagtggctggtcattacatgcagtggctcatgcctgtaatccaagcactttgagaggcccaggcgggcggatcacctgaggtccggagttcaagactagcctgacaaacatggagaaaccccatccctactaaaaatacaaaattagctgggcgtggtggcacatgcctgtaatcctagctactcaggaggctgaagcagaatcacttgaacctgggaggcggaggtcgtggtgggctgagatcatgccattgcactccagcctgggcaacaagagtgaaactccagcttaaa

SEQ ID NO: 13589 - DNA, 450 bp, Homo sapiens
  misc_feature 385: n = A,T,C or G
aggtactatttttaagaaaacactgttggcatctaatatatagaaatgtatacattttgaaagtgtaatgtttggctttgaaactcttctcccagttattgagtagcaccaattcagaagcacccatcaggagtataaggaatttttctagacttaatgtatttatttgctttaacaacagccgtaaaaaggttgatgattgggtagggaccgaacacacaggtttaaacccttaggctttgggaagaatccaaaggtcccataggtccttccaaattgtggcgtggtgaaaacaaggcagcctaaaaccgttgagaaaaacctatgaagggcttgagttttgacaaaccctttaaagtttgggttcattggattggaggggggnaaatggggatagttggggtttggtggtgttgccgttggggtttttttttttttttgtttggttag

SEQ ID NO: 13590 - DNA, 388 bp, Homo sapiens
ccgggcaggtacatatatttattttcttttgctagaagtgttaagacagaatccaagtcaggctgagagctcagtcataactattttatttaactacttccccaaggatgtggaccttacacttactttacagccagcctcagaaaacttcctagtggcaactaaggctagagcagcttgtaagtgggcgggagggggctcttccattctcacacgtgtgtgcatgaaccctttctcctatcctaaaggcccttcgggaagaagctctaactggtgatgagagcaaggtttgggggccgctacacttcggcagtgcagtgttgggaaggtgagaacacagttctaaagaacaagaattgttgagtctgaggaatatggggtctggacc

SEQ ID NO: 13591 - DNA, 444 bp, Homo sapiens
ccgggcaggtactgtggcatggcgcagtgggtgacagatggccacatagcggtcaaaagccatggccagcagcactgtggattccatgccagataaggagtggatggcaaacatctgtagcagacaagcatcaaactggatggtagtggaattgaaccaaaagatgggccagcatttggggcatggattgagggggaaatgagggatgtcaaaggcctgaaaagcatggcaaagaaaatttattacattgggcttcattgcagggctgtgcctcaattccgtcacaaatgtaatatgtatttgttaaagtttactctatgcacaagtaatataatggttagaagggaacgcaccaattgtggaaaggcccaaacccatatacttggagcactttttcttaaaacccagggtagggtccctattaaggaatgaaaatattgttag

SEQ ID NO: 13592 - DNA, 394 bp, Homo sapiens
aggtactttttttttttttttttttttttttcctttatttattttttaaaacagggtctcaccatcgcccaggctggagtgcagtggcataaccacggctcactgcagcctcaacctcctgggctcaagtaatcctcccatctcagcttcctaagaagctgggactacaggtgcacaccaccacatgtggctaattcttgttattttttgtagagacgggatttcaccatgttgcccgcccagtttgttcttgaacttctgagctcaagcaatttgcccactttggccccacaaggtgctgggattacagacatgagccatggtgcctggccaatttgattttcaaatccaaatgttttctaaggcacacaagtttaattatgacctaaacgaa

SEQ ID NO: 13593 - DNA, 392 bp, Homo sapiens
aggtacgcgggggcagcagagcgaaaggtggtggagtcctgaaggagggcctgatgtcttcatcattctcaaattcttaggacggtcgggccctggaaggaacgctctcggaattggccgcggaaaccgatctgcccgttgtgtttgtgaaacagagaaagataggcggccatggtccaaccttgaatgcttatcaggagggcagacttcaaaagctactaaaaatgaacggccctgaagatcttcccaagtcctatgactatgaccttatcatcattggaggtggctcaggaggtctggcagctgctaaggaggcagcccaatatggcaagaaggtgatggtcctggactttgtcactcccacccctcttggaactagatggggtcttggc

SEQ ID NO: 13594 - DNA, 468 bp, Homo sapiens
ccgggcaggtactttttttttttttttttttttttttactttcccagagtctcttggaatttaggcattacattcttttagaaactgttcttttatttctttacatcagagaccttgaatatttaatttacttttcagtaaagctgtcagttgtaatctacaatttttaaaaaaaacaaatggaaacaaaatcctcgttttcacaattttaaacccttattggagtctaaattcacttagaagctgcacagtttaattatttctccctgccagttatgaatggtgcccctccaatttggtaatttggtggttggaacccttttcaagtggcattttaaaatgcttccccgcagtgggctttattcagaacttggggaagaagaattaagttcttaccaattttccgaaacactttccaatataaattatgcctcattttgattatgtaaaaaccaggattggattagg

SEQ ID NO: 13595 - DNA, 398 bp, Homo sapiens
aggtacttcttaggtttttttaagatcctcactggactaaatggaagagaattctaaattctcaacgtgttctaattattctgaactattctccctctcccaaaaacacatacagatacacacaaatttattttgtgtgtaacccttgactttcagaaagtttgggttattctatgcataatttttttaaaaaaccatttggtttaaaataatttcaaacttaaagaatttgcaagaagagtataaagcattcccatatattctttacccagattctccaaatattaacatcttatcacattatttaaccctccttttgtgtgtgtgcgtgtgtggttttccccccacatgaaccatttgagagtaagttgcggacctgttgcccctttattcctaaa

SEQ ID NO: 13596 - DNA, 407 bp, Homo sapiens
ccgggcaggtactttttttttttttttttttttttttttggcatttttagtagagacagggtttcaccgtgttagccaggatggtctcgatctcctgacctcttgatccgcccaccttggcctcccaaagtgctgggattacaggcgtgagccacccatccggcctaacgagacttatttttactcaactagatggcgttcattcatttgcttactcagctgggccaggaattaagttgggcactgggaattccaaaaccaacaagacattctctgtcatcagggaactcacagcctagtttgagagataaacaaatgaacatgaaattataattcagtaacaaagaatgagtgttatggcagagggaatgtgtaagagcttggcagggtttccagcagggattcct

SEQ ID NO: 13597 - DNA, 391 bp, Homo sapiens
aggtacttttttttttttttttttttttttttcagcctgggtttctagggcagcctatgcctgcatcatttagtagtcagacaatgacctgggcaggggttgctcatagacctcaaacccataaagctttgccatctgccaatctatctgtatattgcctgaggaatgcattcaaagttacagccagttctcaagtcccctttaatttttactttttattgggttcccttgggtccctcctgcacatgcaggtaacttccctatcagccagagatatgtggagagcttatcgtagcccttctatggctctcttattttcaaggtcttcccatttagtttctggcaggtccaccatctactccaacaggcactgcaaccttcagctagcaaa

SEQ ID NO: 13598 - DNA, 481 bp, Homo sapiens
ccgggcaggtacgcggggagttcattccttaataaggaaaattgagcaagtatttaattggttggacattgcataaaagaggtccatatccaggctaactctagaaattttattctcaaacttatttggcctcttttttttctgtcagaggaccattcttagaggcactggggaaattttggctcctcagaataattcaactgcgctcactgtaaaaatacaatggcactacattggaatttgtataggaggaaaggagtccctgtatttgtgaggatgtgtctatgagaaaaattctttgctcccctggaatgggtgtcgatgctcaaagggaagaatcctttggtagaaggtcattaaatgccgtttgaaaccaaacattggccattgttttccttgtttttgtggtgttgatagcacctggtgggaaaggccccattacggaaaacaaatgttttttacactttggaagggatgggtg

SEQ ID NO: 13599 - DNA, 393 bp, Homo sapiens
aggtacttactttagcattatcattaaggatgaaggttctagaaccatcaggaacaagggtcccatcttcacacaagttacttaactgctgggaggctctatttcatcttatgtaaactatagataatacctactcacctcaagggtgtatcaagggtttatgtaagctaaatttgtagaaagcagttagcacagtgccaggaaggatccaagaagaaatggtacgcgggcattgaaaagaaaaatactcaactaattattgagtgcccactgtgtataaaatgttagtatccacgaattctgaaaattctgtgagtttcccaaactcatagaatgtttcagaatccgtcctgggaacagctacattccagctccctgctcctcccgtaatcc

SEQ ID NO: 13600 - DNA, 400 bp, Homo sapiens
ccgggcaggtaccttttttttttttttttttttttttttaaataacattctgttctccatctaaatgccacagaaacttcatgggagaaatcaaattaccttctcctaaatcatcagttaaatgacaagatatgtctactatatcttttaagaatttaaagttaatatattaaaactagatatcccaaatccacattttccaagttaatatgcattaaattacttacacggatggatgctcaaccttgtgaacacactaaaaaatattgaattgcccactttaaagaggataaattttggccgggcgcagtggctcacacccgtaatcccagcactttgggaggccgaggcaggcggatcacaatgtcaggagttcgagaccagcctggccaatatggtg

SEQ ID NO: 13601 - DNA, 535 bp, Homo sapiens
aggtacttaacccttgtttttaatatgagttacagatttttttttctggtatgtcatttgtcttttgaccttggtgttttgttatggatttttttttttctcagacttatcttttatggcttctgcattttaagtcatacttagaaaaggccttttccatgttcagattttaaggaattttactaggtccagggcatggttggctcacaccttatattgttaacaacttttggaaggctgtaggttggggtggcatttgttttgaagcttttggaagattttaaggcttgttatgtgaggcctatgtaattgcctgcaacttccagtccctgtataagaacaagaggcgtaggaccttgagtttttccacttctcccccccaaaaaaaggtactttttattaagggaaattttttccttttcaattggttttattctttataatccttttctgggtttttctttgatttttttccatattaaatttttctttatgatttcctgttatttttcttcaagcagtaaactgttttttg

SEQ ID NO: 13602 - DNA, 398 bp, Homo sapiens
aggtacaatggcatgatctcggctcactgcaacctctgcctcccaggttcaagtgattctcctgccttagcctccgaagtagctgggattacaggcacccaccttcatgcctgactgattttttgtatttttagtagagacagggttttaccatgttggccaggctggtctcgaactcctgaccttgggtgatccacctccctcgggctcccaaagtgctgggattacaggcatgagccaccacacccggctggaagtttgttttttggacaagccatagtttttgtcctccaggatatatcactgtctactttttaaagctctgtttatttgaattcaaaaaaaaaaaaaaaaaaaaaaaaagtacctgcccgggcggccgcccgggcaggtacttt

SEQ ID NO: 13603 - DNA, 533 bp, Homo sapiens
ccgggcaggtacgcgggggagttggctatccctaatgtaatcactaaaagtatctagaatatctaaataaaggaatgatcatttcagagcgtatgctagaatgctgaagttataataagtccacctattactttaatttttgcatttttcttaaagtgtttggcaacttgtcaaacgatttatcaattagttgtttttttaattaacatgggagatgtttttaatgccatgtttttattattgtattcaaaaaaaccacaatggactttttttaagtcctttaaaaaagtggaccttaagaactgttctttaattttccttgaaaaaattcaaaaaccctcgaaaaccccgggaaacctgtagaaaatggaatttttttaaaaccaaaaatttatatccccttcgctgatttgattttatttttattaataccaatatatttggttttctcctttgggggtccgcttttttagaaaactttaaatgggaatttcccccctggggactctggcatggaaaattttcgaattttt

SEQ ID NO: 13604 - DNA, 435 bp, Homo sapiens
aggtactttttttttttttttttttttttttttgtttttttaaaaaattattcttattaaggatgtgttaagggggaggtataaagcaacatcaaagttttcccaaatgggagtctgatgcaaaatcacagtgcaaactttgtgaacaagtgaagaaaactgtcgttttttttatcatctgtcatgctgggtgttacccatccaaaccttgcaagtcaacaaagtgtgaacagaaaattttttgagaaagaagcttgtctgtgatatccagagggaatgttttaattgacttaattttcattttctagctctcgtctatgtccacaactgggaagttaacagtgttcagggacctaatcaagtgagtgtgggagtgtaatctaaacttaaacgcctccaggggcccccgcgtacctgcccgggcggccgatctaa

SEQ ID NO: 13605 - DNA, 436 bp, Homo sapiens
aggtactgggattacaggcgtgagccaccacgccctgccaaaaggtgaaaaagcttgataagtgggtgcctcatgagctgaccaaaaattttaaaaatcgtcgttttgaagtgttgtcttctcttattctacataacgacgacgaaccatttcttagttggattgtgacgtttgacaaaaagtgtattttatacaacaacagtgatgaccagctcagtggttggaccgagaagatgctccaaagcacttcctgaagccaaactttcatcaaaaagaggtcagggtcactgtttggtggtctgctcctggtctgatccgctacagctttctgaatcatagtaaaaccaatacatctgagaagtatgctcagcaaatcgatgaggtgcaccgaaaactgcgaggcctgcagctggcactggtccacagaaagggtcca

SEQ ID NO: 13606 - DNA, 470 bp, Homo sapiens
aggtacttttttttttttttttttattttttttttttgcacaaatggcattttattaaataaaatttaatttacaaagctttgtaaattttaagaaaaacattcatagatcataaacaaaaatttcaatatgcaatattcaaatttacaagaaaataagctcaaacttttagacagtgcagtttttgctgcactcctttaattccttatccagagcccaaaaaatgtatacaaacccttaaaatgtagcaaaagcatttccgcacactggggtccagaatcttagtttgtgcaaaaaatggttccaccttaatttataaagttaccttgggccgtttttagaaactaggtggataccccccggggctgtaaggaatttcgatattcaaggctttatttaatacccgactgaacctcgagggggggggtcccggcacccccagcgttttggttccccctttagaggggggt

SEQ ID NO: 13607 - DNA, 583 bp, Homo sapiens
ccgggcaggtacgcggggaactacctacctaagcgatgaaatccaaaggtgaatcttttggatggtgattttgatgatagccacaaagcatgcaggctgtatggttagccttgaaaaccaacaggccacaatcacagtgaaaaccttaggttggcagcccactggaggatacaagaatgagttttgggatcttcctttcaatggcccccaattcccaggagaaactggtcaattatttttgaccttgcttggataggttacccttaaaagggaacgtgttaaagggatggttttataaatttttgaacctggaacaactttgtaaagcctttgcccctggttattgaaaccaggccccccccaattttttccccaatggcctttgtacaaaaaaaatttcagtaaggggctaatccttaaaccacctgggcggggttatatcttggagagaggtacttcaaactttctgtgtacaccctcaagggccttgggaggtaagcaaaatttgtcaccaaataccacctttgggcctttaacattggcaggcccttcaaaccttgttttagttcccttcatagatgga

SEQ ID NO: 13608 - DNA, 390 bp, Homo sapiens
aggtacaagcccaagggagattacagggaactcttgcagcagacaagaatgagattttgttttctgaattcaacatcaactataataatgagccgccgatgtataggaaagggactgtgttgatatggcagaaggtgggatgaagtgataacaaaagaaaattaagctgccaccagaaatggaaggaaaaaagatggcagtgacccggaccaggacaaagccagggcccttgcactgcgatatcatggggaatgcttttttggaaggaacattccagaaattttaagatgaaaaacagttgacccttttgcgcttaagttctgggggggctaaaccatgcaagcccttccaaccttccaagggctcctggccttagggggttgaagcatc

SEQ ID NO: 13609 - DNA, 384 bp, Homo sapiens
tgggggtgggggctgagggaggatgcctataggaatatgcgtgtcaatcgcgcagcgggtcccctcctcctccagaaagcgattcgtgtaagtttaaacctgcggccaccctgcgtgcctcggtgaacactgtctggtgcaaaggaggtatacgaaatgtgtttgttgaattgatccaagccattatcagcacttcagtgggctgggaggacatgaaaatagctgcatggtgaagtggtgtttgctggtgcctgtcctgtcccctgcctctgccagctctctcatgacattccttaggcaacctggcccgtttgcaggaagctgacagcaggtattcagaaattttaggatttgggcttaatttcagataagcaggacaacctg

SEQ ID NO: 13610 - DNA, 377 bp, Homo sapiens
aggtacgacatacactatttttcttaagaattctattctctatgtctctatgtaggagaggaaaatgtttcttttcttacccatcagttcggggtgggatccctatacaaagacgatggcagagaaagcctttaaattaattttaatgtaggttttaagtgacccaggagccttcaaaaatgaaaacccaaagaagcagggaaatgggtctatttttatgcttaggtctgacgaagaccagagagttatggggaagtgtgattggacaatgggaatatgatctaagggtaataaattggggaaaacttagcaacgcctgttggttcacattcttctgggtatctctctgtctttgaggataaggatggtctcttctg

SEQ ID NO: 13611 - DNA, 385 bp, Homo sapiens
aggtacataaaccttggaatgcccctcagttgtttccctgaaggtggccaggtggtcattacattttcccaaagtaaaagtaagcagaaggaggataaccacatatttggcaggcaggacaaagcatcgactgaatgtgtcaaattttacattcatgcaattggaattgggaagtgtaaaagaaggattgttaaatgtgggaagcttcacaaaaaggggcgcaaactctgtgtttatgctttcaaaggagaaaccatcaaggatgcactgtgcaaggatggcagatttctttcctttctggagaatgatgattggaaactcattgaaaacaatgacaccattttagaaagcacccagccagttgatgaattagaaggcagatact

SEQ ID NO: 13612 - DNA, 393 bp, Homo sapiens
aggtaccatgttcaggaaaccaaggacaatattgctctactgttggaaacagagtaatcaaattttctgtgctagccttaattcctgccctctttaagaggagcttaataaaatgtaaatatgcagaatgtttacttttggattgtctcatggtgtccctggaatgctccgagtgcacaagcttaccgcaaggccgaccacacgttctcgggagttcctggacagaccgttcttcacaacgaccacgctcaggtgtaacttcacctgggttcgaggagaccgtgttgggtgccaaagatgtaggggaacctgcctgatacaccacccgcaggctctccccttcccggtggagacgagggaatgagaaaagaaataaagacaaagacacaaagt

SEQ ID NO: 13613 - DNA, 380 bp, Homo sapiens
ccgggcaggtaccgggccttgtgccaaacaccttagatgggttatctctgaacttcacatcagtcatatgaggtgggtaatatcattatctacattttacaagtatggaaactggggattactgaggttatttgcccaagggtaacacagatggtagattctggagccagagttggaaactgggtagtttgctccagacccaatgatctagcatcctacatgtggtccattagggctctctcttttcatccgtttgtaaaagagaagttttcactttcttcttaaaccattgagaaacaacttggaactggaagtgcaaagggaagaattctaaagaaagcgttttaaaaaggagaaaggaacaagaaagcaggacaccc

SEQ ID NO: 13614 - DNA, 378 bp, Homo sapiens
ccgggcaggtactttttttttttttttttttttggttttttttttaactttcaaaaaactaattttaatcaaaacaaaaattgttgatcattaacaagtttataaaacagggatttaggtacataaataaattggtatcagggtttcaaatcttaattactttcaacttgatgagcatgtttacatgggggatgaattacaacctttttttttctttttacctattataataaataaaatggagcgcatgaaatagttcttctaaacaaaaatacctacaaacatacctctaagcatgttctctagtgaagggaacaagagacactggacaacttttgcacctaaacataaaaattgctttaaaaagcacaaggttac

SEQ ID NO: 13615 - DNA, 379 bp, Homo sapiens
ccgggcaggtacgtgcatatacacacatgtgtgtatatgcatatatacacacatgtatgtatatacatatatacacatgtatgtatatacatatatgcatatgtatgtctgtgtgtgtgtgtgtgaatatatatatgggccatataaagggtgaaaaagcatgtttgagaaacaataccacaggtgtggccaagggaccattagctaaagagattaccctgaatagaagggaaccaaatgctattaaagataatgggagaaagatcctgaagacatatcatagatcttagagtcttacacaaccatcacagtcctaaagatctatgagggcaaaatgattcaagaggatgggccgggggtgcccttgagacgcttgctg

SEQ ID NO: 13616 - DNA, 415 bp, Homo sapiens
ccgggcaggtactttataatttgttaaaagttaaaggttcatgtttctctctagatataaaatagaaattgtcgcatcttataaaccgaacccttgaggtagaatacataattacatttggttaaagttaaggtcctcatagaccaatttcccctgccaattgttacttttcccaaaaaaatggttgccaaaaaggttcaaacctcaaacattaccattaagaaaaaaccaaacctataggcatattaacactaaacatacctaaagaaaatttcactgacaattcataatctgtattcaatcatatatttaaagacataaatcctacaaagttgtttcaaaaaaccaatgttaataccttaacctctttttcaatttttggtctaacaagttaatgggtttaaagaacctttcc

SEQ ID NO: 13617 - DNA, 376 bp, Homo sapiens
catcttgggtcatcgatgagcctcgccctgtgcctggtcccgcttgtgagggaaggacattagaaaatgaattgatgtgttccttaaaggatgggcaggaaaacagatcctgttgtggatatttatttgaacgggattaccgatttgaaatgaagtcacaaagtgagcattaccaatgagaggaaaacagacgagaaaatcttgatggcttcacaagacatgcaacaaacaaaatggaatactgtgatgacatgaggcagccaagctggggaggagataaccacggggcagagggtcaggattctggccctgctgcctaaactgtgcgttcataaccaaatcatttcatatttccaaccctcaaaacaaagctgtt

SEQ ID NO: 13618 - DNA, 922 bp, Homo sapiens
  misc_feature 136, 138, 139, 148, 153, 155, 157, 160, 166, 167, 358, 361,364, 367, 372, 389, 395, 423, 430, 431, 433, 442, 445, 448,451, 454, 455, 461, 471, 472, 478, 479, 485, 491, 492, 493,496, 497, 503, 506, 509, 512, 513, 516, 519, 520, 522: n = A,T,C or G
  misc_feature 524, 527, 530, 533, 536, 539, 540, 541, 542, 545, 548, 549,551, 552, 556, 559, 560, 563, 564, 565, 566, 568, 570, 577,578, 579, 582, 583, 586, 590, 591, 601, 602, 603, 606, 607,610, 611, 612, 613, 616, 617, 620, 621, 624, 625, 628: n = A,T,C or G
  misc_feature 629, 636, 637, 638, 642, 647, 650, 651, 662, 666, 674, 675,676, 681, 684, 687, 688, 691, 692, 695, 699, 700, 708, 709,712, 713, 714, 715, 717, 720, 728, 729, 732, 733, 736, 737,744, 745, 748, 749, 752, 753, 763, 764, 767, 770, 773: n = A,T,C or G
  misc_feature 776, 777, 778, 781, 787, 788, 792, 793, 796, 797, 799, 805,807, 808, 811, 813, 816, 817, 819, 823, 826, 830, 837, 840,847, 849, 850, 852, 853, 855, 857, 861, 865, 869, 872, 879,882, 883, 886, 889, 893, 904, 909: n = A,T,C or G
gggtactttgcatgagccccgggggcggcggactgttttataatggcctgaaacccagctcacaaaaatatgaaattatcaaaggattatagtgcaatcttatgttgaaagaaatgaactacctcactttagtagntnntcacgttgnaatgntncnttngacagnnaatggttttgggagggttttttccaaatttgggggggtttttttgggtgggttgggttttccaaaaaaattttcattttttaacaaaaattaatttttcccttggaaagaaaattaaccttttccttttgtttgaaaagggtttcccaactttaccttaaaaatttggccccccctttgggggggattggnccnccnttnttggnggtcccaaacccaaggntttttntttttaaggcaaaaaaaaattaaacctnccaaagnntnttgggcaanaanaanaanttnnaatttnttttttgggnncctttnncccaangggggnnnaannaatttnaanttnggnnccnaannancnccnttnaanggnggnnnnaanaanngnnggtnggnnggnnnncncnaaggggnnnaannaantttnnccggaagggnnnaannaannnnttnnttnnttnnaannaaagggnnncccnttttnttnnttggcccgaantttnaaaagttnnnttggnccnttnnaannggngccnngccgtttnnttnnnncnaanggggtttnnccnnttnnttggggnnttnnttnncccctttttnnccnaanaanccnnnccncaattnnttcnnttnntntttaangnnggncnaannancctnttncttnttccccnccncccattntnnannangngggngttntttnaanttggggnttnnttnttntttngccccaaaggngcccntcctccaaaaggt

SEQ ID NO: 13619 - DNA, 378 bp, Homo sapiens
ccgggcaggtacagtagtgcactcttggctcactgtagcctcgacctccggggctcaagtgatcctcctgccttagccccacaagtagtgggactataggcacacagcaccatgcccatctaagtttttgtattttaaggtagaaacaaaggtttaaccatgtggcccaggctgatcttgagctcctgagctcaagtgatctgcccaccttggactcccaaaatgctgggattataggcgtaaaccaccatgcctggccttaaatcaactttagagtcaacatctcttatcactggagcttctggagaaactccatcacgtggtgctctctttcctgatgtgttgtgcccaaatagcttgttctcatcagatgactta

SEQ ID NO: 13620 - DNA, 377 bp, Homo sapiens
aggtacgaaaaaatcaggctactaagcccactgttaatatagacgcagaccaattgttaggaacaggtccaaattggagcaccattaaccaacaatcagtgatgcagaatgaggctattgaacaagtaagggctatttggcctaggccctggggaaaaattcaggacccaggaacagctttccctattaattcaattagacaaggctctaaagagccatatcctgactttgtggcaagattacaagatgctgctcaaaagtctattacagatgacaatgcccgaaaagttattgtagaattaatggcctatgaaaatgcaaatccagaatgtcagtcggccataaagccattaaaaggaaaagttccagcaggagtt

SEQ ID NO: 13621 - DNA, 391 bp, Homo sapiens
ccgggcaggtactaaagatatacaataaaagggaagaagattttcctagtttaagagagtataatgattttctggaagaagtggaggaaatcgttttcaatttgaccaacaatgtggatttggagaacactaaaaagaaaatggaaatatatcaaaaagaaaacaaagatgtcattcagaaaaacaaattaaagctgacgcgggagcaggaggagttggaggaagcattggaggtagaacgccaagaacatgagcagcgacggctgttcatacaaaaggaagaagagctgcagcaggctctgaaaaggaagaacaagcaggcctttttagatgagctggagagctccgacctccctgttgctctgctcctggcgcagcataaagacagatc

SEQ ID NO: 13622 - DNA, 392 bp, Homo sapiens
ccgggcaggtaccctttagcagtgtcatctggctgtgttctgtagtgtacatgagccattttccaaacgttgacattttttggaccagaagtgagctggatcttttctctggctaaggctacagtggaggatggaggaaaaggggatggtctaatggtcttttaggaagtggcatgacgtgggctctgaacgtgaagtggaaggaacacaaaacattctgttgattaggaccaataaaaaaacatgggaaattgcttgggacatgatatttaacatttattaatttttgtgggaaccagtaaaatgttcccttggtgccctatcaaacagatcctttgttgaatctgtcactattctaaccctgtgatgatctgttcttaaattcatcacag

SEQ ID NO: 13623 - DNA, 457 bp, Homo sapiens
  misc_feature 282: n = A,T,C or G
aggtacagcagtagcagttcatacatatctgatatgctttcacaccaggattcagtaaacaacaataaatataattgtcccctcttcaaaacaaaaaatggatttatacggaaaaagggttaatttacttggggtttaacagcacacccttttttaatgtgctttgaaggaattaaaaaccatgaaactgtattcactgaataccggtaccatagttatatcttttcttttaacgttggcttaaaatacattacattcatggacttttcctatttaaaaaancgctttaaatgcttatggggggaatgttgttggtttagtaattaaggaaccttattatttgaaaaaaaatctgttgttccctccaatattaaaccaaattgttccattttaaaaatttataaaaaaacaaaagattcttggaccattttttccccctttaaaaaatggtttaaag

SEQ ID NO: 13624 - DNA, 1149 bp, Homo sapiens
  misc_feature 126, 144, 145, 155, 157, 162, 170, 178, 181, 185, 193, 202,203, 206, 207, 223, 241, 298, 303, 306, 327, 344, 348, 349,357, 362, 363, 367, 380, 381, 386, 399, 400, 401, 402, 404,405, 408, 409, 410, 411, 414, 415, 418, 422, 423, 427: n = A,T,C or G
  misc_feature 428, 429, 432, 433, 434, 437, 438, 442, 446, 447, 448, 455,456, 457, 462, 463, 468, 471, 472, 473, 474, 477, 480, 481,484, 485, 490, 493, 494, 495, 497, 499, 500, 503, 504, 507,511, 512, 515, 516, 517, 518, 521, 522, 523, 527, 528: n = A,T,C or G
  misc_feature 530, 531, 532, 535, 536, 539, 540, 541, 544, 545, 546, 547,549, 552, 553, 554, 555, 557, 558, 561, 562, 565, 566, 567,569, 570, 571, 573, 574, 575, 578, 579, 581, 582, 583, 586,587, 589, 593, 594, 599, 600, 603, 604, 605, 607, 608: n = A,T,C or G
  misc_feature 611, 612, 613, 616, 620, 621, 622, 624, 625, 626, 629, 630,633, 634, 635, 638, 639, 640, 643, 648, 650, 651, 652, 655,656, 667, 668, 669, 670, 673, 677, 678, 681, 682, 683, 685,686, 690, 694, 697, 698, 699, 702, 703, 706, 707, 715: n = A,T,C or G
  misc_feature 719, 720, 723, 731, 732, 735, 736, 737, 740, 747, 748, 754,759, 760, 764, 767, 768, 769, 772, 773, 776, 777, 780, 781,784, 785, 786, 789, 793, 794, 797, 798, 801, 802, 804, 805,807, 809, 810, 813, 814, 815, 817, 819, 820, 822, 823: n = A,T,C or G
  misc_feature 824, 827, 832, 835, 836, 839, 840, 841, 844, 845, 846, 848,849, 852, 853, 854, 855, 858, 859, 862, 863, 864, 867, 868,871, 875, 876, 879, 880, 881, 886, 887, 888, 895, 896, 900,903, 904, 905, 912, 915, 916, 918, 919, 920, 924, 925: n = A,T,C or G
  misc_feature 927, 932, 936, 940, 943, 944, 949, 951, 954, 955, 956, 962,969, 970, 973, 974, 980, 987, 984, 985, 986, 988, 989, 991,992, 994, 997, 1000, 1001, 1002, 1004, 1007, 1010, 1013,1014, 1016, 1017, 1019, 1022, 1025, 1028, 1030, 1031,: n = A,T,C or G
  misc_feature 1034, 1036, 1039, 1040, 1042, 1043, 1045, 1048, 1050, 1051,1053, 1056, 1058, 1059, 1061, 1064, 1066, 1067, 1069, 1070,1072, 1074, 1075, 1077, 1079, 1080, 1081, 1087, 1089, 1096,1099, 1101, 1106, 1114, 1118, 1121, 1124, 1126, 1130,: n = A,T,C or G
  misc_feature 1133, 1134, 1142: n = A,T,C or G
gacgccctcactacttggcaatgactccccgggggcggcgggacgcggggaaaaagggggggagtgccctttcttgaaggaatcccttaagtgcacgtctcccgttttcttttcacatcaatgcanggagtccctctggtgaannaatttacganancagcncccgcgantagcgaanccntccncctaattntgggaagannttnnttgcgaaaggggtttnccgccccttttttttaanaaaggggaaaaaaaggtgggggaaaaaaaaaaaaaaatatttttttggggaaagggncccanaanaaaggggtttttaaatttttntttgttaaaaaaaaaantttnnttttgggnggggnntttnttttggggggggnnaaaantccctaaattttnnnntnnggnnnnccnnaantttnnaaannnaannnaannaaangggnnnaaaaggnnnggggnnttttnccnnnnccnaannttnnaaaanttnnncncnnccnnaangagnnggnnnnccnnntttnnannnaannccnnnttnnnncnttnnnnannggnnaannnannnannnttnntnnnttnntngaanntttcnnttnnncnnttnnnccnaaannnannnaannccnnnttnnnttnaaagngnnnttnntttgggggggnnnnccncccnnttnnncnngtgntttnttnnnttnnttnngccttttntttnnccnttttgggnnttnnnccnagaaggnnaaaggnggggnnaaanccnnnccnnaannttnnttnnnccntttnnttnnaanngnnantnnggnnngnanncnnnaanacctnttnnggnnnggnnngnnggnnnnaannaannnaannttncccnnttnnntgggnnnggaaccnnaaanccnnnccttccnaanngnnngaannanaggtnaatnaaanttnnttttncnaannnaaaccntttgggnnccnnggtccnnttnnncnnanncnttnggnnncnaanaanaannannanttnaanccnannaantnggnngnncnccntnnanacnanntnttngnngnnantnntntnnngttaangnaaggggnaangnaaaanaagggggnaggnccnccncntggnttnnattgtggnttggaag

SEQ ID NO: 13625 - DNA, 382 bp, Homo sapiens
aggtacaaggctaagcattttaactttatactggaaaaaaaatcaaacaaaggggagggataaaggacttagtcatctttgcactggaaaacaaaatatgtaattaaattcccatagctgcatgtaacattgaattcttccagggtaaaaaaaaaaagttaatcctgtgatattaatggaatgacattttgaggtcttgagaatgggcacaaaagtgggaaatgaatttcagtatgggcaaagacactgaggatgatgttgattagataattcactccgtaatgatcatgctgtgtgctagtaagtataaccctggaaagatcttgagatgcttcccagcctgttcacagatcccctgggccagaacactccttaggaaaaa

SEQ ID NO: 13626 - DNA, 340 bp, Homo sapiens
aggtactttttttttttttattgaatgttctaaattaatttttatattttataattaatttatatttttttataaaataatttatttttttataatttttaatttttatttttatttttttaatttaatttattttattttaattttttatttaatttttttttttatatttattttttatattttattataatttttatttttttattaatttatttatattaattttatatattttatttaattatttatatataatttataattttttttaatattttattttttatttatttaattaattttatttaataaattttttattattttttaatatttt

SEQ ID NO: 13627 - DNA, 234 bp, Homo sapiens
aggtactttttttttttttttttttttttgggatggagtcttgctctgtctcccaagctggagtgcagtggtgctacctcggctcactgcaacctccgttctggttaacacatctcgctagcttcgtctgcttcgctccacagcactatgattataacggtaatgtgatgtattactacattactaggtggatcagtgacactgcttttggttataagtttttagcttttaatg

SEQ ID NO: 13628 - DNA, 388 bp, Homo sapiens
aggtacttttttttttttttttttgagacggaatcttgctctgtcgcccaggccggagtgcagtggcgcgatctcagctcactgcaagctccgcctcccgggtttgcgccattctcctgcctcagtctcctgagtagctggggccttccggggccccggccaaccacacccgggctaatttttttcgtatttttttagtagagacagggtttcactgtgttagccaggatggtctggatctcctgacctcaggatctgcccgccttggcctcccaaagtgctgggattacaggcgtgagccaccgcgcccggccccaaaagccttttttaaaatgggaaactcgtgtagtgccattcccttctacaaaattctgacatccttccagtg

SEQ ID NO: 13629 - DNA, 405 bp, Homo sapiens
aggtacagggtaaacaggaggatccttgctctcacggagcttacattctagcaggaggacaatattaatgtttataggaaaatgatgagtttatgacaaaggaagtagatagtgttttacaagagcatagagtagggaagctaatccagcacagggaggtcacagagacatccctaaggaagtggagtttaaactgagagaagcaagtgcttaaactgaaggatgtgttgaagaagaagggagagtagaacaatttgggcagagggaaccttatagaccctaaggtgggaaggttcaaagaactgaaagagagctagaacagctggagccgttctccggtgtaaagaggagtcaaagagataagattaaagatgtgaagattaagatcttggtggcattcaggga

SEQ ID NO: 13630 - DNA, 396 bp, Homo sapiens
aggtacctgtgttcatatcctgaactgcaccaaggaatagctccatgctaaactgtcttggctaaaatacaaccagtgccatcattcctaatcagactaataaacaaaatgtcttttaaggtaatgagttagatggctgtgtttaggttttgttcaggatttactttggattctcctgctttaagacccaaagaaagttatattgagtttttattgatgattctatgtgtttttaacagagtgtgataggtgaattaaacatattaaaagagttctatagcatctgttcagaaaagattatatactatacaaactattcaaggtcattacaaaaacccatttttcatttgtccttttcaaaaatgaggaaagaaatccctaattcagccacggctt

SEQ ID NO: 13631 - DNA, 650 bp, Homo sapiens
  misc_feature 491, 624: n = A,T,C or G
aggtaccgcacacaattgtatgcgctgcactttcatctgactggaagcacagtgggacttacaaccagacatctaacaacaaacagcgtgcagacagttagcctttgacacgtgacaggcgagaacggccgaatactcaccatagggggggaccagtccacctgaattttccaggcgccccaattaaattaaattcctcaatggggggaccttaccttgtttgatcaaaaattgtaggggatcgcaaactcactatgaaacccaaagaaaaacatttgattgggaaaggccagccgggaccatagtgttaagaattgtcgttggggaatgttttgaggaaatgtggggggcaacaatccaaaaaaaattcacaaagtcaaacaaggccattctttggggcaacggggtggcttacaattctcataggaaagtgtcataggaacgtacggagaaaatagggccatagccatagaaaaaggcaatttcttggnaagtaaaacacaccaagggaataagcgaggcaagggtgggccatttaggaccaaccactaactagccagggaaaaaaaacttaccttttaccactcaaccaaatcgttgcattgccttaattaaaaatttgtnctttaaaattttggcaccttttggcg

SEQ ID NO: 13632 - DNA, 642 bp, Homo sapiens
  misc_feature 155, 164, 166, 167, 172, 400, 401, 407, 415, 425, 428, 455: n = A,T,C or G
gacgcccttcactacttcgcaattgactccaccgggggcggccaggactgaggctgatacagccacagcctctccccatccctccagccttatctgtcatcaccatcaacccctcccatgcacctaaacaaaatctaacttgttaattcctatgnacacaatgntnncaggnctaattaacaattttaatttttcgcctttttcctagggcccccttgggaaaagaaaaaaaggccctttcctttttttcccccctttttgggtaaccttttctttattaaaaaaaaattttcctttaaggaaaaaatttgggaaatttggctttaaaaataaagattcattttttggtaaaaaattaacaagttttttggaacccttaatttccgtattaatcgttttnncaattngccaaaanaagcaagaanggngtaacctacattgattgaagaagtgtncaattcagtgccacaatgtagtaactatgcaacattacctataaaagtgctaattcttgatttattaagaagttttaagataaaaatatattgaatatgcaaagaagaccaccagaagcggaaatgttttaatggggggccaacgttttgtaaagccctggtgatgttgaaagcaaaaaggcacggg

SEQ ID NO: 13633 - DNA, 376 bp, Homo sapiens
ccgggcaggtacttttttttttttttttttttttttttggcttataaagttaggtcaatttccaaaagtgctggagtttatgccaagaattaagtgactccctggttgcagtggccaaatagcctgaaatttttaaagtaaaacttaattttgcaaaaatttttcatgtaaactcctttgcctgaccatgccctaatttttgtgattaggaaaatctggctcttatcccactggaggaaaagtgtctagttcatattctaatggaaatcatcacttgggaggtgttttgacaaacatttctaaattttgtttaaaaattatgttaaaaattaagaaaaataacgaatggaaaacaaaatctaatttttggtatatt

SEQ ID NO: 13634 - DNA, 376 bp, Homo sapiens
aggtacttttttttttttttttttttgtcaggaaaatatctgatctgattcttcccagcttgcttcccctacaacttaataagcccttcactaacccctgtatgtattaactgcaattgcctagcccggcatttacactcttaaaagatttaacgccattacaatcaaaaaacacttgtcatatataacactttttcacatggaaataaattggtggtttaaggtttacaattcctttgaataaaatttcagttattagttacaaaatgctaagacagattgaggtctcaaagaaagaacttgagaaaattatgttttaaaggacttcacaaatatgaagcataattgttagaatcctgatacaaagtaacttttc

SEQ ID NO: 13635 - DNA, 376 bp, Homo sapiens
ccgggcaggtaccactgcactccagcctgggtgacagagtgagactccgtctccaaaaaaaactttgcttgtatattatttttgccttacagtggatcattctagtaggaaaggacaataagattttttatcaaaaagtggtcatgcccataagagaagttatattcttttctaatttcttccccacccaaaaataagctaccatatagcttataagtctcaaatttttgccttttactaaaatgtgattgtttctgttcattgtgtatgcttcatcacctatattaggcaaattccattttttcccttgtgctaaggtaaagatttaattaaataattttggcctctcatagttttctctctctttaaagagaat

SEQ ID NO: 13636 - DNA, 300 bp, Homo sapiens
ggcatttctcccagggatctctgtgcttccttttgtgcttcctgtgtgtgtggatatttaaaggggctggaaatgtgcaaaaacatgtcactacttagacattatattgtcatcttgctgtttctagtgatgttaattatctccattttcaacagatgtgtgggcctcagatggtaaagtcagcagcctttcttatttctcacctctgtatcatcaggtccttcccaccatgcagatcttcctggtctccctcggctgcagccacacaaatctcccctctgttttctccccgcgtacctt

SEQ ID NO: 13637 - DNA, 374 bp, Homo sapiens
ccggggcaggtacagggaaatactactggaaacaaaattaagtgtagaaacagaccagaccagaatatacatgctgattcccgttacatgaaaggtccagcgccaggcgggcaggcagccagccacagaaaagggaaaagggcccaggaggaagtggctagacctgacgctaggcaccaggggaggcggggaaggagggcagaggcaggagagttcactgtgagagctcgacaaggagtagctgctgccaaacatctacattcatttacccgcatttcacagacacaggcttggggaggttaagtaacttgctcccagacataaagttgccaagtagtccagtcaggattcgaaccagctccagtgccctattg

SEQ ID NO: 13638 - DNA, 379 bp, Homo sapiens
ccgggcaggtactttttttttttttttttttttttttttggtaataatttaacttaaataccacacagaaaaaatgctacctaaagctgactgttttccagtaagaagtcagcaatattaccacagttgggacacaaattttgaaacctaactatgtttgcaaaggaccaaaaaggacctaaaaaataaaaggaaaagtgcacactcaaaaaactgtcatcaaatttgtagttagcttggaaatattctgtattttaaacttactattttctatgatccaaaaacatcaattatttaacaaataggtttatttagaggaggtaaaaaaaataggaggggaaaataccaagctgtaagagtaacaaaaagtttattttaa

SEQ ID NO: 13639 - DNA, 375 bp, Homo sapiens
ccgggcaggtactgaggctgtatacagccacagcctctccccatccctccagccttatctgtcatcaccatcaacccctcccatgcacctaaacaaaatctaacttgtaattccttgaacatgtcaggcatacattattccttctgcctgagaagctcttccttgtctcttaaatctagaatgatgtaaagttttgaataagttgactatcttacttcatgcaaagaagggacacatatgagattcatcatcacatgagacagcaaatactaaaagtgtaatttgattataagagtttagataaatatatgaaatgcaagagccacagagggaatgtttatggggcacgtttgtaagcctgggatgtgaagcaaa

SEQ ID NO: 13640 - DNA, 375 bp, Homo sapiens
ccgggcaggtacatcggagcgtgcaggctgcgttccgtccttacgatgaagaccacgatgcagtttccaaacattgccactacatacatggaaaggagggggaagccaacccagaaatgggctttctctaatcctgggataccaataagcacagaggtggcatgtgtgaagttgcaggaactcatagctggaactgaggaggggtgactggagagggtgaggtcacactggcagtagagcccatacagcagttcggcctgttcctttcaggctgactcagaaggctgaggaggctttagattccaggggagggccgagcttgcaaatatgaggagacttattccagcctgactggagacaggcacagagctgaaa

SEQ ID NO: 13641 - DNA, 309 bp, Homo sapiens
gaatggtgggcttttttataaatatatcataattattacctcattttgagaataccaaaattcaatcggattcttaaagaatcctcttaggctacttcactcaaagtctctgcagctgcctgcactgggaaggctgcaacataaatctgtctcttcacttctccccaggccttggaagggtccactttgcttttcatatcaaacagagcatcataaattcctgggaatgactcccctgcatacttgttggggctgcttggagcatagatgacatgcctataaaaaggcctgtctggtaaccctaatgga

SEQ ID NO: 13642 - DNA, 379 bp, Homo sapiens
aggtactttttttttttttttttttttttttgggtatgaccaagttggccacaattatagcaggctccaagaaaagaatcagtcgagccagtttggttgccgtgcttcatggccggtgcccacagaatagctctgtgggtctccgatccaacgccttcacaagctttaatatatgcaggcaacacctcatgatcaggtaaattttgacgtaggatggaatgcacggccattttacactcatggttcgcattttgaaaagctaacatatgaagaagaataccttgagtgtgctcatcagagacagatttttcaacagcatcttgtaatttagctaaaaatcaagatataattcattgggaccctgtttaacaatagtaaa

SEQ ID NO: 13643 - DNA, 380 bp, Homo sapiens
  misc_feature 380: n = A,T,C or G
aggtacaaagagtagctgccccttctcagggcagatgatgctttgagaacatactttggccattacccccagctttgaggaaaatgggctttggatgattattttatgttttagggacccccaacctcaggcaattcctacctcttcacctgaccctgcccccacttgccataaaacttagctaagttttgttttgtttttcagcgttaatgtaaaggggcagcagtgccaaaatataatcagagataaagcttaggtcaaagttcatagagttcccatgaactatatgactggccacacaggatcttttgtatttaaggattctgagattttgcttgagcaggattagataaggctgttctttaaatgtctgaaatggn

SEQ ID NO: 13644 - DNA, 403 bp, Homo sapiens
aggtacatctagcctgaggcaacctccacggaagagccagggaaataaatgctctgccttccagtcctgtggggactgttcagtgtgttatggaaggggtcccgaacatcccgggccatggaccagtgagctgcgggcgaactagcactcactgcctgagtattactgcctgagcttcgcctcctgtcagatcagtggcggcatcagattctcacaaaagtgcaaaccctattgtgaactgtgcatgtgcaggagggatctaggttgcacgctccttatgagaatataactaatgcttgatgatttgaggtgtaacagtttcatccccaaacaatccccccaccgcctcacctactcaatctctgtagcattccacagtctttatagcaacagaataccccct

SEQ ID NO: 13645 - DNA, 378 bp, Homo sapiens
aggtacaataattgctggaacctgggaggcggaggttgcagtgaaccaagattgcaccactgcactccagccggggtgacagagtgagactccgactgaaaataaataaacaaataaataaataaataaataaataaataaattttatggatggtgaagggaatggtatagaattggagagattatcttactgaacacctgtagtcccagctttctctggaagtggtggtatttgagcaggatgtgcacaaggcaattgaaatgcccataattagtttctcagctttgaatacactataaactcagtggctgaaggaggaaattttagaaggaagctactaaaagatctaatttgaaaaactacaaaagcattaacta

SEQ ID NO: 13646 - DNA, 485 bp, Homo sapiens
aggtaccagctgaagcacttcagcgtgaacgccacagaagtggctccacggcttgttaccttagaaatccccataaatctccttgaacagacctgggacagaatgtgcaatgtccttgttgatttccttttgtgaaaattaccacagtctctaaatttataacctggaaaatgtctttgagaatagaaaaacccctcaagattttttcataattgtgtaaaagctatctttaacagacaaaatggtttttgtttctctacaaaattcattttggtgaaggggattttttggtttcttgtacggagaaggtcgctcctttcttttgtattggtgctttaggtttcaagctgaagtaaaagccttcctttaagccccttgtgaaattcttggggaagtcaggtctttcttgttcgggcacctcttgtagggccctttcacctttgggggttatgtgttgaagggcccccatttaatagtaagcattg

SEQ ID NO: 13647 - DNA, 406 bp, Homo sapiens
aggtacggttcagcctgtgatcacttcattccaatcaatttatggggccgagacttgttacaacaatggcatgcagagattactatcccagcctccctatacagccccaggaataaaaaaatcatgactaaaatgggatagctccctaaaagggactaggaaagaagtcccaattgaggctgaaaaaaatcaaaaaagaaaaggaatagggcatcctttttaggagcggtcactgtagagcctccaaaacccattccattaacttgggggaaaaaaaacaactgtttggtaaatcagcagcgcttccaaaacaaaaactggaggctttacatttattagccaagaaacaattagaaaaaggacattgagccttcattttcgccttgggaattcggtttggaattca

SEQ ID NO: 13648 - DNA, 393 bp, Homo sapiens
aggtacactggaggctggagcctgcagatggcatggctctgcggctcaccttgctgcagttggtggtggtgacagagactgcagcttgactgtagtgaatttggaaattatctgtctggaagctctgagtttatcttgggacctcaagaggagaggatcacccaactcacagcaatcaaactccaaatggtgctataaactgaaccacacatggacacgtcagtcttccgaggacccttagatcaaccccaggaggagccctagctgctgttccccattcgacgcccctttccagcaggaagtagccagaagacatcgtcgcccaaacctctaacagcagttagtgcggcatctccacagggggaatgttgtaggagttattgataaattatt

SEQ ID NO: 13649 - DNA, 401 bp, Homo sapiens
ccgggcaggtacttttttttttttttttttttttttaaaaacagctatattttggcactcaagaggcaaaagctaatacagatgatgaaagaacacaaagaaaataagatttgcctattcaaaatggtgcctcgggcaggtcctgtatccagaagaggatgttcatccagggtctggggctaaggtcatcttagcacagcccagctgccagcttccctcctctgccgtttccctgaacacaagccagcttcccttatctagcccttcttggccctgttaaaaaagtgaatcctaaacctttttatgcacttgtattgaaaaaaccacaagaaagcttgggaaagaggaaagagggatttctttaaatttgggacaagtaattccaacatttttaataaaag

SEQ ID NO: 13650 - DNA, 319 bp, Homo sapiens
aggtactaaaagaaaatgaaacaggcaaatgatgaaatgtggatctttttcattcaagaatatggaaactcattggactgaaaaacccaaatcttcattataccaaacttctataatgatcttaatggtagttagctttaaaaaaacacaaaataggctgggcgtggcggctcaggcctgtaatcccagcacctcgggaggccgaggtgggtggatcacaaggtcaggagatcgagaccatcccggccaacacagaaaaaccccgtctccactaaaaatacaaataaaaaaaaaaaaaaaattaaaaagtacctgcccg

SEQ ID NO: 13651 - DNA, 468 bp, Homo sapiens
  misc_feature 3, 18: n = A,T,C or G
ganaaattctggacgcanctagtaataccgggcgaattttagctccaccgccgtggcggccgaggtacccagtaaataagaaagggttccaaaatgaatattcgctccttttgcaaaccttatggtaacaaatataatatttataaaaagtgaattaggtaatatgttaatggagaaataaacatcattatgaaatgctatcttaaacaaaaaataagagaaaatattagtttaaaaatagaacttatagtcgatttaaaaaagcaagaccaaactcttagctatgcacaagaaagttactttacccattcacaaatattaaaggatgagaaaacatggattatgaaaatatgaaccgaaatgaaactatagtagctgggcaaatttcagacaaaattgacttcaaaaaagacttttaaggacttaaccgggatttttcctaagataaaagttcccctttttttttaa

SEQ ID NO: 13652 - DNA, 517 bp, Homo sapiens
aggtactaagttgccatttaagaacctcttcaggttccccgtctccttgagctatgaaagttttcatgaacacttcagttttaatggcatgccaaacattttgttccatgagcatctgcaacagttttaaaaattgccattgagtgttttaatagaatttagcccagttttgttgtttaaataatattttcttatgaggccatgggctttacaaaaattgtattaaaagagggaaggttgcctcagattataaaaaggaatgcttttttgtattatgggaatggctgttttgccctttccttttaaaaaaatcaattcattaaaatcaaaatccttttttaataacagtttcaattggttttggggcattaaattgattttttatttcctaaaaaatttgtcaaaaaaaaattttgctttttaaaattgttacaaaaaagggggttggtcctttggtattttgtgtaacaaattatttaaaaatgcctggggggttccccctagtttattttgtcaa

SEQ ID NO: 13653 - DNA, 626 bp, Homo sapiens
tcgcccgggcaggtacgtcggggagggcatcacggtacctaccaatatgtagatgtcatcccctggtaggctccagacttgtgttcatgtgagataacttccagtctagggcaccatgagtatttcttgcagtcggtgataaattccaaaggtcttatttttatgtccatggtctggagttggtatttttgtgcccatgttcagtgaaagtcttttcttgtcccggttttagacttgagctcatcagaattatccaatcttattattgtgcttattgtttcagtgttgggtataggtaaacacgactattaattttaaaggttttctttttttcttgttgcgtaaaatacttcaagttataaattagtagttacttgttaggtgcataagcaatctcttccgtatgtgtaacaagtaaaccaattgttttgtgtattgtgttgtgaaagccaacccttttatctaattaacggatcctttcacaaggggaacaagtccataaatggggtgggaaatttttcaatgggtccttgtttttgggaaggcaatattaagaaaaccccacccaagttttacttaacggaagtccttggctttgaatttcataaagagttacctctgagaat

SEQ ID NO: 13654 - DNA, 389 bp, Homo sapiens
aggtacgacatacactatttttcttaagaattctattctctatgtctctatgtaggagaggaaaatgtttcttttcttacccatcagttcgtggctgagatccctataacaaaagacagattgacaagagaaaagcatataaatttattttaatgtaggttttaagtgacccaggagccttcagaaatgaagacccaaagaagcagggaaattggtctatttttatgcttaggtctgacgaagaccagagagttatggggaagtgtgattggacaatgggaatatgatctaatggtaataaattggggaaaacttagcaacgcctgtttgttcacattcttcttggtatctctctggctttgaggataaggatggtctcttctccaggt

SEQ ID NO: 13655 - DNA, 399 bp, Homo sapiens
ccggccaggtaccacatttgtgaatttatgccacagactcatttacgtagtgcactaaaattataagtagagataatgattgcagcatggtttagagtactaaaggactggaaacaatctccatggcactgataaggcaagacgtagggaggagaaatggggagtgactgctcacatacagcgccttcttttgggggtgatgaaaatgttttggaacttgatagaggtgctagcatgcacagctttgtgagttttctacatagtacttaattgcccactgcaaaatgttacatcgtgggctgctggacaaatggctcatcgcctgtaaccccaacattttatgtaagcccttgtggcgtggatctctctgaggcctgcattttcaaaaccacccctggc

SEQ ID NO: 13656 - DNA, 384 bp, Homo sapiens
ccgggcaggtacttttttttttttttttttttttttttttcttatattttgaagagatgagttctcactatgttgcctaggctggcctcaaactcctgacctcaagtgatcctcctgcctcagcctcccaaaacactgggacaaggtcacaatatttatcttctcaagtaaggggtctgctctttttgtcttcttcttcttgaccttgcagcagcatctgaaatggttttccctccttcctttctgaaaaacttttctctctggaagattccaggatggcagactcccctgacttacccatagcttgttgattagcttcatgactgttgtctttctgcctaatttcctgaatcttcctcctctaccagaacttttagagagcag

SEQ ID NO: 13657 - DNA, 387 bp, Homo sapiens
aggtactttttttttttttttttttttttcttaattcattttttttcccttggtataacttggaacaaattttttttcccttggtataacttggaacaaattttatttttaaaaagaaaaaaaaggaaaataatggtccacagctcctaccctcacccccatgagcccatccccaccacaaggacaagcttacagttcctgaaggtgaggccaacagctgctgaggagcaaggactcgttccagctgcttctaaacaagggggccaggcctttgccagagccttctccttcctgccctgtgtcaagctatccaagcttcctcctcaacctttaccctgccctatgccctgaaactacctgacacgtattttcctcttgtacctgcct

SEQ ID NO: 13658 - DNA, 403 bp, Homo sapiens
aggtacattctttctatgaagatttttcccgtgggatttccttccatttacccaataattcattcataataaacagttgttgaacctagataaaatacacctctgtctcttcccatttgcctataagtttcttgccaagatgtgatacagcagctcaaagaatgcttgccaagtcactaatagtctttgctctctctagttcagtgactttccgatactgtgtaacattcagggcactatgtgaacttgtaagtgtgaccatactgcatgttttatggtgacctggtccagtaccacatcacaaagaaactcaggagtgacagcagcaggaggctccatttgagggatctcagtgacatcctactcggaaggacagtccagagagccgaggccatccacagca

SEQ ID NO: 13659 - DNA, 401 bp, Homo sapiens
ccgggcaggtaccttgggtctgaaggggtcactcaagcgctctgctatctctgcagctaaaacgggtgtcaggttttcagctgctactaaagataatgagcataagcgttcactgaccaagactccagccagaaagtctgcacatgtgaccgtgtctgggggcaccccaaaaggcgaggctgtgcttgggacacacaaattaaagaccatcacggggaattctgctgctgttattaccccattcaagttgacaactgaggcaacgcagactccagtctccaataagaaaccagtgtttgatcttaaagcaagtttgtctcgtcccctcaactatgaaccacacaaaggaaagctaaaaccatgggggcaatctaaagaaaataattatctaaatcaacatg

SEQ ID NO: 13660 - DNA, 407 bp, Homo sapiens
aggtactgatgcaacagttgggtagccaatctgcagacagacactggcaacattgcggacaccctgggggagggaagatttcattttacgtgagattccctacaggaaaggaagtccaagtaagggtgaataaagagaacccttagcagacaataattgccaggttggcagctcagtctcaagagaggccatttcatctcataccaaatgctcctggcagagcaattcagccccatcaaataaattttgcccttattccaaatccaggtcttctgtatccattgttgatggcatttacttccaaagcccctaccacaacagtgaaaagcataaacgactaacgtagccattgagttccatgaacgaaaaatgttcaacgatttccagatgtgaacttcattcacttg

SEQ ID NO: 13661 - DNA, 413 bp, Homo sapiens
ccgggcaggtacagtatgggcaagtgggagttaatttataaccaaggatcagggtggggttggtgggtggaaaaatcacaaagagaaaacatcaagggtaagggggattctggctaaaccaaccaaacaggattcttgctgaagacaggctgggtgatcagacatcacctgtggcacggtggaggctgaggaacccgatcagatatccagagtgatcagataccgagggtgggaggttctggctaaactgactgatcaaggttttttgctaaaactggattttacaaggaaatgcacagatggcctacaaggttcaggaacttgatataagtttgatcaagcgaagaatctttgtccatggagagtgatgttagaaaggcggttttactttacagcatttcatggttgacggc

SEQ ID NO: 13662 - DNA, 412 bp, Homo sapiens
aggtactttttttttttttttttttttttttttcctgcacatctctaggggaaagcgtaagaagcataagattagcataggccagcagtaagtctgtattggttgcttgccagtcacttttatcagactccaaacactgtaaagactccagatattccttaagggtctgtacacttaaacagctttttttcacatcaagccttccagttgtctctgcttattttacccgggggctcaaagaagcagcgggttgcctggctattcctaggcagctcatctttgccagtatcctccttgtacgtcgaatttgaaaacattctataagccgcaagggagtgaggtctccctaaagtctaagaccccctaaaggaggaaagaggccccaaaaacctaagcacgcaggggttgagac

SEQ ID NO: 13663 - DNA, 407 bp, Homo sapiens
ccgggcaggtacctgaactgtatgcagctgtggccggcatcagagtggagagcctcttctacaactatagcatgctttgaagagtctcgggcaagaaacattcatgcatgagtatatgttcttggaatcaattcctctaagaacagagaatggtctttcccagggacacaaagggagaaatgggacatggattcttgatcttcctttacacatttctcgggaaatctgaaatgatgctggatgggactctacacatcctgagctaagacatactgtcagtctcacttctgctgtcccagtcctagaaatcctgggtagaagtgggggacctgtgcaaaggaggttttagaactctgcagtattttgttggggcatggcacaaataagcttatcccttccgtccgggg

SEQ ID NO: 13664 - DNA, 448 bp, Homo sapiens
aggtacttctttctttctttctttctttctttctttctttctttctttctttctttccttctttctttctttccttctttctttctttctctccttccttccttcctttctttctttcttgtcttgccaggctggagtgcagtggcacgacctcagctcactgcagcctctgcctcccaggttcaggtgattctcctgaccttaggtgatccccccctcctaggtctctcaaagggccggaattaccggggtgaagccactgggccccgggccctaatttgcctttttttaaatgggaaggaaaaagttgaaaatttccaaggggccttacacacttaaagggtttttaaaggggaggggggtttaattatgaatacattttgccttttgtagaaaaaactgattcctaaggctttcaaatggggaaagaaacagattggaaaatggg

SEQ ID NO: 13665 - DNA, 474 bp, Homo sapiens
  misc_feature 181: n = A,T,C or G
gtgcgcgctcgtatcgactagtatagggcgagttgcaccgcggtggcggccgcccgggcaggtacgcggggtttacattgacctttacatttaaagctgttcatccatggtgcctccccaaatcataagaccaaagaccaccaaacgcagggtggactctgctcattattctttgacccanaaagactggagaaggtatgtgctttaagtgctgctctacctgaaaagaaatcctttaaattacctatggaagtgatgtcctcagataatcttaatgactattttggcatttataaatagaaatgattatggactttgatctgccatacggaggttcggaacctggagaacggctgtgataagtaggttttgattgagtgaaagcatgagcttgttcagagtgaggggcatagtgaaaaaggaacagccatgcctcaaaatcaaatcatttgcattcccacagcatcctgaata

SEQ ID NO: 13666 - DNA, 381 bp, Homo sapiens
aggtactcaaatttactacaaaattaataatagtaaatgtaaaatatgtatttatacagccttttgcagacttatgaactatctcaaattcacgaatcctattttttaaatacagttttaagtttcaaccacttgtatcaccagaattttgagacttaactcccatggttaagagatttccaagctgtgttcacacctgtagtcccagctacactgaaagctaaggcgggaggaccacatgagcccaggagttccagactagccttgctctatttaaagagcaagactccactgccaaaaaaaaagaaaaacaaagaagagaattccataaattacttggcttcttatattccatctcttcagtgaaacagtacctgcccg

SEQ ID NO: 13667 - DNA, 419 bp, Homo sapiens
aggtactttttttttttttttttttttttcctcttttaaacaggctgatatggtttggttctgtgtccccacccaaatctcatctctaattgtaatccccacgtgtcaaggaagggaccttgtgggaggtgactggatcatggggacagtttcctccatgctattcttgtgacagtaagtgagttatcacaagatctgatggtttagaagtatggcacatccccccctcactctctttctctctcctgccaccatataagatgtgtcttgctccccctttgccttccaccttgattataagtttcctgaggcctccctagccatgtagaaccgggagtcaattaaacctcttttctttataaattacgcagtctcaggtagttctttatagcaatgtgaaaacggactaatacacaggc

SEQ ID NO: 13668 - DNA, 462 bp, Homo sapiens
ccgggcaggtacgcgggggcttttctttctgttctctgacttgttttctatagtcatccccaattttaatagcctgctttttaaaaggtaacgcctgcgaaatggttctgtcacattttctatgttctgttcctttccattgctcattttgcaagtgtatcctacttggaaaaaccctaattggcatctcacttttcacacgagtgtgttttcttttcccaaaggggttaaaaatctggctcggggaatccctgaccatcttcacagtgcctagcccggactgaacatttactgaatactgctagcccatttgtaagccacatggtcccctgccctggagattaccttctgttcatgcccttgctggactggccatggctggagcaccctgggtgggtattagaaccccttggcccaccgaaaggaccccggaacccggagaccttctttattagaatgaaa

SEQ ID NO: 13669 - DNA, 412 bp, Homo sapiens
aggtactctctgagaaagatcgtgtcctctgtcttgttgggggtgaagtaaaagaaggttgcttggatctcctgaaccgacttattgtactgcattcttgcttaaatagtattaaccataaaggaggtcaggtttatagggtttggtttacctattaaaccatcattgactatggaaatacttactaagcaatatagagacagacaatattatctttccccttatatcttttaagacagccactcaagttttagaagagtatgatacaacattagagaaagaaagatacaaaggctttattcatgtgtgatagtaaaaatcaggatgagtcttagatatacaaaagataaatggatatttaaaatagttatatatgcttttttagcaaaatattcacgtgttaagtatttct

SEQ ID NO: 13670 - DNA, 465 bp, Homo sapiens
ccgggcaggtacttttttttcttttttttttttttttgaattgacttttttttttaaactgttgagggttctttaaatattctagatacaatcagttgccagatatgtgatttgcaaatgttcttccagtttgtagcttgtctttgcatcctcttaacagtctttaatcaggtaaaaattcttaattttcatgatgtccagtttactaatatttccttttatggctcatgcttttggcatcaagttgaaaaaaaacttggctgggcgcgtggctcacacctgtaatcccagcactttgggaggctgaagcaggggggatcccctggaggcaggagtttaaagacccagcccgacttattttagaaaaacccctggtttttttttaaaattccaaaatttcccctggggggggggggggccccattcccctgggatttctcaaactttttcggggaggggcttggg

SEQ ID NO: 13671 - DNA, 435 bp, Homo sapiens
aggtacttttttttttttttttttttttttttcttttttttttgagataaggacttgctctgtcgccaaggctagaatgcagtgctgtaatcacagctaactgcagcctcaacctcccaggctcaagcgaccctcccacctcagtctcccacgtagctgagaccacaggcatataccattataccaggctacttttaaattttctatagagatgtggtctcactatactgctcaggatggtcttgaactcctggcctcaggcaagcctctcatcttgactttacaaagtgctggaattacagacttcagccactatgcccaggcttggctaattttttaatgtatgaaattagcactttcagctctatttgtatctccctaatttctttgctgaaaagggcagggaagggaaggagaggggagaagaggagaggg

SEQ ID NO: 13672 - DNA, 449 bp, Homo sapiens
tccaccgcggtggcggcggagggacttttttttttttttttttgttccccttcatcagggaagttcatcaaagaatttcatcaaagttcagtgatgacctctttttaaaattttcttagtattctatgtaactatcaccgatcttttccccacacactccaagagctttttaatataattttctacatagccatcatcacagataaccaatcctctttttttccccactagagatgtgccttccgtaacctctgtcctcttcctttaacctggaatattgctcttcaggcctgttgtgcagataaaagctttattccttatcatcctggggtacctttccctctttcttgggctggaatccctattgcctggatctctcacacttcaaaatctagataactcctttgtttgggtagaacaacatcctccagcagcttttagggaagggg

SEQ ID NO: 13673 - DNA, 472 bp, Homo sapiens
ccgggcaggtacttttttttttttttttttttttggcaagaagcttggagaattaaattgatcttcttaatgttacataatgctgccttgcaacaagtagtatatttattcttcaaagaatgttagaaatctttgctaactaactagcaaatcacgagcgaaaccagcaaggtgtaaagaaggtcgcaaaaagaaatgcatatggttataacagtatcaatctaaaaacctaaccacattctagagagttgagagaagaagttgttcatttggtggtgcactggggctggagttttttattggttggttgggtttttggtatcaaagaaaagtttattctgggctttgatattagacctggggtccccccggaaatggggcttcttttcctggcaaaggaactaaacaatgggcaagtttttttcaccaccactggaatgcttagggggttttaaattttccatttaaccaa

SEQ ID NO: 13674 - DNA, 483 bp, Homo sapiens
aggtacctctggaagtgtgggtgaagaaggcagctaaaataaggaaagctagttaaacctatttaaaagccagtcagatataatagtaaaattgtataattagtatactcagagataaaagaatcacgttatccatgaaagcaatgaaccagatctacttttaaaatagaaaatttcagtggttgggacgcaagtaagcttcattgcactgttaagtccccaagcacttttggtgagggaccgtagtgcaaggtaggtaaccaaaaccactttcagtcctcagtatatgtttcaaagtactcaagcccttggtttcaaaaggttgtgctaaggaaccctcggtcttctaccagataaaataaagtaaaatcaaaatcaaaaggaatataattagttatggggccatgtgatgggatgtgcttaaaccttgttgggtaccccagccttacttttagtgaagggccttatagggtggggtaggga

SEQ ID NO: 13675 - DNA, 481 bp, Homo sapiens
ccgggcaggtaccaccctcttgctgaaagcactggttcccctgttgaagcttgctagggattacagtgggtttgactcaattcaagtaagtaagcaaacatttaaatatttttcaggccataaaatgtttagcgttccttatgcctgttaatattgccgaagttaaaataaattttataatacattaccttgcctcttgatttacagatgacatggcaataccacgttggttaaagggtggtttcaatacctttataggaagtagtattctagaatttcttcaaggaaaccatgcaagaaaaaattaaggtatagtcacgaagaaattgtaagtttaaggcatggaaaaatttcaaaaatgcggtagtataagaaaaatgtatataaagccccaggaattacttcacaagttagttttaatttttttttaaaacaatggggctaacctttattaattatataagaagtaaaattgtgttaa

SEQ ID NO: 13676 - DNA, 521 bp, Homo sapiens
ccgggcaggtacttgtcatggagctggcactgcggcgctctcccgtcccgcggtggttgctgctgctgccgctgctgctgggcctgaacgcaatgagctgtcatttgactggcccacagtaggaatggcaagggaagtattgggaataatgatgaacggttccgtaaaggaatgacctaccatgatttctggtaggccttcttatttatagctcacacaaacttctcttgtcaagaaaacttttcttcaagtaaacttgcactccatgggttcaatggttggactttacagtggtctggatactcagtgacgtgttttcttaggctacctgggtatttttgtgaaaaactttttgaatggtaaaaatttgtgggctcccactttgaacaagttggaatccttcaataaactcaaccgggaaaaaaactcaactccttggttcttctctaggacttgtccctagttccttatcctaattattgtcgggaattaaattctcccgatggggacaacctgggtgt

SEQ ID NO: 13677 - DNA, 900 bp, Homo sapiens
actcttcgtatccttctactggttatctaatataccgtattttatgtttataattatcatgttacacaggttcgttttattgtgcatgacttacttatcgcgctgacctctattcgctgatcgtatatctcctgtcactcatcatatcatctgctactgtgtgtgatcactataggagtcgactccttccactatcggcgtatttgtgtgcttccacacgcggttggtcggtcacgagtgtacattgtccactctactacccatgtctatattatatctgatcgtttttttttgtcaaatggagttggctgttctacctcattgtcgtgtcttatggtctccgatagctcatacgctcactctgtattcctctggtgcccgtgttctttctggaccttttgtgctctatctccattgaggtcctcttgtctggctgatttgtcctctttggttccactgggccttatcccccctacaactcttatgaccctttaaatgcccccctgtgaaacaccttcgccaacccagagtttggctttgctcctcaccggcctattgccaccccggttccccgaaatgaaaaatagaccgccgggcacttataaagccgcccgaaggttctttgtgttggaaccctttggggccaactctcaaccccggtggccacagtccttgaattggggttaccccccaaagcccgcctcaaggccgaaaccttgtggaaagaaattgtttcttttggggaaaaaaaaaatttgaacccccttggggaaggcccctgggggcctgggggaacactcccaagaggtttcccccccctttgtccccggccccccaaatttccaaagccccctgggttttgtgccacacaccgggggaacctctagtggccccctttcg

SEQ ID NO: 13678 - DNA, 506 bp, Homo sapiens
ccgggcaggtactaaaaatacaaaaaattggccaggcatggtggcacatgcctgtaatctcagctactcaggaggctgaggcaggagaatcgcttgaaccctatgaagcggaggttggcagtgagaccgagaattcgctccatttggcacttccagacttgggtcaaacaagtagttgaaatctctcatgtaaaaaaaataataccataaaacactaaaataaaaaaatgttgttattctttatttactagatttgaaatttactttttttgttgaggacctaaaaccattttcaaagttgttttgccttagaaattaatttccttaaatttaagacttaacactttttggttattgggtttaagggtataagaccattggaaagcctttgaaaggaattaaaattgttcccccggtttttggaaaaaaaaaattggaacagtctccctttcaaaaaaaaaacttcttgtgtctagtttttaacaagaaaagtaaaattatcaaat

SEQ ID NO: 13679 - DNA, 489 bp, Homo sapiens
ccgggcaggtactgggattataggcgtgagccaccgcgtctggcctctaacgagatatttctaaaggttaggccctcagtcaagaattttaaagctggatcttagaggttatctaaactaaaccctctcacatttaataaaataagggaaaggtgaagtccccaaaaaaagcacttggttttgggactaagttttcataaaagccttaaaacagtgacctggtggaattgtaatgaattcctggtcttctttaaacttccttaattccaaaaaatgttttttcttaaactaaaaataaaggccttgttccctttttttactaattttgaaaggggtttaaaaaaccccaaatggtaatttggatatggaagggaaaaaggaattgggtttgtaaaggataatcattatatgtaatataaattacgtatataaaaaaactatattttatattatatatttataataatatatattattataaataaaata

SEQ ID NO: 13680 - DNA, 519 bp, Homo sapiens
ccgggcaggtacaattttaaatctctgatttagagatgaagaaactgaggggtagagaggttaagtaacatgcccaaagttacacagctgataattggttaggctcaggatttgaaaccaggccaaacttgaatagtaaataatggtgtttaccctgttaatgcatctttattttcccaaggaattagaatgaacaggtttttcaaattataaaaattagcccaaaatttattgttgatttgggaaaaatagtataataataaatgttatttagattaatatgtgatagagattataaaatattacctatttaattttttattaccacccttttgtattttattaaaaaaaaggggtgtttttttctttattataggatcaatttaccttttaaaattttaataaatggttatttgtattaaaaaatatgtttatcaaatataatctactttaaaaattattcttcgggcttaataatatataaattactttctatattttactatttatattaatgta

SEQ ID NO: 13681 - DNA, 376 bp, Homo sapiens
ccgggcaggtactttcttttttttttttttttttttgagacagagtctcagtctccagcctgggcgacagtgagactttgtctcaaaaatatctaaatcagatatgggtgagacccaaggtttagcttatcctgaggcaaaattcccctccagctgtgaacctatgaaaccagacaagttatgtgcttccaaaatacagtgatgggataggcaggattaggtattccaattccaaaagtgagaaattggaaggaagaaagggatgatgaggctgggtgtgatggctcatgcctttaatcctagcactttgggaggctgaggtgggaggattgcttgagtccaggagttcgagaccagcctgggcaacatagggaga

SEQ ID NO: 13682 - DNA, 496 bp, Homo sapiens
aggtacaagaattgctggaacctgggaggcggaggttgcagtgaaccaagattgcaccactgcactccagccggggtgacagagtgagactccgactgaaaataaataaataaataaattaaataaattaaatatttatgggattggtgaaggggaatggttataagaatttgtgagaagatatattcttaacttgaaacactctgttatgtaccccagactttttcttctgtaaaagatggtatggttatttttgagacacggaatgttgtcatcaaagtgtcaaatttgaaaaatggcccccattaaattttaggttttcttccaggctttttggaaattactacttatttaaaacttctatttggtccaagaaagggtagggaataaaattttttagaaagggaaaagaccttacctaaaaaaaggaattcttaaattttggtaaaaaaaacctttaccaaaaagggctattttaaaccttataaaaaaaagg

SEQ ID NO: 13683 - DNA, 506 bp, Homo sapiens
ccgggcaggacgcgggggagtttcacgcgcgcatgctttgcccgccatggccgcattcaaggagcctttggagttccatgccaagcggtcttggcgccccgaggaggcagtagaagaaccggacgagggaggatgaggataattactattgaaagccgataatgggtttctccctggagggaagtgttaacggcttcggaaggcacccaagcaatgattatccttaatgcttggctatctttttggattgagaaatgagggaatgtgaatagtatgggaggtcaataaaatgggagcaaatctgattgaccctttctagcaaagggtgaaatttgggaagccattttatttcaaaaattctttaattttgggcggaaagtaattaccaaaaagctttccctttaattttgaaagaaagaatgaaacccaacttgaaataaaagaataatttccaagccaaaaaaaggaaagttttaaaatacccctaaaattaacacttattaaaa

SEQ ID NO: 13684 - DNA, 417 bp, Homo sapiens
aggtacttttttttttttttttttttttgttcatttaaatgtttcagagatgttaatatccaattagcttttgttctgtttcccaaccctttggtttttttttttttgaaaactaacaacctaaatattaataataaattatttctatgcattggattaaacctcaatttttaccaggaactgtttggacaaaacctgttaattcaactagtcattcctcagtttaataatatcagatttgctttttttgtgagacagaagtcttgctctgtcgcccaggctggagtgcagaggcgtggatctcggttcactgtaaacctccgcctcctgggtttcaagcctattattttgcccacagccttttaaagtggctgggattaacagaaagacccgcccaccacaaccggttaattttta

SEQ ID NO: 13685 - DNA, 433 bp, Homo sapiens
aggtacttattggtcatttgcctagagtcaatttcttttttttttgagactaagtcttgctctgttgcctaggctggagtgcagtggtgcgctctcggctcactgcaacctctgcctcccagattcaagcgattctcctgtctcagcttcccaggtagctgggactacaggcgcacaccaccacgcccagctaatttttgtttttgttttttttaagtagagatgtggttttgccatgttggcagggctggccttgaattcctggcctcgagccatcctctcaccttggcctcccgaagtgctgggattacagatgtgagccaccgcacctggcctttcttaaactctttatccttttttattctcttcttttcattttgaaatctttcaggatgatgcacagaaaaatgcttatgtttaaagtctgatcttt

SEQ ID NO: 13686 - DNA, 638 bp, Homo sapiens
atagctactatacggcgatataggagctccagcgcggtggccgccgaggccgccgcccgggcaggtacacaggccgggcacagtggttcacacctgtaatcccaacactttgggaggctgaggcgggtggatcgcaaggtcaggagatcgagaccatcctggccaacatggtgaaactctgtctctactaaaaaatacagaaaattagccagtcatggtggcacgttcctctagtcccagctactcgggaggctgaggcagaagaattacttcaacatgggatgtggaggttgcagtgagccgagatcgcgccactgcactccagcctggtgacagagcgagaccccatctcaaaaaaaaaaaagttgtatgtgacagctaaccataataaaaaaaaaagaaagaaaaaagagagaaagttgggacaacactaaatcattagtaatttgagccacaattcctccaaggcatatgctattttttcaacttgggttcaaatcatggaatcttttattgctttttcttaaatgatataacgcatggtttggtttttattgtagtcttttaaatcattgtaatactttcattagtatggtattatttccacaataatagtcctttaaggtagatgtaccttt

SEQ ID NO: 13687 - DNA, 417 bp, Homo sapiens
ccgggcaggtactttatggagtatgttcttgagttctgcaaagattagcatcaaactctctcacagctgccctgtctgtattactgatcaatactcagttcgtttcacatgactaacaatttaaaaaaacaccttcatctgctgggccattcttttaaaatcagattccaaatagtctagaggtctgctgcgagctctagactaaaggctcttgtcaatcctggctgcacatcaagaacactcctgaggttccaaacaaagcatggattccaggtcccacctgaagctactgaatccgaatctctgaggggagggcccttgcactgatttaaaaacaaaaactggccagatgatcctaattcacagccagggttgagaacctctgctctaaaacatcggactcggctgaactggcgc

SEQ ID NO: 13688 - DNA, 438 bp, Homo sapiens
tggagctccccgcggtggcggccgaggtacagcagaactgcatgatcagctgtatggtagccttgaaaaccaacaggccacaatcacagtgaaaacctcaggttggcagccactggaggatataaaatgagtttggatctccttcaatgccccattcccagagaactgtcattatttggacctgctggtagttccctaaaggacgtgcaaggatgtttttatttgactggacacttgaagcttgccctgtatgaacagcccccatcttcccatgcttgtcaaaaatcagaggcaactaacactgcggcttcctgagagtctcactctgtcacccaggctggagagcaattgcacaaacacttggctcactgcagcctcaacttcttgtcctcaagtgatcctcccaccttagcctcctaagtagctgggaccacagtg

SEQ ID NO: 13689 - DNA, 314 bp, Homo sapiens
aggtacttttcagttcaaggatttctgttgcatattataattattgtcaagtttccttaaaacgattattttgaattatttttcagagagttaatatatctctatttctttagggtcaatcgctggaaatttttttgtccttttggtgatgtcacgtttcttgtaattgttcttgatccttgtagctgtgtattgatatctgtgcatttgaaaaagtagctatttattcaaatctttacagtttggctttgcattggaaagtcatgtggcaggagcaatgatggggtgtgccagaagcccacggtacctgcccg

SEQ ID NO: 13690 - DNA, 413 bp, Homo sapiens
ccgggcaggtaccttttttttttttctttcttttttttttttttttttccgtctccccaaagctttatctgtcttgactttttaaaaaagtttgggggcagattctgaattggctaaaagacatgcatttttaaaactagcaactcttatttcttttcttttaaaaattacattagcattaaatcccaaatcctatttaaagacctgacagcttgagaaggtcactactgcatttataggaccttctggcggttctgctgttacctttgaagtctgacaatccttgagaattttttcatgcataggaggcttagaggcttagcatttctccataggcaaatcatatcatatttttaacgcccagaacaaacttgttgtaacattggagccttatggttcttacgggcccaaag

SEQ ID NO: 13691 - DNA, 410 bp, Homo sapiens
ccgggcaggtaccttcaattccagtccaaagccacatggctcaacctagcctcaaactttttaaatttgccgctttcttcttcaatagtgagaaatcttgctcctattgtctttaatatatttatatattgtcttattctactttataaaacccgcggttttgttccacacggcataaccttcccagctttaacattgctagtcatctgtaaccatacccttagatttgactctgaatggcccttgttgtctcctcagcccgagttgtttctttggcactgtcaccctcctgacctctactcgattccttgggcctgaccctggaagtccttgcagactcacttgggttctggctctgtaagaccctgggtatcaccagggccctctgctgcctccatagaacccttggg

SEQ ID NO: 13692 - DNA, 544 bp, Homo sapiens
ccgggcaggtacctgaacaaatcccatcaaggacagattctcagtcttgaagaggcagcacggtaaaggggaaagatcatgagttttggggccaggttcccttggatattgtggggtccccacacttatggatgatgttggaaaacctctttgaaacttaatgcttcacaatctgtaaaatgggaaaaataccttattttttcagaagtttgtcattaaaccacttaaaatggattttggactttattattcaaaccctaatgttccgtaactggcattcattttgaaccttcagacttcaaagcttgttcccccttcatgtttacgggattgccctttccccccaggtgaggggcgttagttttagggtaattccccttggctgggaataacacacttgccaaaggcttcattaacaacattttccccttttgtaccataaacctacttcaaatatccttttgtttaacttgaaatattataaaaatttcaatggttgacaaattgggtaataatccatctcaataactaaaggcatgatgag

SEQ ID NO: 13693 - DNA, 429 bp, Homo sapiens
aggtacgtccacggtcagccttgcggtaagcttgtgtgcttagaggaacccagggtaacgatggggcaaactgaaagtaaatatgcctcttatctcagctttattaaaattcttttaagaagagggggagttagagcttctacagaaaatctaattacgctatttcaaacaatagaacaattctgcccatggtttccagaacagggaactttagatctaaaagattgggaaaaaattggcaaagaattaaaacaagcaaatagggaaggtaaaatcatcccacttacagtatgaaatgattgggccattattaaagcaactttagaaccatttcaaacaggagaagatattgtttcagtttctgatgcccctaaaagctgtgtaacagattgtgaagaagaggcagggacagaatcccagcaaggaacg

SEQ ID NO: 13694 - DNA, 485 bp, Homo sapiens
  misc_feature 14, 33: n = A,T,C or G
gcccggtcgacccnctttgtaatacggcgaatnggtgctccgccacggtcgcggccgcccgggcaggtactaaaattagctgggcttagtggcacatgcttgtagtcccagctactcgggaggctgatgaacaagaatcacttgaacctgggaggaggaggttgcagtgagctgagatcgtgccactgcactccagcctgagcgacagagcaagactgtctcaaaaaaataaaaaagaaaaaaataataaaaaggaaaacaaagcctttagaaaaacaaagcctttgaaaaaggatgtaaaattgaatatatagatacaattatttttaaaaagttttatagaaaaatatcctggattgttgatgttgttttaatatattttaatcatttttgtataatgtcatgtataatatgtcataatgaaagtaaaaaaaaaaaggtcttagcagagcaggcagaaaaatgccaaactcagtgccttttag

SEQ ID NO: 13695 - DNA, 420 bp, Homo sapiens; identical to SEQ ID NO: 4526

SEQ ID NO: 13696 - DNA, 424 bp, Homo sapiens
aggtactttttttttttttttttttttttttttttttttgcctttgatctctttgtctcatacttcattcagaatgatttacagagaaaatagaggatatcagatggaactttactcaaactcctcctgccacatttgcacaccttcccttctctcagttccttccctcctgcagatgtctcacctctgcccaaggctcttccccttcctatgtcctggatcccacctgcttccagttcctctttaactttctactatatcctctctttcttctccaacactaccaccctccttgccacaaggtttcttcccaccagcatttataatacatgctcattctctactgttttattaacaaccagccaacctttctccccatctgtctttccccaactaccatctttctttttttactcttactggt

SEQ ID NO: 13697 - DNA, 536 bp, Homo sapiens
ccgggcaggtacacttgaggaagcttgggctcagaggctttatgttaattccaacagtttttgcaacaggaggaggagaatatctgtccaggagccctaatcaagactcagcaggaagctggtggcttcctttcctttccttctttttgcttccctttcctggtactttacctggtgctctcctttcagtttcttaactttctacaatatggggacccattcgcatttcccatctgacttctagatgcctggaggggaccaagacttgtaaggtgacaagtgtgccatttgcaatccaagttcatgagtaaccggaatctgtaccccattctaagtagaaagccttaattcgttttttggccagaaaagccacaaagctttcttattagtgttgccacgccttgcattagttgttgtaccctaatttgggggttccatttggtgcctttaagttgacccaatggggcccccttgaaaaagttcttgaaaaattcctgtggaaattttcctttccaaaaaaactgaaaagatttcaa

SEQ ID NO: 13698 - DNA, 430 bp, Homo sapiens
ccgggcaggtacgctaagctctctgctctgcatctgtagctccttgtggattatattgtctcagtgatcagaaatgattttctcggatatgaacaccgtttctggctcccctaaagtgcatcctcctaatgggacccggttttacacttttcaagaatttgctgcactgacaaaagaattaaatgcctgcagggaacaacttctagaaaaggaagaagaaatctctgaacttaaagctgaaagaaacaacacaagactattactggagcatttggagtgccttgtgtcacgacatgaacgatcactaagaatgacggtggtaaaacggcaagcccagtctccctcaggagtattcagtgaagttgaagttctcaaggcactgaaatctttgttttgagcaccacaaggccttggatgaaaaggtaaggga

SEQ ID NO: 13699 - DNA, 608 bp, Homo sapiens
  misc_feature 286: n = A,T,C or G
ccgggcaggtactatagattatttgtcttgaagaagagctttgatatgtttcaaaattcgacgttggctttggaaggaaactgtaaatttacagatctttgttctttcccaaaaagagtccttaatcttacagggttggaattatttgggaacctcaaacttgcttttttttttaaaatttttcccttttaatagtaacttataggtaccattccaagattaccttttcaaaaaaaaaaaaaaagatcttaaaagtttttttcaacttttttgttccaatattgcncaatttgtaaatatattcctttcttgccaataatttttttaaaaaggcccttttttccctggttgaaaccaattaaagtttattttgtctcccgattccaagaaataaaatttttgccggtcctaaccaatttgaatatttttaatggaatttaaattggaaaatcccttgttttctttttcttcaaagatattcctttttaattttttaaaattcaacccataaaaccaataagtttattctttttcaaaaaagggtgtgatggaatataaaaataaaaacatcaactttgtggagtaataattgttttaaaaaacccttt

SEQ ID NO: 13700 - DNA, 451 bp, Homo sapiens
ggagctcaccgcggtggcggccgcccgggcaggtactttttttttttttttttttttggagatggagttttgctcttgtcgcccaggctggagtgcaatggtgccatcttggctcactgaaacctctgcctcctgggttcaagcgattctcctgcctcagcctcccaagtagctgggattacaggcatgcgccaccacacccggctaatttttgtattattaatagagacgggggtttcatcatgttggccaggctggtctcgaactcctgacctcgggtgatccacccgactcaacctcccaaagtgctgggattataggtgcgagcgaccacgcctggcctacaatgtcatatcattctattttttcaaaagccattctccccaaaggttagcaaatgctttctgcaaaaaggaaaatggtgaaccttacaaaaccataaggctttgta

SEQ ID NO: 13701 - DNA, 529 bp, Homo sapiens
aggtacaatattttattttatgggtgtataataattgattttatttttgccttttttctggatgttttaatagttgccattggggggattgtgtttagctattggatttattgcagtctgcctttctgtaaatattttcgtataaatatcttgctgacatacctgtaaggtaaaattccctgtgtattgtgaattgctccatcaagttgggaaaaaataccattttcaaaatttttgaataaaacattcacccaaatttcttttctcttgtgaaaaggtacaactgaatttgtatttgtctttttttcgaagaaccagggttactacggcttcttacaccctcagaacttgcaaattgcaagttgcgcaacaattacataagctttaatttgcaaacccatcaaaacttcggtgaggccttcatagccaatggcttccgcttccttccccaagttatgcctcaggtaccaactaggacattgtccccccacttattgcccccacccctagcttttttttgtcatatttt

SEQ ID NO: 13702 - DNA, 548 bp, Homo sapiens
aggtactttttttttttttttttttttttcctcttttaaacaggctgatatggtttggttctgtgtccccacccaaatttcatctttaattgtaatccccacgtgtcaaggaagggaccttgtgggaggtgactggatcatggggacagttttcctccatgctattcttggaaccattaaattgagtttattcacaaaaatcttgatgggtttaaaaaatttatgggaacattcccccccctaaacttctattttctaattatccttgccactcaataattaaaatgttgttctttgcctaccccccttttgccctttcacaccttttgattaataaaggttatccttgaagggccttccccttaatcccattgtttgtaaacccggtgtagtttcaatttttaaaacccattcttttttcttttttataaaaaattaaccgtcagttcattcagggtgaagtttcttttttataaccaaattgttggaaaaaacgggaacttaaataactacaagttctccatgtcagaaatctttgtttaaaagag

SEQ ID NO: 13703 - DNA, 490 bp, Homo sapiens
ccgggcaggtacaaaaagcagggaccaagataaagcatcttgactcagtgagcttacaatctttgaaagctagggaggggagaagcacttagatcttatgctgcccccacgcaaccactatagcaggatgtcattcagccataaagcactttcagattcatcaccacaaggtgtgtggcaaatgagggcgtttttttattattttctaaaccccaatggatcaaaggaaaccattatactttggtaaaaatctttctcgaacttttttttcacaattatctaaaactgcaatgaactgccactttttaccccaaaatttaaaacctggtcttttccctaaaacccacagggtttaaggaccctaagggatttttattgaattagggggaaattttgatttacaaaaaacaacttgagattccttttgaaaacaaatcccaaccagcccctttttaaagtgaatttcccattttttaaaaaaactattgcc

SEQ ID NO: 13704 - DNA, 426 bp, Homo sapiens
acgggaaagaggtgctggagtatctgggtaaccctgctaattacccggtgtccattcgatttggccggccccgcctcacttctaatgagaagcttatgctggcctccatgttccactcgctctttgccatcggctcccagctgtctcctgaacagggaagctcaggcattgagatgctggagacagacacattcaaattgcactgctaccagacactgacagggatcaagtttgtgggttctagcaaaatcctaagcaatcctggaatagattctttttcttccaaagaatttatgagatttaactcagacttttgccctcaagaatccattctaattccttaaaaatgcctatcaagggtgaagctctttggacacaaaactgaagctagctcttgaggtgggcagaaaaaggttgggaactttt

SEQ ID NO: 13705 - DNA, 856 bp, Homo sapiens
  misc_feature 140: n = A,T,C or G
ccgggcaggtaccataacatttaaaagaatggaaaatgactgaaatccaatttagattatttttagagtatttttccagcaaattcaatttattctgaaatttaaatccagatcttttctaatatggtattacaatgaanagaataaagagacagatttgaattttcagtttcattttcaaaaactatttaccaaaacaaatggagaagaaacatccaaaagcacatttcatttctccaaactttgtgttttaaattatagttataaattgtaaggtaattttaaattgtccctcgtattatttctccacgtctgttttagtttaatgtctcctaagcttttctctcatagcgtagacctagggaagggatgggaagattgcccagtccccgatggctgcgcacacaggaggcggcggagcacaaggcaagtgagtttgcactgtcagccccagaccgtaagcttggctacactgatggttttctttactaaggatactattcaaaaattaacaatttcattctcagtaggttttaagacaattaaatggttttctgagcttcaagtggcttggttggaaaaggtttattataatttggcaattaaaatacatggatcctttttaatcactaaggcattgggggatgggttcaacccagagtccaggaattttgggtttaaaatcatagtacggggcatttgcagtttacccaagctggtgaaaatggattaaaggggtttaaaaaaactgttaaccatttaatcggtgggaatctacctaaagataggcctgggccggactttctaggcatttcccccatttttatgaaaactggtgaacggtgcaactttattt

SEQ ID NO: 13706 - DNA, 857 bp, Homo sapiens
aggtaccagccaccaataggagatttgtcaaaggtcaggggcacctccactcagaatcccttggtggttaccaaaatgtgaaccctgaataactgagacaggtctcagttaatttagaaggtttattttgccaaggttgaggactcctgtgacacagctctcaggagggtcctgatgatatgtgcccaaggtggtccaagcacaggttggttttatacattttagggagacatgagacatcagtatatgtaagatgttccttggttctgttgggaacggcaggacaacttgaagcagggagggggcttcgaggtcccaggtaggtgagagacaaacacttggattcttttgagtttctgattagcctttccaaaagaggcaatcagatacgcatttatctcagtgagcggagggatggctttgaacagaatgagaggcaagtttgccctaagcaagtcccagcttgacttttccctttagcttagtgatttctggggccccaagaattattttcctttcacaggggccatgttatttagaaacccagcttgagaaggaatctgaatcctaatttgggtataattttttctgaaattaaaggtaacctttaattttccttcaaacttgaagaagcattgaactcttacctttgtgcctcttacatttaaagcccccttaatttagacctttcccggcggccctttataaaccaatggatcccccggcttgaggaatttcattttaacctttatattaccgcacctcccaggggggcccgggccccactttgtttccttataggggttaaaggcgcctggggaaacaagggcaaacggtcctggggaatatattccccc

SEQ ID NO: 13707 - DNA, 865 bp, Homo sapiens
aggtacttttttttttttttttttttgttggaaaggggttaaacttcatagcagcttttgttgaggctgttactgttcatgcaaccttctgctggtctctaaaacatctacgtcattaacctttctcagaagatggtgccttgtctttagaatatgccattgcaaaaaagaatattcagtctcaacttttccctgttaaagaatactccgctcatttaaagtgcagcataagccagaagttaatattctttactttggtttctttactgtatggtcatgaaataaaaagcttatttaaaaatatagtaagaactttaaatgtattttggagaatgtaaaattaatctcaggacagaattgcactatcccttcctttaggaaataactttatgaaaaataccccatcctttgggtgctgcaattttgttggaaacttaaatcctttcacacttgcttttacctatgatcttgccacccagaacttctggcaaaatgatctatttaactacataagagaaaaaaatttacttcagaagcccttttatacatttttgcttaaccatgaaagcatttttcattctaaacagcctttggagaaatttgcacacactgatcatccgcaggctgtgattttctatggaaaacaaaaataagctgtggaagcccacttattgcttcccagtaggccactggtcatttcaaggagtaggcttttcctgcatttccttgaaaagttgcagcttagttaaatgaccgcctcactttttttttttttttttttaggactccccatcccaaaggtcgcttttttaatcaaggccccccaatgggatcttgaaggcgctaacatagtttataacacctt

SEQ ID NO: 13708 - DNA, 930 bp, Homo sapiens
  misc_feature 531: n = A,T,C or G
cacgtatacgactcactatatggtatatggcagactcgcagctccaccgcggcggcggccgaggtactgtgttaatcactttacataaattatctcatttactcctcaggacaacccaaagaggaagtataatttttgcctgttactggtgaggacctcatgctcagagaggttaggcagcgtgttcgtgattcacaacttatgaaggaagggagggatgtcagcccaagtgagctgcctgcagagcctatgctctgatattgctccagctaccacttttaacatttagtgttctgacttactattataatggaagccctaccctatcttctgtgtatgtgagaggatttgcttttttattcatatcttcgaatgtctgtgaatgactctgacctcaatcctgtgtgtgtctggacctctactagaacgcatatggcatatgggtagcttacccaacacaaggatacaccaccgggagtggctgagtgctacacgagctcttaacagaagagaacgttagtgcgaatcctnctaaccggctttctttcactggacatgaatgccagtcaacctagtcctgtgtttgagtcacaactgatgaatgggccctctagatagaatgtatgcacattgcagtatacatctcttctgcttaaatgttcactgcccgggccggccgttcttgaactaattgaatccccccggctgccggaattctgatatccagcctaatggatcccgtcgacctcaggggggggcccggaccacactttttggtccttttaatgagggtaaattgccccttggccgaaaaatggaataggtggtttcctgtgtaaaagttttcccctcacaattcaacaaactaacaaccgggacctaaaggtaaaacctgggggcctaaaagaggcctaccccatttaatgggtg

SEQ ID NO: 13709 - DNA, 541 bp, Homo sapiens
ccgggcaggtacgatcttggctcactgcaacctctccctcccgggttcaagtgattctcgtgcctcagcctcttgagtagctgggattacaggctcgtcgccactgcgttccggctaattttttgtatttattagatatagatgtgggttatcaaccatgtttggctcagtgcttggatctcaaaacttccctgaaccctcatttgtgagtacccactctcacgcgtttggccccttcccaaaatgttgcttggggtattttactagaggccgttgtagactctacaccgctgtcatccaggcccctaacaaaagacaaaattttttttttaaaaataacttgtatcaacccttatttaaccttgtatttaaaaaatttccattccttgtttctcaaaaaattcccctaatttttaacgtaatgttttttaaataggaatcaaatgttattttaagatttttttttttcttttcaaaaaataaccaaacttacattttacttggttttaatttggaatttatacaaattttttatatgggg

SEQ ID NO: 13710 - DNA, 407 bp, Homo sapiens
ccgggcaggtactttttttttttttttttttttttttggggagaggtttgcaaatgtttaccaaatttcaattaagcaggaaaaataaggtcaaaatatatattatagaacatgtggactacagtaaacgtatacttgaaaattgcagagtagatatgtgtgagttaatgcttatggttaattagctcaacatagctagtccataatgtatacatatttcaaaacatgttgataccataaatatatataattatgtatcaaatgaaaactgtatatcacaacaaatttgtttccacatattttcataaaccctggttgagcaccataaaaatctatggccaatggattttattttttttttggaggacagttctacactattgtttggttcatagcttggaaattat

SEQ ID NO: 13711 - DNA, 379 bp, Homo sapiens
aggtacaaaaacaagctgtagcctgaccaccttgggcacatgtcttcaggaccacctgaggcagtgtcacacgtgcatccttaactttggcaaaatacactttctaaactgattgagacctgtctcagatattttgggctaacacaatgaatatgaaaaaacttttttgttggcgggggtgggaggtgggacggagtctctctctgttgcccaggctggagtgcaatggcgcaatttggctcactgcaacctccacctcctggattcaagtgattctcctgcctcagcctcctgagtagctgggattacaggcacacgtcaccatgcctggctaatttttgcatttttagtagagacagggtttcaccatgttggtcag

SEQ ID NO: 13712 - DNA, 379 bp, Homo sapiens
aggtacagcaaacactatcctaagcttagcctcttcagatatttgatttaaaaatcactgtaaaaaacaccagtcacaaaaagccacattttatatgattctatttatatgaaatgtccaagataggcaaatctacagagataaaaattagatgagaggttgccaggatcaatggtgggggaaacgggaccatgttcacagccagcttccgcaggtcagcattgagctggcctgggaagcgcaggcaggtggtgaccccactcatggtagcagacaccaggtggttcaggtcaccataggtgggcgtggtcagctttagggttctgaagcaaatgtcgtagagagcttcgttattaatgcagtaggtctcgtctgtgtc

SEQ ID NO: 13713 - DNA, 435 bp, Homo sapiens
aggtacctgggattacaggcacatgtcaccgtgcctagctaatttcttgtatttttaccagagacaggggtttcaccatattggcctggctggtcttgaactccaggcctcaagtgatccacccattatggcttaccaatgtgctgggactacaagtgtgagccacatgttcatccataaaatattttttaagtggtgatctcattaagatttgatttatttatataaattaccaactatatttatctcatttgagggtaacaattggtcttgtctctgcgaagtatggacatcgatttaatttttagtatgccatcttgaacattataccaacttgtagaggatataatatttggtctaacttttgaatcaaccagggtcaagcaatttggcaatgtactacgtatttgtagaataatgtaattattgttatcc

SEQ ID NO: 13714 - DNA, 397 bp, Homo sapiens
aggtaccatgttgacaaaaatgccagatcaaatggatttgagaaataacgcccaattcaaggctggctcagccctccacggggccttccagggaaaggaattcctttatgttcttggaagcccttttctagaaaagccattccattcatacctttgtagagcagtgggctgggtgtggagggcagcgcggagggtatctgcaagagcctgtattttccgcctcccttgcccccactccttttatccttttaaaagtcctatcagccctgccttcgtcccttccgccctaagccctaagagtggaggaggtttaatacggccaatggatcttgtataaagtctacgtaagttttactttaccagagctataacatggttaacgtaaactagtggggac

SEQ ID NO: 13715 - DNA, 388 bp, Homo sapiens
aggtacaaggttgcatggaaaagacacactagcgtaagacatggacagtggccctgagtgacgtgcagccggtttaggcgaattaagatttacatacttgaaaagggacaaacaagtctggacgtggtgactcatacctgtaattccaacactgtgggaggtggaggcaggaggatcccttgaggccaggagtttgcaaccagcctgggcaacatgggaaaacccctgtctctacaaaaattaaaaaaaaattagccatgtgtggcagcatgcccatagtcccagctactcacaggggctgaggtgggagaattgcttgagcccaggagatccaggctgcagagattgtgccactgcagcctgggtggcagaacgagaccctatctta

SEQ ID NO: 13716 - DNA, 391 bp, Homo sapiens
ccgggcaggtacagaaaaggtgaatctgtgttctgtatattctgcctaaggcaaagaaatgtttagctctctttaaaatagttccataattttttctaaaaagctttgcttgaaaactgtaagcttcccatatctggagcatttcactttaaatatttggataaatatgctatcttcttacttggacatttcatgtgtttagggattgtcttctaaattcttcctaattcatatagctgctaacacttcccgcagagctaaaccattacagatatgaaataaagacctattgatttgacttacttttacttgtaaaaccttctgagtgttataacctcatttaatctttcagcatttacagtttcaagagtttgtgtcacaattagaagaa

SEQ ID NO: 13717 - DNA, 296 bp, Homo sapiens
aggtacttttttttttttttttttttttttttactggtaaaacttcatttatttaagatgactagtgatgcagctagcaaacccaagaagccaactggaatggaaatgctcagtggtgctcagccattacccaggaccagagattcctttgttaacagttcaatttgttgaggcacaagtgaggataaattgggccatgacaaaactatgagattgaatgataatcatagtaacatctgacatatattaaatttggtgttatgccatttctcagttccaccaaatgtacctgcccg

SEQ ID NO: 13718 - DNA, 389 bp, Homo sapiens
aggtacgcttcccttggcaccatgttataccatctgtgctgggctgaatagtgtccccccaaaattgaataatgtccccccaaaattcgtgtataccatgaacattagaatgtgatcttacttggtattacttggtatagggtgttgtagaaataatcaaataaagatgaggtcatactgcatcagggtagaccctaaattcaatgaccaggatttttataagtgaaaggagaggcggattcagagaaaaagacacagacacacacagagagaagacagccatgtgaagacacaagcataaattgaagtgacacagctacaagccaaggaatgccaaaaattgctggtaaccaccagaagtttgaagaggcaaaggggaattttttccg

SEQ ID NO: 13719 - DNA, 392 bp, Homo sapiens
  misc_feature 256, 257, 263: n = A,T,C or G
aggtacctacatcacgagtgttacttgaatggagatgtataaagtgcattttaaattcatttgtttccttaacattttcccttcatttcttatcttttcagagtttcttcttcaaggtctcaaggtctgaagcatcccacagaatgatcctactgaataactcccataagttgctggccctatacaaatccttggccaggagcatccctgagtccctgaaggtcagggaacagtgggaggtcagggtatgggatgnngggtgntgaaggatgagaaaatagcaggcttgtgattctagtccttcctgactgtttgcagagggttggagctgggaaacaggatgggactgggggcacaggctgcatatcaagagctgctgcttctctttggga

SEQ ID NO: 13720 - DNA, 388 bp, Homo sapiens
ccgggcaggtacttctgtgagtctgcatgaactacaatgttactggacttggggtgccccctaatgcagatacagtgtcagtcacaacacccaagccatttcaaatacctggaaagccttcccaagaaggacagctacaaacaagcccagactgcaaagactacaataaggacctaattattcggtgcccaaacaccggtgacatctgcaagcatcaacatcatccaggaaaacagcctcaccaaatgaactagataaggcataaggtgccagggactaattctggagaaacagaggtatgtgacagagaattcaaaatggctgttctgaggaaactcaaagaaattcaaggtaacacagaaaaggaattcagaattctatcagataa

SEQ ID NO: 13721 - DNA, 912 bp, Homo sapiens
  misc_feature 124, 154, 155, 188, 274, 275, 347, 348, 358, 409: n = A,T,C or G
aggtgctgtaaaactgcagagaggagcactagcaagaggctctctgccccttccctgcttggtctcgaaacactaacagcctggctcctactccctaaattgggggtggcagtatacctctggngtaaactgagcagtcggaagatgaagtcanntgtgggggtgatcctcaaatgaaaaaaattcanttccttaatcttgcccccacttcctcaccgtaactgccaagtcaactatttaatggtgaacaaaaagccaggtatttgtgggaaanngcctgtaatataaaagagagcataaccaagcaaaccaaacagaaaaaaggggaactcagaaggaagcagaannacagtgcagngggaactgaagaaaaacttaaaaaagatacccagtcccttgggagacatgnagggaaggtatttcatcaaaagatgagaataagtcctataaaatgaaatattcaaaagaaaaaatagcttttggaacttaaaaacaggatagctggaaaaaaattttacttctttacctttggttcctcacactctctgccctgacagtgggcagcacactcttgccctgctattaacaagtggttgttccttctgtctggaatgctcttgctctaaaaattcacaagctttatatcacctctttcatgtctttgcttcaaaaccgtcttctggagaaaggtggtccctaactaacctatttgaaaaattttttaaaaaccgaatatagaaaaataaaaaaaagttcctgccccggcctgccgcccggtaaagttacaagactatgtcgcaccttgggtagtgtactgactatttgttcaacccacttgtcttggaaatttattcggaagaaccagttggtaaatgtatgatttaccaaggtgaacttttgctgaaatacatg

SEQ ID NO: 13722 - DNA, 890 bp, Homo sapiens
ccgggcaggtacaatcttggctcactgcaacctccgcctcccaggttcaagcgattctcctgcctcggcctcccgagtagctaggattacaggtgcccgccaccacaaccagctaattttttgtatttttagtagagatggggtttcactatgttggccaggctgttctcaaactcctgaccttagacgatccacccacctcagcctcccaaagtgctggagttacaggagtgagccaccgtgcccagccccatatactttaaattatctttagattacttataatatctaatacaatgtaaatggtatgttaacagttgttatactatattgtttagggaatcatgacaataaaaaagtctgtatgtgctcaattcagatgcttaaaaaatatatattttcaatcctcagttggttgaatccatggatgtggaaaccatggatgtggatggctcaccattttatatcaaattccggcactcctatttttctgagggattattcattatactggggggttcctttgaactccttggagtttggatattatttgaggaagatagtggaaattggggtattgtgggatcgatattgcgaaattctgagcttaaacattgttttttagttgattaaagggttcatgtatgtaaaacttctgaggtccaatggccttttgtaggcgggagattctgtctctaagtgggaaatattttacggtaattactgcatagtcatgggggaaatttggtgtgaatttgtggacattgctcgggtatttcgtgagatattgtattgatattcgggtgaatattcggcaacattcgtatgtaattttgtgtttaatttgtgtgagtaattggacgggtatgtaggttaattgtcgtgttgtt

SEQ ID NO: 13723 - DNA, 587 bp, Homo sapiens
aggtacttttttttttttttttttttggtttgagacagtttcacttttgttgcccaggctggagtgcaatgggatgatctcggctcactgcaacctccgcctcctgggttcaagcgattcccctgcctcagcctcctgagtagctgggattacaggcaatgcgccaccatgcctggctaattttgtatttttagtggagacagggtttctccacgttggtcaggctggtctcgaactcccgacttcaggtgatccgcccacctcggccccccaaagtgttgggattacaggtgtgagccactgcactcagccaatatctattattcttaaagtctttaccaggtttaaagttcttggattataattctgatgctaattgcttggaaatgtattgctatgtatttatgaatattctcttataactaaagatgatgcatgttatttttgcaaattttaaattgtttttcagagataaactaagataaaaattacaagttcattttcaatttggggatatagacagaactataaattcttttaatctgagaagagataacaaatttccgtattatgtacctgcccgggcg

SEQ ID NO: 13724 - DNA, 865 bp, Homo sapiens
aggtactttttttttttttttttttcttttttgagatggagtctcgctctgtcgctcaggctggagtgcagtggtgtgatctcagctcactacaacctccactccctgggttcaagcctcaagcctcccgagtagctgggtttacaggcatgtgccactatgcccggctaacttttgtgtctttggtagagacagggtttcttcatgttggccaggctggtctcgaactcctggccttaggtgatctgcctgtctcagcctcccaaagtgctaggattataggcatgagcaatcacgcccggcctattggtttatttcaataagcagttatgagtaaagaaagataaaatactagctctatgcattattaattaaaatacatagcttctgacacagctactttttgctctcctgagaagccttttaaaactttctctgaattcctgattatgttctgaaagataaagctgctaaaactgggctccaaggatagttactgcaggaaaaaaactgaaggctaaatgaaagtgttgtgtaaggcttatgacaaaaaaaatttactactaaaattaattcaggtcaagatacctttccctcttgttaataacagtttaagaattatttccctttagaggaggaaagaaaaacttagtcctacccttccggttatcacaaatacttaaaggaacactttttaaaatattcacttttacggcccccttacatgtacctgtccgggcgggccgttctaaaataggggaacccccggctgcagggattcgaattaaacctatcgaaccggccaccttgaggggggcccggacccagcttagttccctttaggagggtaaagcgcgctggggat

SEQ ID NO: 13725 - DNA, 859 bp, Homo sapiens
  misc_feature 496: n = A,T,C or G
ccgggcaggtacagtttacaaggtaatacctctaagtgtgcttttagcgttcagtgaattcttaaaactgctgctggagaattgtcccaaacatatttttttaacctttgtaggacatttagcccatcaaaacctgcaaaatctttacatacacagaagaacagacagttcttcaatgaaccagaagaaaatttctggatggtcatggtatttacatacacagtgtatctttctgaaattgtatggtgaagttatgggtgatctttactgttcagaatttaggaaagttctctggctgttgcatccaagtaaaattaaaataaaattggttgcaattttaaaatcaagttcttcctatttgctttattcattcttggggctgttttaagaagctatgtttctgatgctgtaacatgttcaaagtttttaaattaaagcaaaataaacatggtctaatgaattcattgataatttcagtttatcaaactttgtaggntgttcggaattctataattgaaaaacagagtaagaatgaaaaaccgttatggattttcaaaaggaggagtggtggtaatgggtcattggatggtaattaattaattttttaaaaggattggtgagtattgttaaagcccttacttggttggtattaaacctaggaggcttttgcacaagtttttccgtgcgatataacagaggttatgtggattaatttcggggcgccaatctttttaaatggattgtctcccagtttgcaaggaccctatattttcattatttttgagacccttctaaagggggcttataactaccgaattaaaacttgaaacatttggggtgagacagggctaaaaatgcg

SEQ ID NO: 13726 - DNA, 458 bp, Homo sapiens
  misc_feature 350, 397: n = A,T,C or G
aggtactactaggtttaccctctcatttcctttatcttcaacttattttctttgtgtcatctgaatcctccagatatctaacttttcctttttatgcctttcacatttccattggagatcactttgtccccttccttaaggttctgtcgggagagatttaagagttggttctagctaaaaaatatggctgtagctctgaagatgacataaaagtttttccctatgcctaagatttcaaatatatgtatacatttgaaagaaaaaacagggagagcattatttttttgtccagattatttttgctcattgtaggtaaaaaacaatctgtgtatatatgtaaaaaaaaacanaaacaaaaacaaaaaaaaaacctttcagtccctacataataactcanaaataaagtttcttcagccagctatggggatgggggaaacaattcccagggtacctgcccg

SEQ ID NO: 13727 - DNA, 554 bp, Homo sapiens
  misc_feature 509: n = A,T,C or G
aggtacaaagaagcctcactccccacgacacccttccgtgcatggtgtcactgacatctatatttcttttgtcacgttctgtaaatcacaatgaatggggtattcttcttctattatatatttgctaagtctttatggcatctataaaaaaaagtggtaactctatcctatgtaatatccctgtcaagtcctaaaagtctcttctgacgactatgttgtctgaaatatgcacagctactatagcttcatttcgggtcatatcatcataatccatgttgtctcatccatgcatatttgtgaatgcgtgaagtaactttcttgtgcatagctaagagtgtggtctagctattttaaatcgactactagtgctattcgtaaactaacatattctctccatctacgtcgaagatagcattgcataacgatgtttagttctccattaacatataacctaatccctttttaataaatttaaattgcgtaccataagggtagaaaagggaacgatnctttatttttgaaccctctatttatttttcgggaactggccgggc

SEQ ID NO: 13728 - DNA, 882 bp, Homo sapiens
  misc_feature 346, 369, 454: n = A,T,C or G
aggtacatctgcctatattccttgtgatagtgctttgctttttcatagataagcttcctccttgcctttcgaagcatcttttgggcaaacttctttctcaggcgcttgatcttcagctctgcgaaattccttcgcttttcttaagggtttctggcacagcaggaacctccttcttcttctcttctacaccctccatggttccagccggaaaaagagccccgcgtactatgtggcgttcttcacctcccccttcgtggtcttctcctggaatgtggtcttctacatcgccttcctcctgctgtttgcctacgtgctgctcatggatttccattcggtgccacacccncccgagctggtcctgtacgcggngttgcatttccagccattgctacaaagaacctttatttgttcagtaacggtagaaaattcttccccgataaaaaacttcagactngctgaatatcctgcaatgtcaagatgaccgatgttgaagtgggtggatttgctaacaagtacaaattgaaccttaggcttatggaacccaataggcgtcattgattggcagcaagccctaatctttcaagtttaaataaaatgccgacaaaaaaaaattaagagataaagggttcttgcccgggcgggccgtttaagaaacagttgatccccccggcttgcgggaattcatatataggcttatcgaaaaccgtcacccctgaggggggcccccggcccccactttttgctccttttaaggagggtaaattcggcccttggcggataaatgggaaatcgtgttctctgggtaaattgtttaccgttcaaattccaaaaaaacagacgcgggacaaaagtgaacccctggggccataaggtgagcatccc

SEQ ID NO: 13729 - DNA, 866 bp, Homo sapiens
  misc_feature 591, 625, 644: n = A,T,C or G
ccggcaggtactcttttttttgttctttttttttttttttgagatagagtctggctctgtcacccaggctggagtgcagtggcatgcaatctcggctcactgcaagctccgcctcctgggttcacgccattctcctgcctacctcccgggtggctgggactacaggcgcacgccaccacgcccagctaatttcttcatattttttttagtggagacggggttttactgtgttggccgggatggtcttgatctcctgacctcctgatcctcctgcctcggcctcccaaagtgctgggattgcgggcgtgagccaccgcgcctggcctgcttagagttttttatgtaattattttgtgacacaaacatttaaaatactgtagcttagaatgaaattgtctcaatcctaggagccaaaagtttgatgaatatgaatactaatattaaccatttttgtgttctgtgtcaggcactgttcttagccctttacaagtaagttaatacatcatctctaaatgtagttaccattatcgatcccattttatagatttggaaagtagggtaccctcggccgaggtaccgatgctacttgtncaatgatggtaaaaggtagcttactgttggcctncgattcaggttagaatgangaaggctgcgctaggagtcaataaagtgaatggcttaatggggcgaaaaataaggcttggtggttggatatagggaggatggggatattggtagggataggaggatagtatatggcaaggcgccttctaattggtaggacccggccggaaaatggttggcaataggaatatctttccgcttgaatggggaagggtgttaaggtgggcaagttaaataccagt

SEQ ID NO: 13730 - DNA, 852 bp, Homo sapiens
  misc_feature 673, 727: n = A,T,C or G
aggtactttttttttttttttttttcttttttgagatggagtctcgctctgtcgctcaggctggagtgcagtggtgtgatctcagctcactacaacctccactccctgggttcaagcctcaagcctccgagtagctgggtacaggcatgtgccactatgcccggctaacttttgtgtctttggtagagacagggtttcttcatgttggccaggctggtctcgaactcctggccttaggtgatctgcctgtctcagcctcccaaagtgctaggattataggcatgagcaatcacgcccggcctattggtttatttcaataagcagttatgagtaaagaaagataaaatactagctctatgcattattaagtaaaatacatagcttctgacacagctactttttgctctcctgtgaagccttttaaaactttctctgaattcctgattatgttctgaaagattaagctgctaaaactggcctccaaggatagttactgcaggaaaaaaactgaaagctaaatgaaagtgttgtgtaaggcttatgacaaaaaaaatttactactaaaattaattcaggtcaagatacctttccctctgattattacagtatagaatttttccccataaagaggaaagaaaactaaatcctccatacagtattcacaaatactaanggacactttttaaatatacactattccgaccccttacatgacctgcccggcggncgttttagacctatgaacccccggcttgaggaattcatatcagcttacgaaccgtgacctgaggggggcccgtcccaattttgttccttaatgaggtaattggccctggcgaaaatgggaaagcg

SEQ ID NO: 13731 - DNA, 875 bp, Homo sapiens
  misc_feature 38, 89, 90: n = A,T,C or G
ccggcaggtacttttttttttttttttttctttctttnttttttttttttttttttttttttttttttttttttttttttttttttttnnggagaaaacatttaaaaattttttttaaagacaagtttaccatgtaccgaggtttatgcttctggtggaaatgaacaaatgtccccccataaggaaaaaaagttgagagatgccttttgtttaaagacatgggagccaaacttttttggaatcacatttttatgataaaggcctagtttaattttggagggtgtaaagacaatttctaggggtttattttctagttaatccctacgactttaaacattacttaatccctcatttaagcgggtttctttttctttaggcactttgcaaagggaaatgtaagaattgaaatttggggctttccccctaagattcttaaattaaaacacagtttccattttcctggccagatcaaatgcttaggggtgtttgaagggttcaaagaaaacttatggcgtattaactggttgattttttaaggacccagtagggggtaaaaagtttgtcctataaaaaccttcgggggcttaaaataccaaaacttggtttaaaaattgggtggggcgaaccttgagcaaaacccaaccttggggaattacttggggcgccgggggaggttccatgggctttcaaccctgggggaacggaggaacctcctttcaaaaaaaaaactgggcggggtattttttggcctcacgggggacattctaggggaagggcctaaaattttttaaaaagggtgttgccccaaaagagatttttttttttttttttttccccccccaaaaaagcccccatttgggttagggtctaatttt

SEQ ID NO: 13732 - DNA, 861 bp, Homo sapiens
  misc_feature 322, 540: n = A,T,C or G
aggtacttcgggaaaacaagaactgtgcttcaatgtctttataaccacactatatggctcattgtaaatgttcaacaaatgcttgatgaatgactcaatgagcaaaattacatgaaaacacttgctaacctatctcttttcatcaagtatgtagcaaacacatgcccacacctggcaccagaaactataagtgctatctaaatatcaacattttatttggcctgtgcacttatcagctagtggaaagcataaattattccaataaacagacgggaggtgtggaggcaaaatatcacacctaggtcttcaaaactaatgactntcaaatcaaaaactgcattacctgataaagacttaacttcatgattatttcaacagggactaaaaaaattacaggaaatcttggaaaccagctatctggccaaagacactaattttagagatgaagaaactgaggcccaaagaagtaatcaatcaaagacacacaggtagtggcagaggtatattaaaaactcagaacttctggccctacactagttntttgttcttctacaacatgttgcctttgaatctataaaatcaatctttttatcacacttaaaaaaaaaaaaaaaaaaaagtacttgcccgggcggccggtttgaactagtggaacccccgggctgaaggattccaattcaagcttatcaatcccgcgacctaagggggggcccggtccccacttttggttcttaaatgagggtaatggcgccttggcgaaatcatggcaatacgtgtcctgggaaaaatgatcccttcaaattccacaaaaaaacgaccgggaccataagtgaaggccggggtgcctatgagggaataacc

SEQ ID NO: 13733 - DNA, 1038 bp, Homo sapiens
  misc_feature 221, 434, 436, 438, 440, 446, 451, 453, 454, 596: n = A,T,C or G
tcgtaacactcactatagtcgtataggagcaatcgcagctccaccgcggtggcggccgaggtacaactgatcagcaaaaatattatgattaatatgttaactgaggaagtatatcctacaatttagaaagattaatatttaaaatagttaaaattattgaaagttttaacttgcccgaaacagtccctaaccatacaggaacaattaatgatgctataaanattctatctaacattcctagtctacttgttgttttggagggcaggctgccattcctgcctattttaatctttcgaaggtggtctctgctcccatttaaaggtataagcaattaagagatacagaaccctcagaactaccttctataacttacctaatttctaagcttaaaatgtaatctaggctgggcatggtggatcacccgaggtcaggantncnanaccttnctggncnncatggtcaaacctcatgtttactacaaattcaaaggttgggcccgcgccacagctttttgatcccttttagtgaggggtaaattgccgcgcttggcaagaataatcacctcgaaccccaggccggtggtagggtgagacatncgatcccataatatgtctcacttagccctaagaccctgagccatacagaaaaacctggtctttagaaaatataagaaaggaaggtcctgtactggctgagttccatcggcgcgtgaattcaatattgtgcaagaacaaaaaacctctacgtacatcttgattctcttgtgttagtatattgctcctcgcagatatccaggtcaccctggtagtattaggggcgcattctctacttatgcttggactataaaaatattttgtttcacagaattgtctgtgtgtggggtatcgacgatttcatgttaccctaaatagccatattactcgtatgttttcatcatttatgagtgtgtgacaataatacactgcatatatctggatatgttgtcctctcccttggatagcgaaccatctcattaataaggcgcatcctttgatggat

SEQ ID NO: 13734 - DNA, 371 bp, Homo sapiens
aggtacagtggctcatgcctataatcctagcaccttgtggggctgaggcgggagacttgcttgagctcaggagttagaggctgtagtgagctacgactgagccactacactccagtctaggcaacagagcaagaccctgtctcaaaaacaaaaacaaaaacaaaataacagaatatttgttgccagtgataaagttagaccctaaataaaaattagaactttagaaagcatgcattcaccaccatgaactttaaagcaacccaatatttaaagaccttcctgacgaaatcagtggaattattaacaaatgtctttatttaatactgtatgataaaatgtgtcaacatttagaaaatctgcgtaactcaaag

SEQ ID NO: 13735 - DNA, 366 bp, Homo sapiens
aggtacagtggtgcgatctcagctcactgcatgctccgcctcctgggttcacgccattctcctgcctcagcctcccgagtagctgggactacaggcatctgccaccacgcctggctaattttttttgtatttttagtagagacgggatttcactgtattagccaggatggtctcaatctcctgacctcatgatccacctgccttggcctcccaaagtgctgggattacaggcatgagccactgcgcccagccgagtcattttttaatactactgcatgtgagttaacacaatcattcccaaattgaagttttagatgggccctcaaaatttttaggatatggttttcctacaggtttatattgaaa

SEQ ID NO: 13736 - DNA, 366 bp, Homo sapiens
ccgggcaggtactaaagagacatgtcattaaaaaacaatttggctactaaattttgttcaagaactttactcactactggttaggaaaaaagcttatcattcactatcctacacaaataaaaacaccagttaaaggcgagagatggaagagagagaataggtcatttacttcagtagctacaccttctgtccccaatcacagggacgaaatgacccgagggtgggtgaagctatgcagtaatacagccttcaaaagataatcacatttgcattctcaatagcacagacacaaccatttaatttaacttgacaatcatttgaatgtatcataataaataaatatttctctactaagacatgagaaag

SEQ ID NO: 13737 - DNA, 851 bp, Homo sapiens
  misc_feature 493, 613: n = A,T,C or G
aggtccaatggcccttccctccagaaaaacacacaaacaaaaaaatgagaagaaactatcagaattaacttcatctgaacgctggaaaatagtcaaaggtttacagcaactaagtaaatagtggctcaagaaagaggaaacatgaattttggtggcatttttacttgcccttgccccaatgccctccctgatttagtggcaatcttgacaatggcagcccacatttccagcgtgggactccagttctacagaaggcagagcagatcttattttcaaagaactgtgtttgtctgttttgacttatctggggacaaccttcaggcctgacaaaagacacttgccttactttcacctaactcaagactttctcaaggcagaaaagtggctatacagagggcattctttgaaaacattgaaaggcaaatgaacaaaccaccgtcacctgaagcaaaagattactgttaaggcacacaaaagatatgctgcaacctgngaagaaagattctttggagatttagtgcattgaaaagctgccatgtgttactggggaatttagaaagccatatgcatgcccgtggtaggatgcatattcaaaaaagacctgaaaagaccncaaactttcacatcttgctgatctttaggctcagttcaagcaggctatgagaggactgtaaataacctgtctaagctttgaaaaagtgccccaatgcagaacccatcagcaaattttgaagaatacattttgggggtaattatttttattttggaaatatggtaaggttggtggtgaggcttcaggtattaaagggcatttgtcaaaacaattgctaaacacaagcttacaaacagat

SEQ ID NO: 13738 - DNA, 416 bp, Homo sapiens
aggtacctgtcccaagaaaaaagaagaagactggaaatgtgtcctcagaaccgactaaaaccagcaaaggtcctttccagtctcagaaaaagaacttattccacaaaattgtcagcaaatataagcacaaaaaggagaacccatgtccggaaaaaggaagtggggataaatggtcaaacaagcaactcttcttggatgccattcaccctacagaagccataatttcagaagacagaaacaccatggagcctgttcataaggttaaaaatatcccatccattttcaacactccagagccaacaacaacgcaagaacctttggtgggcagccaaaagagaaaggcaaggaaaaccaagattacacaccttgtcaggacagcagatggccgggtatcaccagcaggaggtacctgcccg

SEQ ID NO: 13739 - DNA, 738 bp, Homo sapiens
aggtactgtttactaaattatagcactgcaataagacatttcaccaatatgatattgaagcataacaagttatttcataaggaatggtaattatctaacattctaagcaaatttggcagtgtgacttggtggggcgcagtgctgccctgacacaatgacagccttactctctaaattagtaacttccgtaggagaccccagaagcacacctccctcccagcagtgaaagccgaggattcccgttttgattagcaggcgccttctgttcacgataaagggataagaatcaggcagtgatggcagcggagttcatgcttcattaaggcaggcattgcaaactagttcagaggagagaatccacgatgacagcacattctgtgccatggagaacattcttaaatcaagcctccagtggaggaaggactcaagaatgaaatagcaccagataacggggcatcattagacttgtaaagcaaagcttccattttctatttttatataaaccattattaatgcctttaaaacaactgtgatatctggacaaataaaatagaaatgacttcttaagatgattgcaacttttagtcttgatttataaaaattattctacataattttaatagggtaactgataatttttctcactttttttttggtgtagggtgaaaaatcctatttataagagtgccggaacaactgtggtcaaatcgaagtttgagggaaaatgagtacttgccc

SEQ ID NO: 13740 - DNA, 688 bp, Homo sapiens
  misc_feature 10: n = A,T,C or G
aggtactttntttttttttttttttttttttttgagacagtgtctcactctgtcacccaggttggagtgcagtggcatgatctcggctcactgcaacctccctttcccaggttcaagcaattctcatgtccccgcctccaagcagctggaaccacaggtgcacgccaccatgcctggccatttttttttttaatatatatattttcagtagagacggggtttcaccacgctggccaggctggtctcaaactcctgacctcaggtgatccacccgcctcagcctcccaaagtgctgggattacaggcgtgagccaccgcgctgggccatctgtagtcttctgcaaaaaaaggttcctctaacatttttagctagtttgcaaaaaacttttctgtttttttgaatcctttaaaaaaatttgatgtccattattttaactgcatccttaaatattttacatgcctctatttttaatgacttgtggtataatggcggtgataaaaataccattagttcaattgcttttttcctctacttgggttatagcggaaagactgctttgtcttttgtaaacatacaaaatgacattggtttattttctagggctctttaggggtaattttgggagaaaatagttctcccactataactggtgaccctgcccgggcgggcggtttaaaaataagggga

SEQ ID NO: 13741 - DNA, 847 bp, Homo sapiens
aggtacgtaaaatgaaatttaaaacctcaaatggctcactgctcagaaacctcacagatggatgctgggtggtgagcagcagaaggggttgtgggtgagtctacattgttgtagttgtcctctcactacccatttgcaaggaaagcctggcatcaactggatatagaaccgggagctctgatgatgataactcatttcttagagagtcctttttctactttgcctgttttgatctctgcctcaggcatctgatgggtctctttgattctgatgccttgggtcaaatcatacagcataatggagtcatggaattgcaagtttattatgaatgtgatctgagcagacgcctacacatctacccaatagcctttaacctctaaagggctagagtcattgttcttcaaaccgttgcactgttaactggtcaagtctggcaacttcgaatagacctcacctcccacgttgctctctcctggtcagagctgaagcacatggagatagttggggttcacaaagctcatattatcaaccctcttactttacttttcctgattacttgcaaataagagcagatagccagatggctttgagtattatgggaaggcccagggctaaggaggcgactaatatgacgacatacacttgtttgataggcactatggaacatgtgataataatgttcataccttgacttgtgtcccaagctggctcattttctttttcctacatgcctttcccttgtaaaaaaagccagactgacttgcacaaacactggccctttgaagtggtcaaaggcttaaccggtctcttttaataaataatccccggccgagccttaaggattacc

SEQ ID NO: 13742 - DNA, 700 bp, Homo sapiens
ccgggcaggtacatggcgaagctagagactgtaacctgaagattgggacaaattaaagaaaaaaatgtgatttaacacaattacaaaaactgttacgttagggtcaaacaagaaccattttatgaaactgaattacaacaaatgacattatatctaactcttccgggtctccacagcacttatacttacttaagcagcttaaacacttccgagtctccacagcactctgatacttacttaaacagctcttttaacctgccctagtattcttaagtgcaacatatctaattttttttttcctcagtagtttgaacacttgctggctattttttctgtccaagttctcagtaacttcggcctgtgtagtcagtggttctacacagccgacactacttcttacataacacttggtctctctggcttctggaaagggcgaggggttaccttccggagtccagtgctctttcggcacttctgcaaccaggcagtggtaaaaggggtgctctccaaaaccatcttctagcagatctttttcagttaagattacttgttcttccatgtattcatatttagccagctccttgatcagccgcagtatgtcactgcaatcggcggcaatggcttggcggatcacgaatttagccattttcggcttttgcttttcttccctttgccggaccagcccctggtccttgggcgt

SEQ ID NO: 13743 - DNA, 396 bp, Homo sapiens
ccgggcaggtacctcctccccactacctagctctagcttctgtccaacctggcctattttccatccttcaaaacaaaccccaatgtgtatggcttactccagctgcttccttaccttcaggtttgtgggcttcatttaagccatgggaatgccagcttaattaatgcatattaagataagaacattaaaccccaaaaatgatgggaaatcactctgtcttcaaaacaatataaaataataaaatctagttataaagattatataccattgtcactagtaagaagtggcactcttatttacaaaacataaagaaattagggtttaggtctggcatggtggttcacacctataatccccagcactttggaaggccaaggccagaggattggccaggat

SEQ ID NO: 13744 - DNA, 384 bp, Homo sapiens
aggtactttttttttttttttttttgagacagagtctcactctgttatccaggctggagtgcagtggcatgatcttggctcactgcaaccttggactctggggctcaagctatcctatcactttagcctcctgaatagctgggactacaggcgcatgccaccacacccagctaattttcgtgctttttgtagagacaggatttcaccatgttgcccaggctggttaatcttactttcaaatgttactgatgagaaaacaggttctgagaagctaagtaactaaatttagatgaattagaacagagatgggactaagtcaaaagttctgcatcctactccaagctcttctgcaaaatgcctatttgtaagtaattggctttaaaa

SEQ ID NO: 13745 - DNA, 388 bp, Homo sapiens
ccgggcaggtacttgccactgttctaggcactggggatacaggaatgaacaaaatcacccaaatctctgccctcccaattttctggtatggagagaaagttcttttgtagatagggatgagaatcccacagaaaactcaggagtgatgtaacaatgcaaatgctcacaaaatctctttcctcatctttcattccctatttggaaggaaaggtttcaaagacattgatgttgtataaatgaccatcttcttcattattttataaacatttgtcctgtgcagagtaaaaacaactggactgcataacaaattatacctattgagagttgggtaaagagttaccattggatccagtccaccaacccaaatgtttttctacatgtattaact

SEQ ID NO: 13746 - DNA, 396 bp, Homo sapiens
ccgggcaggtactcatctgtttacaaatggtctatggctgcctttgtgctacaagggcagaactaaatagttgtgagataccaaatggactccaaaacctaaaatatatatttggctttttacagaaaaagctagttgaactctgctgaaagttataaactgaatttgcctcatggtaagtattatacataaagaaattcctgcctgttttttcttgatggaagaaagaggcaggacccagactagaaagtatgagagtcctagctagggaactgaagaaacaattttcaattaatgagaggaagtataatctaggccatcatgattttttgctatataagtaattgcagggccacaggttaatgggaaactgcttttgtaaaagcatagtatttg

SEQ ID NO: 13747 - DNA, 405 bp, Homo sapiens
ccgggcaggtactgagtttcaggaaacagtgagatacattcagcaaaacagtgggcttcatgctgaaagaagtcactccaagtaaacacacatgacacacacacacacacacacacacacacacacacatacacacacccgcagacaccctagtggccaataggtcctctcaccaaaaacctgtgatcaggagagcagaaagcctcccaggggtccatcactgccctttctggagccccttatcagatggccagccccaggacagcactgtctgatcctggtccagtccaaaccgccatcaccctgtgatgggggaacgggccccttcaccaaaacctttggggaaaaaaaaaattttttcctttttaaaaggaggggggggactcttaaaaaaggggtttgttg

SEQ ID NO: 13748 - DNA, 391 bp, Homo sapiens
aggtacttaaacaacttgtctgttttctttaaatcttttcccttaggttagataatgctgctcatgattgtgagagcacagaaagttcttttgttttctagaattaagtctgctcacctggtttgcattctgcatctgcctttctttagtgcagggtagtgtcagtcccactgtggcccaaagtttgcattctgcgttaaccaagtcacaattaatgaggttttactataggcacaaatgcttaaaaaagaaaaaaacgattgttttgtgtggttaaaataaaaacttgtggggattttaatgtatttctttggtgaaaatacattagttgtttgtctctaattggatcactttcccttctagactctgaacaggaagtgcctcctggaac

SEQ ID NO: 13749 - DNA, 394 bp, Homo sapiens
aggtactttctttcatttttttttttttttttggtaatgtattttttttttttttttagcatcaaaaagctttatttccatttggtccaaggcttgttaggatagttaaaaaagctgcctattggctggagggaaaggcttaagcagaagccctattactttgcaaggggcccttcaaaagtccctgggctaaaaaggctcttagtcgtgcttgaaagtgagcctttcaaaaagatactttcccagcccaccctccgggccacccaacctgtggaggttggtcaggtggacacccatcttcttgataagcttcatttcctgatttaggaagtgagtctcctgggaagtcccacaaatgggggtccgtgcgggcaaaaccaagggcaaaaaaaaa

SEQ ID NO: 13750 - DNA, 378 bp, Homo sapiens
ccgggcaggtacgcgggtctgcgcttgtcatcatggcgacgcggggccatgtgcaggaccctaacgacaggcgcctccggcccatttacgattatcttgacaatggtaataataaaatggcaattcagcaagcagataaactgttgaagaaacataaggatcttcattgtgctaaggttttaaaggcaattggtttacagagaactggaaagcaagaggaagcctttactcttgcacaggaggtggcagcccttgaacccacagatgacaactcactgcaggcactgactatcctttaccgggagatgcaccgaccggagttagttacaaaactttatgaggcagctgtgaagaaagttcccaatagtgaggagtata

SEQ ID NO: 13751 - DNA, 418 bp, Homo sapiens
aggtacttcactgatttttctactgcatctttaccacctgaactctacattattcctccacatgtctgtcccgtctgctccaagactgcagaggacagtcttgagcatcatcttactcacattttactcagaaatttcttattgagtcctgctaaatacatgctaggcattagggtttaaaaacgattaaaataaagcatgtcctggatggctggtctagaaaaacatgctcctagcacaaactttaaatttttgtgatctatccaaatttaataggggttagtgaggcatgatattggatgatcttaatttttctttctatatttctttattctttatattcatatcttagttctagtagttgataacattatataatctgtattatattatcttttttgtttttattccttacctt

SEQ ID NO: 13752 - DNA, 377 bp, Homo sapiens
aggtacttgaaaagaaagcatctgtggctgtgcccaaaaaaccggaagccccacgtgcaaaagtgcctgaagctgctcaagaagttgtcccagaaaagaaaattcccaaggcaccaatcaaaaaaccagaagcccccgcagttacagtgccagaagttcctcaagaagccacagaaaaagaaattcccgtggctccacccaaaaaaaccagaagctccaattgtcccagtgcctgaagctcaagaagttgtcccagaaaagaaagttcctaaggctcctcccacaaaaccagaagccccacctgccacagtgcctgaagtcccacaagaaattgtgccagaaaagaaaacactggtgcttcctaaaaagccagaagt

SEQ ID NO: 13753 - DNA, 406 bp, Homo sapiens
ccgggcaggtactttttttttttttttttttttgtagctctttgtaaattctttattgccaggagtgaaccctaaagtggtttacaagagtgccctatttctttcaattaactacaaggacaaacatattttaaagttgaaataagtgaccaatatgatttgccaaaattctaaagcgcactcacaatgaaatggataaaggttacctttggggatttgcactgcatgaattctgtgaaaagcttgttggatattgtgatagagatagagaaatgaagtatattatataagatactatgaggttccctgcctttgctttacattccaggtttacaaacgtgccccataaacattccctctgaggcttttgcatttcatatatttatctaaacttttataatcaaat

SEQ ID NO: 13754 - DNA, 409 bp, Homo sapiens
aggtacaaggattcctctagggaggaaatggtctctatctggagagagatcttcatgaggagatggagaggcgtggaggcatgtgatggtgctgcagccaaggccgtggggcaaaggccagcctcctcttcctatttttattaacccgggtcttctgcgcccaaagactcagcctcattcaggaccatattatgttcatacttctgctgcttccaaggagtgttgatgaaaaagtggggccttggaggggtagaggccaagggacagtttcccctctgccctttgaagttcacgatcttccatgcaacaaaattgttttctgtgaaaagcaggaaatgaataacaacagcgtaggtgcgttggctatgtccggtggcatttcttcagaattttcattaatgacacctga

SEQ ID NO: 13755 - DNA, 922 bp, Homo sapiens
  misc_feature 179, 273, 336, 348, 412, 415, 474, 517: n = A,T,C or G
aggtactggcctttatgtgtctattcatagcagtggactgggctgctcgcaccagaccctccaattcagcaccactgaaattcttggtctccacggccagtttctttaattgtctacattcaggccagaagagttaaacctgaatggcccccttccttcaatattcccttggcttggtnggttggggaattgcttgaacaaggaaaatttccttggttaaaggttcctggggcccccttttttttcctttccaaatttccttggggggccaanaagggccccctttaaatttcctttccccccacatttttttttttaaaaaaaccattttttccncccagagatttncccttttttcccccccacgaaggagttttcccttcaataatgtgaaaaaagagggggggccgcnccnttctctaaaattttccttaaaattttctcacagaacaaatataccctcggtggggggtnccccttcaaaatttttggggggggttttcaaactttttttccncccaaaacaattggggaaaccattcatagatggggaaaaatgagggttctttgggtgtttttttaaaaaaacccttttgggccctttttttccaaaacagggggccccccaaatttcccaaaaaaattttttttttggggggggaaaccaaggggcccaaaaaaccctttggtggggtttttggggaaccccaacaacccaaaggggttgtggtttccacatttgtagagaaaacctttttcccccccgggtgggggccttttaaacatccacaaagcgcccccaatatgggcgtttttcctccccctttatctttacatttgtgcccttttttggcgcaaaaggaaaattgtggggcccattttccaacaaaatttttttttttcaacttttctaaaaaaaaag

SEQ ID NO: 13756 - DNA, 426 bp, Homo sapiens
  misc_feature 236, 237: n = A,T,C or G
catcttgggtcatcgatgagcctcgccctgtgcctggtcccgcttgtgagggaaggacattagaaaatgaattgatgtgttccttaaaggatgggcaggaaaacagatcctgttgtggatatttatttgaacgggattacagatttgaaatgaagtcacaaagtgagcattaccaatgagaggaaaacagacgagaaaatcttgatgggcttcacaagacatgcaacataacaaannatggaatacttgtgatgaacatgaggggcagctcaagctggtggagggagataactcacgggggcagaggggtcagggattcctggccctgctgcctaaactgtgcgtttcataacccaaatcatttcatatttctaaccctcaaaacaaagctgttgtaatatctgatctctacggttccttctgggc

SEQ ID NO: 13757 - DNA, 416 bp, Homo sapiens
aggtactttttgctttagcagatagatagggcatccaatacaactgaaacaacctgataacaaattaattttatttttcaataaaaaggaatgctctggttttttaactggctccttgaggaagccagaagatggcatctgctctttaaacaggcttctcttatctgacttgagacacaaatccaccaagattctttcttacagtggaagtaggcaccacccctcagatcacgaggcccctaggaagaagcctgtggaaatcagcctgtgatgtgtggtggtgggccagcacctagaagacacatggtggttgtgcacataaatcccttcagcggactcagtggaaggatgagaattctgtaagttcatgcccattttattgagttgtaatataaaatgctttttctttttcattg

SEQ ID NO: 13758 - DNA, 402 bp, Homo sapiens
aggtacttttttttttttttttttttttttttgggtagctctttgtaaattctttattgccaggagtgaaccctaaggtggctcacaagagtgccctatttctttcaattaactacaaggacaaacacatttcaaagttgagataagtgaccagtatgatttgccaaaattctaaagcgcactcaccatgaaatggataaaggttacctttggggatttgcactgcatgaattctgtgaaaagcttgttggatattgtgatagagatagagaaatgaagtatattatataagatactatgaggttccctgcctttgcttcacatcccaggcttacaaacgtgccccataaacattccctctgtggctcttgcatttcatatatttatctaaactcttataat

SEQ ID NO: 13759 - DNA, 404 bp, Homo sapiens
ccgggcaggtactttttttttttttttttttttttttggctctttgtaaattctttattgccaggagtgaaccctaaagtggctcacaagagtgccctatttctttcaattaactacaaggacaaacacatttcaaagttgagataagtgaccagtatgatttgccaaaattctaaagcgcactcaccatgaaatggataaaggttacctttggggatttgcactgcatgaattctgtgaaaagcttgttggatattgtgatagagatagagaaatgaagtatattatataagatactatgaggttccctgcctttgcttcacatcccaggcttacaaacgttgccccataaacattccctttgtggcttttgcatttcatatatttatctaaactcttataat

SEQ ID NO: 13760 - DNA, 408 bp, Homo sapiens
  misc_feature 405: n = A,T,C or G
ccgggcaggtactttgagctgtgacatctcctgaatttcagtggctttgcttttattaagctctgcagtagagagcaccaaaatgatggatatatttaaaagctgcatatttttagaaacagcaaaaatctagggcttgttccttgttgaaagaggtagggcagtggttagaacctcctggctgactgtgggaattgatttgctgctagaggagggtagattgggttttccaaagtctttttaagacccagaccagctgaaacaagggaagggccatggtagttgtttagtcgtctgtggtaaaatggttaataactatttccctctgagtggtttagtatattcttcattcagaatatgcagagcttccaggtgttaggtttctaatatgtggtttttaaagantag

SEQ ID NO: 13761 - DNA, 406 bp, Homo sapiens
aggtaccaaggcccaatcaccccaaacagtgacaggaacataatttcctgttgggaccagttctcggaattttgcaccaacatgatcccatagttccacatctaacgttcccttttcaggaaaccaaggacagtgttcttccactgccctgaatagggtgaccatattttccatgggaacccgaactcccccattttaacaggaatttaatatagcagagataagcataatgtttagactctgcgtgacccatagttaccccggacaatacacagacaactcaccaatcgtcggggagccgaacaagcatttctgtggactggaccgatgaacatttctccgcacctaccaaagggaatcgggttcccacatgcacttaagaaaaagaaaaccacgttgggtgcca

SEQ ID NO: 13762 - DNA, 408 bp, Homo sapiens
aggtactactactgcctagttaactaatacaatatttcaattataatcctgataacatggaatcctattattatcttcctccactggaactgctgattttaaacgctacttaattccttcaaattctctaaatttaaacacatctttcacagtattatgtcattacattagatatggtatttgtccctaagcactgcacattaaaacaagccatatttaccaatataaatgcaaaagtagatgaaatttggaatttttcataagaagagtcaaaaaattatacctatttcaaaaatgaacaagaaactaaattaataatcatttgtaagactgtggtattcttaaaaccagagggaccctggaatagaaatcattctccaggatgaattatgacaaaaaacttaaact

SEQ ID NO: 13763 - DNA, 327 bp, Homo sapiens
ggcatttctcccaggatctctgtgcttccttttgtgcttcctgtgtgtgtggatatttaaaggggctggaaatgtgcaaaaacatgtcactacttagacattatattgtcatcttgctgtttctagtgatgttaattatctccatttcagcagatgtgtggcctcagatggtaaagtcagcagcctttcttatttctcacctctgtatcatcaggtccttcccaccatgcagatcttcctggtctccctcggctgcagccacacaaatctcccctctgtttttctgatgccagcttctcggcacttgctatttctccccgcgtacct

SEQ ID NO: 13764 - DNA, 412 bp, Homo sapiens
ccgggcaggtacgatatgaaactacagttgttggatagctcgagtaaaataactttttgttgtttttagcctaagagtggtgacgccgctgcagctgctgatgcttctcctagtctcaatcgagaagaagtgatgaaactcctcagtatatttgagtctcggttgtcatttcttctccttcagtccattaaactgctatcttcaactaaaaagaaaacaaggtaaattaagtggttatttgtaggaatttctttcctagcaccctacctataaaaattttctctaccaacatcataaagaaaaactaggggccaggcacattggctcacacctgcaatcccagcactttgggaggccaaggcaggcagatcacttgagttcaggagttcgagaccagcccggccaacatggc

SEQ ID NO: 13765 - DNA, 237 bp, Homo sapiens
aggtactggctcctaacgtattcttccaaagcacactgagacttttcctgcaagctttccacatgggctacatcagagagaccacaggcatctggaagaaagtttaaaaacagaagaagaagaagaagaaaaagaagaagaagaagaattcagtcatcagattaagaggtttgaattgggtcacatgaggtgtgtgcacagagctctgtcaaactgccccccccgcgtacctgcccg

SEQ ID NO: 13766 - DNA, 399 bp, Homo sapiens
aggtacgcggggagagacaaaaacagaagaggggaaacatgtttcctactgacgacaggtgattacacgtgtgcttctgatggagggatcaggaaaggatatgaaaaatcccgaagcttaaacaacatagcgggcttggcaggcaatgctctgaggctctctccagtaacatcaccctacaactctccttgtcctctgaggcgctctcgatctcccatcccatctatcttgtaaaccaaacaaccaaactgcatcagtcggctaaattgtattaattcaagtgctgtttaccccataatggaaataattaaatgtagagttactccaggctccattaatacagtataaatcttgcatgatactacaatttgaagtcagaaatgccacttgggtagctat

SEQ ID NO: 13767 - DNA, 412 bp, Homo sapiens
aggtaccagcggttataacaccaccaaccggcatgcctcaggaactccctgctatctggcttcataaatgacggcatgcactgcaccgccgtgtacattacctgacgctgacggatacactctcacacacgcatgctcgcgctgcggtccaaaagagcctgggacgttggtgaagaagggctataaaaatgaccaatgggggggaggtaagtcagttaggtgaaagactacatggcacatgctgtcattctggtaactaaagaaataactcctctattggaaaattagctgttcaggcagattaacggatgtgtccacctgaagggtgacccccactgtggccttttactagcaggaaagggctcctttacaactgagctcctgcttttgtataaaattatttggagtgagg

SEQ ID NO: 13768 - DNA, 403 bp, Homo sapiens
aggtacaatcaactcacaaatactaaaaggtttcatgatcaaaatggctactacttcccccagaaccaaaacagagtaaagcacaagtctttggctctcctttaaagaaaacagcaggttaccattcttaaccagacctttgtttgactaccagtagggcaaataccacatttgtgcatcactgagtaataacaccattagaaaaggcaacttcacagaagttattggctaagcgaactcatttgaatgctctgttttgaggcagcaaactgtcactgtcgcagattggggagggcagtgggtaagtcaaggggaaattacagggtggaaaaaggtcaagaaaaaaaagacgtatatggaaaaatgtaaactttgagctccatccctgaagaactctggaaag

SEQ ID NO: 13769 - DNA, 487 bp, Homo sapiens
ccgggcaggtaccccagctgatgatgttccacaaaagagcaaaacatacacaatctggttccactctacagaaatcctggaactggactacaaagcggaataggacaggtgtgtggcaaggaaggggggttccttcacgggtttggagttgctgagggttaagggcacaggggaattaagaacggttaggttaattaaaacaatttcagtggtgggtaatttaacctttagtggacagcatagctgatccaaatggtatttttcccaaaggttttaagccatcaaataataagggtcatatagaaaatttacaatttaaaaaatgcttatacttatgatggtggtaggtaatattaatgggggtttatataaccaccagacaaccattaacccttccctaagaaggtcaatttaaacctggaagaaagggtttcctaaccaagaaaaaatagaaccaggccacaaatctaaacaaaaacaaaattac

SEQ ID NO: 13770 - DNA, 316 bp, Homo sapiens
ccgggcaggtacagcgcaaattaaaacaccatgaagataactgttcttgctgatattcagctatttttcttgaataagtgctatgtgtataagcttttggctaatttccaaagttctgaaaaagctgaatttgactatttttgtccatgttttcattctttttgtgaagatgattttcagaggtccttacttttttttttttggctgatgtcaccaacatgtagctttttaagtttaggttaattaaaagtaaataattaagcctaggcaacatagcaagacctcatctcctgaaaaaaaaaaaaaaaatgtacct

SEQ ID NO: 13771 - DNA, 362 bp, Homo sapiens
aggtactgatactttttattcttttcagggaccgttgatctaaaaaatgttaaggcttatgctttcagatctcaatccaatttctagaaattaacaatgagtccttttatagcactgaccttactcttcctgccttccccacctccaccccaaacttgctttgggtgttctttaatctttcaagggagtgataaatgtcacaaactcttaaataaagggctgaaatggcagcgtatgactgtttagacgtgtctttaaagtagtattagtcttctagaatactaatctaattcttagaaacagaaaacagaggaagctcaatgttcgaagggaagataataataattgattcatcctggctc

SEQ ID NO: 13772 - DNA, 448 bp, Homo sapiens
ccgggcaggtactctggtaagcttgttgttgtccaagtgaagctccctcatatgaggcgtgttggccagagagccattgtcaacagcagagatgctgttgaaactcaatcccaacttaatccaaataattcaagtcctttcaggcctagctgcaatcaacttctgcttgattttagttgtccactcaagcatgttagatttccgctaaggggataggagtgaaagtaccctttgtagcgaaatgactgggttgaatgatctggtaattcatgcacatggcctggattgctacggaatagccattactttcaattttcccctggtaaaagacccctcatttttgcaaatttccttgaagccttcttttcaagccgggatttcggttgccctcagttttctaatggaaccaatctattcttggcttttcagcttccaatttgaaaaggta

SEQ ID NO: 13773 - DNA, 409 bp, Homo sapiens
ccgggcaggtactatagcatctgtggaaaatcttagaaaaaaacattttctcccccaccctctctcttccctgttaagaccatcccaaaatgcttcaagtaaaaaataacaagtttaaggggttaagcacttttaaagtctgattaagggggtggggggaaaaaagagtaactaccagccatttctccaatggacatctcttccacagacctcaacgtgagaactgctctagtttctataaactgtaaacctgtggtggtctgattatcctgatattggattttcttgttttctgttacaccttgagtcatttgcctttaggattctagacagacctaagggaaaaagaactgaaaacatattttgcccccacccccacaaaaaaaaatactgaaaactcccccccgcc

SEQ ID NO: 13774 - DNA, 407 bp, Homo sapiens
ccgggcaggtacataaattttccagaatcttgcatacagtcgcctgtgctctcttaaatggaactaaatacctggctggtcttttttcttttaacttttttttgtcaacgaatgtctttgttttagaaagaggcattttcaagtgttttgatgtgacccaacgtgacctaaaaccattaaaagattctaagcaaaaataataaggccaaactttagtgtaaatagcatgaaaggcttgaaaactaaataaaaaattattttttcctttaagagtaaatagctaggctaggcatggtagttcatacctgtgaacctgtgaaccattgctttggggggctgaggtgaaaggattgcttgagcccagaatttcaagacgagcctgggcaacatagcaagaccccttctct

SEQ ID NO: 13775 - DNA, 406 bp, Homo sapiens
ccgggcaggtacctcagttttgtcctctttaaaataaggaaaatataccttgtagggttactgtgagacttaaatgaattactaaatgtaaaaaactttataagattcttggcacatggtaactgccatacctattacccataactaactgattttttacacaatttactataatataaccacaattcttattcaaacatcctggacctagctaacagtgacacgtgatgatttctgaatgagttttgagaagaaactgagtcccaaagagtgcaactttctcccactgtcagaaggcctacacaccactcttctcagagaggtggaagaattgagctgtgctttggaactctcgattacatcaggaacagattgctgattggtgacagatagcaagtgttaataa

SEQ ID NO: 13776 - DNA, 417 bp, Homo sapiens
aggtactgctatcaattcaggtttccttagcaaataagtgcttcagatatactcgcaagggctcctgaattggagttttctgcatcatctccataaaaatattttttcacctctaaagtcatcaaagaattgaagcaggcccttgggaaatatccttaaggggagagagtggctccaaaaataaccttccttccagcaccacaccaccagctcagagaattcacttcacggtgggacggtcactcaaagtctactgtgaacctcatccccaaaaaggtaatggcaaaggctagaggaaaatcctaaacaatcacctatgccttgtatctttctctagaaacacaatctactagtagaaaaaccaatttgaaattttaaaaatgtggatgctactcatgagggctgtcatcaacgtag

SEQ ID NO: 13777 - DNA, 406 bp, Homo sapiens
aggtacacggcgaggtattgaggacaaccaacgcaggggcttatgctgagggggcaggcggagcttgaggaaaccgcagataagtttttttctctttgaaagatagagattaatacaactacttaaaaaatatattcaataggttactaagaaattgctttagcgtaaggttttaacgtaattttaatagcttgagattctatgagaaaatatgaagacttataagaggagcatgaggaaggaaaagatataaggtttctgaatcatgacggaggttgagacgaaacttatttttggggtgggacttgtatttaaaagaaaagttgaagaatggactacggagtccaaaactactaccaatatatgggcaatgcttttaaatttaaacgcaacgtgagtaaaagag

SEQ ID NO: 13778 - DNA, 405 bp, Homo sapiens
ccgggcaggtactggtctacagggacaagcagtctttaaaacgaaactcaccttcagacctcactctacggacagtgccacacatagaaagatgactctgtcacttgcagataggtgttcaaagacacagaagattagaatcttgccaatggctggtcgtgatcctgaatgccaacgcacagaaatgattaagaaagaagaagaacgtttgagggcttccatacgtagggaatctcagcagcgccgaatgagagagaaacagtaccagcgggggctgagcgccagttacctggaacctgatcgatacgatgaggaggaggaaggcgaggagtccatcagcttggctgccattaaaaaccgatataaagggggcattcgagaggaacgagccagaatctattcatc

SEQ ID NO: 13779 - DNA, 803 bp, Homo sapiens
ccgggcaggtacagtggtgcgatctcagctcactgcaagctccgcctcctgggttcacgccattctcctgcctcagcctcccgagtagctgggactacaggcatctgccaccacgcctggctaattttttttgtatttttagtagagacgggatttcactgtattagccaggatggtctcaatctcctgacctcatgatccacctgccttggcctcccaaagtgctgggattacaggcatgagccactgcgcccagccgagtcattttttaatactactgcatgtgagttaacacaatcattcccaaattgaagttatagatgggccctcaaaatttttaggatatggttttcctacacgtttatattgaaagtatggggtatctcctattactcctctctatatttgtcttaaaggagaaagggagaggccagagaccaaatgtccccatttacctatagctaatctctctggaagacaagcagcccagacttgagcttctagatggatacaaccaggtgcatgttcatgcacagaggagggtatgtataacccatagtaacattaaatgcagtgccttcttctggctgagcggggcacggtcatctgtagttcccagcattcacacactaatcgtagtatagaattttggatgaacatccctccaggtggaagtttaatagtggagaaaaggcacataacccaattagataaatttagtgtgcaggtaattaattaaggggaaatggggaaacaaaaggttaggaaaaaatatctaataaaccctttggaggggaatccgg

SEQ ID NO: 13780 - DNA, 618 bp, Homo sapiens
  misc_feature 301, 376, 422, 508: n = A,T,C or G
ccggcaggtacttctctgcagccttaaactcctgggctcaagcaatcctgccaccttagccctccaaatagctgggactacggacatgcaccattaaattaaaaaaaatatatatatatacacacacacacacacacatatgatgtggtactcacttctgttgcccaggtctggtctcaaagtccttgagccttaagctatacctcccagccttgggcctcccagaagtggctgggatgtacaggtgatgagccacatgtgccatgagcctgatacaggtgatatattgtagcagagacantttaagaaagtgagaagaaagcagccatgtggttatctgacagtccagatattccagcacaaggggacagagggnggaacagtacttggtggtgtggtgagtatacatggagggaagcatnggctaagtggcatggaacaaagaaggtatggtagggtgcagaagggtggtaggtgcaagcaagtggtaaggtgcacaggggtgtanggtgcaagtggatgtaaggttcaatgggatgtaaggtgcagacaaggggtaggggcaaaacagttggtacgtgcagagcgggtagatgcaacggatgtaagtacctcggc

SEQ ID NO: 13781 - DNA, 797 bp, Homo sapiens
ggtacttttttctttttttttttttttttttttgggggatggagtctcactctgtctccaggctggagtgcggtggcgtgatcttggctcactgcaacctccactttccgggttcaagcggttctcctgcctcaacctccgagtggctgggactgcaggcatgtgccaccacacctggctcatttttgtatttttagtggagacagggtttcaccatgttggccaggatggtcttgatctcttgacctcgtgatccgcccaccttggcctcccaaagtgctggattgcaggtgtgagccaccgtgcctggcctaaataaataatttcgtaacatatacaatccacttcccactaagaattagggtcaaagacattctatttgaacacttgcaattacctagatctagttggcctttggttgatagatcctctgcctcggaatttcattgagtttttttcttccttgccttgggtgtctgcttgccactttctaaaaattctggaggaagcagtttctcttattgcccagaaccccggataccgtgccggcggccgtttaaaactagggaacccccggcttgcgaattgatataaacttttatacccgcaccctagggggggcccgggccccccttgtgttcctttagagggggaaattgccccttgggaaaaaaggggaaaagtggtcccctggaaaagagtttcccccacaattccccaacatataacccggggataaaaggaaacccgggggcccagagagggcccccccaatatttgggggccccaccccccct

SEQ ID NO: 13782 - DNA, 809 bp, Homo sapiens
  misc_feature 132: n = A,T,C or G
aggtacatactcccattccacagcttagtctaacatgcaaaaagggcatgattagagattgttggtcattaagaagaacaggaggagacgttctggagccttggcactatgcctggggaagagaggatctcncacccctcagccatctctgggccagaggaaaatcacctaagggttgtcctaaagagttccacgggagaagagattatgctgtctgatgaccccttaccgttttctgcagtatgtccctactttttgggtgtcagctgaggctattaaactcgtgctgcttctgaagtcggtttcttatataccatgcgaaggtttaaatctgctgtactgactctgctctctgttcttacttttcccagagttcctacacttactacataactaaaaactggattttaagctgattgcactcttcaatgcgtttcatttctgagattgttctttcaaagccctaacaatagatttcggttcatatgacaaactgacgaggcttgtcacctgacactggcatactgcctctggttctgagcaaacctggttcttggaatcaaagatcgcagaaagtagacgtcctatttctactaaatctttgcatacgaaataatccctctaggtctacttggattttccccaggcttattgactatactaaatacaaaaagtgctcatccttcttatttgtgcagatatgggcacactccagggttcgcaaatgcccaattccatctaggatttgcctaggactctgggggcccttgtcacaaagaaaagcgcagaaggccctttaagttttatat

SEQ ID NO: 13783 - DNA, 816 bp, Homo sapiens
ccgggcaggtactgaatttctgtcagttaaggggttcactgctttggtggaaattggtggaaattgctagcaggttccacgatgtttatttttttctccatgttgtatatcattaccatgtcacatacgcgttctatttttcttcctctcctcctgatctccttaaaaatgaatctacagttggtggctttttccccctcctctttggccagttccacagttcagttcttcctgaaaacagggatgatgaacttgtaggatcaggacaaatgtgtgtttttcaaaaacttaaggctgggtgtgaaacaccttctgtggacaaggatttgtaaacttctctcctgcctccagctgcggccccagcctaactgatagttacttgattcagtgtgctagacacttaaatagcatctatgtctctttcaagggaatttgtcaaataatgctgtttagctaattgttgcaagcaattgcatattaacagctgtgattttgttggacagcaagtattatggccaaagccagttttttggcatgtcaaaaataatgcaataaaaactaagtgaggttaactgaggctggaaatgcctttttcatggtaaaatgatcacttgcatattctctttccttttctttttttttctttggatttcatgctggaatcatcccctgatcttaaatgcaaaacgtcggatcaaggaactatgaactaaagtgtttgtcttagcccattgagtgaattatttttaaaaaaggtgaaatgcatagcttttctttagaccaaacaacagcaaaactttggtattcctaacttct

SEQ ID NO: 13784 - DNA, 810 bp, Homo sapiens
aggtacttagggtaagcattaacaatattattcaaaatgttatatagagttcaactgtatacaatagagcatttattaaagtgtgtccaaagcgcttataaataaagcatcttcgaggcaggcggctcacttgaggttaggaggaaagcagactggccaacatggtgaaaccccgcctccactgaaaatacaaaaaattagccaggcgtcatggcgcacctgtagtcccagccactttttagtatttttagtagagacggagtttcaacatgttggccaggctggtcttgaactcgtgacctcaagtgatccgcccacctcggcctcccaaagtgctgggattacaggcgcgagccaccatacccggcctcttatacaataaagagatttttttaaaaaaagatataaattcacacatatgaggaaaactggagaggaaaagatagcaacaaaaattttggaaactggaaaggaaacagataaagaactaactgacttagtagacccaagaaagcaaacacctaagccagcagtggggaaggctgagaaccatcacagtttatactacagcagcgattctgaagctttaatgtgcatcagaatcatatagagaactggtaaaacacaaaatcccaggggatgctaacactactgatccagggaccatattttagaactactgcactagaaaaatctaagtaagctcagattgttggacctgcccggcgggcggtctagactagtggaacccccgcttgaggaattcatatcagcttatcgatccggcacctgaggggggccgggacccat

SEQ ID NO: 13785 - DNA, 402 bp, Homo sapiens
ccgggcaggtacaaaattaatggtggttttggattacgaattttaaattattataactaggcccaaacacatctttatcaaaataggaaacgttacaatcaacacattttttgccaatgagaaataagtttgtttattcctgtagcgtaaaaatccatgctttgggattcgatgaactcttggaaagcattttctgcatcctgatggttgtggaagcattttccctgcaaaaaattttctagatgcttggaaaagtggtagtcggttggtgagaggtcagttcaatatggtggatgaggcaaaactttgtagcccaattcattcaacttttgaaatgttggttgtgcaacatgttgtcgggtgttgtcgtggagaagaactggaccctttctgtggaccagt

SEQ ID NO: 13786 - DNA, 403 bp, Homo sapiens
ccgggcaggtacgcggggggtatctctagccgggcctgagctgcgctagcaccccccccaggagaccgttgcagtcggccagcccccttctccacggtaaccatgtgcgaccgaaaggccgtgatcaaaaatgcggacatgtcggaagagatgcaacaggactcggtggagtgcgctactcaggcgctggagaaatacaacatagagaaggacattgcggctcatatcaagaaggaatttgacaagaagtactaatatttaaactgaactgtttaatgcctaaattttatatataattctactttaaaaataagccttatgtcttttataccaaatatgagtagttttctaaagcaatgaaattagaaaactatataatttcagtatctgattatactgcttg

SEQ ID NO: 13787 - DNA, 409 bp, Homo sapiens
aggtaccatctgcctcctgcttgcccacagcatggggttaacggctgaagttgggcagcaaagcctgaactgtgttttcctgttggcagggcaaattcatccgcatcaacttcgacgtcacgggttacatcgtgggagccaacattgagacctatctgctagaaaaatcacgggcaattcgccaagccagagacgagaggacattccacatcttttactacatgattgctggagccaaggagaagatgagaagtgacttgcttttggagggcttcaacaactacaccttcctctccaatggctttgtgcccatcccagcagcccaggatgatgagatgttccaggaaaccgtggaggccatggcaatcatgggtttcagcgaggaggagcagctatgtaagcctcacac

SEQ ID NO: 13788 - DNA, 812 bp, Homo sapiens
gcggccggcaggtgcctttgatcttatagatactggggagtggtatgtggtagataatgtcaagtaacgccctcatggtgtgggtgaggaagtgaggccttagtgttgattggactgtgctgagccacacattcttcttattgccacactccccatacagtggagggttcttttatcattgggacagttctcagatcaataaagcctttgtccatagagctaaatataaggcttcgggaaatataaaaatatgatctgtaactgatagtcctgagtgctagccattagtggctaagtgattgtggccaaatcactcaaattgcgtgtacttatccttaaaattggcaatactaaaacctaccttatggggtggtcacaaggttagatgacatcatgggtttgaaatttctatgtgaatttgaaattactataaagatgggaaatgctgtcacaactctggatctacctccctattcccaggggggcagccctagttatcatgacatgatattgttgtcttgttgaaattagaaccgctcaaatgaccttaaacttttgcacaactgagaaccattaaaatggatttcctggatacaccgattgccaaactatgggtaaagggcactggatcatgtaagatggattcctggtcgctgctaggaagaattgtattcttgaacacttgtcaaaaaatttgctataaggttcgaattgaaaatcatagcctgaacatttggatgttacaaagccttcaaagatgcacggctgagagtctcaagtattgacatggcccatatcaggtgggcaaatgg

SEQ ID NO: 13789 - DNA, 446 bp, Homo sapiens
aggtactaatctgggcattgttctaggcacctgaaataaattatctcaattcatccttcaaataacccagtgaagtagatcatactatatcccactttatagatcatactgtgtatcccattttatggatggggaacctgaggctcagagatgagaaatgatcatcccatcattcccattcactcaactagtaaacaattgggctaaacttcagctccagctccatgcaattccaagtcctcgttgaaccactttgttattgagcttgctccaactgatctcctgtgtctctggccatcccatcgtttcagtagtgccccagtttgaaagtccacttcatcatcaggcatccagtgccttccagcctttaattgtctcctatcaaactggaaacaattagtctgagaaaatcatccatgccagtgaattaatttattgaatttgtt

SEQ ID NO: 13790 - DNA, 454 bp, Homo sapiens
aggtactaagaaaaattgttttgccttgagatgctgttaatctgtaactttagccccaaccctgtgctcacggaaacatgtgctgtaaggtttaagggatctacggctgtgcaggatgtacagcaaaaaagaaactgagaagcccaaactgctttcttgttaacattcacttattcaaaccaatgtggaaaacttcttatactttggttcccattatgaaagttggacaattgctgctatcacacctggcaggtaaaccaatgccaagagagtgatggaaaccattggcaagactttgttgatgaccaggattggaattttataaaaatattgttgatgggaagttgctaaagggtgaattacttccctcagaagagtgtaaagaaaagtcagagatgctataatagcagctattttaattggcaagtgccactgtggaaagagttcctgtgtg

SEQ ID NO: 13791 - DNA, 499 bp, Homo sapiens
gcggtgtcgcctcagatcgcgcatgcgcgttgggattagcgcgcaatgtccgccgaggtacgcgggggcgttcgtgtgtgtgcgctcgctactgtgtggttatggaggcgggggcagctgagttagagtcccaactcttgtactccatttgctattctcttctttctcccccacacctatctggtggtggtagtgggcgtttatatttggcgtccttttcattcatttcctaaatctcttaaaaaattttgggttgggggtattggggaaggcaggaaagggaaaaggagagtagtagctgaagagcaagaggaggacatggagatgaagaagaagattaacctggagttaaggaacagatccccggaggaggtgacagagttagtccttgataattgcctgtgtgtcaatggggaaattgaaggcctggatggtactttcaaagaactagaatttctgggtatggctaatgtgggactagggttcgctggccccgcta

SEQ ID NO: 13792 - DNA, 491 bp, Homo sapiens
  misc_feature 51: n = A,T,C or G
gccgtctcggatcagatcggtatagcagcgaggggatggtgcgcagttccngccgcccgggcaggtacgctgggggctctcggtgtcagagcgcatgctttccggctccaccacgaacatgtagtagaggttccacattttcatcgacagcagtcgcagaaacgtcaggccgtagccgaagcctcggaaggagcggcccacggcaaagagacatggtctggctatgtgccgtctgggctcaaacttctggccttgggtgattctctcacctcagactcctgagtagctgggattacagatgcgggccaccacacctggctaccagtgtgcttttcttggagaaagaagaaaagaagaaagaaggaagaagaagaagaaagaaaggaggaagaaggaagaagaagagccagtgtgataatacattgagtgattttttaaaaagtgcatatatgagcaaaaggttatttttcccttttctgaagtatggcagc

SEQ ID NO: 13793 - DNA, 492 bp, Homo sapiens
ggggtggggcgttagcactcctatagggcatttggagctaaaccccggtggcggccgcccgggcatttacgcgggaatgttttgaaagtctttattttaatgaaatttacttcataagcattcaataaatatttgctattattactgatggttaatattgtcaacttgattggattgaaggatacaaagtattgatactaggtgtgtctgtgaggatgttgctaagggaattaacatttgagtcagtgagctgggaaaggcagacccacccttaatctggtgggcataatctaatcaactgccaacgtggctacaatataagcaggcagaagaatgtgaaaagagagactagcctagcttcccagccgacatctttctcctgtgctggatgcttcctgccctggaacatcagactccaagttcttcaattttggaactcagactggctctccttgctcctcagcctgcagacggcctattgtgggaccttgt

SEQ ID NO: 13794 - DNA, 497 bp, Homo sapiens
tgagtggtcgccgtcacgattcggtatagcgcgaattggagtaccaccgaggtggcggccgcccgggcaggtacgctgtggagtctcctccttatcgcagctgaaggatctgttgagcgcttcaggaaaggcggacaggcgacactaacaggtgaagatctcgggagaccatgactaagaaaagaattgctgtgattgggggaggagtgagcgggctctcttccattcagtgctgcgtagaagaaggcttggaacctgtctgctttgaaaggactgatgacatcggagggctctggaggttccaggaaaatcctgaagaaggaagggccagtatttacaaatcagtgatcatcaatacttctaaagagatgatgtgcttcagtgactatccaatcccagatcattatcccaacttcatgcataatgcccaggtcctggagtatttcaggatgtatgccaaagaatttgaccttctaaagtatattcgatttaagacc

SEQ ID NO: 13795 - DNA, 423 bp, Homo sapiens
aggtacatggtttactagaaatgtttattgattatatttccagctttaattttcttgagtaatttaactgaatttacacagtttgcttcattgtattttcaaacatatagaaaataaacttattaggaagcattttcttaaagtgtttttgctgtcttatctatttgctctaatggtttgggacctttcattgagttttcattgcttttgatgtcagggcttatttaatctctagtgcatgaaagtctcatatgtaaaaaatgattattctgaatttaatctgtcattggtcatacttctaagtgttcaaccttataaaaaataaatgactatcaaaaaagaaaaaccttacattatgttctagtagtaaagttttccaaggacagtgttcacttactctaccattaaccctagaagagtttt

SEQ ID NO: 13796 - DNA, 552 bp, Homo sapiens
  misc_feature 35: n = A,T,C or G
gggatagtccctcgcatttcactatagcgcctttngagtacatcgcggtggcggccgcccgggcatgtactttttttttctgttgaccgaaacactactggataattattatttttaatgtccagaatgtgtaatacaagggccagagcttcctcctggactcaattttataaattctcaattggttggtgaggccaatagggatactttttcttgtctaaattgggtatcctgggaaaagcttaattcaaggtcctcaagggtcattctgaatcaaaatggaaattaagtatctttcatcctttctccatactctttcctcaatattcctacaattcctgtgccttttgaggaagagacaacctcactcagcaacaaggatttccacatctttctttttttctctcggcattccaaccttggggcaggtataatttaatcccttcttggcaccgtggaaccctttaagccgccatttaaaacatttcttttttcaaaagtacattccaaccaaagaccaatccctttggcccacaatttggccccttgtag

SEQ ID NO: 13797 - DNA, 420 bp, Homo sapiens
ccgggcaggtactttttttttttttttttttttttttttggagtagagtttaatttaaagcttattgatcatttgagcaaatctctggagggcagaacaagaaggagcaggcttcagttaacagaagcagccttgagttgccaggatagtggatggaattcctaaaaaaggatttcacaccagggaggaagcaatgccttcttcctggagtctcccaaggggcagctttagaataagggaagaggatttgctggtcaccgtttgctgacatgggtctatatggtgagttcaggcctgaggacagggttgtttgcaaaaccacatggcccttgagaaatgtccttgcagattgggcttaaaactggtgggagcaccaagaaagggacttcctggaattcagggatagataaaggagaatgg

SEQ ID NO: 13798 - DNA, 422 bp, Homo sapiens
ccgggcaggtacgacctggacggaaatggctatatcagcaaggcagagatgctagagatcgtgcaggcaatctataagatggtttcctctgtaatgaaaatgcctgaagatgagtcaaccccagagaaaagaacagaaaagatctttcgccagatggacacccattgagacggataactcttcctggaagagttcatccgaggagccaaaagcgacccgttcattgtgcgcctcctgcagtgcgacccgagcagtgccggccagttctgagccctgcgcccaccaatcgaattgtagagctgcttgtgttcccttttgattcttctttttaacaattttttttttttttttgccaaacaatatcaaatggtgatgccgacccctgtgcggtctgatgcgccttcctccggggcgcctttagc

SEQ ID NO: 13799 - DNA, 420 bp, Homo sapiens
aggtactgtaaatgtgttttctcttccttatgattttcttgatacatgttcttttctctagtttactttattgttaagaatatactatataatacacatacaaaatatgtgttattgcctgtttatgttgtgggtagggcttctggtcaacagtgggctacattatcgaacggtcaactgtatccttaactttttttcctcaaatacaactttcaacaattctggctttagctaaaaaactttagctaaactaaagaacttcagccattactctttcagctcctttatgttcacagaccaagaggtagacctcaaaagtatatttagtgttccttctaatattccttccagcccccttttctacagctttgcctatttcaaacccctatcactcaataactcttctggtatacacttttt

SEQ ID NO: 13800 - DNA, 439 bp, Homo sapiens
  misc_feature 439: n = A,T,C or G
aggtacgcggggctttcctttcagcggagcgcggcggcaagatggcagtgcaaatatccaagaagaggaagtttgtcgctgatggcatcttcaaagctgaactgaatgagtttcttactcgggagctggctgaagatggctactctggagttgaggtgcgagttacaccacaccgggacagaaatcatttttttttacccccccaacacacaaatgtgttttggtaaaaagggccgcgccggtttcggaaccaactcttttgaattaacaaaaagaggttgggcttttttcaagagcggccggagtaacctctttttcctcaaaaaaaggggcgcctcaagggagtggtgtggccctttgcccccaccacagatgttttttgttacacacatctttttaaggggttttttttcccccaagggccccctttttggggacn

SEQ ID NO: 13801 - DNA, 410 bp, Homo sapiens
aggtacttttttttttttttttttttttttggagggaaaacatcttttttattattattatttttatttatttatttagagacaggttcttgttctgttgcctgggctagagtgcagtggtgcaatcctaattcactgtggcctaaattcctgggctcaagtgatcctcctgccccacccttgagtagataggactacaggcacacaccaccatacctggataatttttttatttttatttcgtagaaacggaggtccagccaagttccccaggctggtctcgaactcttggcctcaagtgatcctccatgcctgggctggaaaacataaccttatgggaaagttcctaaaaatggttgaagaacaagactgaaggctagaatatgaaagcttaaattctgattctgccc

SEQ ID NO: 13802 - DNA, 417 bp, Homo sapiens
tctccaccagaaaaccatcgccaactcctgcgatcagcttgtggcttacaaaccttgtttaaaagctgcttacatggacttctgtcctttaaaagcttccccttggctgtggccctctgtgtatgcctgggatccttccaagcactcatagcccagataggaatcctctgctcctcccaaataaattcatctgttctggagagcctatctttctgaggttgacacttatcttgcagaatggggttcccacccatctttgatcatgaaggaaatctcagatttagaactatgttgcccaggctgctcttgaactcctggggtcaagcagtctacctcggcctcccagaatgctgggattacaggcgtgagccaccattcccagcccacatttcttaaaaatggtatttcagtccaaac

SEQ ID NO: 13803 - DNA, 420 bp, Homo sapiens
aggtacgcgggcatgcaatcagttgagagttcaaatggaacaaaaagccaaaggaagggcaaattatctctctcttcttgagttgtcacatccatctttttctgcccttggacatcggagcagggcccagtgcaccaggttttctagctctcaaacttgtgaatggtatctcatgggacttctcagcctccataatcatgtgagccagttctcgtaacaagttccctcttacgtctatatacataaaatctatctatatcctctctttatgtctctcaggagaactctaataatgcattaatcaaatattacaaaaatcttacgatgaaaagcaacagtatccctctactttgttctctaactcacatctattcccccaaacaacctcttaaccattctgttttaataactctgaataat

SEQ ID NO: 13804 - DNA, 486 bp, Homo sapiens
  misc_feature 10: n = A,T,C or G
aggtactttntttttttttttttttttttttggatttttagtagagacagggtttcaccgtgttagccaggatggtctcgatctcctgaccttttgatccgcccacctcggcctcccaaagtgctgggattacaggcgtgagccacccatccggcctaacgagacttatttttactcaactaggagggcgttcattaatttgcttactcaaccctgtcaggaattaagttggggcccttggaaattccaaaacccaaccagaacctttctttggccatcaagggaaactcaccagccctatttttgaggagaattaacaaaattggaacaatgaaaaatttttaattttcaagtaaacaaaagaaaatggagtggtttattgaacaggaaggggaattgttgttaaaggaacctttgggcagggggtatttccacagccagggttttttcccctaaaccttaaaacccccccacttggggggaaag

SEQ ID NO: 13805 - DNA, 427 bp, Homo sapiens
ccgggctggtacaaaccctactttttctagggctgttcataacaaaattaccatgaatgaggagacttaaaactacagaaatttattatctcacatttctagaggctaaaagactgaaattcaggcattagaaaggccacactttctctcaagtttcaaaaggagaattttttcctgggctgttccagcttttggtggctcctgcatgttttggttttagtggcacatctccaatgtctgctgccattttcatatgaccttctgcttgtgcgtcttcccttgcccttcctcttgaggacaccagtcatggatttgggacccaccctcatccagtatgacctcattttaagtaattacttatttccaaataagattacattctgaggttccaggtgaatgtgaatttggggtaaacatggatctacca

SEQ ID NO: 13806 - DNA, 448 bp, Homo sapiens
aggtacagacttatgcttatagggaggcctcaggaaacttacaatcatggcagaaggtgaaaaggaggcaagcacacattcacatggctgaaaagagtcaggggaggtgctacacactttttaaacaagcagatctcaggagaactttatcatcagacagcacgaggtgggattgagctaaaccattagaaaccacctctatgatccagtcaccttccagcaagcccctcctccaacactgacaattacaattccatatgagattgggggtggggggggcacaaatccaaaccatgtcaagaaggcattttaaaaattgaggggaagttctaatcagaatagcaaattcagggacagggccatttttattaaccattaaccacttctttttaataccatgcccaaaaatggggaaaaaaggaaaaaatttgcaagggaccaaaaatgg

SEQ ID NO: 13807 - DNA, 519 bp, Homo sapiens
  misc_feature 519: n = A,T,C or G
ccgggcaggtactctttccctttatttctcagactggccgacacttagggaaaatagaaagaacctatgttgaaatattgggggcgggttcccccgatacttttggacatatatccagtagtgggactgctggatcatatagaagttctatttttagttttctcaccaacccttcttactgtttttcaatatggcttaacttatttttcattccttaaccaccggtttatttttaggtcccctttcttttgggtcttttggccggcttttggtaattttattgggcctttttggaaaaattgccccagccttaacttgaaagtggtcattgggaaaaaaccttccaaccttgggggcccccaaaaaaattttttggcaacccggggaaaaaaatttcccaaagggcttttatttttatttgccccagggcttgggaatggggaattttttgggcccgttcccatggaaaaccctttttttgccccgggtttaagccttgggccccacccaatatttaan

SEQ ID NO: 13808 - DNA, 412 bp, Homo sapiens
ccgggcaggtactttttttttttttttttttttttgggatggagtctcgctctgttgcccaggctggagtgcagtggtgtgatctcagctcactgcaagctccacctcctgggttcacgccattctcccgcctcagcttcccaagtagctgggactacaggcacctgccgccacacccggctaattttggttttgtatttttagtagagacagggtttcactgtgttagccaggatggtctcgatctcccgacctcgtgatccgcccgcctcagcctcccaaagtgctgggattacaagtatgagccactgagcccggcctctctgtagcttttaagatgttcttaggtgacttatgagaatgaaaaaatggagaattttccgtcttcctgccatgaaatcaattaatggca

SEQ ID NO: 13809 - DNA, 781 bp, Homo sapiens
  misc_feature 491: n = A,T,C or G
aggtaccataattagtttagaattcagtcttttaaattatttgcaccttgagactctgtgaaatgaaaacatttaacagtaaactcttgtcccaagggagcaaagtgagagtaaatgctggtccataggatggggaaaaaggactgtgttcaccatgagtttttcaggatgcagcataaagcttatctaaatactacacagatcattatcttttaacccaaccaatcatatattcaaactaagggaaaaatatgtaagcttttcctttggaacctgagacaccaggagccttaaaccacaaataatctactgtagctatggacagggtagtcaaatttatttcaaaacaaaagctttgttgggctgcatcaaatgcaggagaaaaggaatacttaggggcatggttaaattaccagtgtgcgtaacagtgaagtatgcctcaaataagcctttaaaactttataaactgaactaggacatacccatgcagntatattttttcaatgctactaaatgaaaaaaaaaaataaagcctgcacttgaaatttacaatatggccaaaattgttacttttaccctttgacccttatgtaactggccgggccggcggtcttgaactaggggattcccccggctggaagaattcgatattaaacctaatgattccgtcgaccttgaggggggggccggtccccaacttttgttcctttaatgagggtaattgccccctggcgaatcatggcatagctggttcctggtgaaatggtatccgtacaaatcc

SEQ ID NO: 13810 - DNA, 629 bp, Homo sapiens
  misc_feature 58, 59: n = A,T,C or G
atgcgaatgcatattcgggcgaattggagtgccaccgcggtcgcggccgaggtacttnnttttttttcttttttttttaaggcttcttcaaatatggataaaggaaggagataaagggccaagaacctccagatggagaccggagctgtttgagtttttaccttgaaggcgccaccacccatgtgcctctggtattcacagcagcacttgctatctctcactatggtggattctgacctttaggcagctcagggtttcattgccctagcgggaaacagattgagagctttctagcctgggatatgttgcacaccttatacattaatgactttaggtaggtgcttttttcacagccagtgctgtctgtgaaagttataacctttctgacatttctgacacacgttgcagctggatactcaaagttgtctctgttccttttcaaagaggctcatcttggcttgttaagtttccatgtggactattgagatttgtgcaaaattggcatattaaacccttagtgtggactcaagctttaccttcccctggatttcaaacacctgcaccctttggcctacaggaaccagcaaactttgaatcgcaagctggtctggttttcgggtacctgcccg

SEQ ID NO: 13811 - DNA, 490 bp, Homo sapiens
  misc_feature 372: n = A,T,C or G
ccgggcaggtactctgggaggctgaggcaggtggatcaccttaggtcaggcattcaagactaacctggccaacatggtgaaaccctgtctctactaaaaaatacaaaaattagctgggcagggtggtgcatgcttgtacagcatcgtagggttcccctaaacctggccctggttttggggtttttagattggtaatcccctttactgagccggcctctactaggtgagctgctgattaagatgtcccaagcaagtgatatgggacaggggatatggattgagcactcttggagatcatttgtaaaccaaattcctggccatgaccttgtatagggtgcagatgtgggaagccaaaaccttagatagagggancttgtttaggggggcattcaaggggaagcaaaaaatcttcctttttaacaaaccaaaagcaagtttcctccatttcaacattcaaaccagaatccgaggggctggtgataaaacttta

SEQ ID NO: 13812 - DNA, 459 bp, Homo sapiens
  misc_feature 151: n = A,T,C or G
aggtaccaaatacaatctgtaaataatggccatttcttcccaagcccacagccaagatgagtgttaggctaaattcagagccctggctcttcctcagatgagtggaaaacctgcgcatgacagggccggctcccccttctcaaagggcttnctcccactcatcccattccttaccagaatcggccgaggtgttcacggggccagagaaagcacaaacatggattcagaagtccaaagaaatgcagttcgttgcgcccaatcagagatagatgatttcattcaacaaggcttggaagccccagttgggaaagtcgataaaaaatctttgctaaacttttttaaaattggctttttacctttttttaagtccactggaaaacaaggggaaagggccacatttgcccatttaaaaaatcaaacaccttgtttttccaagaggacttgggtggttcccaaaac

SEQ ID NO: 13813 - DNA, 466 bp, Homo sapiens
  misc_feature 426: n = A,T,C or G
aggtacactggaggctggagcctgcagatggcatggctctgcggctcaccttgctgcagttggtggtggtgacagagactgcagcttgactgtagtggtggttaccaggagctctgccactgcatgtccactagtgacgggttcgctccaccaccccagctgggtagccgctgctctcacataaggggtccaattaaaattgccaggaataaattcccccggactttgacttctcaagagctaagaaggtttgctgagtattctggcatgatgtttggtgatcaaacaactgctggccaaaaatgatgagtatttccccctcttgctgaagatgtgctccatacaatagtccatcacattcatcattcatcagtctggaagtgtgcagccaatcatattatctatcacatgttgctcttgcatttntttttccaatgtccaacctaaactataaagtacctgcccg

SEQ ID NO: 13814 - DNA, 505 bp, Homo sapiens
  misc_feature 288: n = A,T,C or G
aggtacgatcttggctcactgcaacctctccctcccgggttcaagtgattctcgtgcctcagcctcttgagtagctgggattacaggcgcgtgccactgcgtccggctaatttttgtatttttagtagagatggggtttcaccatgttggccaggctgatctcaaacttctgaacctcaatgtggtccacaccacctttggcctccccaaagtggctgggattacaaggcgttgaatgccaccgcgccttcagcctacaaatggcaatttttttaaaaacctggacancgctattacttgggataaaatttcttctgttttaaaaattccttattttacctattttttaaaagaataaagtaattaggtttttttttttttttaaaattacaaataaattttcttgttttatttggataaaaaaattttaaagggccatttttttcaatttggccttttttgccaagatttttaacttcaattaaacttaacccttaaacaaagg

SEQ ID NO: 13815 - DNA, 770 bp, Homo sapiens
  misc_feature 441, 445, 523: n = A,T,C or G
ccgggcaggtacgcgggaaagtgcttaattagtgtccatagctaaggaaagagagaagaagccagcaagtgcatgcagggaatgccaatctatggtccgtagctgaagcagctggacaacaggtgacaagaaatagtgagggaagccagatgaagtgactgagttgtttattaatgatctccatttgtcttttgggaagatacagggtcatatttcttatctactcaaataaaatgttatttaacaccagaagcaatagtatctgtggtgggcagaacaataccccactaaagatgtctacgtcctgggccaggcgcagtggctcacgcctgtaatcccagcactttgggaggccaaggtgggcagatcacgaggtcaggagttcgagaccagcctgatcaacatggtgaggccccgtctctactaaaaatacaaaaatanctangccttgtggcgtgcgttctgtaatccagctactcgggagctgaggcaggagaatcacctgaacccgggggcaaacgtngcaatgagccgaggatgtgcccatgacttcaagcctgggccaaggaaaaaaagaaaaaaggcttgagggggtaagaatcttcccatgagccttcagaaagaacaccactttggtgaattaaatttaatttaatcccaaagaaccaattcaaaatctgaccttcttaattttagaagagaaattctggtggttaaaccacctagttattggaattgggagagcctttttggaacttatacaagggttt

SEQ ID NO: 13816 - DNA, 256 bp, Homo sapiens
  misc_feature 59: n = A,T,C or G
ggcatttcttccagggatctctgagctttcttttgtgcttctctgtgtgtgtggatatntaaggggctgggaatgtgcaaaacatgtcactacttaaacattatattgtcatcttgctgttctagggaggtaaataatctcaatttcagcaaatgtgtgggcctcaaatggaaaagtcagcagcccttcttaatttctcaccttttgtatcatcagggtccttcccaccatgcagatctccctggtctccctcggc

SEQ ID NO: 13817 - DNA, 497 bp, Homo sapiens
cgccgcggcgcgcgggcgcccgggcaggtaccctcgaatctaaaataaaagcagaaattatatgaaaaaactggggtgggagttggaaggaactttatatatgtaataaaattgtgtgaaaactgttaatctctcatgctctcattaaaaaataattattctcaagaaaccccaaattcttccaccttaggaatgaaaagttgcatattgagattttcaagaatgggatagggcactgtagaacctctgcacgtttgtcttaatttgctggagtacaaaaattaattatttataaacacgcaagccattaggtttttgcttatacaaaaacccccttgtaaattaccgtttcatgaagcttctactatccttttttagaaactctttggaggacaatcctggaaaacaacgtccaaaaacctattggtaaaacacccacacattatttggttttgtatggggagaacaagggatacgcattcctttggtcattcttg

SEQ ID NO: 13818 - DNA, 448 bp, Homo sapiens
gttagggcggaattgcacctccagccgcggtgcgcggccgcccgggcaggtacaaagcataacaaaattttcaatcttcaccattttaaaatgcaattcagtaatgttcagtatattcacattcttgggaaagagatctgcagaactttttatcttacaaaactggaggtctatgcatattaaagaactctttttccctctccctgcatcctttggtaaccaccactctacttcctatttctgtgaatttgactactttagatactccatataagtggtatcatacagtatttgtctttttgtgactggcttaattaccttagcataatgttctcaagattgtagaatttaagggattttcttccttttcaagactgaataatatttccgtcatatttgtatatcacattttgcttatctgttcatgttgatgaacatttgggttacc

SEQ ID NO: 13819 - DNA, 411 bp, Homo sapiens
ccgggcaggtacttcagttcctattgccatgaaaattgtatccagcagctaaaaaaaaaaaaaaaaaaaaagactacagttagtcattatccaatttgatgatttatggtccaacactaatgctcatttttttgtttgttttacaaacatttggtggataccacaatgaaaactgcacttaaaaaacaaaaatgctgaaagaggaaggaaatatcaaaaaggtctgaatagacaacaggcaaatatgcttccacctaccgaaagagttttaggttggcagacagatgggtgccttattttctgtgaaactgaagttttaaacactggccagaaaatgtttgattgccatttcaacacatggaaaaagttacattgatgcctaaattaccattttctgcaaaaagctgggca

SEQ ID NO: 13820 - DNA, 506 bp, Homo sapiens
  misc_feature 449: n = A,T,C or G
aggtacccggggagagcacatccggtgtaagaacccctggtaggccttgaaaaggcggtttaggaaaagtgaaaactgttgcacggactctgaacccatgaacatatttgatcgaaagaatcaactttgatcccttttaaaaattttctaatataaaccccgtcaaacgcacaagcaccctgaaaaaggtctatgcaaaggtttgcccttttgtatggttgggggccggttgcaggggccttatgtcccataatggccacttcattttcatttcaaggctgggccctgcctgtcttgcccttggggcttcccttgattattgaatgattttggccttgattgggcaaccacccttataagctcattgaaaacttgaaacaagaaaaaagaactggggacctttccttgcctgggaattttgccatttccctttaacagggaagtttggngccttggggcccccttgcccctgggaagttttttgtaatttgcttgtcaaaaccccc

SEQ ID NO: 13821 - DNA, 394 bp, Homo sapiens
aggtacttcgaagtttatccagaagcaaatttaactgtgtcttaaacttgtttcccacgctgatgaagctaagttttcctgctttttgtttagtatctttgttgttatttgtggatgattcaaataattcccgtataaacccttatctctggattcacatattaagagattcaagagacatatgtaaagcatcattatttttctccacaaactgggtctgaaaaataaatcaaacaggaatgtttctgtccatcttgtgataacatcacttaacatggctctgtccaaaggaactttctgtgatgacagaaatgttctgtatctgcactgtccaacgcagtcaccactagtcagtgtggacactgggcacctgaagtccccgcgtacctgcccg

SEQ ID NO: 13822 - DNA, 550 bp, Homo sapiens
ccgggcaggtacaaaatggtcctctgagaatattgttcctctttgtcattgcaaagagatgcattctagctggatgttttcatttatactcccaaattctaagactcttgtttctcctccagagtttcacacagatggtttagttgaaaaaagacccttttttttccccccccgaacccaaataaaacttgatatttcttgtctgggtccttaattcggtttcatgcttaatcaaggttaacaaggggcaaaatttaatatttccttacatttgggggacctttgaaaggtaatgggatgttttttattaaatttcaacttgaagtggatttttaccaggaaatggccccccacgaacctttttattgttaaaaattaatttttttggtgtttcttccaattaaccttcaatcttggagggttaaataaaaattattttaagatggttttcccccattttaccattaagaattggaggggaaaaatataggaaaggctttcaatgccaaaccaataaaaaaggtgaaatttaccataaagccttgggtat

SEQ ID NO: 13823 - DNA, 412 bp, Homo sapiens
aggtacacaccgacctggagcttacttaggattttctagtgcagtagttctaaaatatggtccctggatcagtagtgttagcatcccctgggattttgtgttttaacaagttctctatatgattctgatgcacactaaagcttcagaatcactgctgtagtataaactgtgatggttctcagccttccccactgctggcttaggtgtttgctttcttgggtctactaagtcagttagttctttatctgtttcctttccagtttccaaaatttttgttgctatactttccctctccagttttccttatatgtgtgaatttataatctttttttaaaaaaatccttttattggattaagaggcctggtttggtgggctcacgcctgtatatcccaggacctttgggaggcccag

SEQ ID NO: 13824 - DNA, 478 bp, Homo sapiens
aggtacttttctttttttctttctttcttcttttttttttttagacggagttttcttcttgttgcccaggctacagtgcagtggcatgatctcagctcactgcaactgattcaagcgattctcctgtctcagcctcctgagtggctgggattacaggcaccccgccaccatgcccagctaattttttgtatttttagtgaaaacgggagtttcaccatgtatggtcagatctgagcttcaaactctcggtaacctcggggtgattccaaccccatctcaagccttcccaaaagatgcttggagatataaccagatgttgagccccaaccgaacccttggtcccaataacattctttagtaaagtagaaaattttcatgggttttgaaaagaagatttttttaggaattttttccctacaagatttattggggaaagaagttatataattgggggtcaccttattaaaagaattgtttt

SEQ ID NO: 13825 - DNA, 471 bp, Homo sapiens
ggcagtcgacgccatctgattcggcgaatgttctggccacgtgcggcggccgaggtactgatgcttattttttttgttttatgacacagggacttccttactcacccaggccagagtgcaggggcgtgatcgtggctcactgcagcctcagcatcccaggttcaactgatccctctggcctcagcctcctaagcagctgggactagaggtgtgtgccaccatgcccagctaatttttatattatttatagtggcggggttttgccatgttgcccaggctggtctcgaactcctgaactcaagcaatccacccgctgcctcagcctcccaaagtgccaggattacaggtgtgagccactgtgcccagcccctgatgctaatttttaaatggacatttgaattctcaaagaaatttgtgttgcctcttgtcaaaccaggtcactgaaatgataacccacacaataagccaatg

SEQ ID NO: 13826 - DNA, 516 bp, Homo sapiens
aggtacattttcttttttctttttctttttttttttttgtttgagatggggccttgccctatcacccaggctggagtgcagtggcacagtcaccactcactgcagcctcagcctcctgggctcgatcgatcctcccacttcagcctctctagtggctgggacttccatgctcaatgctacatacgccccaggttaattttttgaatttttttggtaatagatgggggttttcaccatagtttgcccaggtcttggttctctgaactttcttgggcttcaggtccattccttcctgcccttaccctttccccaaaagtgcttgtggacctgtcagtgcattgtagtccacttgtcacacttagccctttggaaacccccattttttttttttcccttgtttattcattgcttgccctttcattgggcacttttttttctttctcacaacctctaatcttaaattttcagtttttatgttagaagaaaattttccaatttcacttgagtattccaggg

SEQ ID NO: 13827 - DNA, 509 bp, Homo sapiens
ccgggcaggaactatagcctttatccgtaacattacgtgttttagacattcctagaatctgaaattgattccccttccacagaacaggcccgggacttaccaacaccctgctaaggaagttctgtgtccaaggcccacccaggctgggttgtccccacctacatccagcccacacaagcccaggcagcaatccgggccaagggcccctgcaatggacagagggaactatagaagggaaaaagatgtggtcccccaaggaggcaactttcccaaacccgaaatcagagggggaggtaccaagaaaaactgaagtggatatctgaggggaccaaggaaagtacccctcctggttggtaattacaggagggtgctaacactggggtgggcctaaaaggggggtacctcctgaggaaaaagtcttggaaatattcaaattctcctgggaaaaggggcagggcccccccaataccccaccttaagtggtgggaatacaatgggggggaaccacg

SEQ ID NO: 13828 - DNA, 471 bp, Homo sapiens
  misc_feature 22, 32, 33, 91, 92, 112: n = A,T,C or G
ggggtgtcgagctattctgtantctggcgaanngatgcttgctacgtctgcggccgcccgggcaggactaagggtgacgaataggcgaaanngtttataaccttagcctggngacatgaatgagctgattgtggaactctcagcagcattttacgtattgttaacatgtatggcatttattagcatattgtatattatataagattgagggatgtcatattttcagctttcttttaaataaaaattgagtatattttcctattttatatcaggtaactaaattatgctagttatgtggaaaaaattgcaaagatgctttgacagatataatccctttggtgctccatctgatcaaagttgaaaagttgatgttttttaagagacaagctttatcattgtctctgatttcagtagaataatggtttattgttagacaatgatgtttctgcttggataaatcaaagataaatt

SEQ ID NO: 13829 - DNA, 423 bp, Homo sapiens
aggtacttaacaagcagaccatgtgtagaccacccatcctgaaccaagattcctgggcaaggctcttaattcatatgttactgaacaaaagcaaaactgctccacacatgggccacataatatagccacttgtttatttaaatttttgacctatgtgataaatcctgatgctcagttgtctaaaaatgtctttgtaagcatctgaatatacctaatactgaaataagagtttaaaaagctgacaacacaatccaagttttacatttatttactcataattaactcaataaacatactagattttacatttaatatatgttaaaatggctgaacaaaaatatttagcgtaattttcttttttttttggaggtggagttttacttttggtgcccatggtggaagtacctgcccaggcggccgagg

SEQ ID NO: 13830 - DNA, 438 bp, Homo sapiens
ccgggcaggtacgatcttggctcactgcaacctctccctcccgggttcaagtgattctcgtgcctcagcctcttgagtagctgggattacaggcgcgtgccactgcgtccggctaatttttgtatttttagtagagatggggtttcaccatgttggccaggctgatctcaaactcctgacctcatgtggtccacccaccttggcctcccaaagtgctgggattacaggcgtgagccaccgcgctcagcctacaagcaattttttaaaaactgacacctattactgataaaattctctgtttaaaaattcctatttactttttttaaaaaaaagtattaatttttttttaaatacaatatttctggtttggataaaatttaaggcatttttcatttgccttttggcgaatttactcataacttccctaacaaggaaaga

SEQ ID NO: 13831 - DNA, 432 bp, Homo sapiens
aggtacgcggggggacctaaggagtcgcagttgtgaacaggttagagttacttgttattggtaaatagccactatggagactaaggaccagaagaaacacagaaagaaaaacggtggacccaaagctgcaaagaaaaagaagtggcatctgcaggatctccagctaggagactaagaaaatgcccagaagagaaatgccaatgcttttgcagttcagtctgctgtgtggatgtctcgatcctttcacaggactctggatttgaagacacaaaagcatcatattccagtggttgatggaactccactagagccgccaccaataccggtagtggtgacggggccttcaaagttggaaagagcactttgatataatgccttattcggaacttcacctggcaaaagttcaccgagatcagaggccctgtgacgatc

SEQ ID NO: 13832 - DNA, 430 bp, Homo sapiens
ccgggcaggtacgcggggacattggagtggggtgggaagcctgagtcctgtattcacatgaacgaattcaggacacccaccatacactcagctcctttctgaaagtgtcctcccttaggcctctagaaacgccatggactttaggaagggccaagtgacaccttccatgatgtttggttctggtccagatggatctggaagacaaagatttggggagagtgaccacatggctggtagcaataacaaggcctctggctctgaattgcttcctatggtcccggtagaaactgcatagttcagagccaaggggagatgagaagccttaacgtggaagagggacaagagagatgaattggtccctctgcaacccaactcttcaaagtaagaatggttgagagcaatagtcaccaatttcccaggccagaacctg

SEQ ID NO: 13833 - DNA, 471 bp, Homo sapiens
aggtacagtggtgtgatctcagctcactgcaagctccgcctcctgggttcacgccattctcctgcctcagcctcccgagtagctgggactacaggcatctgccaccacgcctggccaattttttttgtatttttagtagagacgggatttcactgtattagccaggatggtctcaatctcctgacctcatgatccaacctgccttggccttccaaagtgctgggattacaggcatgagccactgcgcccagtcgagttcattttttaattactacttgcatgtgagtttaaccacaattcattcccaaaattggaaatttttatatgggctccttaaaaatttttttagggatatgggtttttccctacagggtttattattgaaagttttgggggtatacttcctattaactcctctatttaattttggctttaaaggaagaaaggggagagggcctataaacaaaattt

SEQ ID NO: 13834 - DNA, 427 bp, Homo sapiens
ccgggcaggtactttttttttttttttttttttacactttaaatattcaagtttattgtatgtcaattatacttcaataaagctttttttttttttaaaccctcacaatttagttctgggctctgtgcttgggctcttgaaattcggtggcagtggcctgaatccccatgcccactgtgacagagcaggagcaccatcctctcggacaaacaccgccactttaagtgccagctccctttccagcctcatgcatttcaaaaaaatcacttctcttttaacaccaagcagacagaaagagcagacagtaaaacattgatgagacagctcaggcacaaagggaggtggggggaaagttttttgggtaattgccaaacttaacccttttacattgggccccagtattaacggtgggccttaataagcacat

SEQ ID NO: 13835 - DNA, 431 bp, Homo sapiens
ccgggcaggtacatcccagctgattcagtatctccttctctttgaaaactctcacagaaactgccctataacttctactgacatctcatctcaatggctagatcagtgctatataacaaaactttctgcagtgatagaaatgtactatatctgaactatccaagatgttagctactagccacttatgactgtttagcatttaaaatgtcacttgtggaactgacaaaatcaacttttaattttacttgattttaataaatttaaatttaaatagatacatgtgtctagtggctaccacaataaataagtgcagggctagaccttaatcacatcactaccccatttgcaagaaagctggaaaatgaaggtttggaactaaacaccttggttcccttcaaaaaaatatggttttcttaataaggaaaaaccaa

SEQ ID NO: 13836 - DNA, 451 bp, Homo sapiens
ccgggcaggtaccgtcactgctgctccgctaggcttggtggtgtgaggattttcttctgttcctatcgtggactctctctcccctttctctctttttttttattattttctccattttactctgacattattgagtgtctccctctagttctcatctttctctgccttcactgtgggcaatgactcttttccctcctacttgttgactttttcatctccagcttttctgccttcctgcctgagttcactttatttttaatagagtttctcccctggttctcttttttctcctcctactctccatgttcttccacaatcccccagctattaattacccaaagcatcccaccctttggctctcatggggaaaatgaataattaaatcttccaaaggaagaccccctggatttaaatcaaggcccttaatttctttcaaaaccccgaagggctg

SEQ ID NO: 13837 - DNA, 435 bp, Homo sapiens
aggtacctgctgtcccctctctgactagaaaacagtttccctagatacctgcatagttagccccctgaacttatttcaattctctgctcaaatgtcatgtaaatggtgacatcttccctgaccatcttatataaaataatacttccctttcccctgatattctctatccaccttatcctgtttgatttttctgcactgccccatcaaccattgacatataacatgtctacttgtttatatatgtattgtgtttcaccagcattgaaatgtgactttcacgagggtagggatttttgtctgttttatttaatactgtatccccaagaatgccttgcataaattgggactaacaaatatttattgaattgaataaatgaatacatttgggaaggcgccaaggaatccttgcccctgaaattcatttcttcagtcagc

SEQ ID NO: 13838 - DNA, 438 bp, Homo sapiens
ccgggcaggtaccttttagctctgcctggtttatcgccttgtccccgcagcccctggcagcctctcatctaccctctgcttctgtgggtttgccgattccgggcattttatgtaaatggaatcgtatgatatgtggtcttttgtgatcgtccttttacacttagcatgatgtttttcatgtatattacggtcgggtgtggtggctcacacctgtaatcccagcgctttgggaggctgatgtgggcaaattacttgagctcaggagttcgagaacagcctgggcaacgtgggaagaccctgtctcaattttttttaattgtaaaaaaaaataaaattaataaaatttcatcctttattgaattatttggcaatacttaatttcttttttatttgccaaacacacctacttactggagcccttaatacatctcttaaaaa

SEQ ID NO: 13839 - DNA, 388 bp, Homo sapiens
aggtaccatgagaaattgtagactttactcctatattctctttccaagccctaggattagccatttttccaagaaatgttgcataccattctgctatgaaaggaaccaaaactcaaatcttgattctgggtgtattttttgttaatttgctgtcttttcttgtagaacctctcaggtaatgactctaggaggtatgtgttgtgtattaacccatatatacacacacatataaactttttatttaatttttatacctatattatgctaaacttggaaatatattgacacatctgccctaagttaataccacatgaatgtttattacctaccttctattcctgtccctaaccccgcactccaaccgtgaggaaccccctcctgccacacc

SEQ ID NO: 13840 - DNA, 402 bp, Homo sapiens
aggtactaaggaaggcttttaactatttaagataaaccaacctaattttgattttttacttgcttcaacgtgtttcagttcattaatgtttcaataataaggaatgaattctcttgtcttgacaaaccaagcatggaaatttccccctaagagaaaagaagaaatttaaatgatttccatattcaagtcacagcaccgctgaaaagagaactttgagttcttaggaaaggcatctgttaccttccaaaggaggggccaactcattacagtttttgtgtaataattaccagtaagtgttctggccacagaaaggaatttcaagggaaaatttgggaattgaccaaccactgtggattcccccggccacttctctttaggcacaggttttcccttcccttaatg

SEQ ID NO: 13841 - DNA, 372 bp, Homo sapiens
ccgggcaggtactttttttttttttttttttttttttagtagagatggggtttcactgtgttagccaggatggtctcgatctcctgacctcgtgatccgccctcctcggcctcccaaagtgctgggattacaggtgtgagccaccgcgcctggccaaccctgctcttgaaatgtctaaatcttttcctcactagcatatacaattcaaatgcacaggcctccatgacttctttggaatttaaaagaagccttcatttcaaggatagaaatatgtaaaaatttaccaaccatggctaagtttgttatgggagtagtggaagggacatggaaaaaaaaaaagggttttccatgatacccgcgtaccttggccgg

SEQ ID NO: 13842 - DNA, 374 bp, Homo sapiens
aggtacgatcttggttcactgcaacctctccctcccgggttcaagtgattctcgtgcctcagcctcttgagtagctgggattacaggcgcgtgccactgcgtccggctaatttttgtatttttagtagagatgggtttcaccatgttggccaggctgatctcaaactcctgacctcatgtggtccacccaccttggcctcccaaagtgctgggattacaggcgtgagccaccgcgctcagcctacaagcaattttttaaaaactgacacctattactgataaaattctctgtttaaaatcctatttactattttaaagataagtattagtttttttttaaatacaataattctgttattgataaaatttaagga

SEQ ID NO: 13843 - DNA, 373 bp, Homo sapiens
ccgggcaggtacttttcttcagatgccttgttctgtttagaacaaaaatgcactatagtttttaaagaatcatgcatctttgggttggcccaggatcaaatttgatattgaataatttattccagggcagctttcataaacatacttcatagatgttgttttgaaatgtttctaaatatctaaaatcatttcaacagcagaaatgatttttattttaacaaaagattatgatagcccttgtagtgtttaaaagtggtcatatttattactgactttgagtcaggtgttaaaatagcagtgccacagctcgtctcttgccttagtgtgctgctgtgagagtcacagtggaaactgcagggaggaggtgtgttcc

SEQ ID NO: 13844 - DNA, 380 bp, Homo sapiens
aggtacatgttccgcatggataacgaccatgtgattgacgcgacgctcacaggagggcccgcaaggtatatcaaccattcgtgtgcacctaattgtgtggctgaagtggtgacttttgagagaggacacaaaattatcatcagctccagtcggagaatccagaaaggagaagagctctgctatgactataagtttgactttgaagatgaccagcacaagattccgtgtcactgtggagctgtgaactgccggaagtggatgaactgaaatgcattccttgctagctcagcgggcggcttgtccctaggaagaggcgattcaacacaccattggaattttgcagacagaaagagatttttgttttctgttttatgacttta

SEQ ID NO: 13845 - DNA, 378 bp, Homo sapiens
ccgggcaggtacttttttttttttttttttttttttttttttttttttttttccaattttgcagagatgggatcttaacattttgcccaagctggtcttgacctcctgggctcaagcaatcctcatacctcagcctcccaaagtgctgaaataacaggcgtgagccggcacacccagcccagactattcagacatgtaaatatttgacacttttgtggaataaaggctgaatatggtatttttctacactgattaaatctccaggaaactggttcctaaaaaaggtaactgcaatgttctcgactaatggagtttatgatgctgaaagttcaagacaaactcatttaagccataaaagcctatcaataacattttttg

SEQ ID NO: 13846 - DNA, 522 bp, Homo sapiens
gcccgtccctctctctccttcggcaattgttctccccgcggtggcggccgaggtacttttttttttttttttttttttttttgaggaaaacccggtaatgatgtcggggttgagggataggaggagaatgggggataggtgtatgaacatgagggtgttttctcgtgtgaatgagggttttatgttgttaatgtggtgggtgagcgacccccctttgtcttgcggtataatatcccaaaggtgagtatccgcgcctgtcacctagtatattttagtgcctgctttcggacccggaatgcctcccctctttgggccctatggaactccccgctttccctttacaaccacaatgagcttgctcgctctccttaggggatatacttttcttttcggtcggtactcggcaacaaggtttttctctctaaggcctttgcctttttgcaccttttattcctgtacttggcttcttttcccccccggtatttttgttagctcttcctcagattccccgtccacccggcg

SEQ ID NO: 13847 - DNA, 402 bp, Homo sapiens
aggtacaatagtcgtgaactgaataattaaaactttggcttctcttaggaaaagactacttcctagtcataggtgtcctatggggaaatttattttttttaatgtcctgatccttaatgctgcaaattatcagtattcataaagtaaactgattttgcaccacttttttgttactgtgaccacggtataacaatgtacttctagactatatctatgtaaagttattataatggtatctgtacattctagtgatatgaagatcacagactaacaagctgacaaatcataagtttgcctagttcaaaattcagcatggcctgctagctgtattatagaaaattggatatagagttaattctgtatgctaggccttctgcttagctaatgcgaattataatactg

SEQ ID NO: 13848 - DNA, 509 bp, Homo sapiens
aggtacgcggggggagctagcctggcacctggactctgcccatccacagctgacagattccaacagaagtgtatttaaattctccagtagacaatgctgggtaagggagggggtagggctgggttattaagattcaggctgctgtatttttaaatttggttttgtaggataggggaaccttggaataaaattttttctttttttttcctgttttttgtacacatcgaaaatcatatttactttctttgtttcacttaataaattggtattatttaattcctatttgtttctctcatattcatattttgttcccatgttttctacttttattatatttgtttctagtttgcatatcttctatacatttatattttaatcttcttgttgtggtttttgaaattaaattgttctttttattctaatattttattctttgactgttatcctaactttgcttcctctatatgctgtcctccttctactttttattttgctatctctttttttct

SEQ ID NO: 13849 - DNA, 411 bp, Homo sapiens
aggtacgcgggcagcatcttcaagagatggacagtggacaggagccaacagttggaagtcagattcagagagtagtgagcatggctgccttggccatggtgtgtgaggccatagaccaaacctgagctgcagctggactctttcatgcctggcccttggaaagcttcctttcctctcttcagctcaatcagacgctgcagaagccccacgcagaggagcagagcagttatgctcaccccttggagtgcagcagtgttttggaagaatcgtcatcttcccaaggatggggaaaaatagttgcacaatatattcatgatcaatgggtgtgcctctctttcctgttgaaaaaatatcacacccttataccaaccacagggagtgaaattctggaaccgtttctacctgccggtt

SEQ ID NO: 13850 - DNA, 463 bp, Homo sapiens
ccgggcaggtactttttttttttttttttttttttgcttccctgctgttcatgagctctagaaagctgtagaactattgcttacattttcaccaacatctaggtgttcttatttctttgggctctaaagctttttttttgtctgggggggggccattatttttgggggtttacccactaaatgtaggtgggaagattactggttcctccagaaagtgtcctcactgatgttcctcacccgtagaatctgtggaattagggatatctttacattggcaacaagggccccttacgtttgacgttgtggacacacctggttatttcccgagtcttagtccccatggatactttttcaatggcgtaaaatcgttttttccattgtggcagactattaacagagcctctttaccttactttaatgggctcaactttaggacgcgcactttttgcatagcttgtggaaa

SEQ ID NO: 13851 - DNA, 391 bp, Homo sapiens
agttacaagtgcttgtatagacaaatgtattaatttcacttgtataaatacctaagagtggaatggtggaatcagaaggtaggtatatgtttaatgtttttagaaactgccagctattttccaagttagttgtataatttttcattcctactaaccatgtatgaaagcacctgttgctccacctccttgtccacacttggtatgatcagtttttaattttagctattctaacagttgtgcagtggcatctcattgtggttttaacttatatttccctaatgactaatgatattgggcacctttttaatgtgcttattgtctacttctgagtaaatacaaagtgttttgctaaaactattgtgggggctgtattgggatgatctattcatgt

SEQ ID NO: 13852 - DNA, 392 bp, Homo sapiens
ccgggcaggtactttttttttttttttttttttcaaataggttagttaggaacaactttactcagaagacgtatttgagcaaagacatgaaagaggtgaataaagcatgtggatatctagagacagagcattccagacagaaggaacagcaactggaaaatagcaggggcagagtgtgcctgccactggtcagggcagagagtgtgaggaaacaaaggtaaagaagtaaaattttttccagctatcctgtttctaagttccaaaagctatttcttcttttgaatatttcattttataggacttattctcatcttttgatgaaataccttccctcatgtctcccagggactggtatctttttaagttttcttcagttccctgcactgtttctg

SEQ ID NO: 13853 - DNA, 357 bp, Homo sapiens
ccgggcaggtacttcaaaattcctcactttccagtggttcaaaagcaccacatcagatgactggctccccccaggattcaaagaaggctgcatcgatgctccttctactcttgccacacaggcgacccgatccaagaaagtcactgccacaaggacccgccacaaagaagcctttacaaaaggccttgatgtatcttttcacccacccttgtgactgtgccataccctttctcccgctcttcctcggtgagaaggggtaaagtggttattttgtgccctcgcccaatttggccaaaaccccgctgcgcagctcagcccgggggaaagtccccgcggcagaccccccccgcgtacctt

SEQ ID NO: 13854 - DNA, 392 bp, Homo sapiens
ccgggcaggtaccgtccatggcctgttaggctgcacaacaggtggtgagcagcgggccagcaggcattaccacctgaactccatccacctcctgtcagaccagcagtggcattagattctcatagagcacaaaccctattgtgaactgcgccatgcaagggatctaggttgtatgctgcttatgaaaatacaatgcctgattatctgaggtggaacagtttcatcccaaagccatcctccagcccccaccccagtccatgaaaacactgccttccacaaagctggtccctggtgccaaaaggttggggactactgtactctataaatctagtggaaacatttctgctcaaactagattctggacaccagtgtgcggaaatgcttctggtaca

SEQ ID NO: 13855 - DNA, 382 bp, Homo sapiens
ccgggcaggtacttttttttttttttttttttttttttttacggttcatgagatttaaggaaaaaaagcaatctccataacataaaagtgcaagaagcggcagcaaatgctgatggagaaactgcaacaagttgtccacaaggggtagcttaaaataattaagggtgactacaataaacaacagattttcaatacaggggaaacagccttctattggaagattccacctagggctttcatagttagacagaagttgatgcctggcttcaaagcttcaaaggacaatcttactctcttgttagaggctaatgcagcccgtagctttaagttaaggccaatgctcatttaccattccgaaaattctagggccccgtaggaatta

SEQ ID NO: 13856 - DNA, 152 bp, Homo sapiens
aggtacgcggggtttcagcgcctgcaggttccgggaggtcagctcccagccgaggacgtcggatgtcatcgtccttgctgctttgccaccccattcccgtcaataaagtggtttgaacccaaaaaaaaaaaaaaaaagtacctgcccgggcg

SEQ ID NO: 13857 - DNA, 657 bp, Homo sapiens
  misc_feature 116, 407, 408, 414, 415, 416, 417: n = A,T,C or G
ccgggcaggtcttgaactcctcacctcgggtgatccacccatctcggcctcccaaagtgctgagattacaggcgtgagccaccacgcccggccagagatccacatctatatttatncacatttatggatgaaaattaaacaggtgtccgggtgcggttactcatgcctgtaatccgagcacttgtggaggccgaggcaggcggattacttgaggtcaggacttcgaggccagcctggccaacatggtgaaatcccatctctgctagaaatacagaattggccgggtgtggtgtcaacgcacctgtagtcccagttacttgaacctgggaggcagaggttgcagtgagccgagattgcaacactgccactccagcctgggtgacagagcaagagaccctgtcccaaannaaaaannnnaaaaaaaaaagtacctcggccgcccgggcaggtacgcggggaattctgcggcaagcgctttgagaagccagacagtgttgcagcccaccgtagcaaaagtcacccagccctgcttctagcccctcaagagtcaacccagtggtcccctagagccctgtcccaacatctctgcccctgggcctctgggatccagcgaggggtccaggccctctggatctcttcaggcttcaaccctgtttc

SEQ ID NO: 13858 - DNA, 666 bp, Homo sapiens
  misc_feature 84: n = A,T,C or G
aggtactttttttttttttttttttgagacagtcttgctctgtcacccaggctgcagtgcagttgtgtgatcttggctcattgnaacctccacctccagggttcaagcgattctcccaccttagtctcctgactatctgggactacaggcacacatcaccacacccaacatggtgaaactccatctctacttaaaaaataaataaataaataaataaaccggcatagtggctcacgtctgtaatcccagctactggggaggctgaggtgggaaaatcacttgagcccaggaggcggaatctgcactgagccaagatcacgccattggccctccagcctgggggacaaagcgagactccattctaaaaaaaaaagaaaagttatagaaaaaaatatgatgatatgatttactgaaagcaagtctcaaatgcctaaaaaaggccaaactttccttgggtcttaggatatcattctggggggggggggggactacctgaggatcaaaaacggagatcagaaagaatattggagtacaaaggtatattggaagaatgaaactcaagggaacctctaagtgggaaaacacaaaaaaaggagctccccatggaaaaattctaagggacaaaagctaccgccaacctgggaaagtcaacaaatattgtcaaac

SEQ ID NO: 13859 - DNA, 574 bp, Homo sapiens
actccaccgaggcggcggccgcccgggcaggtaccaggacatgaaggaaagaactataacaaggatgtgaataacttctaaactggtcagccttggacaaaaggaaatctggaaatctcgacttggcctgagagaaacctatcctggcccttaaagtgccaattaaggctgagttgaaaaggagctgggcatcatcaaactgcaaacaaacttagcttaggcacccacagtgtgatgatgtgtttatttccatgaaggagcagtctatggagaagtgcaggaactttcaaagttgcatgggcagagctgcttcttatatgacagaattggcagctgcctgtcacttcacagtgggtcacatgaatatgaagcagagaactggctgtgtgcgtcagcaggggagcttaagactgcagattctggggaatcagcactcactgtgacacatgtgatcctctgtctcctcagacaactgaaggatgatgagaaggggatctctggagccttgaccttctgggccccgaatttctagctagaaaacctcttttcaagacaaaaacatgccaaagtacct

SEQ ID NO: 13860 - DNA, 644 bp, Homo sapiens
  misc_feature 58: n = A,T,C or G
ccgggcaggtacttttttttttttttttttttttttttttttttttttttttaggaantttttttttttttttttttttatttttttttttttttttttttttttattttttttagtttatttatgttttttagaaaaaaaatttggggttttttaaaaaaaaaaaaaaaatttttttttagggggaaaaaaaaaaattagaggtcaaaaaaaaatgggggggggtttttttaaaaatttttttttaaaaaccttaaaaaggaaaaagggcccccaaaaactttggaaaaaggggggaaaaaaaagggttttcttggggggggaaaaaaaacccaaaaccaaaaaacataaaaatatattgggggggaggggttcaaaaaaaaatcgtatttttttttccctgggagagagtgagaaaaaatttttgggggggatttttatataaagaatacacagggggaccaaaaaaaggggttaaatgggggggtttgtgaacaaaaagtggaaaaattttttttttgggggaaaaaaaaaatttttttttttgggggaattttaagaaaggggaatcttttttgggggtaaaaaataaaaaggaggataagtgtttaaaaaaaaaacttgaaaaaaggtataaaaaaggg

SEQ ID NO: 13861 - DNA, 664 bp, Homo sapiens
aggtactttttttttttttttttttttttttggagacaggtctttcaaccaggctgcagtgcagtggtggagtcagagctcactgcagccttgatctacagggctcaagcaatcctcccacctcaggctcttcagtagccagggctacaggcacccaccaccacacccagctaattttttaaaaatttttagtaaaaaggaggtcagactggtctagaattcctgagctcaagcgatcctcccgctttgggttcccaaagcgctgggattacaggcatgagccactgcacccagcccatacataggagttttataacaagcattttgacaaaatatgttgataaggtttggatgtcccctccaagtctcatgttgaaatgtgaactccagtgttagaggtgagcctggtgggaggtgtttggatcatgggggcagatccctcatggatggcttagcaccatccacttggggatgaatgagtttttgctgagttgacaagatccaattgttttaaaagtgtgtggcacccccagtctcttgcacctgctctaactatgtgacgggtctgcccccactttcgctttcaccgggagtaaagggttcctgaatccctcccaaaaaccaagccaaagccaacgccgtgcttgtcctgcccgggcggcct

SEQ ID NO: 13862 - DNA, 556 bp, Homo sapiens
  misc_feature 16: n = A,T,C or G
ccgggcaggtacctgngataaaaagtgcagttcttctgtttatatttgggtctggcatctgtgagagtgccctggggactcaagatatagactggcagaaacagctgcctgttacaggttaaaaaattgtgcctccctcacaagatatgctgaagtcctaacccccagttccttagaatgtgaccttatgtggaaatagaggttttgcagatttaatcaagttaagatgaggtcattagggtgagcctaataaaatgactggtgtccttacacaaaggagaaatttggacatagacacacacagagggaagatgatatggaaacacagagggagaactccatgtgaagacaggcagaggttggactgatgcaactgcaagcaatggaacattcaattgctggacagcaccagaagctagaagagccaaggacagattttatccacagtctcggatggagcaaggccttgctgataccttgatttcagactttgatcctccagaactatgagacgatgaatttctgttgtttctaagccacacattttgtggtacct

SEQ ID NO: 13863 - DNA, 881 bp, Homo sapiens
tgggcgccgaggtactttatttttttatttagtcatttatgattaaccataatcaattctgatcatgaccaatttacccttgagactagtaactgcaggtgctcacaaaaaaatatgcagctgtccttcctgccttaggggatcattcatgaaagtaatttctcacctgaccaaaatgatcgcttaacatttattgcatcattgcccctgtctctgtatactactctaccgaagttttaatttgtcactagtttaaagggccaaatgatctgttttctttcaaatattagagacgccaaaccaagccatctgccacatttcttgagaattcccttctcaaaaaatgacttaaagatctgacaactgtttttcttatattaatgtcctatttgaattgctgcttctacatgaatttaataaagaagcccgggcttcaatcttatctttattcaatgtgaacatttttacaccaacgtagctttatattaactctgcccacttgcgatacggctcctgtaacttagatgtgatccctcccggttatctcggtgaaatctcgttactcaaactttcataaggatccctaatgaccttactaagtggggtgacactgtaccccttcctattatgtatcttctctagtgtataagcaaattatcgcctctttgcaaagataacgattgtaaaatatctatgatttagtggtatcgaaaactcgtggacactcatcactatctgcaaatttatctctaacttacctgagcttatatattacagtttattattctacagttattattactatatctcactattcttctaatgatacatatttatgtctcacctccccagttacatagacttatacatcaagttgcacg

SEQ ID NO: 13864 - DNA, 330 bp, Homo sapiens
gcccgggcaggtacttttttttttttttttttttttttgttagaaacagggtttcactgtgttagccaggatggtcttgatctcctggcctcgtgatccgcccgcctcggcctcccaaagtgctgggattacaggcgtgagccatcgtgcctggccgctgcttggttttaaatgaatcttggatacaggtggccagactaaatggtctctcaacttgtcttcaagtttaggattttaatttttgatatttttcacttctctctggaaatttgttcaattctcaattgttgggggagtgcgcagctgcttcattatgagtttactggctga

SEQ ID NO: 13865 - DNA, 774 bp, Homo sapiens
  misc_feature 10: n = A,T,C or G
aggtactttntttttttttttttttatttttttgggatttttagtagagacggggtttcaccatcttggccaggctggtctcgaactcctgacctcaggtgatccacccacctcggcctcccaaagcgctgggattacaggcatgggccactgcgcccagcctctttactgttcattcagtggggcttggggatggagcaaacaaaaacaaaaactgcatgtgttcaggctgccacttttacctggatgcctacactccccatgtgacagattagtcccaaatcccatttggtccctccccagtagttcagcctctagtccttcaacttcatctcataagagctctcctgctcctggtccttcatttgccaaggttctcataaccacacaggtgctccagacatggccagaccagccagggcatgaacaggaggtaatccacagggcaggggaccatgctgctacaaatgggctagcagtattcagtaaatgttcactccgtgctaggcactgtgggaaatggtcaaggattccccgagcccaacttttaaccccttttgggaaaagaaaacaccctcgtgtgaaaaaggtagatgcccaattagggttttttccaaggaggattcccttgccaaaaggagcaattgggagggaaccgaacattataaatggtgccaaaccatgtcacaggcatttacttttaaaaagcagcgtttaaaaatgggggtggctattgaacacaggcggaaaccgaaagaaagaccccgcgtcctt

SEQ ID NO: 13866 - DNA, 768 bp, Homo sapiens
aggtacagagacagaggaaggggggctccaaagccaagagagggaaccccacctgccacagataccagctaggtatatatacagaggctggaggaggcagtgtctgatttgcacaggctcaggggattggtttgactaggcatgtcattcacgtagcccgcaggaaaagctggctctcccaccctagccttttaatatgcaaatgcagggcaccatgatcttctacacaggtggggatacttcggggtgtccatgtatccaggaatgtggggaaagggcaagaagtccacaggaatcgccatgtttgggtggacccactttctaatggctggcatttggatatcgggtaactggcctggctttaagagctggagctttacaagaaacttttccagacgtgctttaaaaaacaaaaacttcctaaggaccccttttcctctctatctgcctaaaataatttatcaataactcctacaacattcccccctgtggagatgccgcactaactgctgttagaggtttgggcgacgatgtcttctggctacttcctgctggaaaggggcgtcgaatggggaacagcagctagggctcctcctggggttgatctaagggtcctcggaagactgacgtgtccatggtgtgttcagtttatagcaccatttggagtttgattgctgtgagttgggtgatcctctcctcttgaggtcccaagataaactcatagctttcagacagataatttccaaattctaaagaaccaggcgagat

SEQ ID NO: 13867 - DNA, 422 bp, Homo sapiens
ccgggcaggtactcttttacattcccaccagcagtgtatgagagttccagatgttcctttctctttagttcttggtattgtcagtctttttaaatttagccattgattagatgtgtatttgtatctcattatgattttaatttgtgttttactgatggatgatgttgagtatcttttcatgggcttattgaccaaaaatgagtgagactccatcccaaaaaaaaaaaaaaaaaaaaaataaaaatgtgcgcggggctcttcctgctctccatcatggcgcaggatcaaggtgaaaaggagaaccccatgcgggaacttcgcatccgcaaactctgtctcaacatctgtgttggggagagtggagacaggctgccccgagcagccaaggtgttggaacagcttacagggcagacccctgtgtg

SEQ ID NO: 13868 - DNA, 347 bp, Homo sapiens
  misc_feature 347: n = A,T,C or G
ccgggcaggtacactttgaagactttctcaatggcattaacataggcagctgttctcaggtccaatcccaggttatacttcatggctgtgcgcataatttgcctggcagaacgctccattgtgtatgccaagccagagtgcacgatgtctttctcagatgcacccgatatcctgtcttggaactctgccgtgggtacccaggggtctgaaaatctctcatttagtagtcgatagcaaaattgttcatcagcattccttaatatgatcttgctataattagatttttctccattagagttcatacagttttatttgattttattagcaatctctttcagaagaccctn

SEQ ID NO: 13869 - DNA, 432 bp, Homo sapiens
aggtacgcggggattctggggttcgtttagaggtttgaattttctcggagaaagacaggccggccacgaggaaaacagaaacaagccgcagcaacatctaagcccttgaaaggatcctgagagaggggggaaagggaaaacagcagcctccagcccatccacttgtgtcttctgccccttcccacctatcttgtccaccccaccatccaacgctgcttgggactggaaatctgtggccgaaggaccgggacgtacataacctttaaacttaatctaaccacctcttccttttccaaaccgacccaaagttcactcattccaggggattactgtttttgcaatggcactcaggagactttatttctgccgaccgccccttccctaaaatggggtttggtgtggaggggaaaattgatttctgttttaaatttt

SEQ ID NO: 13870 - DNA, 418 bp, Homo sapiens
ccgggcaggtaccagcagggggatgtgtttctggggaattgtggctctggaagcttcacggtttcccagaatgtggaaaatatatctgtgcaggatagaaatcctgcccagaggctgtttctgtctcatttgagctctccttcatgtggcagagctggctgtggcgtttaggagcctacattttagaaaagcttacctcaaagttctgcattgagcctgagactggaaaggagatacaataaaacagctgacaggagctttggtagtcacacatgcctgatggggtgcacagggccacagtctctgaaaggcaatttggcattgtctgtccacaatatacttttatccattggtccagcaatcctactctaggaatttttcctacatataaacctgtatgcatacaaaatgatagaca

SEQ ID NO: 13871 - DNA, 414 bp, Homo sapiens
aggtaccgggatgtgatgttggagaactacagcaaccttgtgtcagtggggtatcaagccggcaaacctgatgccttcaccaagttggaacaaggagaaccactatggacactagaagatgaaatccacagtccagcccacccagaaattgagaaagctgatgatcatctgcagcagcccttgcaaaaccaaaaaatactgaagaggacgggacaacgctatgaacacggaagaactttgaaatcatatttaggtttaaccaaccagagcagaagatacaacagaaaggagcctgctgagtttaatggagatggagcttttctccatgataatcatgaacaaatgcctacggaaattgaattccctgaaagtagaaaacccatcagcaccaagtcacaattccttaaacatcag

SEQ ID NO: 13872 - DNA, 441 bp, Homo sapiens
aggtacgcggggatgcagtaatcagaaagctattctgatagtctgactgctctgccgatacaggttatattactctcacacaatatgttatcacgtaagggctggggaggacatacatacttaagtgggtaaactgaggttagggacatagggagcttgactgtgattccaagtatgtggtaagctcacaacccccaagattatcttatgctctaaacggtcttgtcatgcgcttttcaagagtcacattagaatctgcctactaagaccatatctagtggctgggctgatttttaatggagcacttccccttgcatgttttgacactatatatccaattcttaagattctttgtctttcaaaacttcatgtgctgtattgaaacttttcattttctcagattaaaggaggtcttttaacaattagcatacttgcttgggc

SEQ ID NO: 13873 - DNA, 505 bp, Homo sapiens
ccgggcaggtacagttgttccccagtatccacaagggattggttccaagacccacctggcagatatcaaaatctgcagatgctcaagtccctgatataaaatttgcatataacctacctacatattcctgtatacttttaaaataaatctctagatcaacttatagtggtctaatacaaatgtaaatgcttatgcaaaataccttataacttataattttagaaattttgtatttattttttaatcggttatagttacttatttaggtctgatttgaaatctgaagaatagttggataccccacagattaagtaagtgacttgtctgttattgtgttatatttaaaaacattttatgttgtaataacacttaaaatatattgctatataatatacattttttaaaaaatgtcacatgttccccttttttactgaatacttttaaatgttaattatctgattaaaaatttgacctttaatattttacatttgtaaatttactacgc

SEQ ID NO: 13874 - DNA, 442 bp, Homo sapiens
ccgggcaggtacttcccatgttaaaagacatttattatcttgttttcctgtcatgggagttccagaaaaagttaaaacagacaatgggccaggttactgtagtaaagcatttcaaaaattcttaaatcagtggaaaattacacatacaataggaattctctataattcccaaggacaggccataattgaaagaactaatagaacactcaaagctcaattggttaaacaaaaaaaggaaaagacaggagtataacactccccagatgcaacttaatctagcactctatactttaaatgttttaaacatttatagaaatcagaccactacctctgcagaacaacatcttactggtaaaaggaacagcccacatgaaggaaaactgatttggtggaaagataataaaaataaaacatgggaaatggggaaggtgataacgtgggg

SEQ ID NO: 13875 - DNA, 439 bp, Homo sapiens
ccgggcaggtacgatcttggctcactgcaacctctccctcccgggttcaagtgattctcgtgcctcagcctcttgagtagctgggattacaggcgcgtgccactgcgtccggctaatttttgtatttttagtagagatggggtttcaccatgttggccaggctgatctcaaactcctgacctcatgtggtccacccaccttggcctcccaaagtgctgggattacaggcgtgagccaccgcgctcagcctacaagcaattttttaaaaactgacacctattactgataaaattctctgtttaaaatcctatttactattttaaagataagtattagtttttttttaaatacaataattctgttattgataaaatttaaggcattttcattgccttttgcagatttactcattactacctaacaaggaaagaaggttttt

SEQ ID NO: 13876 - DNA, 430 bp, Homo sapiens
aggtacatctacctaaaggactattatgtggaataatacatactaatgaagtattacatgatttaaagactacaataaaaccaaacatgcttataacattaagaaaaacaataaagatacatgattgaaaccaagttgaaaaatagcatatgccttggaggaaatgtgctcaaattactaatgatttagtgttgtccatactttctctctcttttttctttcttttttttttattatggttagctgtcacatacaactttttttttttgagatggggtctcgctctgtcaccaggctggagtgcagtggcgcgatctcggctcactgcaacctccacatcccatgttgaagtaattcttctgcctcagcctcccgagtagctgggactagaggaacgtgccaccatgactggctaattttctgtattttt

SEQ ID NO: 13877 - DNA, 435 bp, Homo sapiens
aggtactttaaatcatctcttgattactttataatacctaatacaacgtaaatgttatgcaaatcattggtatactgtattgtttggagaataatgacaagaaaaaaaatctctgtatgttcaatacagatgcttttttcttcttgaatatttcctatccacagttggttgaatccatgggtgcagaacccacagatacagagggagaactgtaaggagatttgagaagtttcttcaaaaagttccttcagaaagtgacacttgagctggggtttaaagtataagataatgtcaaagaagggagggaagaggatttatttaaaaaccagaaaaaacaaaggaaatgtagacatgcatgaaggtgtggtgggttttgctgtggcacataaaacttattccccaaattattggagcttatacatgataaatgcttcg

SEQ ID NO: 13878 - DNA, 432 bp, Homo sapiens
ccgggcaggtacgatcttggctcactgcaacctctccctcccgggttcaagtgattctcgtgcctcagcctcttgagtagctgggattacaggcgcgtgccactgcgtccggctaattattgtatttttagtagagatggggtttcaccatgttggccaggctgatctcaaactcctgacctcatgtggtccacccaccttggcctcccaaagtgctgggattacaggcgtgagccaccgcgctcagcctacaagcaattttttaaaaactgacacctattactgataaaattctctggttaaaatcctatttactattttaaagataagtattagttattttttaaattcaataattctggaattgataaaatttaaggcattttcattgccttttgcagatttactcataactacctaacacggaaagaa

SEQ ID NO: 13879 - DNA, 438 bp, Homo sapiens
aggtacgcgggggctcaaagattgattcaaaagtgtaagacaggccagtggattttaatgtattaacaatataagagtgcattaagttttcggagtctacattgcctttaagaaactatgacttgtagtaagccgggcgcggtggctcacgcctgtaatcccaacactttgggaggccaaggtgggtggatcacaaggtcaggagttcaagaccagcctggccaatatggtgaaagtccgtctctactaaaattacaaaaattagccgggcgtggtggcagatcccttgtagtcccagctactcgggaggctgaggcaggagaatagcttgaacccgggaggtggaggttgcagtgagtcgagatcgtgccactggactccagcctgggtgacagaacgagacttcattttctaacaaaaaattaaataaaaaattct

SEQ ID NO: 13880 - DNA, 438 bp, Homo sapiens
ccgggcaggtactttttttttttttttttttttttcctttttttttttttttaaattgagatggggtcttgtcatgttgcccaggctgctcttgaactcctgggctcaagcaatcctcctgcctcccaaagtgctgggattacaggcataagccatcgtgcccggcccttttggaaattttgtattactgacccatactctgctccttggctataaattcccacttgcttatgctgatatttggagttaagtccattcaccctctaccactgcaaaatcccattacatttgtctatatacctgtcataatggccctgaataaagtcttccttactgggctttaacaattctcattgaataatttttttaaacatgtatagcttaattaaggaggtgagattccaacgcctttgccatattttgaatagaggtaagtca

SEQ ID NO: 13881 - DNA, 442 bp, Homo sapiens
ccgggcaggtacttttttttttttttttttttttttggagatggagtctcactctgttgcccaggctggaggagatctcagctcactgcaacctctgtctcctgggttcaagtgattctcctgcctcagcctcccgcgtagctgagattacaggcacatgccaccatgaccagctaatttctgtatttttagtagagacggggtttcaccacgttggtcaggctggtctcaagcttctgacctcaggtgatccacccacctcagcctcccaaagtgctgggattacaggtgtgagccatagcacccggccagaatattttcatctggcttcgcagtaaactgtcataatcagagctgtgatgtcaagttcacagtctcacagtcattttcccagaggtctccaaatcaaacacttatgataaattccctccatgcacatgcc

SEQ ID NO: 13882 - DNA, 332 bp, Homo sapiens
aggtacttttttttttttttttttttttgggtttttttttttttttttttttttttttttttttttttttttttttttaaaaccgggaaaaatgtaatttatttcatgcaaagctacattttttcctattttttaacagctaatcaaataaacttttcaaaaaattcattccatcccaataggttaaaattctacaagggaactgcaggtcaatcatttttttaaaaccaaactgggcgaaccctttgcataaataaggccaaagttactaatttgcttaaagggagcactttgcagttttttccaagaacctgcccgggggggcgttttaa

SEQ ID NO: 13883 - DNA, 442 bp, Homo sapiens
ccgggcaggtactttttttttttttttttttttttttttatttgataattaatatctggcagaagtttcacatgatcactttactctacccatttcctggaaatgtccccagtttccagcttcttaatgctgtttactcctgtgcgttctcaatctctctcccaggaggtagaatctagtataatctaggcactgaccacttctaaaaattataaattacctcttagtttttacattttgtcctatatttatgactgcagtctttttcagaaggtttattcttcaagggacaggaaccctggttctcggggagagtttactttagaagcgtgaggcactttggagtctcctttttggatttgaccgatcttttggtttgaaatttttatacttactatcctgatttgtggtcctcttatttttcgtaatctatttttttttc

SEQ ID NO: 13884 - DNA, 428 bp, Homo sapiens
ccgggcaggtacttttttttttttttttttttgtaaagacggggtctggctttgttgccctggctggtcgcgaattcccggactcaagcaacctttctgcctcggcctcccaaaatgctaggattataggcataagccactgtgcctgtccaaaactttatttttaatgacaaaacctattttcctatagctctgcttggaatgctgtatttatcctaagcaccagttttggccctagctggcctgtatacagctttaggtaggctcttgatctagttttgctataggcagggtagatctcagtatttcatattttacttgtggcagagacagtgttaacctttctttcatggatagcggactcattgagaccgattttaactaaaagctttgaagatttatacctgaactccaaactgaatcaagaa

SEQ ID NO: 13885 - DNA, 435 bp, Homo sapiens
aggtacttttttttttttttttttgggatggagtctcacttcttgcccaggctagagtgcagtggcacgatctcggctcactgcaacctccacctcccagattcaagcaattctcctgtctcagcctcccaggtagctgggattacaggtgtatgtcatcatgcccagctaatttttgtgcttttagtagagatggggtttcaccatattggtcaggctggtctcgaattcccgacctcaggtgatccacccacctcggcctcccaaagtgctgggattacaagtgtgagccactaggcccgacccaattctttaaaccagaataaaataatgatttaaagaaagttaaatatggaggaaacaggggagctttagcacctttgagtagtgaaaagattgtagattttagagacagaaaaacatgagttcaaattg

SEQ ID NO: 13886 - DNA, 500 bp, Homo sapiens
ccgggcaggtaccatccacgtcactgggcacctggccgaacatggccaggtagggctcgtagatgaccgaacggaatatccacctccagcgctgctcattctgcctaaggatcccttgcctggccacgccaaaggccaccatccacaccgcaaagaggaacatgaagaataacaccatcgatcagcattcctctgcagcattataatctttgggttcctaaagtttctgcttaccagtaaaaattgttggatcaattcttaaaagttgaaaaataatgtaatttccaagacagaaaaattgacttcgtttcagaaatacaaaaagagtctttttatttaggaaagaattggtagcccgaaaattacaaatttccttgcttaatgaagttaaaaaaaaggcccccaagcggtgttcccatcaacattttccacaaggttcaaataaaaaataaatttcacccccatttttacgttaccccttgggcccgcttctaaaaacc

SEQ ID NO: 13887 - DNA, 428 bp, Homo sapiens
ccgggcaggtactggctcctcatctcactcgggcttatgccaaagatgtaaaatttggtgcagatgcccgagccttaatgcttcaaggtgtagaccttttagccgatgctgtggccgttacaatggggccaaagggaagaacagtgattattgagcagagttggggaagtcccaaagtaacaaaagatggtgtgactgttgcaaagccaattgacttaaaagataaatacaaaaacattggagctaaacttgttcaagatgttgccaataacacaaatgaagaagctggggatggcactaccactgctactgtacctcggccgcgctctcttccaggacatcaagaagccagctgaagatgagtggggtaaaaccccagacgccatgaaagctgccatggccctggagaaaaagctgaaccaggccct

SEQ ID NO: 13888 - DNA, 518 bp, Homo sapiens
ccgggcaggtacggtgtggcattgcccacctaaagccccagctactgaggagactgatacagaaggattgcttgaactcataaggctgaacctgcagtgagctgtgatcatggcactgcactccagcctgggcggtaaaagtgagatcctgttccaaaaaaaattatattacaaaggactcatatataattaatttttgtataaatttcttctaaaggaaattaattcaaagaatctcaaaaatttttcaactgtatatttaaaagtccttgtaaggttttccattttcattacggttgattaataagaaccatgggttagtaaaaaatattcatttggaaataaaaggtaagaaacatgcccacaaattgtcttaaattttgaaaatattttttgaacccaacttcacaatggatctttttttgttaccctctgcaaccttgcattgcaaatagatataggggttattcaataggggcttggttttttttcaaaattttagggtttaaccctaaaag

SEQ ID NO: 13889 - DNA, 430 bp, Homo sapiens
aggtacagtttttctttgtaattaatattctattaaaccaccacatcacacggattcctttttgaggaaggacttgttgctcagttttggtcagtgcagtcagcagatagcttccagcactttctgcatgactcatatcacccaaggtcacacccttcctggtgcagcttgcacacaatgcctgagtgagatggggtggaactgcccacttcagagctccctgccggttgctgaagccaggactacatttcagtgagattgctcccttagcccaattatacctcttcccccttcctttcacatatgctggtccctagtaaatacattgcaccccaaactctgtcttagcatctgattccagagaacccaacctgagtcatttcttattgggagacattttgaaaccctgtgaataatctgtttgttatta

SEQ ID NO: 13890 - DNA, 431 bp, Homo sapiens
  misc_feature 431: n = A,T,C or G
aggtacatgactctcagtgtctgtggaaacatgattgaagacattataagcgagtgcgtgtgacctataaggaaagtctcattggtagaagagacatgcatggtagaaaggatgatgcacaaaagcagcctgttaaaaatcagcttggattaaacccgcagtcacatctaccagaactgcagctatttcaagctgaagggaaaatatataaatatgatcacatggaaaaatctgtcaacagtagttccttagtttccccaccccaacgtatttcttctactgtcaaaacccacatttctcatacatatgaatgtaattttgtggattcattattcacacaaaaagagaaagcaaatattgggacagaacactacaaatgtaatgagcgtggcaaggcctttcatcaaggcttacattttactatacatcan

SEQ ID NO: 13891 - DNA, 429 bp, Homo sapiens
aggtaccaccatgcctggtttattgttttatttttttggcagagatgggtctcactgtgttgcccaggctgatctcaaactcctggccttaagcgatcctcccatctcagcctcccaaagtgctgggattacagacctgagccaccacacctgggcaacagagtgaaacctgtccctgttttcctgctcttactctcacctctgaggcctcctctgcctggaagagattacagggaaattccaggcagcccttgtcaattggttttatgaattctttacctgttccttttaaagacaaggaaactgaggcccaaagttctaagttgtttggcaaatggaagttcctacccttagctcctgcaaggacctgggggacccccaggtccagcagccacatgattttgcagcaaacaggggcctaaagccctt

SEQ ID NO: 13892 - DNA, 431 bp, Homo sapiens
ccgggcaggtactttttttttttttttttttttttttcctatatcagaagttaggtatcttactcagattcattgttaaatattgtcccttgaagaccacacattctgtatgtcactcctggctacagtaactcagttggtttgcatccttagggaggtgctgtgtctgaagtgaaaatgtgatgacccatccgtggaggactgtcactgccttggcatctgacaaacaccggcctgtcatttggggcatggattttctttcgactttttatacttattcatgtcaatatacatggtttctaaatgtccgcataataaaagttttggaacaaattgtatttgggctgaattatttactaccatttttgatttacagaaaccattttttttatacagttcaagcctactttttacttgctatttttaaaagc

SEQ ID NO: 13893 - DNA, 427 bp, Homo sapiens
ccgggcaggtacttttttttactttggcaacaaatatttatacatacaagatgctagttcatttgaatatttctcccaacttatccaaggatctccagctctaacaaaatggtttatttttatttaaatgtcaatagttgttttttaaaatccaaatcaggggtgcaggccaccagttaaatgccgtctatcaggttttgtgccttaagagactacagagtcaaagctcatttttaaaggagtaggacagagttgtcacaggtttttgttgttgtttttattgcccccaaaattacatgttaatttccatttatatcagggattctatttacttgaagactgtgaagttgccattttgtcttattgttttctttgacataactaggatccattatttcccctgaaggcttcttgttagaaaatagta

SEQ ID NO: 13894 - DNA, 430 bp, Homo sapiens
aggtaccaatatgcattcatcaatgtgcacatcagagaacaaaacacccagtgcagtgtgccagatcccagttgagtcatgataggctgggcacggtggctcatgcctgtaatcccagcaccttgggaggccaaggcaggtggattacccaaggtcaggagttcgagaccagcctggccaacatggtgaaaccccgtctctactaaaaatacaaaaaaattagctggatgtggtggtgggcacctgtaatcccagctactcgggaggctgaggcaggagaatcacttgaacccaggaggcggaggttggagtgagccaagatcgtgccattgcactccggcctgggcaaaaagagcaaaactaaatctcaaaaaaaaaaaaaaaaaaggagaaaagagtcatgacgaggccaggcatgacagtggctcac

SEQ ID NO: 13895 - DNA, 465 bp, Homo sapiens
ccgggcaggtacgcggggtcctcagcttccagccaaaatggcggagaacagcgagagtctgggcaccgtccccgagcacgagcggatcttgcaggagatcgagagcaccgacaccgcctgtgtggggcccaccctccggtctgtgtatgatgaccaaccaaatgcgcacaagaagtttatggaaaagttagatgcttgtatccgtaatcatgacaaggaaattgaaaagatgtgtaattttcatcatcagggttttgtagatgctattacagaactccttaaagtaaggactgatgcaaaaaaactgaaggtgcaagttactgataccaaccgaaggtttcaagatgctggaaaagaggtgatagtccacacagaagatatcattcgatgtagaattcagcagagaaatattacaactgtagtagaaaaattgcagttatgccttcctgtgctagaaatgtacct

SEQ ID NO: 13896 - DNA, 575 bp, Homo sapiens
aggtacacatatcctctgtgggaaaaactgctctcagagtgtgcactctccccacaagccagcgctcaaactggaaaaagtatctcaatgtcctgaatgtgggaaaacctttagccgaagttcttatcttgttcggcatcaaagaatccacacaggcgagaagcctcacaagtgcagtgagtgcgggaagggctttagtgagcgctccaacctcactgcccacctacgaactcacacaggggagaggccctatcagtgtgggcaatgtgggaaaagcttcaaccagagttccagcctcattgtccaccagaggacccatactggggaaaagccttaccagtgcattgtctgtggaaagagattcaacaacagttcccagttcagtgctcaccggcgcatccacactggggagagcccatacaagtgtgcagtgtgtgggaaaatcttcaacaatagctcccacttcagtgcccaccgaaaaacccacactggtgaaaagccttacaggtgttctcactgtgagagaggcttcactaagaactctgccctcacccgtcatcagacagtacctgccc

SEQ ID NO: 13897 - DNA, 814 bp, Homo sapiens
ccgggcaggtacttctttttttttttttttttttttttttccttttttttttttttttttttttttttttttttttttttttttttttttttaaaacaaccgggccttaattttttaaaattgttgacttaaccctttgcaatggggacttccaccttaactcctggcttaaatctggggggaggaatttttttaacaattttaaaagggctgggccaatcaaagagtcccttgggaattttcatttggaaaccaaccccccttttaaaaccttccccacaaggggttttttttgtggggatttttaaagttttggggggcctttaaaccgggcctttttctttgaaattttttttttttgcccccttttataaggcaacacccccctttttcaagggttttaccttgcggctttttagggggattccaatacggggaattgccccccccggctccccgggtgtttttcccggtttcttaaaaacctctgtttttgcccccgggtttttcaacacaattgtttctttggaaaagccaaccaggggtatataaggacaagacccttcggaacaataattttaagccctttaaacacggttttttttaaaaagcccccagttttcttggccgttttaaaaaaattggtcccccgggctctcggaattcttatataggctttatgatcccggaaccctgagggggggccccggcccccatttttgttccttttaggaggggaaatttcccccctggcgataatatggaaaaagtttttcctgggaaaattgttaccctcaaattccaacatattggt

SEQ ID NO: 13898 - DNA, 815 bp, Homo sapiens
ccgggcaggtactctgcacttttttttgtatgatgcttgaaactaaagacttaactgtttttttccgtatctcctcagccccatgttttagactattttaccccaaaattgtatttattaatttggctatcccatttgaaaaaacaaattgatcttagcatggtggctagcttgaggcagtctttactgagccagtataattttagctaacacagttgtgtctcatgtgaaagtatgattttctttaggttttttttttaattgaaagtaactcgtgaattctctttattatctattctaagggcttgaggatatcatgttatccctggatgagatatccttcccaggcctaacattctgatttaacaacactttcactaaagcctttggccccaccttggctcctgtgcattaatatattgagctatatgattaaaattgaactattttatcctacatggaaagtatcagatggaagatcgttcaggtcataattcaacttgtgcgccttagaaaacatctggatttgaaaatcaaattggccaggcaccatggctcatgtctgtacatcccagcaccttgtggggccaaagtgcgcaaattgcttgagcttagaagttcaagaacagactgggcgggcaacatggtagaatcccgtctttgcaaaaatcccatgatttgccccatgtggtggtgtgcacctgtaaccccagttcttagaaacctgagatgggagatacctgagcccagaagtgaggcttcagtgagcctggtaataccctgccttacaccgggggatgtgagacccgttttaa

SEQ ID NO: 13899 - DNA, 528 bp, Homo sapiens
aggtactttttttttttttttttttgtaagacgaggtcttgctctgttgtccaggcctggacaacacagcatgtgcagtggtgtgaacatggctcactgcagcctcgacttcccaggctgaagtgatcctcccgtctcagcttgagagtagctggaaccacaggtgtgtgccaccatgcccagctagtttttaaacttcttgtagagatggggtcttgtcatgttgcccaggctggtcttgaacttctgggctcaaacgatcctcctgccttggcctatcaaagtgctgggattacaggcgtgagccactgtgctacaccaaatgttgacaaggctgtgtgcaacctgaattgtcatacatttgtggtgaaaggataaaatgatacaatcactttgaaaaaaggtcttaaccagtgtcttacgaaactaaacatagacctacactaggacccagcaatttcactcccaggtatttatccaagagaaatgaaagcatttgtcaacaaagaaacaacttgtaccttcccg

SEQ ID NO: 13900 - DNA, 819 bp, Homo sapiens
cgggcaggtacaaaaatataaattggatctagaagaaagggcaattcaggcaatagaaaaattagtagaaatccctttaaaggttagtttgtaaaatcaggtaagtttatttataatttgctttcatttatttcactgcaaattatattttggatatatatatatatattgtgcttcctctgcctgtcttacagcaatttgccttgcagagttctaggaaaaaggtggcatgtgtttttactttcaaatatttaaatttccatcattctaacaaaatcaatttttcagagtaatgattctcactgtggagtcatttgattattaagacccgttggcataagattacatcctctgactataaaaaccctggaagaaaacctaggaaatattcgtctggactttgcacttggcaatgaatttatgggcgctttggaatcctgcagatataataatgataattaaacaaaacactcagagaaactgccaaccctaggatgaagtatattgttactgtgctttgggattaaaataagtaactacagtttatagaacttttatactgatacacagacactaaaaagggaaagggtttaaaataaaagctctgccgtgcaatcaaaaatcttagccactccattctggtagggcctgaggaacttcctggaaagagaggttattgagtctgtacttttcagtaaacactgattcactttcagtcactatccataagtttttatttccaaatacgtgaaatcttatgaagtggatgaccgggccaccttcaccactggcctttaaaaccatggaccacacagccct

SEQ ID NO: 13901 - DNA, 356 bp, Homo sapiens
ccgggcaggtactttggtagaggaactgctgtaaaatctttgttagataattccaacatctctgtcatcttgactttggcatctattaattgtcttttttttctttcaaattgagatgtttctggatcttggcataatgagtgattttctattaaaacctggacattttggatattatgagagtctggatattactttgactttctgttttagctggctttctctgacactgctctaaaagaggcagcgcagggaggcacttcccctgttactaccaactggaggtagaagtctaggttcccactcagcctttactggcaccagggatgggggcctccttgttactgcatggtggg

SEQ ID NO: 13902 - DNA, 360 bp, Homo sapiens
aggtacgcgggggttcctcttggtaggtgcttctctcccagactaaaatctgattctcagcacaaatctcgccttctatttactcagctattcctcctctttagaaacaaaagaaattagtggatgctgggcttcagaaactcctgaccatggatccaaccaagagaattacctcggagcaagctctgcaggatccctattttcaggaggaccctttgccaacattagatgtatttgccggctgccagattccataccccaaacgagaattccttaatgaagatgatcctgaagaaaaaggtgacaagaatcagcaacagcagcagaaccagcatcagcagcccacagcccctccacagc

SEQ ID NO: 13903 - DNA, 308 bp, Homo sapiens
gccagggtccggggggtatttccaggaaattaatgaggctttgtttgatattgaaagcaaagtggacccttccaaggcctggggagaagtgaagagacagatttatgttgcagccttcacagtgcaggcagctgcagagactttgagtgaagtagccctaagaggattctttagagaatccgtattgaatttgtgtggtatgtcactcagaaagaatcgtaatgggtatattgataaattttaaaattggtatatttgaaataaagttgaatattatatatataaaaaaaaaaaaaaaaaaggtacct

SEQ ID NO: 13904 - DNA, 429 bp, Homo sapiens
ccgggcaggtacacagaaagagatcattttggagagtaaggcttttaggagttctgtgccagaaatggggttaaagataaaatatatgtttactagtatcataagggttatgatgtatagagggggctcaaactcactaggaatccaagaatacaaaataaagacaggccgggagcagtggctcacacctgtaatcccagcactttgggaggctggggcaggaggatcgcttgaggccaggagttcaagatcagcctgggcaacatagcaagaccctttctctgcaaaaaaatttaaaaattagccaggcatggtggcacatgcgtgtagtcctagctactcaggaggtgagaggattgtttgagcctggaaggtcgaggctgcagtgagccatgattgcaccactgcactccagcctgcgcaacagag

SEQ ID NO: 13905 - DNA, 723 bp, Homo sapiens
  misc_feature 114, 116: n = A,T,C or G
catgtaactatctcaatattcattgtgacaatgatataacgaactctaaattataaacgtttttttaccgatgtatattaaatatttaataatattaatatctatattatattncnaaaggagaaaaccctatacgatcactatatggcgcgtaggggcatccaccgcgggggcggccgcccggccaggtccccggggaaaaagggtggggagtgccctttcttgaaggaatcccttaagtgcacgtctcccgttttcttttcacatcaatgcagagtccctctgtgaatttacaacacccaacacccatgagttcaagtccttaaagaaggaaaaattgagccatgtattaaattgggttggacatttgcaataaaagaagggtccattaatccaggactaaacttctagaaaaattttatttcttgaaacctttagtttggaccttcctttatttacttgggcaagaggaaccccattctttagatgggcacttgggggaaaaatcttttggccacccccacgaaggaaatttcaaacttgccgccttcaactggcaaaaaaataacaaatgggctctaccatttgggaatttggttatgaggaaagaaaaaggaagccccctggtatatgatgaagcctggtgccttttggagaaaaaaatctttttggcccccttggaatggtgggtgctgaatgccccaaaagggaaagaatctcttg

SEQ ID NO: 13906 - DNA, 423 bp, Homo sapiens
ccgggcaggaccccaccatacaagccaagggagcttcaggtattacaacctggatcatagccacggtcttggcttctctcacttttcccctggttttggtcctcacttccagttctccaaaatctacctgtgtcctgactctggctgtgattctactctaagtgccatacacatccctttcaccactgacagattttgcttccctggttgtgacattcagcattctctactgcagggcttctcaaccttggcactattggcatttgggtctgggtaatgctttgctgtggcaactgtcctgtgcattgtaagatgttaagcagcatccctgacctctgtctactagatgccagtaacaccccatcattgtcaaatgtctcctggggcacaatgtggcacctggttgataaacactgatctact

SEQ ID NO: 13907 - DNA, 440 bp, Homo sapiens
ccgggcaggtacttttcgtagagacagtgtttcaccatgttagccaggctgatctcgaactcctgacctcaagtgatccacttgcctcggcctcccaaggtgctgggattgcaggcatgagctcactgcgctctggcctctaaaatactttttcttagtaagaacataaccagttacactgaaggctttgaaagtcttcaactggtatgaatcctaaaaaaaaaaaagagcaccaagtctacaggagctttcaggatggagaaagcccttccaaatgggaaaggaggtcaaacggatgctgccattactgaaaacaaatgccttactatgtcattttcctaataaccacctttcacctttggacttaccttaaccaggaattccggaccattttaaaataatgccgggctgctagggaacatttgaaagaaatggtaagg

SEQ ID NO: 13908 - DNA, 427 bp, Homo sapiens
ccgggcaggtacccccagctacctcccatgtttccaggtatcattggctcttaactcccacaagcccgccttttggctacccatcccaacaatatcaagagggaatgactaagtatcagctagaaacttagccatgtctcaacattcctggatatctgaaagctgtcgatgcccttttacaggtttatggtgacagacccgtatcatcttaaagtatgttcatagttaaggcttgacttaagaaaataagagaaccagacataatggaaagacctcttcaataatgttgtcatgcctctcagtgaacgtgctcacagtcacgcttggtttggctccccaaacccacaatagaaaaggaaaaatgagtattttgtttttcatctgttttgtatttaaaggcattgggttacttcctcctgccctctta

SEQ ID NO: 13909 - DNA, 423 bp, Homo sapiens
ccgggcaggtacttaaacaattgctttgctgagatgttgttaatatgtagctttgccccagccactttgccccagccattttgacccaacctggagctcacaaaaacatgtgttgtatgaaatcaaggtttaagggatctagggctgtgcaggacatttctttgttaacaaaaagtttacaaacagtatacttggtaaaagtcatcgccattctctagtgtcaataaactaggggcacaatgcactgcggaaagccgcggggacctctgcccttgaaagcagggtattgtccaaagtttctccccatatgatagtctgaaatatggcctcatgggatgagaaagacctgaccgtcccccagcccaacacctgtaaagggttttgtgctgaggtggattagtaataagaggaaagccctttgga

SEQ ID NO: 13910 - DNA, 802 bp, Homo sapiens
  misc_feature 185, 574: n = A,T,C or G
ccgggcaggtacgcgggggggtgctcttgtgagctgctgctcctgcggttggtgagattacctgggtctagagtgcggagctgctccgtggccacgaggacgtcaccatgcccaaagcaccaaagggaaaaagtgcaggacgggaaaaaaaagtcatccatccatatagtagaaaagcagctcanattacgagagaggcccacaaacaagaaaaaaaggaaaaattgaagaatgaaaaggccttgcgtctcaaccttgttggtgaaaaactgcaatggtttcaaaatcatcttgatccccaaaaaaagagatattcaaagaaagatgcttgtgaactaattgaaaggtactgttacaatgagacagcaaagttatccgtttattcatccgatcatttaattgacatttatggagtgcctagtattttctcaatactgcgctagaggtgctgggaagagagagataaaaataaatgatactctcttgttctcaagttgcttgcaaatttgcatgcattggttctagtttggaatttgccaaatccaaggaaaaagatcttcagccggtcccgcanagcaagctccagagaaactcaaccgcagaattccattacttgtatagctttctgggtatgaaaaacaggtagaggaactatcacaactctagggtttttaaaggctgaattatataccagatcaacaggttggtgaccggcttgcaagttaacaatggtttataaaaggagagactacttgtcagaaggaaagcaacgttggccccacccaaagccttcacggaagct

SEQ ID NO: 13911 - DNA, 434 bp, Homo sapiens
ccgggcaggtacgcgggaaggcagtggtaacaacccagactacgcggggatattatcagaaactaattgacctcagaaaaggaaatacccaattccagcctactctagttgtcctgtctccctaaagggataggggagaaactgagaagcacttgtgtaattcacagtccaggaacacaggctcacttaaagattgagacctaagcaagcatgggtctatagaatgttttcccctgcccctaaaccttagcaacacattactaaaagcccatacaaagcagttccttttacctggtccatcatatctggttatcaagaaaatattacaaaacatactaaaggcaaaaaaaaaaatccacaagtagaagaggcaaaagaagcattaaaaccagaatcagatatggcaaggatgctggaattattagaaagaaaat

SEQ ID NO: 13912 - DNA, 434 bp, Homo sapiens
ccgggcaggtacgcgggaaggcagtggtaacaacccagactacgcggggatattatcagaaactaattgacctcagaaaaggaaatacccaattccagcctactctagttgtcctgtctccctaaagggataggggagaaactgagaagcacttgggtaggttacagtccaggaacacaggctcacttaaagattgagacctaagcaagcatgggtctatagaatgttttcccctgcccctaaaccttagcaacacattactaaaagcccatacaaagcagttccttttacctggtccatcatatctggttatcaagaaaatattacaaaacatactaaaggcaaaaaaaaaaatccacaagtagaagaggcaaaagaagcattaaaaccagaatcagatatggcaaggatgctggaattattagaaagaaaag

SEQ ID NO: 13913 - DNA, 171 bp, Homo sapiens
tccacatcccgaaggccatagcgtcgagcaaggtcacaggatggcagcaccttaccactcaggctcaggatattgggatctgcttcaacacaggatcctgcaggacctcctcctttgccatatgctccttcagcagttctgtctgcacaatcccccccgcgtacctgcccg

SEQ ID NO: 13914 - DNA, 124 bp, Homo sapiens
agccctgcaggcctctgccctgaaggcctggggcgggaagaaggagaacctgaaggctgcgcaggaggagtatgtcaagcgagccctggccaacagccttgcctgtcaaggaaagtacctgccc

SEQ ID NO: 13915 - DNA, 119 bp, Homo sapiens
tgttacgctaacactatatagggcaattgagctcaccgcggcggcggccgaggtacgcggggatcttattctggccttggcggagttggggatggtgtcgcctagcaaccgctgccgct

SEQ ID NO: 13916 - DNA, 508 bp, Homo sapiens
aggtacaaattctaactagagtaagagttcctggatgtgtcaaaaatcgtcaccttcccaactcttacatatgtaggacagtgacatgactcctgcccacagaagaacacacctgtcctgccctctcccaacaatggaatgttacaaagcaggacacgcctgagttaaaatgagtatccctgaggttgataattcccaccatgcaccttgaagatggttcttgaatctttcattcagcccgatgaagagaagattcattgtagccagtgtcacattaggtgagaaaaattcagaaggcaacagatttgcgctgctgcaccagcgacccaaaccagcccgtgagtgcatagctactgccagcacttaaagaaaggtgagccgttggatactctgggaaaccgagaaagcaccttctactgcaagcgtgaagaacatgatgcccacagaaaacacaacagaaacaagaagtgagactcttgaaggtaatttccagaatagtacctgcccg

SEQ ID NO: 13917 - DNA, 473 bp, Homo sapiens
aggtacctcaacaaataacttaaagatttccgtgtggcgtgaaaccatttcaatttgaactaatatccttgaaaaaaatcacattattacaagttttaataaatacagtaagaagagctggcatttttctaaaatactgaatttcagatctggagtttattccataaataggtttctttttaattgcttgctttcttggaaacatttgctcaagtattattctctatgaagtgaactctttcatagataccatataaaaactgtattaatatgtgcctcattatagaagcagctggaagaactggatcacacagttacctaactgaaaagtaacttaggaaaaagctctgctttttgtaaaactttaaatcacaggctgaagaataccaaagaaacatttatatagaactcccactagaaattttataaatatatatgtagcatatttatatatattatatttgcctcaccag

SEQ ID NO: 13918 - DNA, 479 bp, Homo sapiens
aggtactctgccacaaactgatcacactgcttctggtaagggtctggcaggaagctgcagcctttctcaagagcagccaggatctcctgcttggtgctgtttttctccaggttgcgatccaaataacccaccagcttcttgcacacttcgcagaagccaccgtcctttggctgagtcaccgtgaacggtcagtgcaggcagccgcgtgccagagcagaggtgcagcatgctgcacaccagctcagggctgacctcctccagcaggatggacaggatggagctgccgtacgcgggtatctgtctttcacctagtgtgctttttgtgtgcacactattcaccaagctttgttcaaattgcaagggatacagaaaggactgagaaagtgactggtggatgagaaaaacaaaatatcttggttaggacagtacctgcccgggcggtcctttttaaacagtgcattcttctgtttgccaggagg

SEQ ID NO: 13919 - DNA, 536 bp, Homo sapiens
aggtacttttttttttttttttttttttttttttttgaaagaaggggtcagggggctccttgatattagggaacagggacctgagcttttacagcccttcatatttattaggtagagtgaatagggaggaagggataactgttggtcagctatttgatttaacacaggcccccatgatttcttttcttttttcaaacgggtttcggatgttctcggggaataacctcaaagaaacacgggacccttgtaacatagacttgcccccaactattcatttcttggcggatagaccaaaatttttgttcagtttctcacatacaatccttgcttttatatgaagaacaagttttgtttatattttctacacaaaagacctatcagtaggttatacatgaggtgtggttcatcgacactttattttcctattagtcctccaaccaatctcccccttttagtgttttgctccctgttgttccttgtcccggagcgggtcggtttttaataacatagttgtgtttccccccgggtctgtatcg

SEQ ID NO: 13920 - DNA, 529 bp, Homo sapiens
acgtatacactactatatggtgtatggcaactcgcccctggcggcgggtcggcgacctaggtccctgccatatcgtgtaggagatcgagactagtagggctaggcccaccgctgcttctcaggcggcaaagactagtatggcaataggcacaatattggctaagagggagtgggtgttgagggttatgagagtggctatactgaacagcgatggtattattccttctaggcatagtaagggaggatatgaggtgtgagcgatatactagtattcctagaagtgagatggtaaatgctagtatgatatttatgtaaatgaggggcatcccgcgtacggatgctacttgtccaatgatggtaaaagggtagcttactggttgtcctccgattcaggttagaatgaggaggtctgcggttaggagtcaataaagtgattggcttagtgggcgaaaaattatgctttgttgtttggatatatggaggatggggattattgctaggatgaggatcgatagtaatcaggcaaggt

SEQ ID NO: 13921 - DNA, 501 bp, Homo sapiens
ccgggcaggtacgcgggtctgatcgctaatgacagttggttctgttatcagccaccaatcatgttaaatacagtatgtagaatggttcaaatctaggaagcatttcgtttgcaaagaaacctgtatatttacagactttaaaagatggatttttttttttttagagagagacttttatatttttaaaaacaaagcttttgaaaaagtgggcagtttcttggggtggggggagggaaagcactaggagatacacctaatgtatttgacaatgttaatgggttgcagtacacttaacatgacacatggtttacttattgtaacaaaacctgcatggttgtgcatcatgtacttcttacacactcctttccgctaattaaaacacctggcttctgctcttgtttagcattacagacaatttcaatttatttggttctggtgaagcatactggttgatgcaccaacattgcatgagcggaacttgttaggattatgattaaaggt

SEQ ID NO: 13922 - DNA, 470 bp, Homo sapiens
ccgggcaggtacgcatttacttcataatttcttttttctgaagataacttgttgctttcagttgtgaaattaaagtccaatgagaccaagttagtataattctccaacatcacatctctgtactgggttcatctcactagggagtgccagacagtggacgcaggacagcgggtgccgggcaaccgtgcgcaagctgaagcagggcgaggcattgcctcactcgggaagcgcaaggggtcagggagttccctttccaagtcaaagaaaggggtgacagacggcacctggaaaatcaggtcactcccacccaaatactgcgcttttccgacgggcttaaaaaacggcacaccaggagattatatcccgcacatggctcggagggtcctacgcccacggagtctcgctgattgctagcacagcagtctgagatcaaactggaaggcagcagtgaggctgggggaggggcaccc

SEQ ID NO: 13923 - DNA, 473 bp, Homo sapiens
aggtacgcggggtctctcggccttagcgccatttttttggaaacctctgcgccatgagagccaaggtgagcggttcctggtagtaagcttgggaggtaggagttggcgagtagtagcgaggagacgaaggcaagtccgccatacctcctgaactactgggtttcaagggtgcccaaaaacctgttgggagagagaaggtagtttgtgagagagctagcggttaagtgctatgggtagagagggtgggcttagaaaagggtggaattctgatcttatgttgggagggtgtccaagttactgatgtagttgttacgaccaatctttcatacttcttggttaagaatctgtccggttctaaagagtgcatttcatatccttgctaagcctactaataagcttcatcccttttttttttttttttaattatctgctgcttgtgatcggttgcttgtggaggaagaagcgaatgccct

SEQ ID NO: 13924 - DNA, 133 bp, Homo sapiens
tcactttcctgcgcccgctctcctgcgccagcttgaaggcatactcggcaatgcgcagggacttggccttggtgatgatcttcaggctctccaccactcccgccacactctcatgctccaggctgctgtacct

SEQ ID NO: 13925 - DNA, 481 bp, Homo sapiens
tcgctcccctgctcctccttggtggctctgtttggagacagggcaggtgaatgctccctggatctgttgctctttttccttcagccttcgggctgacactgactccccgcgtacctcggccgaggtactcaggacttttgcggttctgtaaaatctgtttgtcagtttctttgttagcaaagtatctagtgcagcctcggtttaaataccgaaaattatctggtgaactcaaatgaagtttttctctaatatcttcagaagcaccagcacacaacctataaaagatatgataatttctttcctctttgccttgaacacagatcctagatttctctaggagataatgtgaaacaaatcctccaacaactgagctcttttcattaaaatgtatttctacaaatttcccaaatcgactgctattattgttgcgaacagtcttcgcatttccaaaggcttctaggagtgggttagcttcaacaaa

SEQ ID NO: 13926 - DNA, 419 bp, Homo sapiens
aggtactttttttttttttttttttttttggagacagagtttcacttttgttgcccaggctggaatgcagtggcacgatctccgctcactgcaacctccacctcccaggttcaagtgattctcctgccttagcctcccaagtagctgagactacaggcatgtgccaccatgcctggctaattttgtatttttggcagagacggggtttcgcgatgttggccaggctggcttcgaacccctgacctcaggtgatccacctgcctcggtctcccaaaatgctgggattacaggcaataagccaccgtgcctggccggctctggcctctttttttaaaactcactagattttatggaagtttcctgacaccgcagcagtctcaagacaccagtgcctgagtcactccctgttcctgacaggg

SEQ ID NO: 13927 - DNA, 431 bp, Homo sapiens
ccgggcaggtacaactgaataatatgagtcctgccatttcttttatttacactcttgactcagcaagaattatgacagaagtccgcatggttatctgcagcttgttaagtcttctacaatggcttggactttataacccactcagcatttgggttaagctgatataaatccttcatgtaagtgtcatcatcaaggcagcgttccccaatatttcctcccccgcgtacattcgtggtcataaaatctgcaatctgctgtaatgccaataggcctgtggggttcttccccttcttaaattgctcctgtatcattgattccaattcttcacagaaagcagggctttgcagaatcatggacaccctcttcttttgctccatcatgttgaagtcctggcgaaggtctggtgccatgttcctctccctcaagtacta

SEQ ID NO: 13928 - DNA, 435 bp, Homo sapiens
aggtacagaaaaacattccgcccacgacgccaccgaagctgtggcccagaatggagaatcgattccatttcaaggctgccacaactcttcggatctcactcacaaaagtctggaagtaatatgggacacctgggctgtaatgggacgagagcccatgacctccgaaatccatggcaacgtaataaaagtcttgcgggagaagagggatgagtctgtcgaaggagctggcattgtccagccagccgtgcaggcagagaactggagggccctgcagggagccccaggctttggctgcgatgtggccccagggcacagccagcttcagctctgagatcagaccttctagaatgtgctggggcgggggcgctggtcaggcctggaccccatcacttgctggctgggtaaccttggagaagttactaaaacgtcttgagc

SEQ ID NO: 13929 - DNA, 428 bp, Homo sapiens
ccgggcaggtacctcagtcctatagctgcaaggaattgaaacctgccaacaacctgaatgaacttggcagaggactctgagcttgtgatgagaacacatccccagcttgaaatcaaatcgacatattgattttagcactgtgagatactgagctgagaacacagttcagctgttcctggacttcagaaccacagaactgagatgataaatgagtggtgtttcaagttgctaagtttgtggtcatttgcttacagtaattgtaaactaatgcacaagtgtaagtttgttttcttaaagaagaaaaaaacggggaaggaggtaagtgttaaaggatcaaaactctgacaaaaggctggttgcagaacatggaaggttggtgcactggaaactatttgtcatgcaagtttatgttaaaataagtagctttt

SEQ ID NO: 13930 - DNA, 418 bp, Homo sapiens
aggtacacaatggtttattaaaggaatgtatggcccacatcaacctagcaaggattctactggtaaaccttcctatggccaaaggtaaaacaagcaggagtagagtggctggggtggggtgcatgctatggagagagggcagaaagttgtatcaactgcaggggtcttgaagcttactacagagtttcttacttctgtcttcaaatatttacttcttatggccaatgacccaagtgtttcataggctggaaatgcactcttctagactgctcgagacagtcagaaacaggggaggagggaagaatgatactgtggaaagggatggcggggctgacatttagagctagaaaccactactggaccgatgctatagttactgtctattagcctaaaatagccagtgtctttgggacactta

SEQ ID NO: 13931 - DNA, 234 bp, Homo sapiens
ccgggcaggtacgcgggggcggcgacgacccattcgaacgtctgccctatcaactttcgatggtagtcgccgtgcctaccatggtgaccacgggtgacggggaatcagggttcgattccggagagggagcctgagaaacggctaccacatccaaagaaggcagcaggcgcgcaaattacccactcccgacccggggaggtagtgacgaaaaaaaaaaaaaaaaaaattgttcct

SEQ ID NO: 13932 - DNA, 422 bp, Homo sapiens
ccgggcaggtacaaggaccggtgagctttcaaaaggagacacttcgggagactcgccaggggccctcgtatccccggcagcgcgagttttggaggtcagtggagggctctcgcatcatgcatgtaactttcatactcaaagacttaccttcatcctgcatccctcacccccctgcagaaacttggggcttgaattcatttaaaaacatttgcggtttcagaagccttctttttattatgaagctgccaaggagatcttagaatgaaaggcatttttagagatgagaaagaaggaagccaggccaaggctgggccggctctcagccgtgggtctgtaaaggtgacacgtgggacatggccacctgcagaccctgcaggcggctgggcagaggcacccacagggacctgggtttgaatccctgg

SEQ ID NO: 13933 - DNA, 342 bp, Homo sapiens
aggtacgcgggattgtagagactatccgggttagtttgcaagggaagccaatgatgagtaatttgaaagaaattcacctggtgagcaatgaggaccctactgttgctgcctttaaagctgcttcagaattcatcctagggaagagtgagctgggacaagaaaccaccccttctttcaatgcaatggtcgtgaacaacctgaccctccagattgtccagggccacattgaatggcagacgatgtaattgttaattctgtaaacccacatgatattacagttggacctgtggcaaagtcaattctacaacaagcaggagttgaaatgaaatcggaatttcttgc

SEQ ID NO: 13934 - DNA, 124 bp, Homo sapiens
aggtacgcgggggcaggctcccagccgagtccgttatggccgctgccgtcccgaagaggatgagggggccagcacaagcgaaactgctgcccgggtcggccatccaagcccttgtggggttggc

SEQ ID NO: 13935 - DNA, 443 bp, Homo sapiens
aggtactccacacgggggtagtagcaggcaaacttcatcctgtagccatcctcgtcctgcagaccccgctccagggcgcgacgctggcgagggcacttcccctcagcacactggcagacttcagcagaacacaagggttggccaagagtactgctccttacttgggggccccgtaaaacacagaacatctgcgctcggggttgtagtagtcgtactgcggcgggtaggcctaggattgtgggggcaatgaatgaagcgaacagattttcgttcattttggttctcagggtttgttataattttttatttttatgggctttggtgagggaggtaggtggtagttttgagtttaaaatttcatgtcgggtgttgtcggaacagtcttatgggggtatgggtgtttttcattagcttctacctcaattcttcgttttcattttttt

SEQ ID NO: 13936 - DNA, 462 bp, Homo sapiens
aggtacttttttttttttttttttttttggcttgactcaggatttaaaaactggaacggtgaaggtgacagcagtcggttggagcgagcatcccccaaagttcacaatgtggccgaggactttgattgcacattgttgtttttttaatagtcatttcaagtattgagatgccgttgttacaggaagtccccttggcatcctaaaagccaccccacttatttgtattgagaatgggcacatacttttctcaaatccacacactggggggtagatagcatttgtttttctggtaaaattatttttatgcaaaatttttttttaaattttctacgggcaaatgaattggttgattttcgtataaatttttgattgattaagccttttgggccccgcccctttccccctttttttggcccccccaactttgagatgttttgaaagggctttttgggtttcccttgg

SEQ ID NO: 13937 - DNA, 431 bp, Homo sapiens
ccgggcaggtactgagagggcaaaccaaggacagaatagagatatgtggcagtggcaacccttacaaaatcaaacactggacatgatacatgcctgcccttcttgcttacatgtgaagtataaccaagtgccaaatgcttttataattgactaaagcagccacaccccaccctgctcagaaacagaaagctactgcaggcccctacaaagtgagtgagagtgtgtgagctcctgctgaagaggtgagacccagatcatagttctacttgtttctctatgaagtggaaatacagaaaaagaagcaaatgtaagcataaattgtctatgttttaaaaacagtttcactcatgacttaaatttggtgtcaaactccttgctctagtatgtgtcctcagggtcacccttaatggctttaattttaagaaatagat

SEQ ID NO: 13938 - DNA, 430 bp, Homo sapiens
aggtacctggaaaataacttctttcttttcctctagattttcgaagaagcaaataaatcaagaatagaaacctatatataggaggttgggcctcctgcaaagaatgaagcactttttgttaaatacaggagaggctacttggctgcactaatatgtgcttttttgggaatcttatagagtgtcaccaaattgaactttggaatggcttgaatcatccctggagcatctgtgccgggcagtcatgagtgagtgcaccgtctcccacccagccccattgggcctcacaccctcttcattcctttccccatgaggcaggcaaacacggtcatgaccattttggggttcacttcaaccaggtcttctggcagggcatacactcttgctccaatttttcgggccataaaaaaggcctattttgcatttgttgatt

SEQ ID NO: 13939 - DNA, 83 bp, Homo sapiens
tggctgcccagacgtatttggcgtcgcagtagccgacaatggcggcctcctggcagcagccatcgcacatcaggttatccacg

SEQ ID NO: 13940 - DNA, 429 bp, Homo sapiens
ccgggcaggtacccgagccccgcttaccctgccttttcatgtgggtcaggatatgtgatctccaaggacatcttcaagtggctggcaagcaactcggggaggttaaagacctatcagggtgaagatgtaagcgtgggcatctggattgctgccaaaaggacctaaaagataccaggacagtctgtggctgtgtgagaagacctgtgagacggaaatgctgccttctcctcagaattctacgcgggaactgacagaactgtggtaactgaaggaacagcgcggatatccttggcaatgtctaaccagataacatggactagaataagcagactctaaaaacagggcgggctaactagcatctggtgcaagactgaagatgaccatggttgaccaatgagactgtatggtctttcaagagagtttcccact

SEQ ID NO: 13941 - DNA, 423 bp, Homo sapiens
aggtacagcagcaacagcaaaggaatctctcactacatgaatacatgagtatggaattattgcaagaagctggtgtctccgttcccaaaggatatgtggcaaagtcaccagatgaagcttatgcaattgccaaaaaattaggttcaaaagatgtcgtgataaaggcacaggttttagctggtggtggaggaaaaggaacatttgaaagtggcctcaaaggaggagtgaagatagttttctctccagaagaagcaaaagctgtttcttcacaaatgattgggaaaaaattgtttaccaagcaaacgggagaaaagggcagaatatgcaatcaagtattggtctgtgagcgaaaatatcccaggagagaatactactttgcaataacaatggaaaggtcatttcaaggtcctgtattaataggag

SEQ ID NO: 13942 - DNA, 438 bp, Homo sapiens
ccgggcaggtactttttttttttttttttttttttttcaggctttccagctcccgctgtctctgtcgttcctctctttggcgcttcactactttctcataatcattaggaaacatagggtcatattcgtcagctaagggaatcagaacttccccttccaaaaaacccactgggaacaggatccttcagcccagctgctacatgcggtggagtgtccacaatttgccggtcatctgaggagccacctcgcttcaggtcaatgactggggcgaggactgtactgcggcgggtaggcctaggattgtgggggcaatgaatgaagcgaacagattttcgttcattttggttctcagggtttgctataattttttatttttatgggctttggtgagggaggtagtgggtaatttttttgttctaccccaatagatggccgatg

SEQ ID NO: 13943 - DNA, 439 bp, Homo sapiens
  misc_feature 439: n = A,T,C or G
ccgggcaggtacttccaacagtaagtggaaacacagatattcaagttgagatagcactggccatgcaaccattaagaagtgagaatgctcagttacgaaggcagttgagaattttgaaccagcaactcagagaacaacagaaaactcaaaaaccatctggtgctgtggattgcaaccttgaattgttttctcttcagtcattgaatatgtcactgcaaaatcaattggaggagtcactaaagagccaggaattactgcagagtaaaaatgaagagctgttaaaagtgattgaaaatcagaaagatgaaaacaaaaaatttaatagtatatttaaagacaaagatcaaactatacttgaaaataaacagcaatatgatattgagataacaagaataaaaattgaattggaggaagccctagtcaatgtgaaaagctcccn

SEQ ID NO: 13944 - DNA, 420 bp, Homo sapiens
  misc_feature 10, 35, 294: n = A,T,C or G
aggtactttntttttttttttattttttttctttnctttctttttttcttttgttcatttttttgttttttttgttcaaaattcatccaatatttattgaatcgggaacggttgcaaactgttgccacaatcaaaaacccacccatcctgtgcttttttggcttccccttgagaaggatgcctgaggcgggatgtccccccaaactccaggggacaactggggaaaacatggggtttgcaaagagatttgatgaaaccacgggacaggaggagggtggggtggtgtgaattccngggaacacaaatacacacaaactttcccgtttaaaggcaaaaaccgggggcgttaatttttggcccaaagagcagcccagggaacattaggtaaagacccagttgttcaacctagtggcctgcccg

SEQ ID NO: 13945 - DNA, 406 bp, Homo sapiens
ccgggcaggtacgcgggggagacttctccgccgcctccgccgcagacgccgccgcgatgcgctacgtcgcctcctacctgctggctgccctaaggggcaacttcttccccaacgcccaagaccttaaaaaaaacttggaccagcgtggttttcaaggcgaacaacaaccggttaaccagggttatcagtgacctgaatggaaaaaacattgaagacgtcattgcccagggtattggcaagcttgccagtgtacaggtgaaatgatatgttactggtattcgcttcaaaatcatctgagtgtggggtaattgagtacctcggccgttttaaacttagggaatcccccggcctgcaggatttcaaattaaacctattcaaacccgccaccctcaaggggggccccgta

SEQ ID NO: 13946 - DNA, 881 bp, Homo sapiens
aggtacaatatgatggagtctttctctgtcgcccaggctggagtgcagtggcacgatctcggctcacttagaaacagggtttcgccgttttggccaggatggtctcaatctcctgacttcatgatccaccctcctaggcctccaaagtgctgggattacgggcatgagccaccgcgcccggccagaatagtcctaatttttaactcttcagagagtgaaggaataactccaaatagactcccagaagttatgttcagataagtaaaccatcatgcttacattcagaaagttctgcttctcaggtaacttaaatggaaatggaaatgatgagtgctgggaagaggtattaagtagctcaaagaatgcccttggcaataaactggggtctttaacctatgtgaagaatttgaataaaatgttgaaatgtgaaagtgaaaaatgagatatttaaataaaataccaattttaatatatgtagccaaatgtataagttaaagattacccataaatatttgtcaattttattcaaaactttaaattctctgatttcaagttggagttaaaaacataatttaaaattttctttattgggaaatattatgttttgggttgatagaattaacggaaattgtttaaaaatgcaaaactgaggtgggcgctgggctcacccctggattcccaaacctggccggggggcgaggtcaaatttcggccttggctaggggcctggaacatttttctggctaaaaaccttttgttcaagggccatgccggaatgggaatttggcccgaaccaaattggggcggtttgaactaggggatccccggcttgaggatttattataagctatcttatccctcgacctcgggggggcccggct

SEQ ID NO: 13947 - DNA, 504 bp, Homo sapiens
ccggcaggtacacgatcccagactggttcttgaacagacagaatgatgtaaaggatggacaatacagccaggtcctagccaatggtctggacaacaagctccgcgaagacctgaagcgactgaagaagattgggccatagaggctggtcacttctggggccttcgtgtccgaggccagcacaccaagaccactggccgacgtggccgcaccgtgggtgtgtccaacatgaaataagtctgtaggccttgtctgttaataaatagtttatatccgccggccatacgaaggcacctggaaaaccgtcctttttttttatattctgttttttgcgcgcctgctgacttccttggatgtggtaaccgttgttgacgtctcttatacagaatacaaccctgattccctgtaagccctggtcactcatggtggcactgccactaccattgaaagttgattgtgccaaccttcaaatgggttgtcggcgccaccccgagtaccttggtcga

SEQ ID NO: 13948 - DNA, 521 bp, Homo sapiens
ccgggcaggtactgtggcatggcgcagtgggtgacagatggccacatagcggtcaaaagccatggccagcagcactgtggattccatgccagataacgagtggatggcaaacatctgtagcagacaagcatcaaactgatggagtggaattgaaccagaagatggccagcattttgggcatggatgacgtggagatgaggatgtcaatgcctgaaagcatgcaaagaaatatatacatgggctcatgcaggctgtgctcagtccgcacaatgtagatgattgtcaagttacctagcacagcaataaggtagagggagcacaatgggaaggccaaccagaactgagcctcttctaaaccagggaggcctattatgatgaagtatgtagcacgtggattcattgccattgggatccaccatcatgaagaagctgaactgtgaccagcaccaggcaggtagaggctcaaccgtatggaaggaatgtgtgaacccctatgtccagtctttctcccccgcgtacct

SEQ ID NO: 13949 - DNA, 114 bp, Homo sapiens
aggtacgcgggggtcggcgccattttgtctcggcagcggtggccgtagctccatcgcattttatgtttctggcgagaagggaacggagttttcatcaggtagattggtttttgt

SEQ ID NO: 13950 - DNA, 216 bp, Homo sapiens
gtgagctatttttcattagattcggtcccattgcgtgtataacaaaatattccgctctaatcaaatgtaggtattacccgttctgacttttgtaatacatggtttttactctgagggagttatgatgtactgttatagttaaaactgatggtaatcttatatcattgacataattatttcatgtgttaatttgtctctgactatttatacacgtcg

SEQ ID NO: 13951 - DNA, 964 bp, Homo sapiens
agccgatacgactacttagtgcgattgagctccaccgcgtgcgccgcccggcaggtaccgggctcctcacagctccactaggcactgccccactggggactgtgtgggggctccgaccccacatttcccttctgcaccttcctagcagacgttctctatgagggctccacctctgcagcaaacttctacctgaacatcaaggcatacatcaaggcatttccatacatcctaggtggtggtgaaatctaagtggaggtaaccaaacatctaattttgacttctgatcacccacagactcaacccccgtacgcgggggaggacacatccgaataaactgttaaactctcagatatatatggtaaaaaattccgctataatggagacaaaagatgaccgaaatattacggacactattttcataattattccctcaaaatttgtatgaaaaaactccgtaatataatatgtaactaatatcttcgcagatactcgaccaaaattaaccggagtaatatatcgattaaatataatccgtgtaaaatccacgagaaaaattctcggacaaatagtatacagaaatatatctgagatcatattatcagtagatataatttggagtaaaataatgatgaaaaaattagaggaataattaaccgtaaacaattacagggtaataaatatatactattacaactcttctgttaaataatattgtctgaataataatactcagagaaaataactacccgttaattacataggacaatataatagtctaggggaaaatattttgaaggataatattcatctataataatatctttgacgataaaattctcgtgaaatataaactcaggataaaatattacggggtaaaatattaaacgtttacatataccgcagttaattaaacgttggtataatatttgatacataaatcttgcgtataaatatactattaaaa

SEQ ID NO: 13952 - DNA, 859 bp, Homo sapiens
ccgggcaggacttgggacagttacaggcatgctgctattgccatgatcttcgggaagctgaagtgatgagcagcagtgtgtgattctgaggacacagggggctggggtctaggagctatctcaggtgggctcagtcagtgccatcctcccttttggtgcctccctagaagtgctgagaagatgcaaaaccaaaagcttttactccaacattgcttagccaagctaagcacatgcattccctatgattcagcaattctgctcctagcatgtatcccagagaattgtcccatgggtccataggggcatataagaatggccattgcagcaaagttctggttggggtagggggagctgaaagtcatctggtgtccacaactggaggaatggatggataaaatgggatggatgcacaagtgggcagacagatgggtgaaaggatggtcagtccttacatggaccagtttccttattcttaggctaaggattagcatctccaggcaaaaggaaaacgtttctggattcccttggccacggaagtttcgaggaagaaaaaaatggagtccactaatgaagtggtctttgaaggatatggatgggggacacagggccaaaggaggtttgctctgcggggcccatcctggagatgttcagtctttttcgacaagaccacgcttttggttttttgggtgtcacgaggctgaatggtattcccaaatactctgtcgctctaaaattatgattcccccggctgcaggatttaatttatattttcttacccctctcttttgtggggccgacccaattttttccctttaagtgggatattgcccctggtgaatattgtcaattttgtttcttt

SEQ ID NO: 13953 - DNA, 870 bp, Homo sapiens
  misc_feature 142, 143: n = A,T,C or G
ccgggcaggtacttttttttttttttttttttttttttttttttttttttttttttttttttttttttttttttttttggtttttttttttttttttttttttttttttttttttttttttttttttttttttttttttttnngggggggggggggcctttttaaaaaacccccttttttccagggggaaaaaaaaaaaaattttgaaatatacccccggggggctccctttttgggggggggggggtcttctcttaaaacaaaaaaaaaaggggggaaaaaaaaaaaaaggggcaaaaaaattttttatttccccccccccccaggggggggttcaaaacccggggggggaaaaaattttggggtgtttttttaaaaaaaagggaaaaaaaaggggtgggggggaaaaaattttaaaaatttccggggggggaaaagggggaaaaaacccccccccccccacaaaaataacgcgccaccccccccgggggggccccccccccgggtttttcaatttgggggaggcccccccccccctcccacaaaaaaaaaacggggggggttttttgttaaaaaaaaaaaaatccgccgccccccaaaaaaaaaattttggcccccctggagaaaaatttacaaaatggttgttctcccaacaagaatatttttatttcctcccccccccccccccataaaaaaaagagacccccccgcggggggagaaaatatttatagacattttctacacccccccccacgggggggggggccccccaccactttttctcatatgagagaagaaaaagccccccgcgagaaaacagaaaaatatgtctccggggaaaaaatttcctcccaaaaaaaaacaaaaag

SEQ ID NO: 13954 - DNA, 912 bp, Homo sapiens
catatcactactgaagcgactgagctccccggtgggaagccgtccgggcaggtacatttttgtaaaacttcaaagatacttacctagtaatatagtatagaatttatattctgaaagctgtgtccactaaaagattaacagtggttatctctgggtgattttttctgttcttttttgttcatctgtccatttttcctaaaaacagatttctttagtcataaaaataataaaatataaagtattggaaaacagtgaatatttgaatttcattcatttgaataagcattcaaatgaactgcccagtgaacttataaagacagtggatatacttaaaattcttgttgtgaggacataaaatgataggtaaaagttgcattacctctgggactggaagctggaggagtcaactcgatggttattacagagccattgctgtaagggacagccttgacatctgtgaaatggggataaaattagcctagacatgtggagaagatcaaatgaggtattgagtgtgtgagctgtgttaggctggctcctactctctccccttgcactagcagaaccagtgcccagtcagatacttgggaagggctgaaggagggtctcacctgtgcccagaaataagtccagacagctgacagatgggtgccactctttctgggtaatgccatacctgaaaagtagtgtgccccttctcatggattctgcaccctctaaagccccaactgctgcttgtgggctgaaaaccatgatggacttagcaacactgtccccacaagaaaagggaaaattccctctttccctacataaattatcctaactcaggttgtagtacctcgcccgtctaaacttatgatcccccgggccgagggatttatattaacttatcgacccgcgaccccaaggggg

SEQ ID NO: 13955 - DNA, 113 bp, Homo sapiens
ccgggcaggtacgcggggagctgccgctgagccgccggacggacgctcgtcttcgcccgccatggccgagagcgactgggacacggtgacggtgctgcgcaagaagggcccta

SEQ ID NO: 13956 - DNA, 821 bp, Homo sapiens
ccggcaggtacaattcatagggacgaccaatgaggacagggaatgaacccggctctcccccagccctgatttttgctacatatggggtcccttttcattctttgcaaaaacactgggctttctgagaacacggacggttcttagcacatttgtgaaatctgtgtagaaccgggctttgcaggggagataattttcctcctctggaggaaaggtggtgattgacaggcagggagacggtgacaaggctagagaaagccacgctcggccttctctgaaccaggatggaacggcagacccctgaaacgaagcttgtccccttccaatcagccacttctgagaacccccatctaacttcctactggaaaagagggcctcctcaggagcagtccaagagttttcaaagataacgtgacaactaccatctagaggaaagggtgcaccctcagcagagaagccgagagcttaactctggtcgtttccagagacaacctgctggctgtcttgggatgcgcccagcctttgagaggccactaccccatgaacttctgccatccactggacatgaagctgaggacactgggctttaacactgagttgtcatgagagggacaagctctgtcctcaagccggctgagggcaacaaccactcttcttcccttctcacgcaagccattcccacaaatccaaaccataccataagcaacgagacccaaacagtttggctaagaggattgaggactgtttagcctggctttggctgacccatgcaccacacagggtccattctaggtttaacctaaaatggagtgtgtacctgggcg

SEQ ID NO: 13957 - DNA, 444 bp, Homo sapiens
catcgccgtcgcttggcttcttctggactcatctgcgccacttgtccgcttcacactccgccgccatcatggtgaagctcgcgaaggcaggtaaaaatcaaggtgaccccaagaaaatggctcctcctccaaaggaggtagaagaagatagtgaagatgaggaaatgtcagaagatgaagaagatgattgcagtggagaagaggtcgtcataccttaaaagaagggcaagaaaggctggctgcaaccctcagcaaaaaaaaggtgggtcgttttcccccaacaaaaaaaggttgcaggttgccaacaccaagccaagaaaagccagctgtccacttccagggcaaaaaaggcaggcagccaacaacctggccaaagaagacaagttacaccccagccaaaagcaagttaaccacaccctggcaaagaagggaggccacaaccag

SEQ ID NO: 13958 - DNA, 463 bp, Homo sapiens
  misc_feature 33, 39: n = A,T,C or G
gaaatgtcgaacacgtctgcaataccgcgaatnggttcnccaccaaagtgccggccgaggtaccatatcctaaggctgcacagagcatgaggcccagccttgtaaacgatttttccctcctagacctctgggcctgtgatgggaggggttgccatgaaggtctctgacatgccctggagacattttccccattttcttggtgattacttactcaaatttctccagtgggtttgaatttctccccagaaaatggatttttcttttctatcgcattgtcaggttgcaaatcttccaaactttaatgttctgctttctcttgaatgctctgccacttagaaatttcttccactagatatcctaatcatttctctcaagttcaaagttccacagatctctaggacaaggcaaatgctgccagtctctttgctaaagcatagaaagagtcacctatgctccatttccc

SEQ ID NO: 13959 - DNA, 537 bp, Homo sapiens
  misc_feature 267, 268, 321: n = A,T,C or G
aggtacttttttttttttttttttttgatagagatgaggtctcactgtgttgtccaggctggtctcaaattcctggactcaagcaatcctcccacctcggcctcccaaagtgctgggattacaggcatgagccaccacgcccggccacagtattttttaaatgccagttaggttttataaaaaggtagattttttataactcccaacacaagaaatgacagggttgatgcttgcatgacttttggcaaactaaacttccaggaaagnnccctaggttttacaaagatgcttttgaggtgaccattagttcacaaagagatntgtttgcaaactataaccagaacacaggggatgataaaagaatgtaatgaaggaaagaattgaagaccacctggttgaggatgggcacttcttgaaccagggggccttactcctgggagggtcaaagtcctttgagttcccatttgggaggaaggggagtaaacccctccccttctcccaacataagagtttttaagtgccttgaaaacctcaaca

SEQ ID NO: 13960 - DNA, 474 bp, Homo sapiens
aggtacagacgcaagccgtcacacctggttagcttcatttttttgcagagacgagttctatgttgcccaggcaaatctgttaactcctgagctgaagaaagcctcatgcatcgacctcccaaagtgttaggattacaggatcttgccaacacaggagtatctcctgatcaatttttttttgagacgaagcctcgcctttgtcgcccaggttagaatgcaaaagcgccatgtcttttcactgcaacctttgcttgctgggtttaagtgattctcctgcggcagcctcccgagtctctgggatgacacgcgactgccccacgcccggctaatatttgtatttttagtagaaacgagatttaaccacgttagccaaactggtctcgatccgcacgcctcggcctcccaaagtgctgggattacaaaatcggaaaaattattccctagaaaacggcgaaattcaatattaaagctctt

SEQ ID NO: 13961 - DNA, 402 bp, Homo sapiens
  misc_feature 191: n = A,T,C or G
ccgggcaggtacaccaaggtggtgcattaccggaagtggatcaaggacaccatcgcagccaacccctgagtgcccctgtcccacccctacctctagtaaatttaagtccacctcacgttctggcatcacttggcctttctggatgctggacacctgaagcttggaactcacctggccgaagctcgagcctnctgagtcctactgacctgtgctttctggtgtggagtccagggctgctaggaaaaggaatgggcagacacaggtgtatgccaatgtttctgaaatgggtataatttcgtcctctccttcggaacactggctgtctctgaagacttctcgctcagtttcagtgaggacacacacaaagacgtgggtgaccatgttgtttgtggggtgcagaga

SEQ ID NO: 13962 - DNA, 352 bp, Homo sapiens
aggcaccaggtacttttttttttttttttttcgctgggatatcttacagaggaaggaaaaattaaccttttttactttctttctcactttttaaatcagccaaagtcaagcccgtttgccaacctgcatgtccatgcctgtaagcccttctcttggccaaggaagaaaggaagaaatgaaaaaagaaacccaggggtctgtatcccctgattaaacacagcacagctctccaggcagacatgcccggtggcggctcctttgcaccattgacctcaggccagacacctaagcgccaacaatgggacctcggccttccggctaggtttgccccaggctgggcaggaaaccatct

SEQ ID NO: 13963 - DNA, 473 bp, Homo sapiens
ccgggcaggtacgcgggaaggaagttgtggaagaggcagaaaatggaagagacgcccctgctaacgggaatgctaatgaggaaaatggggagcaggaggctgacaatgaggtagacgaagaagaggaagaaggtggggaggaagaggaggaggaagaagaaggtgatggtgaggaagaggatggagatgaagatgacgaagctgagtcagctacgggcaagcgggcagctgaagatgatgaggatgacgatgtccattccaagaagcaaaatacctacgaggatgactagacagtgtattaggaaaagttaaactaaagaaaaaagccgccgtgtacctattcactctacaattacagtttcataatttaaacttggtcaccttctagtagagaggcccgcccgtccaccatgggcagtgccatccgtatatgacacgcgctttccaacatccaacctagaccatgagaattt

SEQ ID NO: 13964 - DNA, 402 bp, Homo sapiens
ccgggcaggtacatgcccatttatgggtctggttggtctctacagaggcagcaaagggaaaggaggaagactttttcccagatctctctaccttaaagcatggagccaagtagcttgtattagtcctaggattccttttctcctgcaaaactggtggtagaaacagtggcatgcgggggatggtacatcacaaaatacattttgatatcccaaagaagcaagacttgcaagtaggcgttttaaacataactaatctacagctacaaagttctactcttgatagcatttacctttttggggagtctcccaggctccaaaggataaaagcagagtagaatcagtataacatatacacagaagtccgtattgtaaaggctataaagatttgcagcacagtgagaa

SEQ ID NO: 13965 - DNA, 402 bp, Homo sapiens
ccgggcaggtactgttcacagtatagataagaaaattaaagaaacttgcccaaggccacaaagccactaaggggtgaaccatgattcaaacttaggtttgtctgtcttcagaagttaacttcctaaccactgaatcatatttcatctgttccactaaatacatttttctggggcttagcaatgccagtttatttacctaagattatcaacaaacgagtggtaataccaggactcaaactcaagccatcaacactaagtcagtgagatcttcatcaccttacactgccccacaataaccccaacagtaaccctgtatacagtcagctgtattcacaggccagacacaagaggaaaaaggagagggaaaaggctactcaggagtcacaggcatagaatgctgct

SEQ ID NO: 13966 - DNA, 411 bp, Homo sapiens
aggtacgcggggggagctggcagagaccagagctgccaccgctgctgcttccaggagtgtgcaggtggcagctgccgctgagcccgcggcggaggatggcggggcttgttccagaaggcttgagggtccccgagtgcaccgccctcccaccaatttctggtttttcctgttggagcccaaggagccagggcagaatgaggaacatgatgtttcttaccgacagttactcatgacgtctccatccaggactgaggggggcatccttctccatctaggactgggggcatccttctccatccagtattgggggtcttcctcctccatccaggacttgggggtcatcctcctccatccaggacctgaggggtgtccttttctgcgcttccttggatggcagtctttcccttcatg

SEQ ID NO: 13967 - DNA, 408 bp, Homo sapiens
aggtactttttttttttttttttttgttttcatttagaaagaagatgaaagtgaaaacagaatagtcagattactgaaaccaaatgtcatcttaagaagcgaccttgtcagcttagctaaatagtaattccttccagtcatattcctcaatccttatctgcttcataggttatattatcaatgacaaaaaggactgtaactctgacatggacaatggctacagaaaacactaatttttgatattaaaattattcttgatggaattggttaaatatactataaaacttggcttataatcaggataaatcttaaacttgagggtctttaaaaatacatttttggcacttacctttcatcttatattactaatgatgggaatctcaaacatataaaaaaagaattcagttt

SEQ ID NO: 13968 - DNA, 406 bp, Homo sapiens
ccgggcaggtacctaactgccgagatcctggagctggcgggcaacgcagcccgcgacaacaaaaagacccgcatcatcccgcgccacttgcagctggccatccgcaacgacgaggagctcaacaagctgcttggtaaagttaccatcgctcagggcggtgttctgcctaacatccaggccgtactggaatgccatcagccagcaggcccctgccatcatctatgacttctatctgtggctcactggaaggaaacccaggcaaggccaagatggctcaaagagcaaccagccacctctgcagcctgccacctcctgctggcaagatttgtttttgcatcctgtgaagagccaaggaggcaccagggcataagtctactcacttatatctgtctggaacataacgctg

SEQ ID NO: 13969 - DNA, 468 bp, Homo sapiens
ccgggcaggtacatttaaaattatcatcataaatttatgtgcccaaacccctcccaccccattccccctgaaaccaactgagctattttctgaattaaatttgaataacgaaataaatttgaataatcaagaaaaaatacacagcttgacagaatgccttttttcaaagcagactttcacaaggttaatggtcgctttgcccctatttttcaagtttttcagggggtttagtttggcttttgtcccaggaagttcaacaagactgggaaatggagttttggtcatccggaatagaaaagggtccagaatttttagatacactttaggggttttcccaatttcacctttgttttacttggggtaaaaagcctggaaaaacttttcctaacttggctcatttttaaaaccaggattcctttgtggggttggaaaggggtcaagcttgaatttttctttggctggcaaata

SEQ ID NO: 13970 - DNA, 415 bp, Homo sapiens
ccgggcaggtacacaatggtttattaaaggaatgtatggcccacatcaacctagcaaggattctactggtaaaccttcctatggccaaaggaaaaacaagcaggagttgagtggctggggtggggtgcaggcaatggagagagggcagaagggtgtagaagctgaaggggtctagaagcttactcctgagtttcttccttctgtcttcaaatcttttacttcttatggccaaagaacccgctgtttcataggctggagatgccctcttctagactgctcgagacagccagagacaggggaggagggaagaaggatactggggaaagggatggcggggcaaacatttaaagctagaagccacttctgggccaatgctaaagtttctgtccctaagcctaaaaaagccagtgtagtg

SEQ ID NO: 13971 - DNA, 401 bp, Homo sapiens
aggtactttgctttagaaaatatcttagtattattacttttgttttccagtaaccttgctaagcttctgaagaacttttctctcatgttttctggttcaatttctgcttcattagtatctaagctactgaggttatcaccacccatgctttgagacatcatgggaaaccacaaaaatgacccattatcttgaagtgggtgtggctctggagattcacattccattctatcttccatagactgaagctgggtgcctaaagactcctttgcagaatccagagggatcatttcttccatagaaacttcctgcccatatgtgccctgtgagacctgctgtctaggttcatcaagctccctctccaaatcttccagcaaagtcaccacctcttctccactctcagg

SEQ ID NO: 13972 - DNA, 403 bp, Homo sapiens
aggtacagaggccggtgggctccctgacatcccttccaggcaacctgaaagtactgaaatagcttatggccctgtgccagggaccttggcccaagctgctgacctccagggtggggagggagctacccccaggagaagagtcactcagacagcagtatgagcaagccagccagcagctccgtgcctgcacccagctcaggggaatcccagggggttcagatgcccaggaaggaaaaggggacagcgctactgctatggaatgagaccaccacttctcctgttgtccttcccagcttctccccaacctccccttttccctagtttataagacaggagaaaagggagaaagcaaaaagctggaaagaaacagaagtaagataaatagctagacgaccttggcgcc

SEQ ID NO: 13973 - DNA, 412 bp, Homo sapiens
aggtacctctttgcctgtgggcctttttccccctagacatggtggcatacacaataagtgtgtaggaaaagccagaagtgccacaaagttaatgtcttggaagcatctgtattccaatgttaagcaaggatttggtggatgaaaagcacagtttcctttccccttgatgggaataactcttagttatatctgacactgtcttccagactttcccagcaaaactgagctccagttgcccagatgggtaaccagcttgaaaattcatactttattccttccctgctctgtctactttactactccattcccagtatctaataatttgatgatttttaacttccagtataaactcttttacaagaagccttgcctcaggatcggtttttagaagtgccaagccaagccaggttgt

SEQ ID NO: 13974 - DNA, 222 bp, Homo sapiens
aggtactctggatatgggaggagctcagggttgttggctaagatgtaattttaaggaaacactttatatttcataccaagtaagaatttcaatggcaatgaatattaccacatagctgtatactgtaactcagggattctgtcagatgagtgcaaacattacccgtgctgtaaccatccagagtcccagggtcacatttggcagccaaaagtacctggcccg

SEQ ID NO: 13975 - DNA, 215 bp, Homo sapiens
tccccttttacttgagggggttaaatttgccgcgccttgggcggtaaatcaatgggtccattaggcctgtttttccctgggtgatgaaaaatttggctttattcccggtttcgccaaatttgtcccacaaccaaaccattaactggagcccccggggtaggccatttaaaaggttgtttaaaaagccccttgtgggggggtgtcccttaatattg

SEQ ID NO: 13976 - DNA, 419 bp, Homo sapiens
ccgggcaggtaccaaggattttctattgcagcagaccatgctacgagtgaaggatcctaagaagtcactggatttttatactagagttcttggaatgacgctaatccaaaaatgtgattttcccattatgaaagtttcactctactttttggcttatgaggataaaaatgacatccctaaagaaaaagatgaaaaaatagcctgggcgctctccagaaaagctacacttgagctgacacacaattggggcactgaagatgatgagacccagagttaccacaatggcaattcaaacccttgaggtttcgggcatattggaaatgctgttcctgatgtatacagggcttgtaaaaaggtttaagaactgggagtcaaatttgtgaagaaacctgatgatggtaaaatgaaaagcctgggat

SEQ ID NO: 13977 - DNA, 417 bp, Homo sapiens
aggtacttttttttttattttttttttttttcggagagatactcttgttctattggccaggatggattgcagtggtgcgatctcagctcactgcaacctccacctcctgggtttaagcgattcttctgctttagcctccctagaaactgggattacaggcacacgccaccttgctcggctgatttttgtatttttagtaaagaacagggttttggttgttgcccatgctggtcttgaacacctgagcctaagtgatccgcctgcctcggcctctccaaagatttgggatttcaggcgggagccacttgacctgggccggcttttcaaattttaaaatagccccaaacctttcttggccccaaagggaaacaaggttgaaccactgcctaacttttttaaagggccaaattttttgtt

SEQ ID NO: 13978 - DNA, 496 bp, Homo sapiens
ccgggcaggtacgcggggtccagagtgcttgctaccgtgttcggagtctcgctgcctccctcccgcgggggtttctcctctttttgaaaattccgtctgtgggatttttagacatttttcgacatcagggtatttgttccaccttggccaggccttcttggaaaagcctggcccccccgtgtgggagggacggaacccgacttggacctggtccacttaagtaccctcgggccgctcttagaaactagttggattcccccggggcttgcagggaatttcgattattcaagccttattggatttccccgtcgaacctccaaaggggggggcccccgggttcccccaacttttttggtttcccctttaagtggagggggtctaaattggccccccctttggccgtaaattcaatgggggcaattagcctgggtttctcctggtggtgaaaaaactgctttttatccgccttcaacatattttgcactaaatataaatt

SEQ ID NO: 13979 - DNA, 445 bp, Homo sapiens
aggtacttttttttttttttttttttttttttttttttacttttttttttttttttttttttttttttttttttttttttaaaaacaagcaaattttattaaaggaaaattttgcaggtttaaggtttgcaggggaaattttgtaggtgaaaaggtttacttttcaccaatttggtttgggcttgcttttaatggaggtcagaatcccccgggaacaatgattgccagggggcccactttgtaatattttccgcatgctgggcccatttaaatacccggcgtaccttgcccgggcgggccgttttaaaaactaggggattcccccgggcctggagagaatttctatatcaagccttatttgataacccggtcaacctttgagggggggggccccggaaaaccagacttttttgttccccttttaggggaggggttaattggcccc

SEQ ID NO: 13980 - DNA, 418 bp, Homo sapiens
aggtactcaaagacgaatcatgaaaaagaaaaaaaactttatttcaaacaggttcagtgatatatgtgtgtgctacagcaaaggctggttgtggcaaagtttcatttcaaactgtatgatgtgggctgggcaaggtggctcacgcctgtaatcccagcactttgtgaagcccgaggtgggctgatcaccctgaggtcaggagagaccggcctagccaacatgctgaaaccccgtctctactaataatacaaaaattagccaagtgtggtggcgcgcacctgtaatctcagctactcgggaggctgaggcaggagaatcgcttgaacccggggggcagaggttgcagatcacgccactgcactccagcctgggtgacagagccagactcaaaaacaaaacaaaataaaacaaacaaaaa

SEQ ID NO: 13981 - DNA, 425 bp, Homo sapiens
aggtacaagggaaaaacctgtcttgggcaggctgggggggattcttctggtgagtccccagcccaccctgagtaacacaaccagataacagtcattttacacccaggtgcacatgagcacagcacacaaacacacacacacacactcacacacacacacacacacaagttgggttgagctcttcttccagggagggtcctgggtccagtcacagtatgagggtcctctctcttctgaatatcatcccagtagtggcagcagagagtacacttcagtgatctaaaacaccacaatatccaacatacacaaactctcagggaagggtttagtaaacacacacaatgattggaatcatggttgctctttgctcctgaatggaatggttcccacagaaaaaagcacagggatacaagcacaacataagg

SEQ ID NO: 13982 - DNA, 164 bp, Homo sapiens
gtgatggggcagacatggtgggtcctgacggccttgtcttcaccaagtgctcctaactctcagcaaacttggggttcatgaccgtcgtggtggcgctcttgaaaaggggattatcattgttccactgggacttgagcttctccttctcaaagcgcctgtacctt

SEQ ID NO: 13983 - DNA, 547 bp, Homo sapiens
ccgggcaggtacgcgggatgatagacacaatgaaatccacccccaaagaggactacttcggatacaatcacagcaaccctggccttggccctgccctgtccctgccatgcaacttcacaactcagctggcctagacccctgggaggcctccaagtcccttaaccgggttcccgttttggtggaagtccccaggccaatcactgtgttccacatagatccgaaaccccaaccacgttgggcccagttatcaatcagtctaccttccttaacagttgctacaacaacaacggcttccccagtccccagacttgttagccttcttggggcccttggaaacctaattgaaagaacacttcagttgccttctctcagtaaccttcaaaccattttgcgggaccattcttgagttttcccttggaggctctccaaccaaactaatgtgtccacaggagaattgggttgggaggtaacaaggtctactttcaccttaagtatcctttggtagggcccccctaacaccatagaggatcggggctatactccagcg

SEQ ID NO: 13984 - DNA, 503 bp, Homo sapiens
aggtacattgtgcaatgacagtcacaatcaattcctcagcgcacccatcgccacggatacgatacattagatattctgaacttgctcatcttaggacttcacattggtgtcagtgttttctgacaaatcacgtgtatcaggaatgaatgagggaggtgtggcttggttaatgtcttattatctttccttccaggtccacgtttgctcttaccttctccagtgttgcttgctctccacacacttgtcattacacttctattctctacactactggactttacacaattacatcattattccgccctcctaagtaaaatttctcaatggatattcatcttgaaacccttgcctgtttgtgtctgtatggcattttatttgaagctgttttcacctcccttatcttggtaaggggttcagtatgtttcacccttgctactgttgccgggtcctgttttttatgaaatctttatgtgaatttccctactgttatctatttgtggata

SEQ ID NO: 13985 - DNA, 417 bp, Homo sapiens
aggtactttttttttttttttttttttttttttaatgaacaaatatttatttatcttttataacaagtaaggcaatgttgcttaaaggaagacaaacaaacataaaagattccgttgacaatgcattttttcatctgttcggcacaatgcttttgtcataatggagatgtgaccccaaaattttccaggacattcagtttttgggggcagcacttagggcagatgactggccgcttatagatgaggccaaagcaccaggtagggggaaggttcttgtatcggttcgaaccccgacagcgcgccaacagacaacacgaggcagtggggagcaacatgctgttttaatgagcgcctgggtgcaggcgtgctgaggctgaaaatggcatcagcccccgcgtacctgcccgggcggccgtt

SEQ ID NO: 13986 - DNA, 309 bp, Homo sapiens
ctcggcctcccaagtgctgggattacgggcacaagccactgcacccagccacaaacagatcgcagatccaggtttctcaaactggagcatctgcttaattttcccataaaatcagtcttattctttctgacagctctgagactcctccggccacgactaggtgctgtcctggaggaaacggtggaggacggccgcacaaaaaccaatctacctgatgaaaactccgttcccttctcgccagaaacataaaatgcgatggagctacgaccaccgctgccgagacaaaatggcgccgacccccgcgtacct

SEQ ID NO: 13987 - DNA, 508 bp, Homo sapiens
aggtacgaagccatcgacagcagagatggagcatcttgtgcagagttggtgtcttttaaacatcctcatgttgcaaacccacgacttcaaatggcctctccagaggagaagtgtcaacaagtcttggaacccccttatgatgaaatgtttgcagctcattttaaggtgcactttatgcagtgggggaattattgactttcttagaaggcattacaagtgccagacccgggatagttccaatcatttcttgccaggcatttcccaggccccacaaaagaaagaaaacctggggcttctgccctggtcattgtattgcaggtaagccgctttggcccctttcgaggtggttttggccaaataaatggccagattcaaacaaagtttgggttaaaaagaaaagggaaaaaaaaagccaaaagtttgtgggggaccattgtttggggaaaaaaaggccaggccagtaagtttaccttggattgaagcctggtttttccccggggttcttggg

SEQ ID NO: 13988 - DNA, 420 bp, Homo sapiens
aggtacgcgggtgagagggtctgcgtttcttctagagctcctacctcagtggtgtgcacagagttggagacacctgagggctggtccacgtctcacctttgccatacgggtcatttcttgatcaaatatatgactggggtcctggtttactcccgcccaccgtttcttttaaagttttcttaacatgaaatccacaaaagcggaaacaatgaaccattcttgcactttacagaatcattgtccttagctttagaggttgttaatttcttgtttttaacatgaacagaatgtgtggttctgaaggtgtgtgggggttttcaagaaattgtcctttggggccgggcgcaaatggctcacgcctgtcctgccccgggcggccctttttagaactagtgggatccccccggtctgtaagaattt

SEQ ID NO: 13989 - DNA, 883 bp, Homo sapiens
aggtacctgcccacagccttggtccctgggggctagactgctcaactgtggagcaattcattatactgaaaatgtgcttgttgttgaaaatttgtctgcatgttaatgcctcacccccaaacccttttctctctcactctctgctcactcagattgactttcaatagtttttctaagacctttgaactgaatgttctcttcagccaaaacttggcgacttccacagaaaagtctgaccactgagaagaaggagagcagagatttaaccctttgtaaggccccatttggatccaggtctgctttctcatgtgtgagtcagggaggagctggagccagaggagaagaaaatgatagcttggctgttctcctgcttaggacactgactgaatagttaaactctcactgccactaccttttccccacctttaaaagacctgaatgaagttttctgccaaactccgtgaagccacaagcaccttatgtcctcccttcagtgttttgtgggcctgaatttcatcacactgcatttcagccatggtcatcaagcctgtttgcttcttttgggcatgttcacagattctctgttaagagcccccaccaccaagaaggttagcaggccaacagctctgacatctatctgtagatgccagtagtcacaaagatttcttaccaactctcagatcgcttgagcccttagacaaactggaaaagaaggcctccaaagggatcaggcaagctgggcgtcttgcccttggccccccagagatgataccctccccagcagtgggagaagtttcactttcttctttagagcagctaaaggggctacccagaacaggttgaagagaaaactcaattaccaggggggaagaatgaaggcctt

SEQ ID NO: 13990 - DNA, 433 bp, Homo sapiens
ccgggcaggtacccagcacatctcagagagatggaggcaagctgggttcctgatgatttccagctaatacaggtccttcctcctgcatgcaggcgccccgtaacgctttataacagacgcctctagacttctgtgggggtaaagtgaaggacccaaagcgacacaagtagtgtctgttcacacttccactttcaaagctaactactagctgttcaaatatactccatacagctttcagcaaatcaaagtgtttacctctcccacaccaagggaagaaaagatgcagactgcctttaaagcacctgtcagcaaggcgagggttttaaagatcagccttgagaatcaaagcagcagcagaagtgtcattactccagtgctctcccttcccgttcgtgggtcacacagagacaggcacatccccagcgctttgcaa

SEQ ID NO: 13991 - DNA, 435 bp, Homo sapiens
aggtacatgctgcttgaattttcatcatcatcctccactccttccacctccaagaaaaaaaaagcgtgcaggaagtagcatttcagatccttctccaccacctctgcttcccttctcccttcttttcctccttgcagcattccctttagtacgcggggaggcattgaggcagccagcgcaggggcttctgctgagggggcaggcggagcttgaggaaatcgcagataagtttttttctctttgaaagatagagattaatacaactacttaaaaaatatagtcaataggttactaagatattgcttagcgttaagtttttaacgtaattttaatagcttaagattttaagagaaattatgaagacttagaagagtggcctctaagaggaaaaacccggggtggcctggtaccttgcccgggcggccgcttttagaa

SEQ ID NO: 13992 - DNA, 353 bp, Homo sapiens
agcctccgctcaggctggcagccccagctctgcacggggaaggcaatgttctgtccttcagcagaagtcatacaaaataaggatccaaagtgaactcaagaaaaaaaaaaacaaaacaaaataaaccccaacccctacagtggcccattctgcagatacggattcgcgaaaggaaaaatcagagggaagaggctaaaatccctcagtctaccccgcgtacgcgggacccactccctcttagccaatattgtgcctattgccatactagtctttgccgcctgcgaagcagcggtgggcctagccctactagtctcaatctccaacacatatggcctagactacgtacctgcccg

SEQ ID NO: 13993 - DNA, 433 bp, Homo sapiens
aggtacagcaaaatcaaccttacatctcaaccaaattttgggagatcagggactctctgcaggggagaagctccacaacctcagcaaattatcctattggtttgggcaattaaaacagcccaggttggtatcaagcaatgagatttatcaaaggtcaggaccacctttgtaatgtccttctcttttttatctttattcgcatagtctgttttgtcagaaagtaggagtgcaacacctgcttttttctgttttccatttgcttgaaatatttttctccattcctttattttgagcctatgtatgccaccgcatgtgagatgggtttcttgaagacagcatactccagtgggtcttggttctttatccagcttgccccatgtctttcaatgggagcatttagcccattttccccgcgtacctgcccgggcggtcg

SEQ ID NO: 13994 - DNA, 876 bp, Homo sapiens
  misc_feature 14: n = A,T,C or G
ccggcaggtactcnattatttccattccctttatgttttggaggttgaatgcagggttttattgagtggtggaggtggttctctgaaggatggatgcatagctggaagcggggatggcacgggaagataatcttcctgctgggtggcaaacctctccgaccaccctcggctgaactcctctcggcgttcaaatgttcctcttctctctttctctgctgtatcgtttcaccattcatctgcttgtctgggatggagaagacaactgtttgctcatttgcttggcgataggtgattgtctcgccgctcagctataggcgatggtctcaccactcggtgataggcgattgtcccatctaggtcgccaaaatgtgtctggaattggtgggttcttcgtctcactgacttcaagaatgaagccgcggacactcgcagtgagtgttgcagttcttaaaggcggcatgtctagagtttgttccttctgatgttcggatgtgttcacagattcttccttctggtggggttcgaggtctcgctggctcaagaatgaagctatggacctttccggcgttacagctcataaaggcagttgggaccccaaagagtgcgcccggatcaagatttattgcatagaccaaagaacaaatcttcggcgtgtggaaagggaccccagcaggttcccccattccctcggcaatttaaaactatgggtaccccgggcggaggaatttgattcaagctttttttcccgtcgaccttggggggggccggaccaaacttggtcctttaggggggtaaagcgccctgggtaaaatggccggattttcctggggaaatttttcccctacattcccccacttaaaccgggacataaggtat

SEQ ID NO: 13995 - DNA, 163 bp, Homo sapiens
tccctcttaatcatggcctcagttccgaaaaccaacaaaatagaaccgcggtcctattccattattcctagctgcggtatccaggcggctcgggcctgctttgaacactctaattttttcaaagtaaacgcttcgggccccgcgggacactccccgcgtacct

SEQ ID NO: 13996 - DNA, 421 bp, Homo sapiens
aggtacagttggaatccatggcagttttatggaggccaaatatatcagatgaataggctaatttccctgagttgctggccttattagtccctactctgttgccccctggttacctaatgcatgttcaaaaggtatagttttcatcacctgcttgatcttgattttcagacagcatcaaatcagttgcaaaacaaatccaagctaaaattttgagtgtatgattaatttactatagcatgtaattatgcagtattttattttttgttttttattttttttgagacagggtctcgctccattgcccaggcagaggttgcagtgagctgagatcacaccactgcactccagcctgggtgacagagcgagaccctgtttcaaaaaaataagaaataaaaagtgagtcttcatattcaaattagta

SEQ ID NO: 13997 - DNA, 377 bp, Homo sapiens
ccgggcaggtacaatactgaggcagcatactctggtccagcccttctatttgtttcagcttctcacatactgcatccacattcagtgaattcagtaataccactgggcctggggctgggcctgaccctaggccattgttctgatctctgggcaaactcgtttttactgatggacgtgaagatgagatgttgggagccgccagggtaataccttggcgtgtaaaggtatagggcaaagaatggcctgttgtagaagggatgctgagggcccgtcatgccgctgtaatagctgctgtgaggctgtggtgacaccactccacctgcgaagggcccattgaaggacgtggaagagcacacggatgggggctggctgtacct

SEQ ID NO: 13998 - DNA, 153 bp, Homo sapiens
aggtacgggggacggggaatcagggttcgattccggagagggagcctgagaaacggctaccacatccaaggaaggcagcaggcgcgcaaattacccactcccgacccggggaggtagtgacgaaaaaaaaaaaaaaaaaaaagtccctgcccg

SEQ ID NO: 13999 - DNA, 415 bp, Homo sapiens
ccgggcaggtacaagccttgaacatcgtcctgcttcccagtgggttcagacctcacctttcagggagcgacctgggcaaagacagagaagctcccagaaggagagattgatccgtgtctgtttgtaggacggagaaaccgcttgggtaacttgttcaagatatgatgcatgttgctttctaagaaagccctgtattttgtgattgcctttttttttttaagatgctttcattttgccaaaataaaacagataatgtggatggtttaagggttatagtattatagtttaaataataacaacaaaattcttcccaggaactctgctggaaggtaaattaaaatacttgtttttccattggtaaaatattgttgcactctgtgaaccaaaagacagtctaagttggaggacatagaac

SEQ ID NO: 14000 - DNA, 323 bp, Homo sapiens
aggtactctcactgttccagcttccagcccaatcctagcagaatgaatgcattttaaaatcagtccacattcacatgtgctgagaaggttgttagtggtccctcatctgggcaaagcagacccaagatggtgctgagtgcagagtgcagagcattcttgtgctctcctctcatggctggaactatctgggctttgcgccctggtccagtgctacgtatcaaccccctcaacacgcctgtggctctgacacggggggatgaattaacttgcctctgttcaaatatacagacttggtgaggctgtcttttgttagtacctgcccg

SEQ ID NO: 14001 - DNA, 420 bp, Homo sapiens
ccgggcaggtacttgattctgtctgtgtcataattacacatttacttgaacacagctatcctttatcttgtgctttctttaatagaaaaatgaacagaaactgaatgcagttaaatttttatttttagtaggttgtgaagttacttttactggagaaataaaaatatgttaaacttgattgactttttaagataaattgttaacacttttgcaggattagaattaatatgaagtatctctttaacattattgtatatattacctactgcaaacctatctgttctgtttctttgtgatttaaagaaaaataggccgggcattgtggctcacgcctataatcccagcactttgggaggccgaggcgggcggatcacaaggtcaggagttttagaccagcctgaccaatatgatgaaaccccg

SEQ ID NO: 14002 - DNA, 138 bp, Homo sapiens
atctcacactaacaatacctaggccgtggagacattaaaaatgttaaaggccttggggttgccctaatggagttgaagctaaccttcacaattaatttggcgttggcggcttcacttgcacccgcttttccaagtcgg

SEQ ID NO: 14003 - DNA, 409 bp, Homo sapiens
ccgggcaggtacgcgggggttttacagtgtgttgctgttggaagccctattcctcactaccagtggttcaaaaatgaattaccattaacacatgagaccaaaaagctatacatggtgccttatgtggatttggaacaccaaggaacctactggtgtcatgtatataatgatcgagacagtcaagatagcaagaaggtagaaatcatcataggaagaacagatgaggcagtggagtgcactgaagatgaattaaataaaccttggtcattctgataacaaagagccaacaactgacacaactttggcaaaagacaagggtgcccttttgataggaaatatgaattaccgggagcaccccaagctcaaagctcctttggtgggatgtgtaccctccgggcggtcttgaaca

SEQ ID NO: 14004 - DNA, 419 bp, Homo sapiens
aggtacgcgggaagcaggtggtaacaacgcagactacgcgggcagctagagcagtgatccatcatggagttattcgaatttatacaagccctggccggctgcagtggcacacacctgtaaccccaccactttgggaggccaaggcaggcagatcacttgagttcaggagtttgagaccagcctggccaacatggtgaaaccccatctttactaaaaaatcaaaaattagcttgggcgaggtggcaggtgcctgcaatcccagctactcgggaggctgaggcaggaaaaatcacttgaacctgggaggcggatgttgcaatgagccaagattgcaccactacactccagcctgggtaacagagcaagactctgtctcaaaaaaaagggatttattagaagcccttccaagaatggttagg

SEQ ID NO: 14005 - DNA, 413 bp, Homo sapiens
aggtacgcgggagtttttgatttaagttgcagttatagccaatttaggctaatgcttggttttggagcttttatacacaacgtttttgttaggcatcacagttttgcaacctctgctccaaagagaaaaatagaatgagttttctttcttttttttttggagtcagagtctcgctctcttgtccaggctggagtgcaatagcgcgatctgggctcactgcaacctccgcctccctggttcaagcaattctcctgccttgcctcctgagtagctgggattacaggcgtgtgtcaccacgctcggctaatttttgtatttttagtagagacagggtttcaccatgtcaagctggtcttggactcctgacgtcgtgatccacccgccttggcctcccaaagtacctgcccgggcgg

SEQ ID NO: 14006 - DNA, 413 bp, Homo sapiens
ccgggcaggtacctgcagtcagatgatgagatggagctggaggagacagaaccgcccctggagcctgaggatgccctatctgacgccgagtttgagggggagggtgactacgaggagggcatgtatgctgactggtggcaggagccggatgccaagggtgacgaggccgaggctgagccagagcctgaactcgcatgagaaggggacaccccacacccctcaagcttgggaagcctggtgccgatggccccaccctcaccagtcctgggcagcagcaagaactatttattaaaaacttaagatgggccaggtgcggtggctcacacctgtaatcccagcattttgggaggccaaggtgggtggatcacttgaggccaggaatttaagaccagcctggccaacatgatgagacc

SEQ ID NO: 14007 - DNA, 529 bp, Homo sapiens
aggtacttttttttttttttttttttttttttggaatgaacaaatatttatttatcttttataacaagtaaggcaatgttgcttaaaggaagacaaacaaacataaaagattccgttgacaatgcatttttatatctggttcggcacaatgcctttttgtcataatgggaaaatgtgacagtcaaactttttccagtgacaatatgtttctttctggcgggcaggaactttataggccaaaatgatttggccccgtttaagaattcttcttaatcttggtttttaaagaacaggtgtgtaaaaaagcttgctttattaaaatggaagggccaaaattccacccagggtttatgttgtgtaaagggtaatctttgtatttttgggtctaataaaaactatgtaaaatggacggtggcccaatctaggaaccaattatcctttggcctaagtatcgtaaaggcttaaaaaggactgttgattataaattgaagacccacttattttttgatatggcgctatcatataagga

SEQ ID NO: 14008 - DNA, 415 bp, Homo sapiens
aggtacacaattaatttatttgtaaatactaaatgtttccttttttcattactcatatatttttttcttgccttactacactgcctagtaaaatatataaaatatgtgcttcacggaaaggggactttgattaaggacatgcctccttcagagctttttcttttccccctagtatttccaacttggggatgtttggcatcgacgaatttactgcagtgattaaccctcctcaggcctgcattttggcggttgggaggttccgacctgtgctgaagctcactgaggatgaagagggaaatgccaaactgcagcagcgccagctcataacagtcacaatgtcaagtgacagtcgagtggttgatgacgaactggcaaccaggtttcttaaaagttttaaagcaaacctataaaatcc

SEQ ID NO: 14009 - DNA, 405 bp, Homo sapiens
aggtacatagtgtcgcgaactcaaatcggcatttagatagatccagtggtttaaacggcacgtttttgcttataaaaaaagtgcaaaaaagatgtggtttacaagttaaagctacagaatccctttttgctgtaattgcaccagttttaaagcctctggacagagcagtatttcgtttaaaactttgtttttcttaaaagcttacagtgtttggctaattctcctcccctttttacaagacgggggccggagggtggacactggtggcaggttaagggatactgtcactttaagaagcctgcagattgaagtgtaaacatggagaaattaggggctgattttttaaactgtgtgagatattaaccagccgccctgttataaaatcaagaaatccaaacagcgatt

SEQ ID NO: 14010 - DNA, 333 bp, Homo sapiens
ccgggcaggtacctaacaaacccacaggtcctaaactaccaaacctgcattaaaaatttcggttggggcgacctcggagcagaacccaacctccgagcagtacggccatcttccagctgcttgcctgcaaagatgagcctctgctggtcggggggaatgccttccttatcctggatcttggccttcacattttcgatggtgtcactgggctccacttccagggtgatggtcttgccggtcagggtcttcacgaagatctgcataccacctctcagacgcaggaccaggtgcagggtcgactcctttgggatgttgtagtcagaaagagtacct

SEQ ID NO: 14011 - DNA, 409 bp, Homo sapiens
ccgggcaggtacttttttttgtttgtttgtttttttgtttttgagacaaggtctcactccgttgctcaggctagaatgaagtggagcaatcacggctcactgcacctcagtctcctgggctcaagcaatcctcccgtgtagctgggcctacaggcatgcaccactaatttgtttgacttttagtaaagacagggtttcaccacattgtgcaggttggtctcaaaactcctgagctcaagtgacccacctgcctaggcctcccaaagtgcagaaccagattcttaactgccacagactcttgtattatgtaatttatatacagaacacaaagcacttgatttgcttaactgatgtacaagccaaattgcgttctggtttggccataagctccttgggccaatgtgttgag

SEQ ID NO: 14012 - DNA, 412 bp, Homo sapiens
aggtactgaagagtaacaaaaatgatagaagcttttgccgttatctcaaacatgagccccagcaggaagaccatcgccacacatgagacgatgtccgcgtgattctgcaggacgaattcgtggctcatcactggggggctcttggtgcttttcttgcgattcgccatggtggggccgccgcccgcgcctgcaggtcccgcgtgctcagattgcaccatgctcttagactgtcctagggattgggccaggaccagcagacctaatttgacaaagtcactggtcacctagaactttactaggtggactttgatatgacaacaacccctccatcacatgtgtttgaagcctgtcagattctaacaacacatgctgaatttcttcacccaacttaaatgttcttgagatgaaaatc

SEQ ID NO: 14013 - DNA, 415 bp, Homo sapiens
ccgggcaggtacattaagaattttgtgggaactgacagaagaggtcttgctcatgtttgggtgggcatggggaaagaggcgtcagggaacacttcatttctactctgagactgaaaagacaagtatgagttacagagatgatggggaggatatagacacgtgtttcaggtatttgtaaatgctgaggagaaagagggtgattcattcaacaattcaggcttaagtatgagataaagacatagaaagaaaattaatgagtgctgaggaaataggaagggaccagaaaagtcatattcgaattgcattttgagagtaatggaagaagagtggaggcagaccatttaattttttgaaccatttaaggagggctatttttttaaaaaaattcatgcttggcagaaacacaggacctcgg

SEQ ID NO: 14014 - DNA, 433 bp, Homo sapiens
gcgcccggccaggtactttcataattcagaagggaaaagtgaagtctcacattatgcctgcaaaattttcttcctgccccttgaactctgatgaagaagtgaataaatggttgcatttttatgaaatgaaagctcctttggtttgtctaccagtttttgtctccagaaacccggggttggatttgcgactggagcacactcatttttttagtcgtcatggagaaggtggacactaccattatgacactactccagatatagtggaatattttggatacttcttacctgcagagtttctctattcgattgatcaaccaaaaagaaacgcatttcaattgggcgaaaattaaatcagctgatacttaatttagaaaaagaaattattaaagggtaatttaattgattggacttattaattattactgatattaag

SEQ ID NO: 14015 - DNA, 406 bp, Homo sapiens
ccgggcaggtacgcgggatcacgacgcaggtctcgtgccaatcaaaacgtcaacgctgttcacagccattatacacgtgcccaagcaaatagtcccagaccagcaatgaactcccaagctgctgtacacggggaaagatgtcactgtcttgcagaacactgatggaaataacaatgaggcatgggctaaggatttgaagctggcagactttgcgctgctgtgcctcgatggcaaacggaagcctgtgactgaggctagaagctgccatcttgccatggccccgaatcatgccgtggtgtctcggatggataaggtggaacgcctgaaacaggtgctgctccaccaacaggcttaatttgggagaaatggatctgactgcccggaccaggtttgcttattcccatct

SEQ ID NO: 14016 - DNA, 421 bp, Homo sapiens
gtgcctcttcgttaatgacctggcagcttgtttctcagctgcagatttcttttgttagtgtttctgccattgccagaggcatttctgttgaacctggcatctgttagtaaactttctccaaaacaaagctaatttaggttttgtagcatatgaagcccttctagctctttccacttttgattttatttcatccctaaattgccatcgtattgaggtcatttttaactatttttttcccaatgatttatttttcctagtgtatttttttttctcttggaatttgacctagggcatgtgtgcatgagttttactcgggacactttctattaataccccataacttttccaattgtgttctgccctctttccatcctcccacttcaacttcttggtctaagttgaatatgaactttcctttgct

SEQ ID NO: 14017 - DNA, 415 bp, Homo sapiens
aggtacttagggtaagcattaacaatattattcaaaatgttatatagagttcaactgtatacaatagagcatttattaaagtgtgtccaaagcgcttataaataaagcatcttcgaggcaggcggctcacttgaggttaggaggaaagcagactggccaacatggtgaaaccccgtctccactgaaaatacaaaaaaattagccaggcgtcatggcgcacctgtagtcccagctactggggaggctgagacacgagaatcgcttgaacctgggaggtggaggttgcagtgagccaagattgcaccactgcactccagcctgggtgacagagtgggactctgtcttaaaaaaagaaagaaagaaagagaaataaagcatcttatgtaggaagtatggagaaataaaaaatgaagca

SEQ ID NO: 14018 - DNA, 419 bp, Homo sapiens
ccgggcaggtacatgctaagacttcaccagtcaaagcgaactactatactcaattgatccaataacttgaccaacggaacaagttaccctagggataacagcgcaatcctattctagagtccatatcaacaatagggtttatgacctcgatgttggatcaggacatcccgatggtgcagccgctattaaaggttcgtttgttcaacgattaaagtcctacgtgatctgagttcagaccggagtaatccaggtcggtttctatctacttcaaattcctccctgtacacgacatctgacttgggaatgcgcaagcagtcgagagcttcgtagaactctcccagttgctccttggtcgtctctggcttgtcagcatagacagacagcccccagttcttctcatcgttcacgtcaaaagcaag

SEQ ID NO: 14019 - DNA, 114 bp, Homo sapiens; identical to SEQ ID NO: 13949

SEQ ID NO: 14020 - DNA, 398 bp, Homo sapiens
aggtacttgtatggttcacagagcagcagctatggcgtcacttggggagctgttagaaaagcagaatctgaggccctactctacacctactgaatcagagcatgtattttataagatccttaggtgattcacatgcacgttacatttttaatggttttaataaattatacttgagaaataataaactgcatatatttaaggtgtccagcttggctcagcctggtggttcacacctgtaattccaggattttgagacactgaggtgggaggattgcttgagtagctgagactacaggcgtatgtcacaccaggctaatttttgtatttttagtagagacggcattttgccatgttggccaggctggtctcaaactcctgacctcaagtgatccacctgc

SEQ ID NO: 14021 - DNA, 208 bp, Homo sapiens
aggtgctgaagatgtcccctcgctcagagaagtattcttgatgacgtagtctgtcacgtccttcgacccacatgttcacacgcacgatggctttgacgtaggcgtcccctgttcatgggctctagtgaatccctgccatctaatctatacactctcttgtgcgacgctcccgtgccggcacaattcaagtcttaaacgccccaaccca

SEQ ID NO: 14022 - DNA, 397 bp, Homo sapiens
aggtacacagtatcaatatgatttatcactgttgatgttaaccttgatctggcttggtagtatttgtcaggcttctccactgggaagttatttggttttgtccttttctgtattgtattcttgaaagaaagtcactgtgtgcagcccacacttaagtagttgtatattgtgctccccctcctttagggtggaaaatctataaattatttggaattcttctgcataggacatttgtttcttcagtttcatttatttattcagtcatttatatgagtgcgtagtcataaatatttattttatactttaacttagaatctaatggtacattttattacccttcagatctttgggaatacttaaaaatcctaaccattaagccttttcttttccttcagag

SEQ ID NO: 14023 - DNA, 396 bp, Homo sapiens
ccgggcaggtacgcgggggtctgccgcggtggccgggtgccgatttgacaagatcaaagctgcaggaaaatggacagtgaggttcagagagatggaaggatcttggatttgattgatgatgcttggcgagaagacaagctgccttatgaggatgtcgcaataccactgaatgagcttcctgaacctgaacaagacaatggtggcaccacagaatctgtcaaagaacaagaaatgaagtggacagacttagccttacagtactcgtcttggtgagagcgtgagctgctgagatttgggagcctgcgctaggcccgcttggagttctgagccgatggaagagttcactcttgtttgcacccgcggtgatgcgtgcttttcgcaagaacaagactctca

SEQ ID NO: 14024 - DNA, 492 bp, Homo sapiens
tgggaggtactataggagtcgcgcttatgactattgggcgaatcgcagctccagcgcggtggcggccgcccgggcaggtacgcggggaggcctttccttacctccctccatgctgtccacttcctctgtaaagctctcaaccctgtccccttccccctctctcctgggaaagagccctcccatgcctagctgctgctcttagggaccctgtggctaggtgcgcggatggaaatccaggtatgcccaaccccctcccggtggagtaggggttgggtggttatggaatgacggaaagaggcaaaggagtgtataattggagggtcagacaaggctgggagttgaggtccctcctaccccttacctgagccctcaggtccttgatgatccttgaggtatgggctccaagtcttttgacccgggggtccctttcttttcccaagtgcctcccggatttttggttttcaacccttcgggttttggggtccccaagcg

SEQ ID NO: 14025 - DNA, 397 bp, Homo sapiens
ccgggcaggacgcggggtcaagcacctgtctgccagccagaaggcactgaaggagaaggagaaggcctcctggagcagcctctccatggatgagaaagtcgagttgtatcgcattaagttcaaggagagctttgctgagatgaacaggggctcgaacgagtggaagacggttgtgggcggtgccatgttcttcatcggtttcaccgcgctcgttatcatgtggcagaagcactatgtgtacgcgggcttatgagctgtgacatcgtaaaccatgcacaagggctcttccagggttaaacaaaatgcataacaatcaaatacagcaacatctgccaaaagaagtaacaccaataaattgcaagtgattgtttaactatctaatgtggtataatcagcc

SEQ ID NO: 14026 - DNA, 468 bp, Homo sapiens
gtgccctaatacactactatctggctatatggagctccccgctgcggcgggcgctgggtgcagccgagcggtgtggagcggagagaatactcgaagggctctcctgatactagcagttttacgatttaaaacttcgccagaatttcgacagggtctcactgtattgcccaggttggtctcgaactcctggcttcaagcgattctcccacctcagcctcccaaagtgctgggattacaggcgtgagccaccacgcctggcctcactcaaacagtaaacgaggtatgtgacgcattcccagactcttcagccaactgagcatcagcttcttcacagcaattgggtcctgattaatgtcctcccaagacagacttcattggatccacgatcaagaggactctgccaggtttttctgacccctctacattgctataaagtgccaaggccttaagacttgggtacctcggccg

SEQ ID NO: 14027 - DNA, 398 bp, Homo sapiens
ccgggcaggtacaggtcttgcctaaaatcaagaagagagcaggagaactgagaaactcctccccttcccccaccagaagccttgtgtctagtaacaggtaacaacagccatctactgttggagaaagaacaaaagcatggaaaggatggagcatggaaagagggaaaaaacaacaaccactctccagcactccaggtcttaacattaagcacaaaataggagcagcctagcccaccaccggagggatttcaagtctgttgcacactgaaaataaccatggctacaacaaaacccaattcaccacaaatgctgactaaattgactaatagccccatgctaatagcttgatggaaggatagatattcccactttgaacatttgcttcagtgtctactttt

SEQ ID NO: 14028 - DNA, 426 bp, Homo sapiens
ccgggcaggtacggaatagaatggaatggatcgaattgtaatggaatggaattgaatggaatggaatggaatggaatggaatggaatcaacgtgagtgcaggggaatgtaatggaacggaatgcaatggaatggaatcatccggaatggaatggaatggaatggaatggaatggtatcaacccgagtgcaatggaatggagtggaatggaatggaatggaatggaatggaatggaacaacccgaatggaatggaatgtaatggagagtaagggagttgaatagaatcaatccaaacgtaatggaatggaatgcaacggaatggaatggaatggaatggaatggaatgcaatggaatggaatcaacccgagtgcaatcgaatggaatctaatggaacggaacggagtggaatggattggagtggaat

SEQ ID NO: 14029 - DNA, 420 bp, Homo sapiens
ccgggcaggtacgcgggggatttggcagcagcggaagaaggagaccggagggtgtgtgttgggcaaagccggaggcagaggaggacgattgttttacggatcccgtgatcggcccgtccttctcccctttccccccctccctaccgcccctgtcccgccggggagcggcggcggccttggactttgctgtctttcctcgcggagacagatttcaacactacacttgcacaatgtctttgaaaccaagagtagtagattttgatgaaacatggaacaaacttttgacgacaataaaagccgtggtcatgttggaatacgtcgaaagagcaacatggaatgaccgtttctcagatatctatgctttatgtgtggcctatcctgaaccccttggagaaagactttatacagaaacttagatta

SEQ ID NO: 14030 - DNA, 128 bp, Homo sapiens
ccgggcaggtacttttttttttttttttttttttgattaatgaaaacattcttggcaaatgctttcgctctggtccgtcttgcgccggtccaagaatttcacctttagcggcgcaatacgaatgcccc

SEQ ID NO: 14031 - DNA, 428 bp, Homo sapiens
ccgggcaggtacttatttttttgagacagtctcactctgtcacccaggctggagtgcagtggtgcaaccttgactcactacaacctcctcctcctgggctcaagcgattctcctgcttcagctttccaagtatttgggaccacaggcgcacaccacaggcctggctaatgtttttgttttgtttttggtagagacggggtttcaccatgttgccaggctggtctcgaactcctgagctcaagtgattcacccaccttggcctcacaaagtgtcaggcttacaggcgtgagccactgcgcccggctcacagggtaaggcttctgtctggtgtgttgtattacggattttgcttaataggcacagtgaggcattaaaaagaaaattcagtatgcctgtagaaaggataatccttgtttaaagtctccaaa

SEQ ID NO: 14032 - DNA, 359 bp, Homo sapiens
aggtacgggttgcccctggcttggcactgcaggacgtgtctcgttttatctttccatttcaagtgctgggggcatgtggctcggtcaattttgggaccatctgtggaaccaccatgtgtgatcagacacccaacacacccgatgcacagtggtgcagaggagcgtctaatcttttcagggcaggggtggagggaataaaaggtaagggggaccgactaacacaggactcgcagttgaacgctactgttcctgtgcaagaactcgccgtccacctcgaaagtggcactgcaaaagaagctgcgtccgttcgtcactctcggtagcatttagctgaagttgaactggctgccccggggccc

SEQ ID NO: 14033 - DNA, 428 bp, Homo sapiens
aggtactttttttttttttttttttttacaaggttttttcctagtgtccaaagagctgttcctctttggactaacagttaaatttacaaggggatttaaagggttctgtgggcaaatttaaagttgaactaagattctacccgcgtactttaaaccagacagcagggttcagaggtggcacaccgggacaaagctgaggccctgcacctcaacagctgactgccaggtgcctgtgggtgaactgaggggagtatagggagagggcaggtggaactggggcagaatctagtcatgccctaaagctagccctgtacacaatggtgccccaaaaagctgcaggtggtgtatggagataccatcccttttcaatttacataaacctttttccttacctaagacttaccatacctccattaaattgcgttgct

SEQ ID NO: 14034 - DNA, 435 bp, Homo sapiens
ccgggcaggtacttcttttttttttttttttttttttttcctgattaaatgttctttatttgatgcttttgtgtgcacaacactataaggagttgcccaattcaccaagtcagcccgttcacacccttagttaaggtggccattaaggggccagggggtggcaatcagtaagctgcctcctgcctaactttttttttccaaccattctttataggttccagcgtatttgctagccccattgtatccaaaaaatccgggccagtttcgttggtctggaaggccccgcttgcccatttgacagaagaaaacgagatgctcattttcccagctttggcttctcagcagaatataaagcctgtaaggcagttggctccatttgcagagcactctccaactcggacaccgggatgttgagcgcccctgggatggtcccat

SEQ ID NO: 14035 - DNA, 422 bp, Homo sapiens
aggtacgcgggtatctggggatacccaaaaagcaaagcagttcctgccttttcttcagcgggcaggtcgttctgaagctgtggcggaatacgtcttcagtggttctcgtctcaaactctatttgccaaaggaaacttgccttaataccttcttgcttgcaggcattgaatgccccagaggagcccgaaacctcccatgcttggtgcatgaaggagagccctttatcgaggaagctacacttttcaccaaggaactggtgctgcaacgagaggtggaggcggaggcgtagagcatggacccggcccccaactttatctgctgtttgcgcaggtacagtgcccacctggccgtactgttggcatagcactctcctgtcaaagatcactttaccgtcaaacgcacctactacctaaaatccgtgg

SEQ ID NO: 14036 - DNA, 424 bp, Homo sapiens
ccgggcaggtactttgggaggctgaggcaggcagattatgaggtccagatttgaagaccagtctgaccaacatggtgacaacccatctctactaaaaatacaaaaaaaaatagccagtcgtgttggcaggcgcctgtaatcccagctactagggaggctgaagcaaaagaaacacttgaacctgggaagcagaggttgcagtgagccaagattgcaccactgcactccaacctgggcgacagagcaagactccatctcaaaaaaaaagaaaagaaaaaatggcactacataatgtttctaatgctgcttttcttatatgattttcttgatggatttgcttcacaaacttaggagctaacatctttggaatggctagtctcctatagaagaacttctttttactttcttttcatacattttatat

SEQ ID NO: 14037 - DNA, 584 bp, Homo sapiens
aggtacaggttcaatcatctgtttttttgattcaagagttacacttcttcgaaacctctgcacatattcttcctcagcatcaccacactgcgatgtcaattaacttttctagcagtccgaatgtaactgcatattaatcttaaatctgacagattttttccacttaacaatattctttcttagtttccctcctttaattcagcccatcctagcttggccaaatcatcattttttctgggttaacatgctttttttttacttggttaagcaaggaccttatatggtcttttgccaatgatgaacctcttagaattgtttattttacttagaaatttgaagattatacaattttctccattatttccaatccaattgccattttatattggacatttagtttattggaccatggaattttgccccaggtttttaggaataattaaagaattaggtggtaaaaattgggtaccgtggctccattccttttctttcctccccaaattgggaattttgggcttccctttggtgacttttgggaaaaaaaaatccttgggttcaattggattgtcttttacatttaacct

SEQ ID NO: 14038 - DNA, 393 bp, Homo sapiens
  misc_feature 364: n = A,T,C or G
ccgggcaggtacaaactgaggctcagagaggttaaggcactagaccaagatcacacagctgtttagtgcagagccaacactcaacccaggtctctgctccctcattctcttcccatttcttgacaccaagaatacgaaagaggttttctacttccctcttccctacccaaacaggattttcttttcactggtccatccacgcacaacctagtcagttccgaacaggaaaaggaacaatttatcaagttaattgtcacaatcccaggtgtggtgcagtgggctggggtaaaacattttgctgtatctttcatgatgttcctgatttctctcttttttttttctttttgagacagggttctcttangaaaaatataatacaaaataatgtacctt

SEQ ID NO: 14039 - DNA, 417 bp, Homo sapiens
aggtacgcggggacacaccaggattcgagggccacacgcctcagccagccccggcaagggcctatcaggggtgggtcggggcatccgagcgggtttgacggaaggagcggcggcgacggaggaggaggatggaggcggtggtgttcgtcttctctctcctcgattgttgcgcgctcatcttcctctcggtctacttcataattacattgtctgatttagaatgtgattacattaatgctagatcatgttgctcaaaattaaacaagtgggtaattccagaattgattggccataccattgtcactgtattactgctcatgtcattgcactggttcatcttccttctcaacttacctgttgccacttggaatatatatcgatacattatggtgccgagtggttacatgggagtgtttg

SEQ ID NO: 14040 - DNA, 98 bp, Homo sapiens
aggtacctgcctcacagtgcagggcggtatgccgccaaacgcttccgcaaagctcagtgtcccattgtggagcgcctcactaactccatgatgatgca

SEQ ID NO: 14041 - DNA, 402 bp, Homo sapiens
ccgggcaggtacgcggggggaagtggtttgcgttttcaagatggcgactccctatgttactgacgagaccggcggggtgggaaccgccaaacctctcccttctttttgacttcacccttggataccatcaaggccagaggatggaaccaagataacataaaataggtgctcctttgtgataatgggctatttgtatctctgagggcttccacacaggatggccattcaagaagcttctgctctgcctttcattacagtctatctttagtcctcctaaaccttcagctataatctctatgcaatcaacttaaatatatgtttgtagtattgtccctttctcccaaattccatgtaaaacacttgcctgaattgaattgtttccacaaagttgttttcccctgg

SEQ ID NO: 14042 - DNA, 402 bp, Homo sapiens
ccgggcaggtacagcctgcagaactgccccactcacctcctccaactcctctggggaaacccaagccctgcagctcatggaacagaagaagtggaaccgacgtttctggaacaggactatctgagagcggttcttcctggccctcgggttcatgcaacggcgtaactggaaccgacgcttacggaccaagggaagtggaagatgttttgtttggagtcctcgtcgtcctcctccatgtcattggccaggtagctgaggacaggaatcaggttgctgctcaggggcaccaccaggagagacctccggctgaggtcagcttcccagagaggaagagtaaagaggacaaataggtgaaggaacaaatgaaaggctggaatcccacttcccccgctgtcccagggt

SEQ ID NO: 14043 - DNA, 407 bp, Homo sapiens
ccgggcagggtacaccgactacggcggactaatcttcaactcctacatacttcccccattattcctagaaccaggcgacctgcgactccttgacgttgacaatcgagtagtacaggtaagccctggctgcctccacccactcccagggagaccaaaagccttcatacatctcaagttgggggacaaaaaagggggaagggggggcacgaaggctcatcattcaaaataaaacaaaataaaaaagtattaaggcgaagattaaaaaaattttgcattacataatttacacgaaagcaatgctatcacctcccctgtgtggacttgggagaggactgggccattctccttagagagaagtggggtggcttttaggatggcaagggacttcctgtaacaacgcatctcat

SEQ ID NO: 14044 - DNA, 401 bp, Homo sapiens
aggtacctgtggcagcccttcttcagacacggctacttctgcttccacgaggctgctgaccagaagaggtttagtgccctcctgagtgactgcgtcaggcatctcaatcatgattacatgaagcagatgacatttgaagcccaagcctttttagaagctgtgcaattcttccgacaggagaagggtcactatggttcctgggaaatgatcactggggatgaaatccagatcctgagtaacctggtgatggaggagctcctgcccactcttcagacagacctgctgcctaagatgaaggggaagaagaatgacagaaagaggacgtggcttggtctcctcgaggaggcctacaccctggttcagcatcaagtttcagaaggattaagtgccttgaaggagga

SEQ ID NO: 14045 - DNA, 307 bp, Homo sapiens
tttgagctccccgcggtggcggccgggggcattcgtattgcgccgctagaggtgaaattcttggaccggcgcaagacggaccagagcgaaagcatttgccaagaatgttttcattaatcaagaacgaaagtcggaggttcgaagacgatcagataccgtcgtagttccgaccataaacgatgccgaccggcgatgcggcggcgttattcccatgacccgccgggcagcttccgggaaaccaaagtctttgggttccggggggagtatggttgcaaaaaaaaaaatataaaaaaatacaaaagtacct

SEQ ID NO: 14046 - DNA, 353 bp, Homo sapiens
aggtactgccttatggtaagccacatacctttttatcttgtaatatcttagtcttggaattctttatcttccctactctatatctacaaaacagtagcacctgacttatcaagttgcagagctcttaattctatccttagggccggattcagaaaagggggttcctcatgctggatctgaacaacccagcacaggcatgtctggggagcatggcgtgagcctgcatgtggactcataggaccggcgcccgaaacgaatctattggctggctcaggtgtgcaaaccaggcacgaaaagcagctgtccttcggagcgagatgcacgtgatgggaagaaaacaggtcatgatacta

SEQ ID NO: 14047 - DNA, 359 bp, Homo sapiens
ccgggcaggtacgcgggggaagagtgagggttccaacttttctgcttatctgggaggtgttgggcgcggacagtcgagatgtcagagaaaaagcagccggtagacttatgtctgttagaggtagacgacgagtttgaagagttccctgccgaatactgggctggcttagatgatgatgaagatgcacatggtctgggaggataattgtgatgatgacaatgtagaggatgacttctctaatcagttacgagctgaactagagaaacatggttataagatggagacttcgtagcattcagaagaagtgttgaattaacctaaacttgacctgcttaatacattctagggcatatagccca

SEQ ID NO: 14048 - DNA, 351 bp, Homo sapiens
aggtactttgctgggcactgttctagaagctgggaaatacaagtgatcaaaatataacctaccccacaactcccaaatccagctcgaaaaaacttttagtgtggaggatgggatagtaaagataataagccaatgaataaggaaaacatagcatttcagatctttatattatgataaaaaaaaaagtcctaaattggaacaggaaacacagatggggtggctcaattacaagacagcagttaaagaaggcctcactgacaagatgagttcccagtgtcaggaccccaatatccttccttacaaagagtggggatcccaccctagaaaaggaatagcagttcagccacccca

SEQ ID NO: 14049 - DNA, 406 bp, Homo sapiens
ccgggcaggtacctaggtttccttcaagacatcgtcttttgaatgagaactttcctgggttttagaggagggtggacattgtttattgatgcctcctgtccattaccgatgtttctcctgattgttattcatatgctcaccacccctccatggagcatccatggcctgtgacagagctctggggactgatatccttccactgactttggcgctggtgagagccctggtcatgtgattcagcttggccttaacccgacccagttgcacatattcctcaggccctttagagttgaagtcgagacctctctgagaacgcttgccagcccatgctcttctaaggctggagcaaacttcctccatctattccagacagaggggactgcaggggttggactcactcaagatt

SEQ ID NO: 14050 - DNA, 301 bp, Homo sapiens
aggtacttttttttttttttttttttttttttttttctttttttttttttttttttttttttttttttttttttgggctctaaagggggtaaagggggggctatagggtaaatacgggccctttttcaaaaatttttaggggaattaattttaggaccatgggcatgaaactggggtttgctccacaaatttcaaagcattgaccgtagtttacccccggtcgtgtaacggtaaaaggggtttggttaaaacctccgggaattgcatttgtttttaagcctacccgggtacctgcccgggg

SEQ ID NO: 14051 - DNA, 402 bp, Homo sapiens
ccgggcaggtacagtagtgcactcttggctcactgtagcctcgacctccggggctcaagtgatcctcctgccttagccccacaagtagtgggactataggcacacaccaccatgcccatctaagtttttgtattttatgtagagacaaggtttcaccatgttgcccaggctgatcttgacctcctgagctcaagtgatctgcccacctcggactcccaaaatgctgggattataggcgtaaaccaccatgcctggccttaaatcaactttagagtcaacatctcttatcactggagcttctggagaaactccatcacgtggtgctctctttcctgatgtgttgtgcccaaatagcttgttcttatcagatgacttatttgctatgatatatatacttcaaga

SEQ ID NO: 14052 - DNA, 406 bp, Homo sapiens
aggtaccctgagggctaagtgcaacaaagagagtgatggggtcatccttcatacattctgaagaccgccgcactcgcatccatcgaggcacgattgtccctccacgctggaacacagggatactgcttagagttacaggcaggtacaattcaggcaattttgttttttcacttgggttcagattgcaaattcattgctgtgagaaaaggatggaggcaaattttagcagcaacctccacctgactgcttgactggagtgctctgaattttaacattggacttctcagcaccaccagctgttgctccgggacccattcgctttttaatctcagctgccatcgtcatgaaagactgttctacattcgttgcattcttagcactggtttccaaaaacggaattccaagg

SEQ ID NO: 14053 - DNA, 473 bp, Homo sapiens
  misc_feature 30: n = A,T,C or G
gcgccgcttcgacgcaagattggtaggccngcgaaggggatctgggccaaggtcccggccgaggtactacctactttttggttatgggtttactctttctccctgttttcacctctttctttcccaattcaaaacagccaattgagccctgttctggtattttgaatcattagagaaaagaaagggagtggctgttttgagttgtcctttctttgcagaaaggagaaaatgtgattatgtttttttttttaccagcctacttctaagtgtcactgcctggtttttctctttttcaaggattagaactaagaggacacaccagcatcggagtgtattaagcccctgaaacacatggtagctaggggctgaacacaggaaccgtatgacagcagcacaaacccccaaaggatgttcctgccttgtgggcccctgagccccttgggagactgagaatcatgaccagattcatccag

SEQ ID NO: 14054 - DNA, 116 bp, Homo sapiens
aggtacgcggggagtcagtgtcagcccgaaggctgaaggaaaaagagcaacagatccagggagcattcacctgccctgtctccaaacagagccaccaaggaggagcaggggagcga

SEQ ID NO: 14055 - DNA, 415 bp, Homo sapiens
agtagctgccaggaaggagagactgggatggtttttttatctgttgctttcttaaatcaagggccgccgggccggagatggatggagggaccggggatttgggaactcgaaaacgagctgagagaagggagcctgtggaaatagactggagtctgggtagtgtcgtttcctagagaatggtctcgaagtaacttctcggtaaagtcttcacggaatttccagaccacacttgcccactgggaggcttttaggacccgagacgtgtgcaggcttttccagccaaaatgaagtttaatccctttgtgactttcgaccgaatcaagaatctcaaaaggcattttaatgcacctttccacattctaaggatgattatgttttcccctctttccaaagagctgagacagatgtaccttgg

SEQ ID NO: 14056 - DNA, 417 bp, Homo sapiens
aggtacattgagaatgagaagctcatctcaggaaagcgccaggagctggtcaccaagatcgaccacatcctggatgccctgtagcccctgcccgcatcctccagggggcccagggtgcctgcactttgctgtggcaggcagattgggtggtagtgggaggatgtgcatggaggccaatgaaagctgacatctgtaaaaggccttcaaggaagagaaaccaggccctgcgtcaggcagtgtgagtttgccgtttgtccttaactttcttttgtttattgggttaaaaaaaagaaaactttaaaaaaactcccactaaaaacaaaacatttttgtgttttgaacaaaggaatttttcaaatatttgattggaattctgttttggaaatctaagatattttttcatcctataaagccccc

SEQ ID NO: 14057 - DNA, 412 bp, Homo sapiens
aggtacaaagcaacagtaaaattaaacttaagtatattttaatttacctggtgtttccaaaacctattatttcaatttataataaaaaaaattgaggtattttacattttatgttgctaagtccttaatcttgttttttccatttatagcacatcttaattctttgtagctacatttcaagtattcagtagccacatatgactgttgttgactgcattggacggtgcaagtctagaatatagtaggggctcagtagatgtttgttgaatgaatgaaggagaggaagatgagttggttgttaaaggttgattgtagaatcgaggaagggttttgttctcacagtgaggcaggagtatattttttatgtttaagacagatctgggagaaagagaggcggatataacagatgtct

SEQ ID NO: 14058 - DNA, 676 bp, Homo sapiens
tgcatcatcatggagttagtgaggcgctccacattggggacacttgacctttggcggaaaccgtttgggcgggcattacccgaccctgcacctgtggatggcaaagttaccctatggcccgtgcttctagaaacttatgtggaatccctcctcggggctggcaccggaaatttacgtatgactcaaaagctttaatcggataacaccgctcgaacactttggaggggggtggggcacccgggttcccacaagactttttttggaatccccccttttttaagctgaagggagcttttaaaatttggccgccggcctatagggatggagtatattccaagtgggcttcaattaggacctggttatttacccctggttggtagaaaagaatctggtgttaatccacagccttccaaacaaaatatttcccaccgacaataccatttatacgcaattcccccgggggaagcccacttaaataggatgtttaaaaggacccctaggggcgttgggcccttcaaattgaaaggtggaaggactttaaacctccatcaaattttaaaatgttggcggtatatggccgacatactaacctgtgctcccagacatttttcacaatgttcagggtgtaaaaaaacctttgattcggtggccccaagtccatggataatattaaatt

SEQ ID NO: 14059 - DNA, 63 bp, Homo sapiens
ccgggcaggtactgtgccctcttctggctcttgaggctctggagtcccaattgtctgtgttag

SEQ ID NO: 14060 - DNA, 401 bp, Homo sapiens
ccgggcaggtactccagcccggcactccagcctggcgacaagagtgagactccacctcaaaaaaaaaaaagaatccaatactgcccaaggataggtattttatagatgggcaactggctgaaaggttaattctctagggctagtagaactggatcccaacaccaaactcttaattagacctaggcctcagctgcactgcccgaaaagcatttgggcagaccctgagcagaatactggtctcaggccaagcccaatatagccattaaagatgacctacagtgctgtgtaccagtgaacaaaggcacgcttggcatacatcaggtcaaacttgtggtccaggcgagcccaggcctcagcaatggctgtggtgttgctcaacatgcacacagctctctgtacct

SEQ ID NO: 14061 - DNA, 414 bp, Homo sapiens
aggtactttttttttttttttttgctagctatttaatctaggaaatacagctcagaaaaaaaatgcagtcataaaacctgttggtataaagataagcagtttatttaatatctaattaaatgtggtcaccagagaaatcacagcttatgaaactttatcagaaaaagattaatccatttcaggcttaacccaaatgtcataagagaactcatgaatttagataggaatccacttattatccaaagacgttttcatatcaagttaggtgagcctatattactagctatatttatacttacttcaatcaaatttatatactttgtagctatcactgatgtggggcacaattatcgaaccagaataagataatagggagcctttctgtctttatcaaaaatttctagaatgttctaa

SEQ ID NO: 14062 - DNA, 101 bp, Homo sapiens
cctaacctacttttgtctaatttttatttcactcttgctatattatatcaatatattatgataatgatattttcttatcgtatacttattacttaatatgt

SEQ ID NO: 14063 - DNA, 507 bp, Homo sapiens
catgtacaagccatagcaacccctggtgcgactgaaaggcggtgcctacatctgggagggccgcgtggaggtgcttaaaaatggagagtgggggaccgtctgcgacgacaagtgggacctggtgtcggccagtgtggttctgctgagagcttgggcttttgggagtgccaaattaggcagtcacttggcttctccgactgggtgcaaggtgatcttgacccaatctcacctttaacgatgattccagttgtcacagtgcaaatgaagaagttccatttttattatcttgtaagtttcaatggcacgaggtcttcaattggcctggcgaacctacatatgaaggaattgcttggattgtgtagaattgcaaacacctttttgctcatgggtcctttgcaagataataagtcttgcttcccttgaaactggtcggctctgcttttaaaaatcttagtgggattctctccctgtccttgcatgtatatttttgattatttctgagctttt

SEQ ID NO: 14064 - DNA, 519 bp, Homo sapiens
ccgggcaggtacgcgggtattccatctgtggatagaacccctggcagtgttgtcagctcaacctggtgggttcagttctgtcctgaggcttctgctctcattcatttagtgctacgctgcacagttctacactgtcaagggaaaagggagactatatgagggcttaaactcaaaacccttgggcattggttttggggttgccaattcccataaggtatgggagagcctctagaatcttcttttttgtggctggggattcaagtgggcttacttcagggggactaggataattgccttggtgattctgtgccaagtgttggtttctttgaagcattttgggggtaaacatgccagagaatctcattcaaatttaagttatgggtggcattgttcaagatgtaatcatattcccaaatttcattattggtaatgtctccggggatcttgttcttccccttaattcattcgggggatggaccatactggtgtttattaaaatggtggcccagacatgggaaa

SEQ ID NO: 14065 - DNA, 862 bp, Homo sapiens
cattaaatatgtttcgctatggattctatcatgatgctaaaatacttattcgttgtgaattcaggggataattaatttatgtaaattcttatatctatttcttcttttaatataacttttaagcttttgggcccgatacactcactatgggcgaattgggagctccccccgcgggggccgcccggcccggccagggtaccgcctgattggggcttgtttccctaccttaacccaactcgggttttaagtgtccttacaatttctaaagaattaaagtgcagtttcaaatctacaagtttgggtttgtttcatactaatttgtctcacgtgatctttggtgaatagttttctctgggggaatgttcttaaatcaaattttggaaacaggcctctattttttctgaaaggattcgccaaaaaagttggagattttaaaaaccattgtaatcgttaaggaaaaaaattgaaccattggaatttttgtttttttatccaagaagtccccctttttttttttaagaattttgggggtttcccattaaaattaaataatcaatttcgggatttcccttttttcctccccccttagaccttcaaatttcaaagggtgaaggaatgggggttttatttctcaaggaaaaatattccaagtttggctttggtggggaattaaaatggaattggaaggccccattccccaaaattggggaccaccaccaaggtttttttaaccttttcaaacctttttaaaccaaaccgggggttgggcaaatccaaaaattaaacccctccaaagcctttttttcaatatgggaaaaggggattaactcatagggaaccatcctcctatgccccttcaaaa

SEQ ID NO: 14066 - DNA, 721 bp, Homo sapiens
aaaaatatactatatattatataatcatgtttttattagattttatctatttaaataaattattctagatattctatatatatactttaaagtaattatattattttttatattaatatatttatttatttgaccgcgtatacgactatatatggcgaattggtatctccaccgtggtgggtcggccaaggtacctaatatatttttattttatttttggtctataaattggaaaggaaggctcggactgaaataaatacatttattctgagtaatgaccttttgggagcaatgtccgtcaactctgcttcaagagcgtcttcacgtgagcagcaaacgcctgtttttgcgccttagacgaaggcgggaaccacaccgtgtccctccaagcggaaggcaggcttttttttctgtgttttgttgaaagggaaaaataagcaaggttgtctgtcaaatggttcattaaatggaaagcgcgacaaattgaatgcccttttttacttctgaaacagaaaataaattgttccggcttttaaacttattgcaaagacaaaggacttttggttaccttcaacgttttcgcagttttttataaattagaatttttgtcccctgggaaattattttaacctttgccccgtggccggattcggtttttaaaaacataggtgggaaaacacctcggggcttgcaatggaattttcaattattaaagacttta

SEQ ID NO: 14067 - DNA, 563 bp, Homo sapiens
  misc_feature 563: n = A,T,C or G
aggtacgcggggctaatgccattttcagcctcagcacgcctgcacccaggcgctcattaaaacagcatgttgctccccactgcctcgtgttgcctgttggcgcgctgtcggggttcgaaccgatacaagaacctttcacctacctggtgcttttggccttattctattaagccggccaagtcattctgccccttaagtgcttgctcgctcgaaagaactgaaatgttccttggaaaatgttttggcttgatccacattctttcatttattgaactaaaaaagccatttggtgcccgtatatctagtaatgaaaaaaaatttgtcaattttgttcaaccgggaaaatactattttaatagttttggtttttgatcctttacctttttacaggctaaatcattttgtcccttttaactttgttttattaaaaaaggaataaaaaattaaaatttatttttggtttccattttttcaaatattaattattaatatataaacattatatattggttactcttggcacccggggaccgggatccgtttctttagtaaacctaagttgn

SEQ ID NO: 14068 - DNA, 441 bp, Homo sapiens
ccgggcaggacgcggggcctctttccgccatctttccgcgccggtgagtagcactctctgagagctccaatttcatccgtctgccatcggcgccatcctgcaatctaagccacaatggtgcgcatgaatgtcctggcagatgctctcaagagtatcaacaatgccgaaaagagaggcaaacgcccagtgcttattaaggccgggctccaaagtcatcgtcccggtttctcactgtgatgatgaagcatggttacattggcgaatttgaaatcattgatgaccacagagctgggaaaattgttgtgaacctcacaggcaggctaaacaagtgtggggtgatcagccccagatttgacgtgcaactcaaagacctggaaaaatggcagaataatctgcttccatcccgccagtttggtttcattgtacgcggggcttctcgcc

SEQ ID NO: 14069 - DNA, 318 bp, Homo sapiens
tgcgtttgtggccgtccggcctccctgacatgcagccctctggaccccgaggttggaccctactgtgacacacctaccatgcggacactcttcaacctcctctggcttgccctggcctgcagccctgttcacactaccctgtcaaagtcagatgccaaaaaagccgcctaaagacctgctggaaaagaagcagttttagataacccgggcaagaccggggttggggggacggacctcaaagctgagagtgtggttcttgagcatcgcagctactgctcggcaaaggcccgggacagacactttgctggggatgtacct

SEQ ID NO: 14070 - DNA, 480 bp, Homo sapiens
aggtacctattctttgcagtctcaggaattgttgacatgctcacctatctggtcagccacgttcccttgggggtggacagactggttatggctgtggcagtattcatggaaggtttcctcttctactaccacgtccacaaccggcctccgctggaccagcacatccactcactcctgctgtatgcccttgtcggaggggggtgttagtattttccttaagaggtgatctcccgggaccacattgtggctggaactttttccgaaccagtctcatcatttcttcatggaaccttggtttctggccagattgggttttagtgctgtttcccacgctttttggaacaaccctgtattgggaaccaagaaggattgattgccaaaccttcaatgtttcattcacacattgtggctttttgccttggcacataacctgtgcttgcaccttcaagcatttggtgggcacgttcaaacctatttctg

SEQ ID NO: 14071 - DNA, 524 bp, Homo sapiens
  misc_feature 443: n = A,T,C or G
aggtaccagacccgccagaaccagtgcttctataactccagttacctgaatgtccagcgggagaatgggaccgtctccagatacgagggaggccgagaacatgttgctcacctgctgttccttagggacaccaagaccttgatgtttggttcctacctggacgatgagaagaactgggggcctggcttttctttgctgaccagcccattaaccacccaaggagccaacttgggaggaggttctacgaaagcttctcgacctggcttgtggcatttcccaggttcagaatgttccatgtaaccttggcccggggccgggccgcttcttagaaactagttgtgattccccccggggcttgcaagggaaatttcgtatattcaaagtctttatcctgataacccggtcggacacttcgtagtggggtggggcacacgtgtaacccncagactttttttgttttccccctttataggttgagggggtttaaaatttgccgccggcctttgggcggttaaatcaatggg

SEQ ID NO: 14072 - DNA, 277 bp, Homo sapiens
tcccccaccaaatatttccaagcccggggaggccataaaagtggtaaaagtccttgggggtggccctaatggaggtgaagcctaaacttcaccaatttaatttggccgtttgcggccttcacttggccccgcttttttccagttccggggaaaaaccctggttcgtggcccagctttgccttttaaatttgaaatttggggcccaaacctcccccggttggaagaaggggctgtttttttgccgttattttggggccgcctttttttcccgcttttg

SEQ ID NO: 14073 - DNA, 402 bp, Homo sapiens
aggtacttttttttttttttttttttttttttgccacacagactagggaataagagaacaaacagtaataactgagtagtgcaagattatattctttgagtctaaaataaattaaataacttccaaaaaaagtaagtgcttttgtttggaaggtgataacattataattttaaaccaaactgcttcactgatataactcccaccaaatatcttcatggggtaggttactgatttttatcttcctgaataaggaaacaaaggtcagtgacagataccagtaactgattatttttacaatcttaaaaaaaccccaacatatttcattggaaccataaaaactcatcattttctctttatgaataactcgtgtttttataccactttaaatgccgtcttcctttt

SEQ ID NO: 14074 - DNA, 141 bp, Homo sapiens
gttgtcctggtggaatgtgtccccctcgttccccagcgccacgatgtggatggacctgcacggacagagggggcgaggggagaagggaagcacggtcagcgcgcgggtctctcctcggaacaggaagtgccccgcgtacct

SEQ ID NO: 14075 - DNA, 404 bp, Homo sapiens
ccgggcaggtacttttttttttttttttttttttttgagactgagttttgctcttgtcacccaggctggagtgcaatggcgtgatctcagctcactgcaacctccacctcccgggttcaagcgattctcctgccacggactcccgagcagctgggattacaggcgcctaccaccacacccagctaatttttgtatttttagcagagatggggtttcaccatgttggccaggctggtctcgaacccctgacctcaggtgatccacccgtctcggcctcccagagtgctgggattataggcgtgagccaccatgcccagccagagtaggaatattaaaatgaggtcagtaaagaaaaggctacattctcactaactggccacatcatttagtgtttcttttgaaaa

SEQ ID NO: 14076 - DNA, 771 bp, Homo sapiens
gccgaggtacctcacaagacactacacatatgaccacgttgcacattgctatctgtctgctagatatgaagcccacagatgtattattcttgtgttgaattaatgggaaataacacaagggaattccaacttcaaaaaatacagtaattatgtggcttgtttttttattgaaataagttgataactaaggatgccttgggtattacttttgccaggggatataataaaaataaacaacttttaagaattggaagggtggaacaccccattttttattggccaaaattggatttaatatccttttttattacaggtataccttttgtggttccaatgggtgccaccccaacctattaaccaggacaaattgcctcattgtcattttctttcaagattaaaacgtaaacaacctctcttcttttatggaaggcctaccaattttaaaaccgtcaggttaattgtttctttttatgaattcctcccaattaagagggtataaagcaatgtttgttgaccctccctacatatttctccaacaaaggaaatggcaatagaggggcttttcaaagaaaggttggtttcctcttggaataaaaagtttttaaagaaagtccaaacctccaaaaggattatggccacacagaaactttgggggctggaatgtttctccagtgaaggcacccgggctcttccttgggtagtatggcctttgatcgaaacacctcaaacaccttttacttctttgggctttatgtgtccgaaataccaaag

SEQ ID NO: 14077 - DNA, 300 bp, Homo sapiens
tgagcattaaaagtgtaaaaggccttggggatgccctaattgaagtggagtctaaacatcaccatttaaatttgccgtttgtcgcatcaacttgctccggcttttctcaagttcgtggaaaaacccttgttctgtggcacaagcttggcaattaaaatgtaaattcgggctcaaacggcgtccggtgggaagaagggccggttttttgccggtaatttgtgggccggccttcttatccggctttttcttccgccttcaacttggaacttccgccttggtcgcctacgggttcggtttacg

SEQ ID NO: 14078 - DNA, 400 bp, Homo sapiens
ccgggcaggtacgcggggactttataccagtcatgtggcagaaatcaggcctgctctgtgaatcggctttgtgcagatcatgaggcgcacctatgttggcagcatgcctggtcgcatcatcaacggcttgaagactgtgggagtgaacaacccagtgttcctattagatgaggttgacaaactgggaaaaagtctacagggtgatccagcagcagctctgcttgaggtgttggatcctgaacaaaaccataacttcacagatcattatctaaatgtggcctttgacctttctcaagttctttttatagctactgccaacaccactgctaccattccagctgccttgttggacagaatggagatcattcaggttccaggttatacacaggaggagaagata

SEQ ID NO: 14079 - DNA, 428 bp, Homo sapiens
  misc_feature 180: n = A,T,C or G
ccgggcaggacttttttttttttttttttttttttttggtagagatgggacttcctacgttgctcaggctcgtcttgaactcctgagttcaagtgatccacccaccttggcctttcaaagtgctgagattacagatgtgagccaccacacctggccaaaataataaaattttaatcagtnaaaaaaaaaaaaaaggaaaagtgtaaatgtgttcatccaacaaagcctttctttcacacatatgaaatataaatagatccatttaaatacgatatccagttgaaccagccctgaagggctttctgaattggacatgttctgtcgctaccagtggggcttcctggaagctggcccaaagctggtcttgtccacgcagaggatctgaaagcaccctgtgtgctcgccataaccctgccccaggaaagaag

SEQ ID NO: 14080 - DNA, 444 bp, Homo sapiens
aggtactttgttttttttttttttttttttttggaatgaacaaatatttatttatcttttataacaagtaaggcaatgttgcttaaaggaagacaaacaaacataaaagattccgttgacaatgcattttttcatctgttcggcacaatgcttttgtcataatggagatgtgacagcaaactttccaggacattcagtcttcggcggcagcacttagggcagatgactggccgcttataaatgaggccaaagcaccaggtaggtggaaggttcttgtatcggtttgaaccccgacagctcgccaacatacaacacgaggcaatggggagcaacatgctgttgtaatgaacgcctgggtgcaagcctgcttagggctgaaaatggcattagcccccccgttacctgcccgggcgggccggtctagaactattgggatccccccgg

SEQ ID NO: 14081 - DNA, 312 bp, Homo sapiens
  misc_feature 299, 300: n = A,T,C or G
ataccttaccgtggctgctgtcttccgtggtcggatgtccatgaaggaggtcgatgagcagatgcttaacgtgcagaacaagaacagcagctactttgtggaatggatccccaacaatgtcaagacagccgtctgtgacatcccacctcgtggcctcaagatggcagtcaccttcattggccattagcacaacccattccaggaagcttcttcaagcgccatctccggagcaagttcacttgccattgttcacgccggaaagggcacttcctccacttggtacaactgcccgtggcggnnccgctcttagaa

SEQ ID NO: 14082 - DNA, 36 bp, Homo sapiens
aggtacaatttctgccactggtctaggtgtctgagg

SEQ ID NO: 14083 - DNA, 558 bp, Homo sapiens
gagagcgttagtaaaccaagggcaatttggaggtaaccgcggtggcggccgttgggaactgtgtctccccagcctttgggccggcgcctggtcctggcttcggcgaatgagacctgcggacctgcccccgtgccccatggaagaatccccggcgtccagctctgccccgacagagacggaggagccggggcccagtgcagaggtcatggaagaagtgacaacattgctccttaacagcccttctggtccgggagggaagatgaccagaggggattaccttaccgggatcccaggccctggctctaacataaccctccaccccacatccttcctgggccctttgcatgagaaagcgtttccaccgaggagaagattgagtgatgtctactccaacctggttgcatgagagctgagtggtttgaagggatttgtggccagttggggtaccctttggccccgcttcctagaaacttagttgggattccccccgggggcttgtcagtgaaatttcgaattattcaaggctgtattcggattactcggttcgacccttcgagg

SEQ ID NO: 14084 - DNA, 448 bp, Homo sapiens
ccgggcaggtacttgtctaaggctctggcggctccgcgaatctcatgtgctgggccatcatggacgagagtggtcttcagcaccgcttgtaaagcagtgttaacaaccatcacaccgccagcagcaatgccctcctcagccaccaaggcaggccacaggtaacgagtgatgccccatcttgaacggcacccaagcctccgcctccataactcaacagcagcagggaaaaagcatggtctcaattctcttgacaaatctcagaggtattatactcttattccaactacatctccctccccaaagaagcgcacacaaaacaattttaaaacttatgttttctacggaaaccttacctcaaagtgatgcacaaaactgaaatttatatggctgcttaaatgtcacatcctggctcctagcagggaaacaaaacgctctgaagaaaagatgg

SEQ ID NO: 14085 - DNA, 832 bp, Homo sapiens
  misc_feature 552, 567: n = A,T,C or G
aggtcacacagtgcagttgtatcactgtcggtgcacttgagaataagacatcagcactctgtttcttggcgttgtggattttacataccacgacgcagttctccatatggttgtggtggctcactaggtgtctgcatctgtagtacaactcctattcatatgcatttttcacatggatcaggcttatattatgccagtacaatacataagggtgtatacgtagtttattggtctttggggtgggggaaaaaagctctataaagtggtacaaaatagtacacccaccgatattttgctttttggctcttttagttttaattttacattaaataaccattctttccctctctatgtgtttcttttaaattcccggataaatactcaactccaacagaggtggggtcctatcctttcatttatatagaagggtttctttaccaataatgtttatcctctttggtcctctcttggtgtccttatgtaaccagtcttttctctataagagagagccttgatcggtctgcgagaatttcatcctctcctctgtggtgnactttggtcgcagtnggctaattttttttctgaatataattcgcgaaatgttcctttttaatatcggtattcttcctctgttttaataaccatcttttctcaagtgggctgtggtggtacccccttgggttttaccccccatagtctttttttaggatttcctccctttttttacgctcggaatgggggtttttataattatggccggccggcctttttgggtctgtttaaattatccaatggggttacattataaggttctgttaattacaccttcgtt

SEQ ID NO: 14086 - DNA, 441 bp, Homo sapiens
ccgggcaggtacgcgggaagccctcaccccacaaggggcaggtgggggcttggttgctgacccggcccaagtccccacagagcaccttctgtagctccagcttgtctccctggcttctctttgaaggagaaaaatgtaaaatatgcactgagaaagccagccccgcctgcttagtcagccccggcagcagggcagccatgggaactcaaggaaaagcaggaacccttttccaaaagcccagagaagccctgggctcagatctgtaattctcccaggagctgtgatagagcaggccacacaaagtccctacgcctccctgctgcctcccccagatgcattgtgatggcatcaccattccccaaattgaatatcagcatgcggcctgaccagggactctttagatgcatgaattaatttatatgaaggctctcacagagacac

SEQ ID NO: 14087 - DNA, 438 bp, Homo sapiens
  misc_feature 350: n = A,T,C or G
aggtacaataatattatctttatgagcagcatggaaatttcattcctgatctggaagaataaaaggaaagaaaatgtcaggtgaaagagtaagtagcctccaacttaagcagacagaataattttctttaaaatgaaaagaacattttaagctgtcttcccccctaaaagatcagatctagaaagggctggaaatgaactgtgcccaggaatctgggggtgctctccagtaaggcgaactgaggctcatttgcagccaagacttggaactcgggatgagacctaatgggctattgctgccatctggctgccaaaaagtccctaatagatggattttccaggctgacccanctgtggggcggggggggtcctctggcttctgtgtcctctgaagcgtttgctgccctcaccctctctgaactgaccattgtcctgctgt

SEQ ID NO: 14088 - DNA, 64 bp, Homo sapiens
aggcacttggtttgttctttttttttttttttctgatgttgagagtcagttttattgccatctc

SEQ ID NO: 14089 - DNA, 360 bp, Homo sapiens
aggtactttttttttttttttttttttttttttgcaaaataatggaagatccttttgaaacttaatatcttcagttatcaatattactgcattatggagctagtgcaatcctgcatagccttggtcaaaatgacaaggcacaataaaaaaaaattaaagttttatatgaccaagaaaagtctttgaagataattaagggccttgaagggattaatcagtctaattaaaagctaatgattaaaccttaatttatccacctgaaattgcaaggcaatatgcttttttcaagcttgtggttctggggccaatatatcagaaacaactctttgtttatggtttggggattaaaatccctttggg

SEQ ID NO: 14090 - DNA, 969 bp, Homo sapiens
  misc_feature 152: n = A,T,C or G
ctacactctccactcgatgatcgtggagtactaatcaaatacaataaatcgtaacactcttgattagatataaccgtttaaaaattgttacataaccactacatccccccccgagaggcattggacgctcattgacacactcagggcgaatnggtgctccaccgcggcggcggccgaggtaccatatcctaaggctgcacagagcaggaggcccagcctaggaaacgatttttccctcctagacctctgggcctgagatgggaggggttgccatgaaggtctctgacatgccctggagacattttccccattattataggtgattacttactcaaatttctccagtgggtttgaatttctccccagaaaatggatctaacttttctatcgcattgtcaggttgcaaatcttccaaacttaaatgttctgctttatcttgaatgctctgccacttaaaaatttcttccactagatatcctaatcatatctctcaaggtcaaagttccaccaatctctagggcaaggcaaatgctgccagtctctatgctaaaacataaaaagagtcacctaagctccagatcccaacaagtcctcatctgcattttagaccaccgtagctcggattcattggccatattcaaatcaagcatttggcggaaaccattcaacaatctacaggtagatgaaagccttcacacctacatccaggcctctggagatcccccaaattataggaaaggccataacattccacatattaaggaccacatagggcccctccaaatatttcaattctcagccagaaacaagacctaaaagggcttctcccgtatctgccaagcgcaactcgctaggcccaattacaggattagacacattccaaattgttgaatagacaacccatgactggtcactttaacaggaaaggtttaatgacccacatacgcgatgggaaagggccctagtaac

SEQ ID NO: 14091 - DNA, 348 bp, Homo sapiens
  misc_feature 348: n = A,T,C or G
ccgggcaggtactacaagcagggatgtgctggcctgtgcagagtggaatcccatgtggtgccactgttgttactgtgtaagaaacagggactgttccttgatggagctgatcatgtatgtcaaccatgactgcattctgctggggtggatgagcagcaggatgtagcagacggggagatacattcggagggtggaaggctcgaggctcctctattgcttgctgctgtgcgtaagggagatggtgatagttttcatcttgactaatggaattatgtcgagacagacgatcccttcttcctctctggcgcctgacaggaggacttcttctgttgcgtgcaggtgtgttgn

SEQ ID NO: 14092 - DNA, 352 bp, Homo sapiens
  misc_feature 352: n = A,T,C or G
ccgggcaggtacaggctgggtccccgtggtcgccaagcctcctgcctgctcaatgatgtaggccacgggattgcattcatacaggagccggagctgtggaggaacagaggcaggacaaattcaccaagagcctagcaacatgaagagagatgccaggaagaagagagaagccaggaaacaagccaaccgcacaatccccacatcagagcaggagaagatgggggcctgctggcagagctggggcttggctgtggtcactctgaacctgctctttggtgttttcatgagtggtgggaagaatagggaccatatggagcccacacaggaagctctagcagtaacacagcaagcn

SEQ ID NO: 14093 - DNA, 342 bp, Homo sapiens
ccgggcaggtacaaacagaataaaaagtcattgcttttgatggtcagcaaacacccaattctgaggaggaggagaggtgatgcccagcaggtggattaggacccccagtggttggcggggtgcctggctttgcggccctctcccaggaggcagagagcacagctttaggtagtgtaagcctttttccttttatttagaataatcttttttttttttctttttctttttttttaagcaatttccccactcccaagttgggccagtaaagattacatgaaaactggcacacctattggctggaatacagatgcaccaaatgaggatttaaaaactttccgagcg

SEQ ID NO: 14094 - DNA, 206 bp, Homo sapiens
aggtacctctgccaccgagttcaagggatcctcctgcctcagcctcccaagtagctgggattacaggcatgcaccaccacacctggcaaattgtcataattttttgtgaagatggggtttcaccatgttggccaggctgcctaggttttgtttttaagaagtaacctgaaatttcctacaacactgaataaagtggttcctgcccg

SEQ ID NO: 14095 - DNA, 335 bp, Homo sapiens
  misc_feature 7, 49, 64, 93, 103, 115, 117, 122, 133, 195, 196, 205, 207,208, 239, 258: n = A,T,C or G
cccctanccagaacagtaggcccagacccccgagcccagaaccagcccncggcagcttttcacnacaacgggccaccagccgcaaaaacacgngcagcagagnaagagaggcacnangggcnggcagaaggcngggcacccacacatttacagacaatttttagcaacagcggggggcccccccaggaccaagcnnggagaaggngnnggccgacagcaggcgcgggccaaacaagagngcaaggaggaggggggccnacagacccaggagaggccacccgccaaggcggccaagcacagcagcagcggacaccgcgggcagaacccccgcccac

SEQ ID NO: 14096 - DNA, 349 bp, Homo sapiens
ccgggcaggtactttttttttttttttttttttttttggggaatcattccccatggtgatatgattgtttaaagagctgggtcaattgtggatcacttgtagaggtctgggttgtcccacagggcaaagaaagtctgtacttgtctggatgggtccacagctcgatctgcgccatcacctggttggtgaaggagttactcatcacgaagctggggtggcccatggcacaacccaggttgaccagccgaccctcggccagcaggatgatgcggcgcccattcttcaaccgataccggtccacctgcggcttgatgttcaccttctccacggcgttctcgttgagccactt

SEQ ID NO: 14097 - DNA, 361 bp, Homo sapiens
aggtacctgaacaaatcccatcaaggacagattctcagtcttgaagaggcagcacggtaaaggggaaagatcatgagttttggggccaggttcccttggatattgtggggtccccacactattggatgatgaaggatcacttatagagactaaagccaaacataagaaaaatttgtatctaacatgataaaaattaaaaaaaagaataataaataatttaactatataatattaaataaataaaaataatataaatataattataaatatatatataatatattaataattaaaataataatatataattaaaattccctatatttattttaataccatatataaataataatagattata

SEQ ID NO: 14098 - DNA, 349 bp, Homo sapiens
ccgggcaggtacattaataagacacctcagaagtgaaacaaacctagtttttactaaaatgatgggataaaggtagtgtctatgctgaagagcagcttcacttgtttccccacagaaaaaggcccaaaatttttggaggataatttaaaaactaagccaataaggccaggcacggtggctcatgcctgtaatcccagcactttgggaggccaaggcgggcagatcacctgaggtcaggagttcgagaccagcctggttaacatggcgaaatcccgtctctaataaaaatataaaaattatcccgggcatggttggcatgcacctgtaatcccagctactcaagaagctg

SEQ ID NO: 14099 - DNA, 610 bp, Homo sapiens
aggtacttacatgggttataaatcctctctctggacatcaatgtagagtccatctttcaagcactttaatttttttagctgccaaagggtatgaattacattattgtatgctaatttccctgaaatcaatgccttctatgttcaccacagggatacaagcctgttatgtttgatggggtagaccattactttttaattatttattaagttaacttctattttcatccttgcttagtataagtgatttgttatagggtgttttggtgtggttataggagtgtattgcgctgtcagttcgaagattatggcgttgttttttagttgttgcaaatattctttatctttccttaacttatatacgattaatattaatgcgtatattaattaagtgataatattttttctatctatgctatcttatattttattaattttttagtaatcttatgatatgtattacttgaaatgtatgttactttttgtgttgtttaagtagtttcattgtgtcttctccttatcttattttcatgaattacggctgttcacgtacttttttttgtttacgcttttcttgtgtgttttctcttgttttatgttgtacttatatctg

SEQ ID NO: 14100 - DNA, 584 bp, Homo sapiens
ccgggcaggtacgcggggaatcccgcaaacacaagaagtcaaagaaatcccacaaaaaaaagcagaaaaaaaggtcacacaaaaaacagaagaaaagcaaaaaagaagccacagatataacagcagattcctcgagtgagttctcagaagaaactggggcttctggtacacgacatctgacttgggaatgcgcaagcagtcgagagcttcgtagaactctcccagttgctccttggtcgtctctggcttgtcagcatagacagacagcccccagttcttttcatcgttcacgttaaaagcatgcatgtaggtcttggtgtccctgacgatcatcaagtgagcgaaatgctcttggccttccacgaatttggagatggtcccattttcccgcttgacattaaggtaggtggcgatttaatgcactggacctgtacggcttgtgacctctaccgatctttaattagtggattacacgttatgacataactatatttcattgttattcatatcatcgcttcatagcgagtacatcagttcactctttattcatttattattaggttcaattagttattgtttttatt

SEQ ID NO: 14101 - DNA, 543 bp, Homo sapiens
aggtacatgtgggagaaaaacttaagtgtgatgagtgtggtaaggaattcagtcagggcgctcatctacagacccatcagaaagtccacgtgatagagaaaccatacaaatgtaagcaatgtgggaaaggtttcagtcgtagattagcacttaatgttcattgcaaggtccacacggcagagaaaccttataattgtgaggagtgtgggagggccttcagtcaggcctctcatcttcaggaccatcagagactccacactggggagaagccattcaaatgtgatgcatgtggtaagagcttcagtcggaattcacatcttcaatcccatcaaagagttcatacaggagagaaaccatacaaatgtgaggagtgtggtaagggcttcatttgtagctcaaatctttacattcatcagagagtccacacaggagaaaaaccctataaatgtgaggaatgtggtaaaggctttagtcggccttcaagtcttcgggcccatcatggagttcacactggaagagaagtcatacatatgtacctgcccg

SEQ ID NO: 14102 - DNA, 348 bp, Homo sapiens
ccgggcaggacagacatggctaatggaccagggcctctgtggtcagaagagagtcaagcaagcaggcggcagatctgggaccagcatgcccaccacccagtcaggccgctctgtttcgtgatgttttggacacccaacgtgtctgagaaaatcttgatagacatcatcggagtggactttgcctttgcagaactctgtgttgttcctttgcggatcttctccttcttcccagttccagtcacagtgagggcgcatctcaccgggtggctgacgacactgaagaaaaccttcgtccttgcccccagctctgtgctgcggatcatcgtcctcatcgccagcctcgtggtc

SEQ ID NO: 14103 - DNA, 319 bp, Homo sapiens
ccgggcaggtacccccttttcactcaaagatgtcccggattggataataaattacatagctataccctgtccatagtagaacctgactacctttatctacggatttatttatagtttgtcacacggtcgaatagctccttcttctcagtaatacaagcttttttggtttgaaatatggatcctcttcccagcataataatgtgattttttttattcattttatgttattatattcacatttttacttaaaggaaaatgctgctatttgtgatgaaattgctcgtcttgaggaaaaatttcttaaagcaaaagaaaaaag

SEQ ID NO: 14104 - DNA, 342 bp, Homo sapiens
  misc_feature 78: n = A,T,C or G
ctcggcctcccaaagtgctgggattacgggcacaagccactgcacccagccacaaacagatcgcagatccaggtttcntcaaaccctggagcatctgcttaattttcccataaaatcagtcttattctttctgacagctctgagactcctccggccacgactaggtgctgtcctggaggaaacggtggaggacggccgcacaaaaaccaatgctaccctgatgaaaaactccgttcccttctcgccagaacataaaatgcgatggagctaccggccaccgcttgccgaagacaaaatggcgccgacccccgcgtacctcggccgctcttaaactagttggtc

SEQ ID NO: 14105 - DNA, 345 bp, Homo sapiens
gctcctttgacaacagtagtctctgctccggcggcggggacaaggcggtggttctgtgggatgtggcatcagggcaggtcgtgcgcaaattccggggccacgcaggggtgagtgaaagcctggagaccctcatttgagtggaggggacccgtattagcgcataggtggtgacacggccacccccattacaccgtaaggatcccttccccagatgacgatcccccacttcgtatgccaggttaggcagccaccaacccctgtccttgctgttccccgcaaaacctttcacctccccttcgcccttgctttaaccgacactgggaaccctgccttattcccagtcct

SEQ ID NO: 14106 - DNA, 339 bp, Homo sapiens
atgacatggctcagcttcggtttaaaaaaggtcagtgtctatctggaaatttctatgtgagaggtgatggaaccagagtttacttcttcacacaagaggaactggacacgcttttcaccactgctggactggaaaaagttcagaatctggtggaccgccgactgcaggtgaaccgagggaagcaactgacaatgtacctgcccgggcggccgaggtacagaaaaatcacagtaatccactccaatgtctgtaaagtccacaaaggtagaggacaaaatctggaatgcctgaggattatttttctttagtttttggcacacattaaacccatctacaatt

SEQ ID NO: 14107 - DNA, 339 bp, Homo sapiens; identical to SEQ ID NO: 14106

SEQ ID NO: 14108 - DNA, 266 bp, Homo sapiens
ccgggcaggtacgcgggggcggaagtgcgagggcccaggtggctgaaggggccgttaggaacatccaagcggtggggcacaggcagatccccgacctgacctggaccacccttctcctcttggcccgccccttcaactcgcctccgcttaggtctggattggccccgccccctgacctgagcctggtccttcttcaggccctgacccttgacctccggtggctcccccatctctcaggcgcgatggctacgggcgcggatgtacct

SEQ ID NO: 14109 - DNA, 266 bp, Homo sapiens; identical to SEQ ID NO: 14108

SEQ ID NO: 14110 - DNA, 340 bp, Homo sapiens
  misc_feature 1, 10, 15, 28, 29, 34, 35: n = A,T,C or G
naaggggggnccggnaatatttgggggnnagggnncccctttttataccccctccccaaaaaacaccattccccgcgggccggggttgggggtccggggccccggggaatattttttttccttcctttttgcccccttttacttttttttgtccccccttttttttcccttttcccccttaaattttgggaaaaatttggggccaattcgaaggggggggcctaaaaggtttcggggtggggcaggcggccgggggcgcaaaccgcaaggggtgcacgggcgaccggagtttggggccgccctggggggccccttgggggggccctaagaagagggacaa

SEQ ID NO: 14111 - DNA, 340 bp, Homo sapiens; identical to SEQ ID NO: 14110
  misc_feature 1, 10, 15, 28, 29, 34, 35: n = A,T,C or G

SEQ ID NO: 14112 - DNA, 131 bp, Homo sapiens
ccgggcaggtacgcgggtgggacccgcagctcagctacagcacagatcagcaccattgaaacttttcaacgggccctgggtttttttgctccttgggcccctggggggtcaaacaaccccgaaaacttttc

SEQ ID NO: 14113 - DNA, 131 bp, Homo sapiens; identical to SEQ ID NO: 14112

SEQ ID NO: 14114 - DNA, 295 bp, Homo sapiens
  misc_feature 42, 48, 71, 78, 79: n = A,T,C or G
ccgggcaggtacgcgggtctgatcgctttaatgacagtttgngttttncttggtttattcagccaccaatncattgtnntaaataccagtatggttagaatgggttccaaattctagggaagcatttcgttttgcaaagaaacctgtttatttccagacttttaaaggatgatttttttttttttttaaaaagagacttggtaatttttaaaaaaagctttttaaaaggggggcattttttggggggggggggggggaaagcctttgggaaaccccctatgtaaaaggcaaggtt

SEQ ID NO: 14115 - DNA, 295 bp, Homo sapiens; identical to SEQ ID NO: 14114
  misc_feature 42, 48, 71, 78, 79: n = A,T,C or G

SEQ ID NO: 14116 - DNA, 341 bp, Homo sapiens
ccgggcaggtacttaaatcagaacagaatgatttaaggctacagatggaagcccaacgcatttgcctctctctggtttattcaactcatgtggatcaggttcgtgaatatatggaaaatgaaaaagataaagctctttgcagtcttaaagaagagcttatttttgctcaagaggaaaagatcaaggaacttcagaaaatacaccagttagagctacagactatgaaaacacaagaaacagaggccatggaggacgaggagagacagaagaagctggaggccggcaaagccaagcttgcccagtttcgacaaagaaaagctcagtcggatgggcagagtcct

SEQ ID NO: 14117 - DNA, 341 bp, Homo sapiens; identical to SEQ ID NO: 14116

SEQ ID NO: 14118 - DNA, 600 bp, Homo sapiens
  misc_feature 600: n = A,T,C or G
aggtacatcaccctgctgagggacatccaggacaaggtcaccacactctacaaaggcagtcaactacatgacacattccgcttctgcctggtcaccaacttgactatggactccgtgttggtcactgtcaaggcattgttctcctccaatttggaccccagcctggtggagcaagtctttctagataagaccctgaatgcctcattccattggctgggctccacctaccagttggtggacatccatgtgacagaaatggagtcatcagtttatcaaccaacaagcagctccaacacccaacacttgtacctgaatttcaccatcaccaacctaccatattcccaggacaaagcccagccaggcaccaccaattaccagaggaacaaaaggaatattgaggatgcgctcaaccaactcttgcgaaacagcagcatcaagagttatttttctgactgtcaagtttcaacattcaggtctgtccccaacaggcaccacaccggggtggactccctgtgtaacttctcgccactggctcggagagtagacagagttgccatctatgaggaatttctgcggatgacccggaatggtacctgcccn

SEQ ID NO: 14119 - DNA, 774 bp, Homo sapiens
aggtacacggctcagaagatcgaagtatcaaagtcacgttctctgtttctaacactgtatgatagacagctttgtggaaatctgtcaaagaacaatacaccatcttgtcttacttcttaggcaactgatccttgataagagtcttggtgcgcctgagaaaccatgccagacatctttttggcaagtctttgcatggcctttcggccagtggctagatctctctttgttgccgtgtgtctctgaccatgttctactgggtcagaaaactgcttcttgaagtacgtcccactccctaaaaggcctggcacagcccagtgcataacacaccacagttccttcatgttgttctgaaagatggttccagcgaggccaatgcggacattacatttcaaagcttgcataacttctggtactctagcttttggattcttgattctatgagcttcatccacaatgacagctgaccattccaaactgttaagttcatccaggcataagcctagtgggtcataagtggcatagcaatttcacaattcctttgctttacacgaattaactcattatcttttctggttgcatgaaaaacagtgactgtgaaaatatcccaggtgtccaattcatgccttttgctggaaaaaaaaggggtccttttgcatacttattagtagaaccttggcaaggtatttttaattatccaacaagatcccatttatgcaaaccgcggccgaatagaaatacctggaccctcccgggcggccctctaaaactaaggaa

SEQ ID NO: 14120 - DNA, 262 bp, Homo sapiens
ggaaagggccaggaaagggagtcaagcaggagcgtctgtccgaacggaggctaggtaagaatatttcaccatgaaaatgttaaaagacataaaggaaggagctaaaccatatggacccaactctccttatatgagaacgttattagattccattgctcatggaaatagacttattccttatgattgggaaattttacctaaatcttccctttcaccctctcagtatctacagtttaaaacctggtggattgatggagtacct

SEQ ID NO: 14121 - DNA, 405 bp, Homo sapiens
ccgggcaggtaccggaagcagcgaatggaagagatgcggcagcagcttcacaaggggccccaattcaagcaggtttttgagatctccagtggagaagggtttttagacatgattgataaagaacagaaaagcattgtcatcatggttcatatttatgaggatggcattccagggaccgaagccatgaatggttgcatgatctgccttgccgcagagtactgtttgcattaataaattaaagctccatagggtcttctcgtcttgctgtgtcatgcccgcctcttcacgggcaggtcaatttcactggttaaaagtaagagacagctgaaccctcgtggagccattcatacaggtccctaattaaagaacaagtgattatgctacctttgcacggttagggtacct

SEQ ID NO: 14122 - DNA, 483 bp, Homo sapiens
aggtaccgggaaccaaactctcattccccaggggcctaagccccccgtggccaggcccttctcaagtcagggttcctgcacattcacagttacgggtggccctgggagtaacacctggcacccaaacaggtcaccagagtccacacatagtccacctgccctccctgcgtaagatcagctcttcctcctcccgacgaatagatcagggtcaatgatccctgccaagatggcgactgctccagcctgctggtccaacctgtccagccacagctgttgctcgaaggcttgaagttcaatgggaccctctcccgctttctacaaactggttcctttatttttatgtttatttatttgggacgaggtctggctctgtcacccaggctggagtgcagtggtgcaatcactgctcactgcagcatccacctcccagcgtccacccatcctcctggcctcagcctccggaacagctggggtacctgcccg

SEQ ID NO: 14123 - DNA, 310 bp, Homo sapiens
ggcgcggtggctcacgcctgtaatcccagcactttgggaggccgaggcgggtggatcacgaggtcaggagatcgagaccatcctggccaacacggtgaaaccccgtctctactaaaaatacaaaaaattagccgggcgtggtggcgggcgcctgtagtcccagctactcgggaggctgaggcaggagaatggcgtgaacccgggaggcggagcttgcagtgagccgagatcgcgccactgcactccagcctgggcgacagagcgagactccgtctcaaaaaaaaaaaaaaaaaaaaaaagtacctgcccg

SEQ ID NO: 14124 - DNA, 532 bp, Homo sapiens
aggtacgcggggctcactagaaggagccccctgaccccttcttccaaaatactttttgtctttgtcttcgtttctgcattcatcccccttcgttcactcccataacaaccaacagcgacaactggcacctaggacagggacgtgagtgaaggtctgctggagcagagaaactgacactggcaagaagaacgagaatgagaaaccctgcgacgagtctgctgacagctgatataagtctgcaaaatcagctggaccaccaaacggcaattgagagctgcacaacctgcaattacctttattcaattaatgcaaaaacaaaaatggggagatgttacaggccgaaagaatgaaggtcgtgaccaactcagtataccactgaaggctatatgagcaaacagaaaactgttctcatgaaagcaggatgttggaaaactaacaactgtgtctgccgccagaaaggttgctgagggcagtcatgccccaagcgcagtgttccttgtgattatctatagtaacatctgaagccttgtgt

SEQ ID NO: 14125 - DNA, 641 bp, Homo sapiens
acgtaccacaggacaatcccattagatgtatcccccaaataggaaaagttaatttccccaaccttaaactgctgggcttaaaattgagctcacgggaaaggaatccaaaagcctccccgcgtacttgggctttttgttgtttactacttgggaaattggcatgtattctgcaaacacttgttttacgccagttttaccccatctgctaaacgcaatgcatagtctgtatcaaccataagaacccatctgtaaaaacatcaatgttgatagtcaaagaccactgtgttacaaccaaaatcaggtcttgtatgattacatacatgagacagagcaatggtggcacatgctgagcatgacaatggctcatatgtttgacgcaaaagtaaacaaattcatggatgcattcacgaggaatgccttgcatggacaagggtaaagttcaatttaaaataaaagctccctaatattcttatagggcaccagctctaaaccggtctgtagaagagcttttgggctgaaacatctgccaggaacattgccaatcccatcactaccttcatttcctagtgcaaatggaaggtgcagctgtttgaaggtgctttttaaaagagcaaaagatgacttgcccgcgtaccttgccc

SEQ ID NO: 14126 - DNA, 371 bp, Homo sapiens
  misc_feature 123: n = A,T,C or G
ccgggcaggtacgcgggggctgatgccattttcagcctcagcacgcctgcacccaggcgctcattaaaacagcatgttgctccccactgcctcgtgttgtctgttggcgcgctgtcggggttnaaccgatacaagaaccttccacctacctggtgctttggcctcatctataagcagcttttccactgtcctgaaacaagatagagaatctgagcggccagtcatctgccctaagtgctgccgccgaagactgaatgtcctggaaagtttgctgtcacatctccattatgacaaaagcattgtgccgaacagatgaaaaaatgcattgtcaacggaatcttttatgtttgtttgtcttcctttaagcaaca

SEQ ID NO: 14127 - DNA, 410 bp, Homo sapiens
ccgggcaggtacgcggggggtatgaaggagctggccgtgttccgggagaaggtcactgagcagcaccggcagatgggcaagggcggcaagcatcaccttggcctggaggagcccaagaagctgcgaccaccccctgccaggactccctgccaacaggaactggaccaggtcctggagcggatctccaccatgcgccttccggatgagcggggccctctggagcacctctactccctgcacatccccaactgtgacaagcatggcctgtacttattggcacaaattcgggcagcctccagggcttcagaggacagctgctcatattcatctgacaccatgtggccccaaagcggaaactcatccacttttgcctttttccgccccaagtcaaaaatgccaatcttggcatg

SEQ ID NO: 14128 - DNA, 352 bp, Homo sapiens
aggtactataatggtccccatcttaatttgaaagcgtttgataatcttttaggacatgcactgacgaaggcactcgaagactccagcttcctgaaaagaagtggcagggacagtggctacagagacatctggtgtcctgaacgtggagaatttcttgctcctccaaggcaccataagagagaagattcctttgaaagctaggactctcagggctcgaggtcattgacaagctgctcctctgatatcacattaagaggggggcgtgaaggttttgaaagtgacacacatgccggaatttaccattcaagatgcaggattataataaagatgatatgtcgcatccaaggatttt

SEQ ID NO: 14129 - DNA, 416 bp, Homo sapiens
ccgggcaggtactttatagcatttgccccaccccacagcttaggtttttctgtcatcctcagatcccacaggcattgcgaagaagccgctccctatacccaggtataactcaaaatccaaagggatagggccaggatccctattcctaccccatctattctctgttggctccaagagctaccccagagaccttaaacagaaacagtagctgaggcttcttcctagatacctgactagggaagtttgtctctcctttcttgcccaaccaggtcaaagtaaaatgtgagttgacagctcaaagcacttgtaactgctgccccctccctacctctactccccaaaatggaatcatgggatagggaaggcccccatggggtcagaagggcacggtaggttcttgcaataatttttgtttt

SEQ ID NO: 14130 - DNA, 403 bp, Homo sapiens
aggtactttttttcttttttttttttttttttttgctccaaacagatttattgaatacagcaaaattctatatacaaagggacctggacctgctgcttcaaaacatgatctttttttactaatatcttgatagtcgggccatagagcattagaaagcaattggctcttaaattaacagaaaagtgcctaatgcacattaaatgaatggcctaactactggaactttagtagttctataaggtaattaacataggtaggatccagttcctatgacaggctgctgaagaacagatttgagcatcaagaggccattttgtgcacttgccccgtgatgccatcgtgttactggatcataatgtccccattatcgggatctagaaccaccacaggaatattagggggg

SEQ ID NO: 14131 - DNA, 471 bp, Homo sapiens
  misc_feature 4: n = A,T,C or G
tganaattgaccggccgcgtatcctatgggcaaatggagctcaccgcggtggcggccgaggtactgatgaacccgaacaggagttgcttctgttttaattctactactactggtgcatgatttacagctaaaccagagaggagtctgcaatgccgagtggaggaaggaggaaccggagtgtgagcagtagctgggtgggcaccatggctgggatcaccaccatcgaggcagggaagcgcaagatccaagttctgcagcaccaggcagatgatgcagaagaacgagctgagcgcctccagcgagaagttgagggagaaaggcgggcccgggaacaggctgaggctgaagtggcctccttgaaccgtaggatccacctgggtgaagaagagctggaccgtgcttaggagcgcctggccactgtcctgcaaaagctggaaataaactgaaaaagctgctgatgtaaagtgagag

SEQ ID NO: 14132 - DNA, 457 bp, Homo sapiens
gaagagttgcggcccgtatcgactagtctaaggggaactgcaccgcggtggcggccgaggtactgcacgacgtgaatcatgacattggagaagacactgacgtagaggcactcgaagagtcttcgtaagctgtgcagccacagaaatactagcactaagaatgcagacagtgccagctcccctccctggaactgtgccgccccgagaattctgagcaaaccatgaagccagcttggaaaaggtgctcccaggaacagagattgagtaaggcaccaaagcaggaagccattccacagcactgagatgatataaaagtgggaaaaatatctcttggggacatcaaaggctcggcaggcggcggggcgcgacggctccccacacttggttttcccataacggatcaggtcctggaagatcgcgcagcccgggagcaggccgggcggcaggagctgcaaca

SEQ ID NO: 14133 - DNA, 375 bp, Homo sapiens
ccgggcaggtacaagggcatgacaggctgggaggtggctggtgatcacatttacacagctgctggagcctcagacaatgacttcatgattctcactctggttgtgccatgatttatacctccgcagtcggtgatggcagacacagagaattaagaagggggccagaatcacatttgtctttgagaccctctgttctgtgaactgtgagctctacttcatggtgggtgtgaattctaggaccaacactcctgtggagacgtggaaaggttccaaaggcaaacagtcctatacctacatcattgaggagaacactaccacgagcttcacctgggccttccagaggaccacttttcatgaggcaagcaggaagtacct

SEQ ID NO: 14134 - DNA, 396 bp, Homo sapiens
aggtacagaaggtagatttagaggtgaggggcaataagtaaatgactcgcacagatggtgttcatgctcaatgtttctcttctgaacaattttcagatttggtgttaaagcaccttctggccaggcgtggtggtttatgcctgtaatcccatcactttgagaggcggagtcgggtggggattgcttgaggccaggagttcaagactaccctaggcaacatagtgagatgctcgtctctattaaaaaaaaaaaaaaagaaaaaaaaaggggacccaaggccatatatctgtttcattcctagaaactctccacagtgtcagatgaagactgcaaatccagtggtcctacattcacagataattcctagcctttggttagtgaggagaatgggatggg

SEQ ID NO: 14135 - DNA, 135 bp, Homo sapiens
agctcactgccgccccgccccccccgcgtacgtccaggcaccgccagccactgtcttcatgcaggaaccacagtgccagatccccacagctcgtctcttcatcttggttttgccacagaaagagcaagtgtacct

SEQ ID NO: 14136 - DNA, 412 bp, Homo sapiens
ccgggcaggtactatgctttactaatagaaatacctctttgctgggggaggggagtgcttctgaatagaaattacccactctgagttacagctttagtggcatattaatggggatttaaatttacagtaaaaacaaaaacaaaaaccaaaaccaaccctattccaattatgacaaatctatttttttttaaaacctatcttagatagaccatctccctacgataagatggcagaacagaatgtcaggaggagaggtttggtctgaagagggttatctgtccaggagacgctttatccccaaagcaatgcgcttcagtttgctgtgcgcagcagagcacctgttggggggagaaaagtagagcacctagaaagtccatgaacaaattccagcagcaaaaaaacttcctacccg

SEQ ID NO: 14137 - DNA, 397 bp, Homo sapiens
ccgggcaggtacgcggggaggcttgaagtgtggggagaacttggtctcctctgtgctatatgaaatatgggagacgacataccgtttgtgtgcaatgcaccccggctgtggacagagatttacaaacgaggaccacctgtcaaactattaaacccagccatgagatgacattgaaatttggcccataccgaactgactcacccatcattggggatcaaacccctactccaactagattcctgaagaactgttaggaggcgggactcttcaatgaactaactagctcctttgaacatgaattcaagaaagctgcatatgaggatgaaaaaaaggcttgaacctagactgttgccaaaaaagtggtgagtttcagacctaagctatttttattgcgctt

SEQ ID NO: 14138 - DNA, 428 bp, Homo sapiens
aggtacaaagggcagccctgcacgctggagggacttccactcagccacaatgctgggaagtcacatgtatgtctttgggggccgtgccgaccgctttgggccattccattccaacaatgagatttactgcaaccgcattcgagtctttgacaccagaactgaggcttggctggactgtcccccgactccagtgctgcctgaggggcgccggagccactcggcctttggctacatggggagctgtacattcctcattagattgtgggtttcaagtttccatttgcaatttgaatgtttccagaaatctctgtcttaaccaaacctctctctccaggcacgattctgcacatgagtctgatctgtgtagagtagtatcatcaaaaatgccaaattttgatcaggaatatacctggactactctctttcaa

SEQ ID NO: 14139 - DNA, 432 bp, Homo sapiens
  misc_feature 432: n = A,T,C or G
aggtacctgtaatcctgaagaaaaggtcctaattccttccatgctgaaatgctagctttggtttcagagagagactttattgcaactgtgaccaccgtcactggtgagcactgctgttcggcccccagcggacttaaaagactggaatgtggtagtggcggtcgttctcggtcagcagggagatctccggccagtccctgagaggctcctctgggtagcagacttcaaagtctctggagttaaacttgaacagtctgaacacttttatctttacttcaagggagtatccaagtataaacatatcaatctgctctagtccacatgtgtcgcctacagaattcaggtgattcatcatgaagctcaaaggatcagaggatgtctccctggaaaacaggagtctaaaaagactgggaatgacctttttagtcttan

SEQ ID NO: 14140 - DNA, 422 bp, Homo sapiens
ccgggcaggtacctgtttagccacgatggccgccaggcggcccaggagatggcctcgaccatcaagcaccaggacctgcacctccgccatcttcggcagccgcttggaaaagccccgcgtactttttttttttttttttttttgagcagacacagacacagatgtttattccaggaagaggtctaagaaacgagcttcttagagcatgtgtcacggggcagccagtcctggggctctcagagccagccccctcccttcagcagctgaagcaatagcgcccccattttacaggcggagcatggaagccagaaaggtgggtgggggagggggtccttccctggctcaggcagatgggaagatgaagaatccgttgaatacgctgtcggccttaaagccctggtaaatgttaccctttttggggg

SEQ ID NO: 14141 - DNA, 520 bp, Homo sapiens
  misc_feature 520: n = A,T,C or G
aggtacttttttttttttttttttttttttttttgcatttttagtagagacagggtttcaccatgttggccaggatgatcttgatctcttgaccttatgatccgcccgtcttggcctcccaaagtgctgggatcacaggcgttgagccaccacacctggccccctatttaattctcttttaaaggagaaaagaaaactttttaaaaaggcccaaaaattatttaaattaaaattcttttacctttatccgcaaaggggaaaaaaaatgggaattttgccctaaataatagggttgattgaaagccatatcaccatattgaaccacgaaaacaaattcaacatttttttaattaaaaaagtgcaaaaaatattttgagaaactttattaaagcttataatggttaagctttattttttttgggttgtggggaagtaaaattgagtaaaaaggaattttaaacaattttcttaactggccatgtacaccattttttgtattaaaaaaattctttatatgttn

SEQ ID NO: 14142 - DNA, 423 bp, Homo sapiens
aggtacgcgggggaattccggaggcggcattcggtggtcagaggcctgtgcggctgcaggtagagtgtcttaggaacctaggaaataactcggaacctgtaacgtcccactggtttggacatattcctctcctgatctggcctcatctgttccagggaggtgggattgaaacatatgcagtaatgtcacctcaaaagagagttaagaacgtccaggcacaaaacaggacttcacaaggtagtagtagttttcagaccacgctttcagcctggaaagtaaaacaggatccaagcaactcgaagaacatctcaaaacatggacaaaacaatccagtgggagattatgaacatgctgatgatcaagctgaagaagatgctttgcaaatggcagtgggatattttgaaaaaggtcccattaaagctt

SEQ ID NO: 14143 - DNA, 789 bp, Homo sapiens
aggtacaaactagtggggaaggtttttttaaaaagttttgcagtcttgtaatttacctttttaaaaaatttattttatttttctgagatggagtcttgctctgttgcccaggctggagtgcaggggccatctcagctaactgcaacttccacttcccaggttcaagcgattctcctgccttagcctcccaagtagctgggactacaggcgcatgccagcatgcctggctaatttttgtatttttagtagagcgggggttttgccatgttggccaggctggtcttgaactcctgacctcaggtgatccgcctgccctggcctcccaaagtgttgggattacaggcatgagccactgcgcccagccttgtaatttacctttgatggtgacctgaaatgcagtatgatcctatatgtggcacgtagtaatgttcagtgtttgctgaattaattctgggcagcactaagaaatccctctttcccagtcatattctataacacatttcccatttgccacaaaacctgcagctttttggtccaggtaatgacatttgctgccattttgatgatttaaaaatggtcgtgggagttgaacatagtcatgaattcaggattcctgaacctgtagacagtcatcccaatgaaaaaacccttcacttataaagaagttaagttagaggaaacaggttatgctaaaaaaattttagaaaagccttgaaaatgtttgattaatcttgccctcttaaactggaagtatgaagggcatagtttgatcaccggtatgaagatggg

SEQ ID NO: 14144 - DNA, 326 bp, Homo sapiens
aggtacaaggccaagaacagggagacagggcagctggtggccctgaagaagatcagactggatttggagatggagggggtcccaagcactgccatcagggagatctcgctgctcaaggaactgaagcaccccaacatcgtccgactgctggacgtggtgcacaacgagaggaagctctatctggtgtttgagttcctcagccaggacctgaagaagtactactcgattgtcaacgtcaaggagtcgcaggtcgcctggttctaggaataatgggggaagtatgtaggagttgaagattagtccgccgtagtcggtgtacctgcccg

SEQ ID NO: 14145 - DNA, 285 bp, Homo sapiens
aggtacgggttgcccctggcttggcactgcaggacgtgtctcgttttatctttccatttcaagtgctgggggcatgtggctcggtcaattttgggaccatctgtggaaccaccatgtgtgatcagacacccaacacacccgaggcacagtggtgcagaggagcgtctaatctttccagggcaggggtggagggattaaaggtcagggtgaccgactcacacaggactcgcagctggacgctactgttcctgtgcaagaactcgccgtccacctcgagagtggcac

SEQ ID NO: 14146 - DNA, 683 bp, Homo sapiens
  misc_feature 135, 165, 166, 167: n = A,T,C or G
ccgggcaggtacttgccgcccagccacgcccgcgcgccagccaccatgctaggtaacaagcgactggggctgtccggactgaccctcgccctgtccctgctcgtgtgcctgggtgcgctggccgaggcgactttntttttttttttttttttttttttttaaagnnntaacagatgtatttcaaatacagcatgttttacaggagttcacaagcttttcatctctaaaaaaaaactttcaactacctgactgttccattccaccccagacaaacctgacatgactgaactacttcatgtgttactttcccaaaaataaagttaaaaaaaaaaggaactcatgataaatgcagatctctaatacagtatctaacacaaaagaagctttaaaaagacagtttctttccttatttgattagctagaagtttatctaggtaaaagcaaaaaaaaaatttacaaagcataacataacattggggttctttttatactcaagatgtttaactgttcaaaatgacaacaattacatcttttaagaatataataaaatgggtggaaaacagcaacacaactgacaaaagtgtagatgctaaataaaccaaaattttttttttaaagagtaggaaaaaatccacagcttggggaaatctcaaaatttaaaaaaaaaaaaaaaaaaattcctt

SEQ ID NO: 14147 - DNA, 614 bp, Homo sapiens
ccgggcaggtactttttttttttttttttttttttgcaacctagcagttcaaccaatttctcttttaataaaagctgcacattacagtggtataaatttatcttttaaacactccacataaaaacatgtgcaccctctccttctacatttaatcattagtagtctctaaaatggtaaaataaaactgaatttatattagcaaatgaaagtgcaagtttgtacgcggggggtggcctttggggccgaagtgggcgtgcggctcgcgctgttcgcggccttcctggtgacggagctgctccccccgttccagagactcatccagccggaggagatgtggctctaccggaacccctacgtggaggcggagtatttccccaccaagccgatgtttgttattgcatttctctctccactgtctctgatcttcctggccaaatttctcaagaaggcagacacaagagacagcagacaagcctgcctggctgccagccttgccctggctctgaatggcgtctttaccaacacaataaaactgatcgtagggaggccacgcccagatttcttctaccgctgcttccctgatgggctaacccattctgacttgatgtgcacct

SEQ ID NO: 14148 - DNA, 413 bp, Homo sapiens; identical to SEQ ID NO: 4979

SEQ ID NO: 14149 - DNA, 393 bp, Homo sapiens
ccgggcaggtactttttttttttcttttttttttttgtgggtgtctttggggtttggttggttcggggtatggggttagcagcggtgtgtgtgtgctgggtaggatgggcgggggttgtgttgatgggattagtagtatgggagtgagaggctaaactcccgccccaacagacttttgacaaaaaagtgcccttcccgtcgaaacttgccctttgaccggccaatatggtgcagagagaaataagccccctctgctctctggcctaagttaactcaaaactgaaaatggggcggtccaaaccccctgaagctaaagttgcctctccttttgaagcacccgctatcggacacccaggtcccaaagaccacggatcggcatggggtacctgcccg

SEQ ID NO: 14150 - DNA, 201 bp, Homo sapiens
acgtcggatgacatgttaccatgacacaaaacgacaatgaccacggcaccacaccaagaatcatctacctatattacaaccagacattagcactcaaataaggaggtgctgccgtatacttatccgttgctggaggcagcatgaatgggaaccagacacagctggaaagcaatcgggtaacagagcgccaaccctgtacct

SEQ ID NO: 14151 - DNA, 347 bp, Homo sapiens
aggtacttttttttttttttttttttttttttttttttccaataaatctttattaaatgaatgaaaggaggaaggagtccttaactgtagctaagcttccactcttaagtatcaattaagcttctctgttcagtccagcgtttagggcgcctactgcgcgccccgccccacacacttttgacaaaaaggtcgcctgctctgtgtgacttgccctttcgccggccagtatggggcagagggaaataagccccctctgctctctggtctcagtttactcgtaactgaaagtgggtcggttcaaaccccctggagctgaggttgcctctcctcttcgagcacgccctatc

SEQ ID NO: 14152 - DNA, 142 bp, Homo sapiens
ggcccaggagagaacacggggaggtttgtttgtgtgaaaggaaagtagtccaggctgtccctgaaactgagtctgtggacactgtggaaagctttgaacaattgtgttttcgtcacaaggagtctttgtaatgcttggacct

SEQ ID NO: 14153 - DNA, 349 bp, Homo sapiens
ccgggcaggtaccttggctccggctacttcactgccatccagaacttgaggaaaagtgaggaggaagtggctgcccggcgtgcgcgggtcgtgtggtgtgcggtgggcgagcaggagctgcgcaagtgtaaccagtggagtggcttgagcgaaggcagcgtgacctgctcctcggcctccaccacagaggactgcatcgccctggtgctgaaaggagaagctgatgccatgactttgtctgactacaatattcaaaaggagtctactcttcatcttgtgttgagacttcgtggtggtgctaagaaaaggaagaagaagtcttacaccactcccaagaagaataagcaca

SEQ ID NO: 14154 - DNA, 460 bp, Homo sapiens
tccgggcaggtacagtatatttggccaatctcagcttagctcacagtagctacccatcccccacccctcagccctgtagcaggcagctgtgcacatgttcctagagcagcttacttgcagctggcagaaaccagggttgacacaaaagaccccgtcctctaaatatcgtggatctgttctttctgctgattgctgcttctcactacagtgacacaaacacagaggcaagccgccattgttgcacatacccataccatgattgcaagcccctttatctttggctgaagttattttcagaggatttaaagagctgacaccgtcaccctcctcatccactttatgtttttcttttccctttttgggagccagtcattaaagactagcatattcaaaagcaactgcctatacatgagaaataagaaagccagtatgcctgcccagggaaactcttatgctcaag

SEQ ID NO: 14155 - DNA, 522 bp, Homo sapiens
agggcagtggacctggacttggagtggcgccaaggccggatcgcccgggtcgtgctgcaagatgaggacatcaccaccaagattgagggtgactggaagcggctcaacacactgatgcattataaggtgtcagacaggtcggtggtggctctggtccccaaacaggcctccttcttacaacatccttggcgtgtgccagcgttatccccggatgtttcatcacttagatatggactctctcctttcagcgtatagcggtcaagccccagacagcacttgcggtccccggggccccgattggatcacctcccaaaccttggaaagtcgggggtcaaagggagttggcattctttggtgaaagaaaccatgtaccaccggctgacccagaaagggaggtgttgatccgggtgtcagctatagatggggggttcccgtgaattctaactctgacccctgggctaactgtgcccactcaaggcgccacctcctgcaaaaaggtttttgtgggctccgaccttcgtt

SEQ ID NO: 14156 - DNA, 461 bp, Homo sapiens
ccgggcaggtacgcgggggagtcaaccggatcggtgactgtggagggcgagctgagccctggccgccgccacaatgggccgcgagtttgggaatctgacgcggatgcggcatgtgatcagctacagcttgtcaccgttcgagcagcgcgcctatacgcacgtcttcactaaaggaatccccaatgttctgcgccgcattcgggagtcttttctttcgcgaggtgccccagtttgtcgtgttttatcttatctacacatgggggactgaagagcttgagagatccaagaggaagaattccgctggcttatgaaaatgacaaatgagcaacgcattccggatgacgggttccctgtctctgaaagacctttttttggaagaggagtctggattgcagtgtctcaatgacacaattaacttcctatggccttggaccaatatagcaaacccaagcaccctgggg

SEQ ID NO: 14157 - DNA, 248 bp, Homo sapiens
ccgggcaggtacgcggggaagtgaggcagcggaggacgacctttttccggttccggcctggcgagagtttgtgcggcgacatgaaactgcttacccacaatctgctgagctcgcatgtgcggggggtggggtcccgtggcttccccctgcgcccccaggccaccgaggtcccgtatttgccttgtggaattcaaccccaacttcgtggcgcgtatgatacctaaagtggagtggtcggcgttcctgga

SEQ ID NO: 14158 - DNA, 106 bp, Homo sapiens
ggtacgcgggcggcctcatcgccgtcatcgtggtggtcgtggtggccctcgtcgccggcatggccgtcctggtgatcaccaaccggagaaagtcggggaagtacct

SEQ ID NO: 14159 - DNA, 541 bp, Homo sapiens
  misc_feature 541: n = A,T,C or G
aggtactttttttttttttttttttttttttttggttttttttttttttttttttttttttttttaaaggagttagcatttaatgaaactccctccatgtggcttcaagccaccaggacacaggcccccccaacacttttaattttctcctcagcttttctgctgaaaaatttggcctttacaaaagacagggctgcttttgggagcttttccctttttccaaaaactttgtagtaccccccgatccgcaccacatcaaatgatggggaaaccagcccccagttttttgttttttgagcagccatttcaccccgtggtcgtgttccacctgacccaaaagtgccaccaatttttgttcaaaggggttgacccagtatgggcgcaagaaacgcttcttgagtttccctcttattaaaggtgggtaaattggcttttcaataacccaaaccttttctctcaaaaaagtagcctcttgggggtgggttatttttgttcccaaagtttggatcccggggtggggggattgcacaacccaccaccn

SEQ ID NO: 14160 - DNA, 447 bp, Homo sapiens
  misc_feature 447: n = A,T,C or G
aggtacgcgggggaggagaggcaggaggcgacggtcctgacatctcacacattgcccgactcgctggtgtatggagccgactggtcctggctgctcttccgttctctgcagcgggccccctcgtggtcctttcctagcaacctaggaaccaagacggcagacctgaagggtgcaagcgagttgccaacaccctgtcatgaatgcagagaggataacgatggggagggccatgccagaccccagagtggaatgaagccactcacagagggcatgaggaagaatggcacctggctgcaggctacagcagccaccacacgtgactgtggcgtgaacccagaagaagcagactcagccttcagcctcctggccacctgctccttctatgaccatgcgctccacctctgggagtgggaggggaactgagcttgaaatcatgaagccccttcn

SEQ ID NO: 14161 - DNA, 451 bp, Homo sapiens
ccgggcaggtacgcgggatcggattgtgatgtgtgccaaaaggtggattttatacgacaactggcgatgaccagctcagtggctggactgaaagaagctccaaagcacttcccaaagccaaacttgctccaaaaaatggtcatggtcattgtttggtggtttgctggcagtctgatccactacagctttctgaatccaggtgaaaccattacatctgataagtatgctcagcaaatcaatgagatgcaccaaaaactgcaatgcctgcagccggcattggccaccagaaagggcccaattcttttcacgacaacactgggccgcacgttgcacaaccaacgcttcgaaaattgaactaattgggctatgaagttttgcctcatctgccatattcacctgacctcttgccaacaaactaccacttctttaggcatctcagcaacgttttgag

SEQ ID NO: 14162 - DNA, 515 bp, Homo sapiens
aggtacgcgggggacacggatcaggtcacaactcgcgtgctgatcagtagtgggctcgcgcctgtcatcccagcactttgggaggcctaggtgggcggatcacgaggtcaggagatcgataccttcctggctaacaaggtgaaatcctgtctctactaaaaataccaaaaaaattgggctggaaaatggtgggcgggccgctctgaagtttccagcttactctgggaggcttgaagctacgagaattggcctgaaccccaggtaggcattagcttcgcagtagtggcggagaatgcctgtccacttgcaatcccaggcctggtgtgacacgagcaagcacttccgttttcataaaaaaaaaaaaaaaaaagtaacgcccgggggaagtctcactcaagtatagaggtttgttggctcgaaattcacactgttcagctacccctggaacggggaagaaacccttaataagcacaaaaatcgggatgctggagagaaaacaaggcaagggttctgtt

SEQ ID NO: 14163 - DNA, 186 bp, Homo sapiens
aggtacgcgggatgccaaactctaataaaatggagtcggggggccacatagaagccctcacacacacatgcccgtaacaggatttatcacaagacacgcctgcatgtagaccagacacagggcgtatggaaagcacgtcctcaagactgtagtattccaaatgaactggcaaattcttacctacca

SEQ ID NO: 14164 - DNA, 446 bp, Homo sapiens
ccgggcaggtacgcggggagaaaccctcataaagtagatgcagagggcagtaagatataactcaactttgaaaatgtcagccgttatagttgaagaaatctgacccaagagacctcgctccgctgcaagatggaaggaagcttaagtaagacataaatttgtaatgaactgggccccacatccgccgccactgtgacttgcagtcatcatccattaccacaaaattagttgcaggatggctactcgtatccctccacacatgatcatcagtatttgcctcctgtgtcccaaccggcctgagtcaaattcccactctgtcacccaagctggagtgcagtgatgtaatctgggctcactgcaaccttcacttcccaggttcaagagattcttctgcctcagccttcaaagtagctgggattacagggttacgactcactgattaaaaa

SEQ ID NO: 14165 - DNA, 153 bp, Homo sapiens
ccgggcaggtaccgcttggcggtgcggcctggtgtcggcttgcaggttctttctgtgtttgttctctgccctgccaaggccgtagagctggtgcgtgcgggtagcggggctctccgaggagccgcacgccggcggcaccatggtccacctcac

SEQ ID NO: 14166 - DNA, 405 bp, Homo sapiens
aggtacttctgatagctcatcactttctgtgtcagaactttgaaaagcaaagacaggacatcgacttccttcgagattgcctactgattcttctagaagacagagatctactggggtagtccgggactgactgcaaagagcctcaggtaaagcagaggccattggccggcctaaggttggcagtcaaagaggctgcggaaggttgaaaatgaaaaggagagtaagcagagggatgataagacccaaaacctctgatgggatcagggtctgtaggaagagagaaatgaagctggggagaatccagctcagggaaggtgccagcagaaggcctggtagtaaagcctccaggatgttgcagtggagcagactgtgcagagcttaatgagctccctgaaaaaacaatgc

SEQ ID NO: 14167 - DNA, 474 bp, Homo sapiens
ccgggcaggacgcgggggctgcttagcaggggaaagatggcggtgacgggctggttggagagtctgcggacagcccagaagactgcgctgctgcaggacgggagaaggaaggttcactatttattcccagacggcaaggaaatggctgatgaatctgaccaggaccaccattgaacctcctttgtgagaatgcgggcttgttaaatgtgcccttgtgaagccatggacctgttggcagcttgacggtaagagacccaatcgccacctaggagctaggggaaccttgggggcctcgaactacatcggaggaacagtcaatgcccacatccattatgcttcgatgccgcaaaggtagcaccctagtatcgaagtttgccatgtgggccgcgcttgctgaatacccctaacccttattccctaatggaattggtcttataagacgctctttatgttgggacccaagataaggaagcg

SEQ ID NO: 14168 - DNA, 400 bp, Homo sapiens
aggtacctggctttttagactctacataggaattccaccataattaagatgtataaacttgacctacagcctaaagcccaatatgcttccctcaagaacatcaacagtgttcaagcttagctttgttacagaaaatgaggtagggtgcggtggctcacatctgtaattttaaacagttgggaggccatgcaggcgcatcagctgaggtcaagagtttgagaccagcctggtcaaaatgatgaaaccccatctatactaaaaatacaaaaattagctgggcatggtggcacacgcccgttatcccagctactcaggaggctgaggcactagaatcacctgaacccaggaggcggaggctgcagtgagctgagatcacgccactgcattccagggggaaaaa

SEQ ID NO: 14169 - DNA, 433 bp, Homo sapiens
aggtacttttttttttttttttttttttcttcttgttctcaaaaaggtcaaagggagcccgacgaggaataaatagcaatgccctgaattccaactgaccttctacagaaaagtgcttgactgccaagtggtcttcccagtcattagtgaggctcttggagaattctccatacctcctcttgggtgaaggaatcaggggtttttggtccaaataggctttggtcttgtttagttcttcctgatcaatgtatttctctttgatcttcttagttttcttcttcttatccttaccgctgtcattccttcctcatcgtgaaccccacatctttcaatactttgggcttttctttcatcaatcttttatactgtcctccttacttttctacaccttttcttattcctgctgccttcattcattcacctaaattttcct

SEQ ID NO: 14170 - DNA, 402 bp, Homo sapiens
aggtaccagtaaaagagagaaacacacaggttaaatatcttcttgtggggttaaggggtagaacctatcttgccttcactctcaagataacgactcaaattaagctttttgagcaccactcttgtggggacacacatacgctgatctaggaatgaaatcttcgtggtcttcaatcctagatctactatgccagtttctctctggctttagcctttgagaacctgtataagaatacgtaagtaatccagagctgtgaagagtttaaaggccaacttctccagtgaactcaacctctgggtcacttgcaaccagaaattggatacctcataatgatgcaggaaagacccgagttcatgatgagtttcaaaggccacgttcatttaggaaccaactctctctgga

SEQ ID NO: 14171 - DNA, 465 bp, Homo sapiens
  misc_feature 231, 236, 237, 263, 264, 295, 302, 303, 325, 336, 337, 338,350, 351, 369, 370, 371, 377, 378, 386, 387, 394, 395, 413,414, 415, 422, 424, 425, 453, 454, 455: n = A,T,C or G
aggtacgcgggaagcattctcaggtctggattagagacaggaatctgtctccacttccttacatggctagacacagagcccgggagggcaaaggaaaattggaggccccttcttcccatgagccattttctctgcatcccctgcccataagccttcactggcctctggacacccctcatgggttgactgcagactgctcctctcagtggccctcatgcccctccactgtgnctcanngcgcacggaaaggagtgaatacctcnnagttcttcctgaggggaaccctgaggcaccnagagaanngtggagggggcatttagaactnggccaagtggnnncagggcccatgnnataggaaccctaggcagnnncctgcnncttggcannacctgtnngtttttaaaatggttgcnnnttatgtntnncatctgttgaaccttctttacttcaccnnnctctcctgcc

SEQ ID NO: 14172 - DNA, 407 bp, Homo sapiens
tgaagtagccccccaacttgctggcgtgctgcttctttgggaacacccctgggtggcgtttcatgtaatgggacacgatgcccttcttgctgaacgactggaaagagcacaaggagcactttttcttctccactgcccgcctgagttcctcgctcagctgaggggaagtcgtccttgggcggggatgggatgatcaactttgttgggcttgtcgctgatggtcctggaggctgccaagcagtgagtgtaatacgcatcaatgtcgtggcgcttctggtagtgggctgccagacctttgcggatggggttggtgtaggcacacagggcacacttgaagaggttgttcttgccttctggctgggctcggacattattgtgcttgatgcggtagtgcctggcgatcccct

SEQ ID NO: 14173 - DNA, 299 bp, Homo sapiens
ccgggcaggtacatctggcaggggactgttcattcaactttcgaaagagttgcttagcctgactctgatactgttgaaggtcccggccagactgttcgtcctcctgcatcgaggcggccagcgggagcccgtccgccactcgggcgatcattgttagcaacacccttttttacaaactacagggatccaacactggcccggaaggcccttggcgccgtcctcacttcctccgccgcgacaacagttataccctatgtcccagttaccggagatccagctgcttgcgtccccgcgtacct

SEQ ID NO: 14174 - DNA, 539 bp, Homo sapiens
tgtgacgctatcactacttaggcgattgagctcaccgcggtggcggccgaggtacttttttttttttttttttttttttttggactcctccatgctgcagaacccacagtgctgtccatagaggagaacaagcaacgaagatcatggctaaagatcttagagatccttaaaatgccgattcctaatctcttgctgaaaactactgacttttagatattttcccacttggccacttttgtaatccagaaattttagggaacaagtttcttaaactccgagttttactttttaacttggtggtttgcatagtggtggggggacaaaaagtttattgtgtctttgtggcaaggtaacactagttgggtatcttgtcagcccttgggagggaggtgttataaaaaaaacacaaaataacgggtcctgtggggcagcaactggccttccgttgaccgtgtaaattccccaattaacctttttgggggaggccaaaaagggcacggctggagattcatattggagtgcgcagggtaggtttcaag

SEQ ID NO: 14175 - DNA, 473 bp, Homo sapiens
aggtacttttttttttttttttttttttctttttttttttttttttttttttttttttttttttttttttttgggcgcagctgttttaattcaatcccacccccctgtccagcaggaaaccccttatagaaaacccaaatcctcatctgggagtttttccttcagccaggggagaacttttaaaaaagggtgatgtgaaaagttttcggggcggtgagcagggtcacctgtcccgggcgggccgagtgtaccctcacggggaggtctgtgtgtgacccgcgaaggtgcattgtggagggatagagcacccgaataatagccattcgcgggagaggggggttcaataaagtggggcccccgcccgcaacaggagggcgttggaagaacacaccacgcgaggtattgtcgcaaatattccttgtactcttgccccgcaaataaccacaatttataaaatttctccttgatagggg

SEQ ID NO: 14176 - DNA, 404 bp, Homo sapiens
ccgggcaggtactttttttttttttttttttttttcattcttgtataaaccagtttatttcttctatcattagtctgttaaatgccaaacctcatttctgtggtctgttgaatgaatcctaaacagttctgtgagaaagcagcaattacacagttatatacatgggcagttaaatttaacattattgataattagttttaaaaaaaaaatactggccaggcacggtggctcacacctgtaataccagcactttgggaggccgaggcggttggatcacgaggtctgaggcgggcagatcacgagatcaggagatcgagaccatcctggctaacatggtgaaaccccatctctactaaagatacaaaaaattacccgggtgtggtggcaggcacctgtggtcccag

SEQ ID NO: 14177 - DNA, 406 bp, Homo sapiens
aggtactcctcgtttcgaaaggccgatgcgatataaaaccacttgccagtgatccggtccagggtggcgttggtgatgggcaccggaactttttttttttttttttttttttggggtctagtcatcctcggcggtcttctgcttcttggtatcgacatcgtcattcttattaatcttaagcttgcccgcttgcccgtagctgactcagcttcctcatcttcatctccatcctcttcctcaccatcaccttcttcttcctcctcctcttcctccccaccttcttcctcttcttcgtctacctcattgtcagcctcctgctccccattttcctcattagcattcccgttagcaggggcggtctcttccattttctgcctcttccacaacttcctttttttcctttaag

SEQ ID NO: 14178 - DNA, 448 bp, Homo sapiens
  misc_feature 265, 320: n = A,T,C or G
aggtacctgttatcaatataaaataatcttcctgttgaatgcttcatgacttgaattctactttgataaaaacattgccatactgctttttatcttgatgaattcatctggcattgctttgccttatcatctcatctggagtttttaaatgccatttgtttcagttgtcttttaccaccttaattaattagacttttgccatttaacaaggtaggctcaaatttcttttactaattcgttaccatcgaaacccattctttcatcnatatttcctgtgttttatattgcgtttgtttcacacttccctctgctttacctantactacagttgtattttggaaagggacgatttcgcttttaaaacacaacatagccttatttggtgaattggctttcttatgaattttttaaaagtaagcctttgagcagcctttccaagttgaaatct

SEQ ID NO: 14179 - DNA, 464 bp, Homo sapiens
  misc_feature 228: n = A,T,C or G
aggtacgcggggggagaaggggcgcaggtggccgccatcttggattgcgaactgggtcgctacgcttcacgccaggggcggagtggcggcccttctgttacccgccacacacgtcgccgctggggactgggaaatcagggcatcggagagtgccacattaatgggatggccttggctagttccaggggaaagaataactattagaatgaaaaggttataaagaataanagccctaaagtcctcaagaagattgcgtatgaccgaagcagaatgaaagaacgggaatacactctttagaaagaaacaacaaaaacgaacaaaaaaataattgttactctgcccccgggcggtcccgcttctagaaacctgagtgggattcccgccggggcttgcaggaatatttccgataatccaaggctttattcggatacccgttccgaccttcgaggggggggggccccggt

SEQ ID NO: 14180 - DNA, 402 bp, Homo sapiens
  misc_feature 160: n = A,T,C or G
ccgggcaggtaccactatgcctggctactttttgtgtttttagtggagacggggtttcaccatgttggcccggctggtctcgaactcctgactttcagtgatccacctgcattggcctcccagagtgctgggattacaggcatgagtcaccttgccaggncctactttttgcctttttataagaatgaagccaagtgtggtggctaaggctacacagagacttgagagtctgaggtgggaggatcacttggtgccaggggtttgagagcagcctgggcaacataagcaacacctcatctgtagaaaaaaagtttacaaaaccttggtttacaggtgtgagcctccgtgtccagctcccaagtttctagtctctacctgcactgctatattgctagactgtaa

SEQ ID NO: 14181 - DNA, 265 bp, Homo sapiens
ccgggcatgtacgcggggctgcgcggtatcggcgtccgcttcgggcggctgctgaggggtgactgttctttcagctcccagcactggagcgctcggcccctgccgcactggatgccagcagttactaaaagtgagcctggcatttcagctgccttgaggtgcagtgttggggatccagagccatgtcggacctgctactactgggcctgattgggggcctgactctcttactgctgctgacgctgctggcctttgccgggtacct

SEQ ID NO: 14182 - DNA, 801 bp, Homo sapiens
ccgggcaggtactttatgtcttttttttttcttgaatctgccaggttctggctggggcatgagctttcttgtttttttccaaaacttgtaatgggagtcactgcttgcagagcggtctgattcaacttgatcgcgactgcctcagggttgtcggtcaggtagatctgtctggagatgttgtttattgcacatatccactcttcattttcctttctgctctcaacctggaggattattcccgattttccattgggcgtggtgatctggaagcagtagcgccggtcttcgcaatccacggccatcactgatcagttgtccaggtcccggatcaaacctccagccacggctcccctgggctgacacatgagattcccgccctgggtgaagaaataaagcctctcccaggtggtggtgaccagccctgttttgtttctaagattaaggtaaccagccttctggatgaggttcctgttgatctggggggcggccacatcagagtctggagtgtaaacagattcatcaacggaaagtaattcttgctgggacacccgcatttttttcggctcggctttccagtctacctgaatgctttgaaccatgtctgcaaccgtggattaaaagcttgccatacgtttggaaaacatttctggtccctttttaaaaaaggtaatctgttcatgggccaaaccttatatgggcttccatatggccatttgctttctgtaccctcgccgagggtcgcaggaaagtcaaaaattaaacccttggttgatttcacctttgggaccatggggatgtctt

SEQ ID NO: 14183 - DNA, 415 bp, Homo sapiens
aggtacgcggggatgaacctgtgtcttcaggctccctttgtctctgaggtttgggctgtggaggtgagcagaaggtgcctgtctttactaaacagccaggatggaggaatcctgacaagagctgctggtgttctgagccggaccctttcttcctctctgaaaattgttgaggaggccttgcgagcaggagtggtaaagaaaatgatgaaattcctgaagacaggaggtgagactgcatcacgttatgctataaagatactagctatctgcacgaatagttatcatgaagctcgggaagaagtaataagactggataaaaagttgagcgttatgatgaagctgctcagctcggaggatgaggttctggtgggcaacgctgccctctgccttggtaactgcatggaggtgcccaacg

SEQ ID NO: 14184 - DNA, 805 bp, Homo sapiens
ccgggcaggtacttttttttttttttttttttgttttgaggtggagtttcactcttgtcgcccaggctggagtgcagtagtatgatcttggctcactgcaacttctacctccagggttcaagtgattctcctgtctcagcctcctgagtagctgagactacaggcacataccaccacacccagctaatttttgtatttttaatagagacggggtttcactatgttggccaggctggtctcaaatgcctgaccttgagtgatccacccgcctcggcctcccaaagagctgggattacaggtgtgagccaccaggcccggcctcctagattaattcttgacattttttggatcaagtaagaaccactggagcctttcctggaaaaaagaacacatactcagtctcacacacaatttctgggggctcacagaccctcttgaagcctatccataaaccccctggtgaagtccccctgcccgatagcctgagggaagacatgtgagtggatatatgtgcactaacaggggcgaagacagacctggatgctctgcaatcccagaaagcatgaggcaccatgtcccaaagctttggttgtgggcctgggctcctccccctaattttatctctttgaagaagcttaactttttttttttgagacggagtcttacttctgtcacaagctggagtgcagtggcacgatcttcggttactgcaatctttggcttccccgcgtaccttgcccggtttataactagtggaccccccggcttgcaggaattgatttaagcctatcattaccgcgacccg

SEQ ID NO: 14185 - DNA, 399 bp, Homo sapiens
ccgggcaggtacgcgggtggaattgggaagggatgaaggaggctgtgcctccgggttgcacgaagagtccgagtcatttctcagaaggttttgataggtgggccttagaggagacgccgccgagcaccgcaagaactggaaaacacacccctctctgtctgcctgggagagccacggaaattggcacttctctgagtgaagctgaggagaaggctgtaaatctgccaaaacagccttgaagtattcttttgtcatgaggaagtgacggctgctggagggaggtgaacaccacaaggagagatggcatctggcctgggccccgcctagcagcagctccacctcctaagccaggccctgtgggatgcgccactagaccaccatggacggatcccacagcgc

SEQ ID NO: 14186 - DNA, 250 bp, Homo sapiens
ccggccaggtacgcgggatctttggtggctgtggtcgggtgttttctggtgcccccagctgaagccaacaagagttctgaagatatccggtgcaaatgcatctgtccaccttatagaaacatcaatgggcacatttacaaccagaatgtatcccagaaggactgcaactgtcttcacattggtggagcccatgccaatgcctggccatgacgtggaggcctactgcctgctgtgcgagtgcaagaacctc

SEQ ID NO: 14187 - DNA, 404 bp, Homo sapiens
ccgggcaggtacctcagctggaaatacagaaagcacccaccttctgcgttgatctcactgggaactgcagatcagagctgttcctattcggccatcttgccagcctcctggctgaaggtttttctacatttcttacatttatatgttttttatccagggggacatctctgattaacagtaggggattggtgataactaaaggcttggccacatgcactacattcttaaggttcttctccagtatgacttctttgatgacaaattaaggataactttcttctgaacgccttcccacattcaaaacactgatagggcctttggccagtgtggagtctttgatgctgagcacaggatgagctatcactaaaagcctttccacattcagtaccttggccgctctagaa

SEQ ID NO: 14188 - DNA, 433 bp, Homo sapiens
ccgggcaggtacttttttttttttttttttttttttttttggatgcacccaacccactctaaagaatgtcagtgactttatacaaaagaggaagcatctagattggcattgtgaacataatgcataggggcgcggcgggagctctagagcctaatggttaaaaccgtggcctctggaatatgactaccttggacttgaatgctcactctgccatttattaactgcatgacctttgaaaaataacttttttatccttcggtccctcatgtgtaaaattgaggataattaactacttatcttacgggggttgtttctaagtttttaaaatgggtataattacaaggtaaaagttccctttggcccggctctataaacctagtggaattccccccgggcttgcagggaaatttcgaatatctaaggctttattcgg

SEQ ID NO: 14189 - DNA, 135 bp, Homo sapiens; identical to SEQ ID NO: 12550

SEQ ID NO: 14190 - DNA, 353 bp, Homo sapiens
ccgggcaggtacttttttttttttttttttttttttgctgggcgtggtggcgggtgcctgtaatcccagctactcaggaggctgaggcaggagaatggcgtgaacccaggaagcagagcttgcagtgagctgagatcatgccaccgcactccagcctgggcaatacagcgagactgcccatccacagatgaagggataaagtaactgtggtggacatacacaaagagaatagtcttcagccagaaaatcagaatgaaatttcatcctttggagccatactgttgaacctggaggacagcatggtaaatgacctgttcaaacacagctgcagggatgaggaaactgctgtacct

SEQ ID NO: 14191 - DNA, 385 bp, Homo sapiens
ccgggcaggtacccgcattcaaggggcaatttcatccatgtctatgccaaggactacttcccttttccctcccaaataatccctcccaacacaaagaaacaaacaaaaaagagctaggcaatggaatgaaatgacacccagtagtgctgtaggaattatgagaatgaatccagtcagtctaatcctcgaacacttccaagaacaaaggggggaagagttctgtggggcattccaccttcatgtgcaggaagcggctggcatggcaggctcctatcatccgcagatctgtcaccttcatcaggagttttggccaaaagtgtgtcacgtggtgttttcggtaattgatatagtgttcaaaggccagcaggaaactatcttggtacct

SEQ ID NO: 14192 - DNA, 130 bp, Homo sapiens; identical to SEQ ID NO: 5023

SEQ ID NO: 14193 - DNA, 370 bp, Homo sapiens
cacgctggttttgcatcttcaggagacgctcgtagccctcgcgcttctcctcggccagtccgcgatgatgtggctctggaaggcgtgagccacttcatcgcggtcgaaatagaagcccagagagaggtaggtgtaggaggcctgcaggtacgcgggtatattcaggtgaatgagccctggaagcggattaaaggcagtgaggctgacaggcaacgggcaggaacagtgactggcttggcagtgaatatagctgccttgctctctgtcatgcttcagccttacatgcccacggttagtgccacaatccaggcccagctgcagctcccacctccagcctgcagtatcctgctgacaaacttcctgtgtacct

SEQ ID NO: 14194 - DNA, 151 bp, Homo sapiens
gtcagcaacttccacgacatacatatcgatgccgtggaggcattaaaggtggtaaaaggcctgggggttgccctaaatggaggtgaagcttaacttcacatttaatttgtcgttggcgcttcacttgcccccgcttttccaattcggggaa

SEQ ID NO: 14195 - DNA, 306 bp, Homo sapiens
ccgggcaggtactttttttttttttttttttttttttttttttttttttttttaagaaaagatggcctttattgcagcacgaactgagggggactgcatgtccacagctctccaggagctgccaaaggcaacgggcccgccctgcccctgcaacaggccctccaggggccaaaaacattggctccccttaaggaagggtaacgcgtgcttgtaaacaagggcccagacaacacatagaggagaggcagcatcatcatgtgcagctttgctacaagaaagatagttcttaatttccccgcgtacctg

SEQ ID NO: 14196 - DNA, 373 bp, Homo sapiens
ccgggcaggtacttttttttttttttttttttttttttttgggtataatactaagttgagatgatatcatttacgggggaaggcgctttgtgaagtaggccttatttctcttgtcctttcgtacttgtctagctcctctcggttcttccgagccagctcggtctaattgggcccggatgtctgccatgatcttggcgaggtcctgagatttgggggcatttacctccacggtcaacccagagctggcaatctgggcttggaggccttttacttcctcttcgtggttcttcttcatgaagagcagctcctccttgagagcctcgatctctgtctccagctgcagtcgtgtgatattggtgtccccgcgtacctt

SEQ ID NO: 14197 - DNA, 83 bp, Homo sapiens
tcggtcccctgctcctccttggtggctctctcagaggactccagagttgtatccccaggccgtcttccccgcgtacctgcccg

SEQ ID NO: 14198 - DNA, 409 bp, Homo sapiens
  misc_feature 409: n = A,T,C or G
aggtacttttatattttaattcaaaacctaagatatgggtaaaagaaacaatccaaattttgacttggcaatcctgaccacatgatgccagtcgaaaaaactgaagaccttgttctccatcagaaactggctgtgaagaaaaatcgcagcaggtaattccaagaatcatgttgcttttttcactatgcagacacctcattttatcatcccacactgttaaatcaccacatgaggagccagtgacaaagaagcttccattaggagaaaatgcacatgccgccaaggagccatctttaacactaccacatctatataatttgtatgactgtgcattccacaaaaccacagttccatcagctgcccctgatgccaaacacgttggagtctggggtaaaactggcaaaccctn

SEQ ID NO: 14199 - DNA, 325 bp, Homo sapiens
ccgggcaggtactttagttacttcttgcacttttcccctggtggagaaagccttaacttatcttgaaaaggtgcaaataagcaatagcatatacccatagcctctggcacggggcagttcggtaaagtttataagcaagttttcacaaggcacggctcctaattcttgaaatttttggggctgagtgggcccctgtcgtgggttattctcagcacaggttaatcattgttcacaaacatcttgagtgacagcagagagccacggcacatagaaatggcactttcgtgacccagcgcagtggctcatgcctgtaatcccagtacct

SEQ ID NO: 14200 - DNA, 187 bp, Homo sapiens
aggtacttttttttttttttttttttttttttggactgagtctctttcgctctgtcacccaggctgtggtgcggtggcgctctctcggctcactgaaacctctgcttcccgggttccagtgattcttctttggtagctgggattacaggcgcacaccatgacgggcgcttcttaaacctttttggta

SEQ ID NO: 14201 - DNA, 434 bp, Homo sapiens
ccgggcaggtactatgctttactaatagaaatacctctttgctgggggaggggagtgcttctgaatagaaattacccactctgagttacagctttagtggcatattaatggggatttaaatttacagtaaaaacaaaaacaaaaacaaaaacaaacctattccaattatgacaaatctatttttttttaaaacctatcttagatagaccatctccctacaataagatggcagaacagaatgtcaggaggagaggtttggtctgaagagggttatctgtccaggagacgctttatccccaaagcaatgcgcttcagtttgctgtgcgcagcatagcacctgttggggggagaaaagttgaacacctagaaagtccatgaacaaattccagcagcaaaaaaacttcctacccgcgtaccttggccgaggtactttt

SEQ ID NO: 14202 - DNA, 116 bp, Homo sapiens; identical to SEQ ID NO: 14054

SEQ ID NO: 14203 - DNA, 431 bp, Homo sapiens
aggtcggccaaggtacaaagctactttaagtctgctcttaagatcagtttttgctcatattcaaaatacatggaatgttggcacaaaactgaagctgctgtagaaagatcacagatgttctgtgggttactcaaacttccccccgcgtaccgattgtttcattggacatgatgttatggaaacgtgccagctgtccaaacatctgtaggccagcctccttttctcggcgggcttctggagtcagactatcccattcacctcgatccttctcaatttgctgaatctttatcttgctcaaatactgtatggcttcatccaaaaggaagatggcatcattcattagcaggttaagaaagcggaggaaaagtgggggattcatggcttctaaattcttagaggcatagtcagccaaatccttaatgctctcccga

SEQ ID NO: 14204 - DNA, 638 bp, Homo sapiens
ccgggcatgtacgcggagaggtgcccagtgtccacacttgactatgtggatgacttgcgttgtgacatgtgcagtatacagtaacattttctgttcatcacagtaaagttctcttttggacagtagctcattatttaagttgattgtttatcactaatgattggtaccagaaaacaatttccatggttttggatttaaatttctattccaaaacccccaattttttgtggggagtataataattaactggattgccttttaacaataatggtacttcatttgatatactctttaaattattgtttgtaaattctcagtaagtattatatgtttttattaacagtgggacattttattattgaaaatacatttccatcataatttaatcaaatcgaaatagtaataacttatataacttacataaagtccatgtgaaaaaaagcttttatgtctatacaattcaggttcgttgtgggtaaaactatatgttttttaaaagtaccaaccatgttttatataatttttgtcttttccttgggaattaaagaaatattcgaaaatgttaacacctatcgggtcccgtgctttcttagtaaaacttaaggttgagaaatcctcccctctgggggacttggcag

SEQ ID NO: 14205 - DNA, 432 bp, Homo sapiens
aggtacatggtggatgattttaaatcaccctagtgtgctgagaccttgagaataaagtgtgtgattggtttcatacttgaagacggatataaaggaagaatatttcctttatgtgtttctccagaatggtgcctgtttctctctgtgtctcaatgcctgggactggaggttgatagtttaagtgtgttcttaccgcctcctttttcctttaatcttatttttgatgaacacatatataggagaacatctatcctatgaataagaacctggtcatgctttactcctgtattgttattttgttcatttccaattgattctctacttttcccttttttgtattatgtgactaattagttggcctattgttaaaagtctcttaaattaagccagaattctaaaacatgctgcagcaagaggaccccgctctcttca

SEQ ID NO: 14206 - DNA, 435 bp, Homo sapiens
aggtacacacatcacagcccagacagcggtgttgattgagacactctgtgccctgggggctcagtgtcgctggtctgcttgtaacatctactcaactcagaatgaagtagctgcagcactggctgaggctggagttgcagtgttcgcttggaagggcgagtcagaagatgaacttctggtggggtattgaccgctgtgtgaacatggatgggtggcaggccaacatgatcctggatgatgggggagacttaacccactgggtttataagaagtatccaaacgtgtttaagaagatcccaggcattgtggaagaaagcgtgactggtggttaacaggctgtattagctttccaaggctgggaagctttgtgttccggccttgaacgtaaatgattctggttccaaaccagaattttggtaacttggacaggaccgg

SEQ ID NO: 14207 - DNA, 428 bp, Homo sapiens
ccgggcaggtaccattccgggtcatccgcagaaattcctcatagatggcaactctgtctactctccgagccagtggcgagaagttacacagggagtccaccccggtgtggtgcctgttggggacagacctgaatgttgaaacttgacagtcagaaaaataactcttgatgctgctgtttcggaagagttggttgagcgcatcctcaatattccttttgttcctctggtaattggtggtgcctggctgggctttgtcctgggaatatggtaggttggtgatggtgaaattcaggtagaagtgctgggtgctggagctgcctgttggttgataaactgatgactccatttctgtcacatggatgtccaccaactggtaggtggagcccagccaatggaatgaggcattcagggtcttatctagaaagact

SEQ ID NO: 14208 - DNA, 431 bp, Homo sapiens
  misc_feature 252: n = A,T,C or G
aggtacaaaataaattttcagaaaccaaccctaaagaaaaggggctatattaattacctgacaaggaattcaaaactattgtcataaagatgcttaatgagctcaggaaaattatgcatgaagaaaatgagaattttaacaaagagaatattaacaaagagaaaatataaagaagaactgaacagaaattttggagaagaatgtagtaacttaactaaaaagttcactagaggagttcagcacagactgttnaaaaaaaaaaaaaacaaagagggtccctggagttatcctgagccagggtcggtggggtcagacccagacccagcacgaagaccaacaacaaaacgcccaggcccatcaccatctcttccaacacaggctcctcggccttagaacaagtccgcataaacgggcaggacaatggaaagaag

SEQ ID NO: 14209 - DNA, 425 bp, Homo sapiens
aggtacttgtggctggttggaagggagccccaaaattaaaccctccagtgccagaggtggagaaagaaaaccctgtagcaggtgtggttgttgccgtctttgcagtgccaaacgtgaacccgcctgtaggggccccagtgcctccaaaattaaacccgctcatggctccggactctggtggcggcagctactctggctcccaaagcaaatccgtcggtgtctgcagccttgggaagatttctgtgggttttcaactgtcctctctctctcctccttaggtcacctggcattctggtcccattttcctccctgatgcctttcaacctacaggcataaccgacttgcattaaggaccgctcagtatcaggattccttcaccttctttggaccttgattcagttctcctaactgccacagaagggatg

SEQ ID NO: 14210 - DNA, 644 bp, Homo sapiens
  misc_feature 562, 615: n = A,T,C or G
aggtacaaataggtgaaagaaagaaacttaactttttgtttagggtgtttgcaaggggacatattttcaatagaaaaatcagcaggttttggcctttggtctgtttctgaagggtgagtattctccatgacagaaaaaggcaaaggtaggtcagaggtggcgagtttcttcattctcaaacaagggagaagacatcctttgattaaagaatgaggcggggtgggggagggaaggacatggaccccctccctttaaaatttcatctgggccttcaaggcacttcaaaagacacagagtgaacagtgctggctgccacttcactcggtattgactggatagtttagactgttgggctagacctggctcacccttaaaaaaaaacaaacacaaacacacaaatacaataaataaaacaaatgtaggctacaaattttaaaccagacctctttcaaataaactgaaagataaatatcttcatctgcaaggccagcttgcaattcatcaataagcaccaagttacagatttttctttttttaagtgtgctcaaaagccccatgcttncgaggggcaaaaaagcaagaattgaaggccacgttggaagcaacaaaattttncagggccttccttctggtgtacctgcccc

SEQ ID NO: 14211 - DNA, 291 bp, Homo sapiens
ccgggcaggtacgtgttttccttcaggaccagagctgagaggagctgggatcgcggcggcaatggaacgggcctcagaaaggcgcacggccagcgcgctttttgcggggttccgggccttgggacttttcagcaacgacattccacacgtggtgcggttcagcgcgctcaagcgccggttctatgtaacaacctgcgtgggcaagagtttccacacctatgacgttcagaaacttagtctggttgcagtaagtaattctgttccacaggatatctgctgtatggcagctga

SEQ ID NO: 14212 - DNA, 745 bp, Homo sapiens
ccgggcaggtaccatgcttcctgtaaagcctgcagagccatgagccaattaaacctcttttctttacagattacccagtcttgtggatcatgaggtcaggagatcgagaccatcctggctcatacggtgaaaccccatctctactaaaaatataaaaaattagccaggcatggtggcgggcgcctgtagtcccagctactcgggaggctgaggcaggagaatggcatgaacccaggaggtggaggttgcatagagccgagatcgcgccactgcactccagcctgggcgacagagcaaggccccgtctcaaaaaaaaccccaaaaaaccaaaaaaccaaattacccagtctcaggtatttctttatagcaatccaagaacggcctaatacaatgggctcccaacacataaaacatacagcagccacaaaataattagaaacaatgttaagtaatgcccactaaattttgaatagcaaaatatagcatagaagtataaaacaaatgtatttcttatccctacaaaaaaggggcatctttttggttttgatattgctgtttgtataaaaactatggtgtgtgcatgtgggtgtatgtgtattccttatagaaaacttgaaaaatacagaagtaacttagaaagaattacctttccctaccagccttaggatctcccgataccaattcaatacccacttaaaacccacaggccaaacctttttttagctttaaaaatctttactgtggc

SEQ ID NO: 14213 - DNA, 513 bp, Homo sapiens
aggtactgtaagagtttaggagaggctgggcacggtggctcatgaccgtaatcccagcactttgggaggctgaagcaggaggatcatttgagtccaggagttcaagactagcctgggcaacatagtgagacttacgtctctataaaaagtaaaatgaattagctgggtatggtgatgcacacctgtggtcccactactcaggaggctgacgtgggaagattgcttgagcctgggacatctaggctgcattgagctgtgattgcactactgcactccagcctgggcaacacagcatgaccctgtcccgtaacataaaatccgtaaaaaaataaagtacccacgtaaagacgttaggtcaaggtgtagcccatgaggtggcaagaaatgggctacattttctaccccagaagactacgatagcccttatgaaacttaagggtcgaaggtggatttagcagtaaactgagagtatagtgcttaattgaaccgggccctggaacgcttacctgtccg

SEQ ID NO: 14214 - DNA, 424 bp, Homo sapiens
ccgggcaggtactgcaagtaaaacctactccccaaaaatgtgtggctttgggtctgcattaaacgctgtagtccatgttcatgccaaaaatggctgggaacgtttgctttatttacattcagtcagcgttgctttcagatcacactttatccacacaggaaagccagtcagcctataatgaagtagttattaaaataaatgtaatgaatatgtctacaaagtatagtttagtggtttattttgctaaaatgcacatatatttgatataatttagtttgagaagttcagctagtttttctcctttgtttgactttgtcaatttctatctggtttttaagggtctgagcttagcttgtgcatgcaaggttttgggtttttttatttttttttgagcacagcttttcaccttttaatttgttgggta

SEQ ID NO: 14215 - DNA, 750 bp, Homo sapiens
ccgggcaggtacagggacgtgatgttggagaactacaggaacctcggcttcctggcaggactctgtcttcctgacctgaatattatctccatgttggagcaagggaaagagccctggactgtggtgagccaagtgaaaatagcgaggaacccaaactgtggggaatgcatgaaaggcgtgatcaccggtatctctcctaaatgtgtgatcaaggaattaccaccaatacagaacagtaacacaggagaaaaattccaagcagtgatgttggaaggacatgaaagctatgacactgaaaatttttacttcagggaaatccggaaaaatctacaggaagttgactttcaatggaaagatggtgaaataaattataaagaagggccgatgacccataaaaacaatcttactggtcaaagagttcgacatagtcaaggggacgtagaaaacaagcatatggaaaatcagcttatattaaggtttcagtccggtctgggtgaaattgcaaaaatttcaaactgcagaagaaaattatggatgtaatcaaattgagaggaacaggtaataaattgttttttagcttcaccacttcaaagaaatttttctggggttcaaaccaacatttttaggaaatatgggaatgattttttgcaactttcgttacctacaccagacgagaaaaccctttttagggaaaaaacctacctaggtatgagtgtggcaaaaccttcaagtgttttaagtcttattaag

SEQ ID NO: 14216 - DNA, 758 bp, Homo sapiens
atgtacggaatagactggaatggaacgaaatggaatggaatggaattgaatggaatggaatcaacccgagtgcaatggaatggaatggaatggaatggaatggaatggaaataacccgaatggaatgtaatgtaatggagtgtaagggaattgaatacaatcaatccgaatgtaatggaattgaatggaacggaatggaatggaatggaatggaatggaatggaatggaatgcagtggaatgaaatcaaacctagtgcaatggaatggaatggaatggaatggaatggtatggaatggaatggaatggaatggaacgcaaaagaatggaatggaacgaaatggaatggaatgaaatggaatggaatggaatggaatggaatggaatggaatcaacccgagtgcaggggaatggaatggaattgaaggcaatggaatggaatcatccggaattgaaatggaatggaatggaatcaacttgattgcaatggaatgcaatggaatggaatggaatggaatggaatggaatggaattaaacccgaattggaatggaattgaatggaatggaatgggaatggaaataatggaatggaatgtaatgaaccccagggcaggtgaatggaatggaatggaatggaatggaagggaagggatggaatcatccggaatggaacagaaagggatggaaaggaattaaccccttgttaccgcgttcctggcccggcggtcggtttaaacatatgggtcccccgggctgct

SEQ ID NO: 14217 - DNA, 610 bp, Homo sapiens
aggtacgcgggggacggtcactttttccaacaaaacccactccatagccatgtggatttttatccaaaggctcaacaaccagagggaatggtgagacctgataactaaaatactgtattggcaagggtttgaaatgtgtaagaacctaggagggaaaggaagattgagcaacataggaaaaggggaagagaggctgagtgtcaccaaggtccaaactccatttataaaaatactgcaaaaccaggagttgatggtagaagtgcatatgatccatggcaggagtaaatctctccacctcctctaactctctgaaaactctagagttggagcaagtcttccatttgcttcttatccccttaaaagaatgccttccacttcccaacagcccccatcaagggaccccaagaggccaccatgctcttatctcgcactttctttcctattccccttgcctgaatctggagtggggttgagccctctgccttcaaccttaagatttaggaagttctttccccaactgtctaacttggaaaggtagatgagtctgaattttgaagtaacgaatgcaaattccactcagcagaggcaatgttatttatgtaccttcccg

SEQ ID NO: 14218 - DNA, 276 bp, Homo sapiens
gtttcccctcacggtggacttaccaagaatttttcagccgctaccgtgtcctaatgaagcagaaagatgtgctgagtgacagaaagcaaacatgcaagaatgtgttagagaaactgatactggacaaggacaaataccagtttggtaagacaaagatctttttcccggccgggtcaagtgggcctatttagaaaaattgagagctgacaaactgagagctgcctgcatccggatccagaagaccatccgagggtggctgctgagaaagaagtacct

SEQ ID NO: 14219 - DNA, 508 bp, Homo sapiens
accgggcaggacctgttaccatgacacataacgactatgaccacggtaccacaccaagaatcatctacctctattacaaccagacattcgcacttaaataaggaggtgctgccgtatacttatccgttgctggaggcagcatgaatgggaaccagacacaggttggaaagccattctggtaacaagagcactcaacccttgtacactcggcacgctgctacaaactaggtgagatcccatctgggctgcagcgaacttcgatgtgcgaagctttatgcgcatacctgtcggacactactaggtggggggcccctgcgtcctccctacctatagtgtttcgcactatttagttgagaggttttaaagttggcggcagcatttgtgccgtaaaatccattggttccattagtcgtagttatcgcttgatggttgaaaaaatgttgtttaatatccggctacaacaatatttttcctacatcgaaaacatttatcgcaaaccctgtgggag

SEQ ID NO: 14220 - DNA, 765 bp, Homo sapiens
tcgaggtacagggttggctgctctgttacctcgattagctttccagactgtgtcatggtttcccattcatagctgaccttccagtcaaccgagatatagtattatcgtgctagcactctacctatattttagaagttgctataattgtcttaggattgttaaatatgcagtgtaagaaatgtatatacatcttggttgtaggattgcaccgtatggttcaattttggacctgtttttttggtagtgttattttggtaaaaacctatctgtttcattccctgaacctttatatggggctctgttttcactattgtaaacattaaggttggtgaaattcactcttcccggttagcctatgtccatatgtaaattttatctgtaattattttctatatgactcttttatttcagaactttacttctggcttctgttatcaccttacagaaagtggagagtgcggagtcaccactgttgttaatctactctatgacttattattttagaatattcctcacactattattagaattgttatgtggggttttttataattaatagtctcgtcctggacttaattgcgattctggtttaaatttaccaattggtggtatccaataaaatggaccttggttaattgtaccaccattggtttagatgggaatataaacttttggattgtaaatttaccacgtccttttctaaccaatatttttttcccataccaaccaataacctaattttaccgtatagttcctccgggtgtt

SEQ ID NO: 14221 - DNA, 475 bp, Homo sapiens
  misc_feature 313: n = A,T,C or G
aggtacttttttttttttttttttttttttgggtaaatggtttggctaaggttgtctggtagtaaggtggagtgggtttgaacgctttcttaattggtggctgcttttaggcctactatgggtgttaaaattttttactctctctacaaggttttttcctagtgttccaaaaacctgttccttttttggacctaacagttaatatttacaaggtggatttataagggttcttgtgggccaaatttaaagttagaactaagaatttctattcttgtgacaatccaagttttttcaccagtgcttcggtaaggtntttgttctgccttctaaccttataaaattcttttcccacttatttttgcttaccattaaacagggttgttgcatctttttatacatgtttcttttagggtttgccttcgttcttggatttttcggggggatcttttaaactttttggcctctattcctttgg

SEQ ID NO: 14222 - DNA, 349 bp, Homo sapiens
ccgggcaggtacagaagtagaaggcccaaaatggagagataaattataatggtaaccttgattgtgacagagcttctttcttcatatttgcattcacagcgtagacagtatgcttctacatcaggcccccgcacaggcatgggctccacaacatgaaggcaatcacaaatcttttctgagaaatgttcttattataaatattgcccagaattttctttatagggagggcagatacatttacatctgacatcctcgaaattctgccgcccacgcgcctcctgaccacagcccccgtcggctttctaattctgtgagctgccctcgtgggcgtggcctcccccgcgtacct

SEQ ID NO: 14223 - DNA, 413 bp, Homo sapiens
aggtacgcgggaggagaggcaacatactccaaatagttgggttcttcagggaagctattagaaactcaggtgacttgttagagcactaacttggtcagagccaaatcctggcaaacgctgcctgaccttcactctgtggttggggcagtgagaaccactgaggtccaatgatgagacttggaggtctggatccagtctctctttgttttaatgtgacttaggtgctgtcaacattagcaagataatggaaatcacgacgccagtgggtgcttacctccctgctaggcatgcaggggctggcggttggcaggggaaggaggcccagtgagccgagtcccttaggggagggagagtttgtcctctttgccccacagtctacccttcaaggccttgtggcagtgccagtgttcggg

SEQ ID NO: 14224 - DNA, 442 bp, Homo sapiens
  misc_feature 300: n = A,T,C or G
aggtactttttttttttttttttttttttgtatttttagtagagacggggtttcaccatgctggccaggctggtctcgaactcctgacctcgtgatccgcccgcctcggcctcccaaagtgctgggattacaaacgtgagccaccgcgcctggccttccttggttttcttggcttcaattcctgggaacgcctgaatcaacaggcggacatctgtcaaaccttcctagcaactacgcctgcggatggccaacctgaccctggaagacagtggggtttagttaagcacagattggactttntttttttttttttttttttggggtttttgtttagtttatatccttctttttttttttttttttttttagggttggaattacagggatagatggtattcgcctcatttcatgtctttacatctggcaaacaggactggtacct

SEQ ID NO: 14225 - DNA, 529 bp, Homo sapiens
  misc_feature 217, 475: n = A,T,C or G
ccgggcaggtactttttttttttttttttttttttttgaaatgaacaaatatttatttatcttttataacaagtaaggcaatgttgcttaaaggaagacaaacaaacataaaagattccgttgacaatgcattttttcatctgttcggcacaatgcttttgtcattaatggaaatttttgacagcaaaactttttccaggaacttttaagtttttcnggcgggcagccactttagtggcaagaatgacttgtgccgtctcaagaattctcctatcctttgttttcagggaacatgtggggaataaggccttgcttttatatgatggagggccccaatagcaccccagtgtatggttggaaaagggtttctttggtattacgggtttcagaaaccccccgaacaggtcgcggcccaactagtactaatccacggaaggtcagttggggagaggcaaacaattgccttgtttttaantgaaagcgcccttgggttgtcagggctgtggcttgaagggctggaaaaattggt

SEQ ID NO: 14226 - DNA, 442 bp, Homo sapiens
aggtacgcggggagaacgtgtgcagctcagccagccacagaactggaatttttcaggagcagggggagcatggagtttggactttgctgagcaactgaagtggagcgcagagcttgctcgcttaggagagagcatcatggatggcaaacaagggggcatggatgggaagcaagcccgcggggccaagggactttcctggcatcaggcttctttcaaacccattgatgggcgatgctgtgtctgattggtctcctatgcatgaagctgcaatccacggacatcagctgtctctgaggaacctcatcagccaggggtgggctgtgaacatcatcacggcagatcatgtttccccactccatgaagcctgtcttggaggtcatctctcttgtgtgaagattttattaaagcatggagctcagcacggagccagcgttcaacctga

SEQ ID NO: 14227 - DNA, 545 bp, Homo sapiens
ccgggcaggtacttttttttttttttttttttttttttgaaatgaacaaatatttatttatcttttataacaagtaaggcaatgttgcttaaaggaagacaaacaaacataaaagattccgttgacaatgcattttttaatctgttcggcaaaatgctttttggcataaatggaaaatgtgacatgtttaacttttccaggacatttcagtttttttggctgtgtatcactttaagggcaaaaatgaactgggccgcttcaaaatttcttctattctatgtgtttaaggaacatttggaaaaaagtcttaattagatggagggcccaaagcccacccagtttttttgttgggataggtttctttgatatttcggttttttaatcctttgattttgcttcttcccaaacagaaacaaatcacgtattgtcaattgtgtggaaaccataacattgcctgttttttaatatgagtccacctttgtgttttgcaaggtctttgcttgaagggtttgaaaaatttgtttttttattttcccccgttgtat

SEQ ID NO: 14228 - DNA, 444 bp, Homo sapiens
aggtacctcattagtaattgttttgttgtctcatttttttctaatgtctcccctctaccagctcacctgagataacagaatgaaaatggaaggacagccagatttctcctttgctctctgctcattctctctgaagtctaggttacccattttggggacccattattgggcaataaacacagtttcccaaagcatttggacagtttcttgttgtgttttagaatggttatcctttttcttagccttttcctgcaaaaggctcactcagtcccttgcttgctcagtggactgggctccccagggcctaggctgccttcttttccatgtcccacccatgagccctccactggacagatcagtaagcctggcccttcattctgcgctgtgtacttcctctgtgaaaatccaatacctcttacctgctctgcatgcaaagattctcag

SEQ ID NO: 14229 - DNA, 433 bp, Homo sapiens
aggtactttgggcttgctggtgtgacaaaaaatacatttgaggtaattccagtgaattctgcaggctctcctgttggggatgtgccattcatccgatcaggattgctggggtttgtagggccgggtagtttggtgttcgtggttgggaaaatggatggcttactgatggtttaggggtcgaagacataatgctgatgacattgttgctactggattggctgtagaatcaataaagactgtttatagaggaagaattgctgtgttttctgtgtctgtattttatgatgagcgcattgtggtggttgcggaacaaagacctgatgcttctgaggaagatagtttccagtggatgagccgcgtgctgcaggcgatcgatagcattcatcaagtgggggtttattgtcttgctctggtgccagccaatacattgcca

SEQ ID NO: 14230 - DNA, 428 bp, Homo sapiens
ccgggcaggtactttttttttttttttttttttttttttccgaaaaataagacaatttattttgttgatgacatgattgtaaacctagttatgcctctgctccctcatttaaaaattaaaaatcaggccaggtgcggtggctcacgcctgtaatcccaacactttgggtggcccaagggggccataatcacctgtgatcaggagttcgagaccagcctgaccaacatagtgaaatcctgtctctactaaaaacacaaaattagccgggcgtgggggtgcatgccttgtaatccacagtttcttcgggggttctgagggcacgagaatttgcttgaaccccatgggatgtgaggtttgcatacgagcccgaaaattcacaccatctgtcactttcagtcctaaggtccaagaatgatgtgtaaaactcc

SEQ ID NO: 14231 - DNA, 437 bp, Homo sapiens
aggtacacgtgtgactgcggatggagctccagttttctcccaattttgcgctaggcagagaaaagtagaaacaaccagatgatgtccaccctgctagttctaaatcctcttttgggtgcttggtaaggagaggtggagggaagggaatatgaggaagggtcggttagggaaaataaatactggttgagcaatggggcggtggctctagctgtggtcagcactgcacagagtaggggtctggaaaggagaaagaggcagaagaatctggcttgaagtagatgcaaatacttacaacgaggaaactttctctgccagattcaaaggggcacatggcttttgtaacctggagaatgaggtgaggttagagctgtgtttcccttaccactggcttatcagtgcctggcacagtacctgcccgggcggccgctctagaacta

SEQ ID NO: 14232 - DNA, 326 bp, Homo sapiens
ccgggcaggtactgcagcatgcactggcatactatagcttggtccagctcttccagagccccaaccactttccaaattgaatcctaaagtttttggtgcaggacccaatttaaatccatgtttcttccccgcgtacaaattgctaatcaaaaaggaaaggtggaagatgggtagttttaataacaaatagtaaaacgggtgttgctgaatacagcacccggtagcctctatttgcaaacccggggagggaagggggtgccccaacaacagtggctccgcctcattgtccaggcacaggcaaaccgcagtagtgagctttggtacct

SEQ ID NO: 14233 - DNA, 454 bp, Homo sapiens
ccgggcaggtacttttttttttttttttttttttttttttgcaaataaaaaagttgaagagcaaaacgacgtgtctaacgtcacacattgagctttaaagacagatgggatctggcatgcgtttgtcagttaacagtgctagcacaaataccaacttttgttaaaatcgtaaggattttatgtcgtgagacactcaggactcacctgatctcggtgttcagttgtgcgtagtttttgatttgcgcctcgcccttgggcaagtgcaaaatcctggggttatacaaagctcatcacagttaacccctttgtcccaatccgcagaatgagagctcagagcccggccatgggaggctcggttatttaggcaggaaaatcaaggaacccatgtttgagcaggggccttttgtggcgcggaaagaactcctatccctgccgtccattttcgtcttaggct

SEQ ID NO: 14234 - DNA, 446 bp, Homo sapiens
ccgggcaggtacttttttttttttttttttttttttttttgaggaaatatttgcttttaaacatttgattttcatcaatctttggatgatttgactttattgtcaatatctagtaaatttgccaaaatattttttttattccttgctcccctttatcccactaaaaaattgggcgggtagaattttctgttttcctaaacaggaaggaggcaaagctggtttcaccttgtcgtctaactgtaagcccataaaggaaatattggtccaaaattttgcttgagcaaagttctattaattcatttttacccaagaaatttaattcaagaaacttaaatatgtagtgaaaaaaaaataataattttttttaacaagaaaaaaatattctagcttaaaagtcaaagtaaaaactttttgattcaaaaaaccctctatttttaaaataatat

SEQ ID NO: 14235 - DNA, 455 bp, Homo sapiens
ccgggcaggtaccaatttactgtattagtccgttttcatgctgccgataaagacatacccgagactgggtaatttacaaagaaaagaagtttaattgaacttacaattccatatggctggggaagcttcacagtcatgatggaaggcaagaaggagcaagtcacatcttacataaatggtagcaggcaaaaagtgagatctcatgcaggggagctcctctttttaaaaccatcagatctcagctgggcacagtggctcacgcctgtaatcccagcactttgggaagctgagacaggcagattatctgaagtcaggacttcaaggccagcctggccaacatggtgaaatcccctctccactaaaaatacaaaaattagccaggcatggtggcaggcaactgtaatcccaactacttgggaggctgaaacaggagaatcacctgaaccccggaggcg

SEQ ID NO: 14236 - DNA, 273 bp, Homo sapiens
ccgggcaggtacttttttttttttttttttttttgagacagcgtcttagtctgtcgccaaggctggagtgcagtggcgcaatcaaagcttgctgcagccttgaactcctgggctcaagcaatcctcttacctcagcaactaggactacaggcacatgccaccacgcttggccttctaatttatttctgtgtcaacaaaataaaactcaggcctaggaatagcttggttcagaaatcacagagggacttagtattccattaatcccgcgtacct

SEQ ID NO: 14237 - DNA, 438 bp, Homo sapiens
aggtacgcggggcaccagaaacatatgaagaatatggatatgatgatacatacgcagaacaaagttacgaaggctacgaaggctattacagccagagtcaaggggactcagaatattatgactatggacatggggaggttcaagattcttatgaagcttatggccaggacgactggaatgggaccaggccgtcgctgaaggcccctcctgctagaccagtgaagggagcatacagagagcacccatatggacgttattaaaaacaaacatgaggggaaaatatcagttatgagcaaagttgttactgatttcttgtatctcccaagattcctgttgctttacccacaacagacaagttattgtctaagtgtttttcttcgtggtccccttcttctccccaccttattccattcttaaactctgcattctggcttctga

SEQ ID NO: 14238 - DNA, 463 bp, Homo sapiens
aggtactttttttttttttttttttttttggtagagatgggacttcctacgttgctcaggctcgtcttgaactcctgagttcaagtgatccacccaccttggccttttaaagtgctgagattacaggtgtgagccaccatacctggccaaaataataatatttttaatctgtaaaaaaaaataaagagaaaagtgtaaatgtgttcatccaacaaagcctttctttcacacatttgaaatttaaatagatccatttaaatacgatatccagttgaaccagccctgaagggctttctgaattggacatgttctgtcgttaccagtggggctttctggaagctggcccagagctggtcttgtccacgcagaggatctgaaagcaccctgtgtccttgccattaccctgcccctagacagctacagaatgcactgtcccttttaaaacagttctgtttaaatcccg

SEQ ID NO: 14239 - DNA, 443 bp, Homo sapiens
ccgggcaggtacgtcccaccccctgctgggtcagtagcttctgggccagtggttgggggcagaaagaaggtcagaggccctgaacagataaagcaggaggttgagagtgaggaggaaaaacccgacaggatggatattgacagtgaatacacagattcaaacacatctttgcaaacaagggctagagaaaagaggaagcctcagctggagaaggacacaaagccgaaagagcccaggtatactcccgtgagcatctacaaggaaaagctgctgctcaagaggctggaagcttgtcccggtgctgttgccatgactccggaagctcggagactgaaactcaaactgattgttagacaagcgaaaagggataggggattaccactttttgacttggatcaagttgttaatgctgctcttttgttagttgacgggatttatggagg

SEQ ID NO: 14240 - DNA, 442 bp, Homo sapiens
aggtacgcgggggacatatcacctaagctctggattcgcagataggccccaatctcttttttgggcaatgctcgggtaagagagcagagtcacatcaagtggttgatgggcccagagatatatcacattgccccttgtggacagggaccaggcaggggactcacatcacaatagaggtaggacaaggaatacatcacaatacgttttgagagcagaaccaaaaaagagtaacataatctttgtgttgagtgcagcaatatgttacacttttctttgtgggcagaacgtgtaaagaaggaaaaagttggccggacacggtggcctgtaatcccaacactttgggaggtcaaggtgggcagatcacctgaggtcaggagttcaagaccagcctggccaacatggcaaaacgctgtctctactaaaaatacaaaaattggctggg

SEQ ID NO: 14241 - DNA, 355 bp, Homo sapiens
aggtacactgggctctcaacgtggtgtggaaggtagcctgttacagtgctggattcataaaagggtctttatggtttgtgaaagaatatctgtgtgcttagggaggaaactttttgatctgcagaaaagccagaagacatctaggacatccataaaaattcatcagagagcattttactactgagctgcaaagggaaaaacttaaaatggatatgaaaagtgaagagagtgatcataggagaaaaccatttcagatgacaagagcacctcaaaggcagcagcctcaaggagcagccatggccccagacttgtcgcacggatgcagaaaacttaatggaggaggctgaggtcagaa

SEQ ID NO: 14242 - DNA, 498 bp, Homo sapiens
aggtacgcggggatgctgccatggctgcaagacctcattcaattgatgggagagtagttgagccaaaacgtgctgtatcaagagaggaatctggaaaaccaggggctcatgtaactgtgaagaagctgtatgttggcggaattaaagaaaaatacctgtggaaacaatcaccttagaatattacgtttgaggaatattgtaaaaatgtgatatccatttgaagatacattacctgtataggcagtgctgtgaaaagaaaacgaggcctttaggtcttttgtttactttttgatgaaccatcgatcactgtggaataaaaatcggatttgcaaaaaattaccattactcattcaattgggtcattaattgctataatttaagtaaagggcttttcgttttagacaaagaaattgctacgaaaagttcaagagtttctagggagtggtaagaaggaggccaactattggcttttgggggatttcaagtggtgggcggagg

SEQ ID NO: 14243 - DNA, 424 bp, Homo sapiens
ctgagcgccgacccacgccctgcctgctcttccagtccagccaacactctaagcaggcaccgcctccactcgcagcccccgggatgggtcccactccctaccgcagatccccaggccccctccacccagtcggctagccctcgcctttgccatccgatactaaaatgtctgatgatgctggtgacaccttagccactggagacaaagcagaagttactgagatgcctaatagtgattctttacctgaggatgcagaagtgcattgtgattcagctgcagtttcacatgagccaacaccagctgaccccagaggggaggggcatgaaaatgcagctgtgcagggtgcaggggctgccgccattgggccccctgtgcagcctcaggatgccaacgccctggagccccctcttcaatggaaacgtgt

SEQ ID NO: 14244 - DNA, 198 bp, Homo sapiens
tagtgtaggggttaaatttgccgcggctttgggccgtaattcaatgggttcattagtcttgtttttccctgttgttggaaaatttgttttattcgcgcttctacatatttccaatcacaaaccatttacgtagccccgggtaagccattaaaagttgttaaatagccctttgggggtggcccttaaatggaggtggag

SEQ ID NO: 14245 - DNA, 486 bp, Homo sapiens
aggtactttttttttttttttttttttctgaaatgaacaaatatttatttatcttttataacaagtaaggcaatgttgcttaaaggaagacaagcaaacataaaagattccgttgacaatgcattttttcatctgttcggcacaattgcttttggtcataagggaaattgtgaccatctaaactttccaggtacattcagttctttcggcgggcagcatccttagggctagatgtactgtgccgtttatagtatgatggccaaaagcaccatggtaggttggaaagggttccttgtattcgggtttcgaacccccgtacagtcgctgccaaaccagacaaacacgtagggcatgttgggtgagccaaacatggctgttttataaatgaagccgccttgggttgcaatgccgttgcttgaaggccttgaaaaaattggcatttaagccccccatggttccttgcacctgggccggtccgcttcttat

SEQ ID NO: 14246 - DNA, 468 bp, Homo sapiens
  misc_feature 227, 239, 240, 241, 263, 338, 341: n = A,T,C or G
aggtactgattttaaaaactaataacttaaaactgccacacgcaaaaaagaaaaccaaagtggtccacaaaacattctcctttccttctgaaggttttacgatgcattgttatcattaaccagtcttttactactaaacttaaatggccaattgaaaccaaaccagttttgagaccggttcttccaccaactgattaagaagtggggttggcagtgtatttaggganttaatattcatnnnttagccttcttgagctttctgnggcagaactttgatgacctttgccagcttctcagcagccctttcttggtccacttgcttttgatgaacaacccanccngcaactgttctgttcttcatatttcacgaacagcaaaagcgacccaaaagggtggaatagttctgaagaagcctcttcaaccacaccatggggcttggccaggaaacccattatcaaccaaatggcc

SEQ ID NO: 14247 - DNA, 418 bp, Homo sapiens
ggtggcgggaggaaccgttacgggaactgaagttgcggattaagcctgatcaagatgacaacctcccaaaagcaccgagacttcgtggcagagcccatgggggagaagccagtggggagcctggctgggattggtgaagtcctgggccagaaagctggaggaaaggggttttgacaaggcctatgttgtccttggccagtttctggtgctaaagaaagatgaagacctcttccgggaatggctgaaagacacttgtggcgccaacgccaagcagttcccgggactgcttcggatgccttctagagtggtgcgacgccttcttgtgatgctctctgggaagctctcaatccccagccctcatccagagtttgcagtccgagtagggactcctcccctgtcctctacgaaggaaaagatt

SEQ ID NO: 14248 - DNA, 342 bp, Homo sapiens
ccgggcaggtactttttttttttttttttttttttttttagttggttggttggttggtttttgtttgtttgtttcgagacggggctccggctctgccgccgggggctgcagtgcaatggcgcgatctcacctcactgcggcctactgggctcaagcgatccttccactgttgcccggcctgaagacagcctttagagaaagaagcagggggagttcttccgaggacagacaagatttctggagtttggaaagggtgagagactgggtcagcgaaaggaacattccggtctttatgttgggatgcaacgtattgatacagggatgagaccccccgcgtacctt

SEQ ID NO: 14249 - DNA, 425 bp, Homo sapiens
  misc_feature 425: n = A,T,C or G
aggtacttgcaaaagcacttgaagtcattaaaccagctcatatactgcaagagaaagaagaacagcatcagttggctgtcactgcataccttaaaaattcacgaaaagagcaccagcggatcctggctcgccgccagacaattgaggagagaaaaagagcgccttgagagtctgaatattcagcgtgagaaagaagaattggaacagagggaagctgaactccagaaagtgcggaaggctgaggaagagaggctgcgccaggaagcaaaggagagagagaaggagcgtatcttacaaaaaaaaaaaaaaaaaaaaaaaaaggtccatgctaagacttcaccagtcaaagcgaactactatactcaattgatccaataacttgaccaacggaacaagttaccctagggataacagcgcaatcctan

SEQ ID NO: 14250 - DNA, 581 bp, Homo sapiens
gtggccgcgctcaggtagcgcaactcccgcagaagtcctcgaaaagtgtgcgacggggaccctaaggccgacatagtcctgtccttctcccgcgtaccagacccttatcaggaccagtgcatctataacaccaacctaccttgaatgttccagccggggaaaaatgggggaccattctttcagtataccgttggtgagggcacaatgagtcattttcgcctcaacttagcttgaatcgcttcagtggaaccacccaatgtacccttaccatagcctttggcttttttgaactgtgtaaaccgtattgaagtacagtaaacctggggtgggcttgttacttgtttcttattgccttggaccaaagtgcccagtagaacccgacctcatatgtaagccaaaccttggtgtaggaaggtattctaacagaaaggccttccttcgaaccttggcttttgccgtcactttccccccaaagtttcaaggaattgttccgtttgttaaccggcgggtttcacctttgaaaagtgtttccttctccaagggtatccaataacgcggggcccccccttcaaaaaattttt

SEQ ID NO: 14251 - DNA, 353 bp, Homo sapiens
aggtactttttttttttttctttttttttttttttttttttttttttttttttcattgggggcacttttatttacagccaaggaaaaaagaaaactaccttctatttaaaatgggaaagcttgtttgtataaaaacaaatatttcatcatcacttattttctatactgttggaaactaagttttacatttttcattttcaacagagatttgaattttaatgtcccaaaaatataaagaagatggctttaaaatgtcctatatgttggcagccctaccctgaaaacttttttggcttatctttggttctgagctacagtcttcgcagagactaaattagtgactggacaacagc

SEQ ID NO: 14252 - DNA, 752 bp, Homo sapiens
  misc_feature 102: n = A,T,C or G
aggtacagccacccctctgcaacccgaagagacaggaaggtatatacaatgaaaccccttatatacaacttctgttactcgcattccagactgctacagctntgtgtcacttcagagagcaaatccttttaaaaaacagatggtcaaagagaaaatgagaaagacttcccccaaaaaaaggatacttccattccactatactaatgcaggctcttcggatggggttattgagtgataaacagaaaagggcgcgggcaggtcggctgttggacgagttaccctgttttttgctcttggcgtattgctgacgttttctttgggagagagatcctacaggtgggggtgcagaggtgctcatagtttgggcagccttggcctgtctagcagcatcgattgtagcttgccaagacaggacagtttgcttggagctatgcggctgaaaagttggtccttcaccagaaagaggaagtctggtgcctcttgcatagtttgcctctggggagaaggagaaaaacaaagattttttttttaaatgaggatccaatgggtaggagaaaaaaatcaaaggttgtctcccatcaataacaggggaatcattcactcctatgtttccattttgaatctcatgtgctatttttcacaagcctgggcttaatcaactggagagtcaagaaaagttcacgagctctggtctcagtgtcaatcacacaggatcaccgctgaatcacacccaatggggttagtacctgccc

SEQ ID NO: 14253 - DNA, 532 bp, Homo sapiens
ccgggcaggtacattaaataataacagaaaccaagagtttgtttctagtagtagaagtataagtggagagagtgctacatcagagagtgaatttaccttagggggtgacgacagtggtgtgtcaatgaacccagctaggagtgcacttgcactgttggccatggcccaatctggggatgcagtcagtgtcaagattgaagaagaaaaccaagatttaatgcattttaaccttcaaaagaaaagagctaaaggaaaagggcaagttaaagaggaagacaacagtaatcagaaacagctgaaaagacctgcccaaggcaaacgccagaatccaaggggaacagatatttacttaccgtatactcctccttcctcagaaagctgccatgatggttatcagcatcaagaaaaaatgagacagaagatcaaagaggtggaggaaaaacaaccggaagtcaaaacaggatttattgcttctttcttagattttctgaaatccgggcccaagcagcagttttccactcttgctgtacct

SEQ ID NO: 14254 - DNA, 342 bp, Homo sapiens
  misc_feature 10: n = A,T,C or G
aggtactttntttttcttttttttttttttttctttgtctgtgtttgtttgttggttggttggttggtttttgtttgtttgtttcgagacggggctccggctctgccgccgggggctgcagtgcaatggcgcgatctcacctcactgcggccttctgggctcaagcgatcctcccactgtgcccggcctgaagacagcctttagagaaagaagcagggggagttcttccgaggacagacaagatttctggagtttggaaagggtgagagactgggtcagcgaagggaacattccggtctttatgttgggatgcaacgtatagataccccgcgtacctgcccg

SEQ ID NO: 14255 - DNA, 344 bp, Homo sapiens
ccgggcaggtactgggccaagcacagttggcagggctggggcaaggaattctgacagaaacacaacaagggttaatggtagccagccctgctcagaccctcaatgacacgctggatgacatcatggcagcagtcagtggaagagcatctgcaatgtcaaacactcctacccacagtattgctgcatccatttcccaacctcagactccaactccaagtcctatcatctctccttcagccatgcttcctatctaccctgccattgatattgatgcacagactgagagtaatcatgacacggcgctaacacttgcctgtgctggtggccacgaggaactggtacct

SEQ ID NO: 14256 - DNA, 877 bp, Homo sapiens
  misc_feature 544: n = A,T,C or G
ccgggcaggtacgcggtggtgtcgggttcctgggcctgaggggcctgaactgatctcacttggctccgaaagcctttgctgtgttccctgcagcccctggccccccagccttggggctctggctccccccggcggaattgggggactgtttcctgacatcctggacaagggaagcccactagaggctggaacaggacctctccagcctcctcaccagcaccgtgcccatctcaactggacttcccgccctccttctccacctcctagtgcccgtggccggggattcaaagccgtgtgtgtgtgtgtgtgtgtgtgcgtgtgtgtgtgtgtagtgggtgtgcgtgtgggtgtgggtgtgagtgaatgtgggcgtgtgtgtctgcccgtgttattggggtggccgtgagtgtgtgctcacaggttcctaagcccctctagaacctagggtaccctccggctgcttagaattttacttcaagccatatcgattcccgtcgaccctccaagggaaggcccccgaaccccaactttaacggtccctttnattggacggtttaatcgacagcgctttggccgcccattatgggggaatgactggaatacccgtgggaaaaatgtgtaatgcggttgacaaattccacacaaatatacagaaccctggagcctttaagcgctttagagcagttggttgccttaatgtagtgtatcttatcactcatattaattatcctatgatctttacttgcccgttattatcagtgataaaaaacggtgcgtatccccttcaaataaatggactatggcaaactcacccggagaggaaggcggttatgacgttattaggcgagtcttggtgcctcctatacaccctgtaacg

SEQ ID NO: 14257 - DNA, 564 bp, Homo sapiens
aggtactttttttttttttttttcgttttttttgaggtcaggagttcgagaccagcccagccaatatggtgagccctcctctctactacaaataaaaaaaattagctgggtgtggtggcatgtgcatgtagtcctagctactcaggaggctgaggcaggagaatcacttgaaccagggaggcggaggttgcagtgagctgagatcacgccactgcactccagcctggacaagagagcgagaccctgtctcaaaataatgatgatgataataataataataataataattctgatctgtcataaatcttgtcttttccttaaagagcatgaaaaaaatgtttcccatgctagatggaaattgcaaactctttcgctgaaaataatcaacgcaacgcaatttcccgtttccaccacctggtcttggaagacagggacactgagatatcccagctgggaggacggtgctgagagaattgtgcaagcagagactagtgtcagcctttgcttggaacagctccatttcatttttatgatatagtttaaagggagctggtggggacctcc

SEQ ID NO: 14258 - DNA, 618 bp, Homo sapiens
aggtacttctgcaggatgaaggacttcagctcatccttttgggggcctctgaggcgtctgggcaggtcctgcagagaggggaggcctggtctaggcccaagggcaccagcaggggaaacagatggggataggtaggggttggggcttaacaccaaggtggaatgtagctgaggctacatggtagagggtgctgggaaaagatacctggttggggccctcccaggctgcaggcccctcttcctttccctctaccagcatctgcacagcttcttccaagtccccccgagctttggccagcacccactgggcctgctccaccgaacaggtagggaacacctccaggagtacctcagtccacatctccttcacgttctccagcaccatgttgcagtgcctatcgaaggccttcacgcggcccaggagtttcttattgttgcggcagttgatgagcacttgggtattgttcttgactgactgtgtgagcacagagagtggaccggtgttaaattcctcctcctctcgcttctgcagctcctctggggtcatttcactcttgggcttgttgaggaggctcatgatggtcactacgctctccgttcactcccgcgtacctgcccc

SEQ ID NO: 14259 - DNA, 464 bp, Homo sapiens
ccgggcaggtacttttttttttttttttttttttttttttttggagacggagtctcacccttgttgcccagactgcagtgcaatggcccaatctcggctcactgcagcctctgcctcccaggttcaggcgattctcctgcctcagcctcccgaatagctgggaatacaggcatgtgccaccatgctcggctcattttgtatttttagtagagacagggtttcgtcatgttggcccggctggtctcgaactcccgacgtctggtgatccacctcccaaagtgccgggattacaggcatgagccactgcgcctggccctatatagactttttaatgtgactttgtcaaaacagatattcccaactttattattagaattgagaatgcaagcattacttagtaggaaaaatattttgcttgaattcccaatgatttgtggatataaattctactaaatcatgtacct

SEQ ID NO: 14260 - DNA, 452 bp, Homo sapiens
ccgggcaggtaccttgatggctgtttgtggtcatacactccgtggaccagtcttgagggatcacagggccaaccagctcagcaaacctctccagaggacagctgggactgccccgcgtacgcggggaaattgagtccttctatgaaggagaagacttttctgagaccctgactcgggccaaatttgaagagctcaacatggatctgttccggtctactatgaagcccgtccagaaagtgttggaagattctgatttgaagaagtctgatattgatgaaattgttcttgttggtggctcgactcgaattccaaagattcagcaactggttaaagagttcttcaatggcaaggaaccatcccgtggcataaacccagatgaagctgtagcgtatggtgctgctgtccaggctggtgtgctctctggtgatcaagatacaggtgacctggtacct

SEQ ID NO: 14261 - DNA, 251 bp, Homo sapiens
aggtacgcgggggcacaagctgtaacatggcggcagcgactgcggcctgaactctagggagccgggttgatttttaaagcttcaaaatcctaagactcagcactgttgcggggagcacagggatcagttgtccttgtttttttttggtcttttcttcatttgaagattaagtattggagccatgggaataaaggttcaacgtcctcgatgtttttttgacattgccattaacaatcaacctgctggaagag

SEQ ID NO: 14262 - DNA, 462 bp, Homo sapiens
ccgggcaggtacttttttttttttttttttacagtttttgatatgctttattttgggtatgtagtttacaaaatataaaggaaatataaggagtgttctctttttttttaaataaaaagtgtatttttaactgggcatggtggctcactcctgtaaccccagcactgtgggaggctgaggctggtgaatcgcctgagtccaggagtttgagaccagcctgggcaacaaggtgaaaccctgtttctatcaaaaaaaaaaaaaaaaaaaaggaaaaaaataagtcaggcatggtggtatgcacctgtggtctcagcctcctaagtagctggtattacaggagtgtgccattagcctggctaatttttgtatttttagtagagatggattttcattgtgttggccatgctggtcttgaactcctgacctcgagtgatcctcctgccttggcctcccaaagtacct

SEQ ID NO: 14263 - DNA, 790 bp, Homo sapiens
aggtacataccccatggcccgttacattaatatgcaactgaaaatccagaacagagaacttgggaaaaacaataataactttagtataagcctctcagctgacaatgacccaaggactgttcagcggcccaggcacctgaggagcaatgacagtctacgaggacatcttctgcagcaacagccatcaggagaccagcagcagcacagcactcagggctcggtgtccacctccctgcagatcactttctccctcactggaatcaaccgcagcacttggagtctactcatggagtagaaacttctttatggggtctggcagaggcagcgaaggaatcagatgaagccggtgtttgccaagagctcttctcacagccacacggcacagacacagcaaggttctgggaacacttctggcctctttaaagacctgcaaggcctcagggtccacttttcttcttcctctcgactctgggcccaacgattcccacttcaataaattcaggttggctccaaattttaccagcaagcctcacaaaggctggctaaaaggccgggcgcaaaacaacattcatgacccacccagaaggacccccgtagaaacctggtgtgtgaccggaccattgcaattaagtcagggtccgccaacccaaagaaccacccgaaacactgaaggtttggaaggcttccttattacctgcccgggccgcaagggatttttttccttatttttttttttgggaaaaatgggtttcccaatttgttggaactctcgcctcgggtttccttcccg

SEQ ID NO: 14264 - DNA, 809 bp, Homo sapiens
aggtactcccgtgattgatgcagatcaacccgagtcttctcagctccgggtccttacactcagtgaagactcgccctacgaaactttgcattctttcattagcaatgcagtggctccttttcttaagtcctacattagagagtctggcaaggcagacagggatggtgataaaatggctccttcagttgaaaagaagattgcagaactcgaaatgggactccttcacttgcagcaaaatattgaaattccggagatcagcctgccgattcatccaatgatcacaaatgttgcaaaacagtgttatgagcgtggagaaaagccaaaagttacagactttggtgataaggttgaagacccaacatttcttaatcagttacaatctggagttaaccgctggatccgagaaattcaaaaagtgaccaaactggatcgagatcctgcatcaggaactgccttacaggaaattagtttttggctaaacttggaacgtgcgtgataccgcatccacgagaaacgggagagcccggaagtcctcctgactctggatatcttgaaacatggtaagcgctatcatgccaacgtcaggtttgacactggcacaggtctaaaacaggctttggaaactgtgaatgactacaatcctctgatgaaagatttccctttgaatggattgctgtctgccacggagcctgacaaaataaaacagcgcttgtgacaatttcaccatttgaaaaagatccgaacacaaatatcctatccgagggactggctttggtggagcaatttcagaaacttgagttttaattact

SEQ ID NO: 14265 - DNA, 797 bp, Homo sapiens
ccggccaggtactttttttttttttttttttgaaacggaggcgggttgctgaaccaatgtgaaagcttcattgttgcatttggacatgacaagaaactggatggcaaacccatagtcaccaagctgtataaaaaacctggctaccattttggctccatccagagactgggtctctttaacaatattgacagctttttcaagattattgaggcgatccacatagatgcggattacactttgccactgtttcgcattttcataagctacaacagcttctttggatcttgcatctgcttccttggcttaggcatactgcaaatggatcttaggagaagaaacgtgggggagaagatcaccaacttttgcccaattcttagagcggatgtaaacagatgcttctttatcgaagtcgagaccttttttatacagatgggccgcttattaaaattgtttcatattctccaatatggcctcccaggcttttttaaagaccttgttgggatgcttttaggctgggttaaccccttgactttttctcccattcttatggacatttgggccaattcaatcagaccaagctttataatgttccttattatcaaccgggtattcctttctcataagggcccaaaccttttacataataacccgcgaattaaactaaaaacataattttttcaaataaaaggtattgggctgggccaaaatctttcccattgaaaagaacttcccaagctggaaaaccctttctatttcagggatcaattgggaaattggattgagagaacctcgcccct

SEQ ID NO: 14266 - DNA, 298 bp, Homo sapiens
  misc_feature 129: n = A,T,C or G
ccgggcaggtactttcttcatttccacctttgcccaagtcatctgctttttcatggaccaccagtgtgcggccaatgatgcaatggtctcctgagagtgagatcacagaatcttcaatagacacatcgngccacaccatctttgtcagcagtcacattgcccaagtctccaacatgcctctcttcatcctttggcccaccgtgttttctggatagaggattaaagtgaggacctgcactggtacgcggggagcactgcctggctccacgtgcctcctggtttcagtatggcgctgtcc

SEQ ID NO: 14267 - DNA, 349 bp, Homo sapiens
ccgggcaggtacaggagccctgatagccatactcgcctgtgttttgacattattggtgttgatcctccttatcgtcactatgagaagacggaaaaaagagccccttatttttgacgaagaaagagacatcagagaaaatattgtgagatacgatgacgagggcgggggagaggaggacacggaagcgtttgacatggctgcactgagaaacctcaacgtcatccgagacaccaagacccggagggatgtgactccagaaattcaattcctgagtcgaccagcttttaaaagcatcccagataatgtcatctttagggaatttatttgggaaagattaaaagaagccgat

SEQ ID NO: 14268 - DNA, 342 bp, Homo sapiens
aggtacgggaagggtataaccaacattttcggggtatgggctcgatagcttatttagctgaccttactttaggatggggtgtgataggtggcaccccgcgtactgccagctcagggcagccaaaagcatgacaaacgacaggtagatgggggagtagtggcttcgggaaatcagccgacagttgggaagattctgcgtccggatggtggagatgatctgccttgttttgctagaagatgggtctgagtcggggattctatgataaatctcttccatatactgatatatgatggctttgacagctggcatattggtggcatccatcatcagggtcactgcttg

SEQ ID NO: 14269 - DNA, 358 bp, Homo sapiens
ccgggcaggtactttttttttttttttttttgaaaaaccacgtgggttccgagttcattactacaggaaaaactgttctcttctgtggcacagagaaccctgcttcaaagcagaagtagcagttccggagtccagctggctaaaactcatcccagaggataatggcaacccatgccttagaaatcgctgggctgtttcttggtggtgttggaatggtgggcacagtggctgtcactgtcatgcctcagtggagagtgtcggccttcattgaaaacaacatcgtggtttttgaaaacttctgggaaggactgtggatgaattgcgtgaggcaggctaacatcaggatgcagtgcaaaat

SEQ ID NO: 14270 - DNA, 309 bp, Homo sapiens
ccgggcaggtaccgggatgtgatgctggagacctacagccacctgctctcagtagggtatcaagttcctaaaccagaggtggtcatgttggagcaaggaaaggaaccatgggcactgcagggtgagaggccacgtcacagctgcccaggagagaaattatgggaccataatcaacatagaaaaatcatcggttataaaccagcttcctctcaagatcaaaaaatttattctggggaaaaatcctatgagtgtgctgaatttggaaagagcttcacctggaagtcacagttcaaggtacctcggccacct

SEQ ID NO: 14271 - DNA, 421 bp, Homo sapiens
ccgggcaggtacgcggggagagcatgctttttcctgtttggctgggaaagggaaggctgaactgctgagtctgacacttaacaggacttcggccttcccctgaatacagactagatcagagattttatttttttaattgaaaaggtacttgggttctctttagaaacccttatttggtgtgcgcatctggctattgcacagagatgtcatcttatgcgaagaagtcggagttgatttcttccctcagacaagctattggttgttggtgggcaacagaagttgctcagcatagacaggggaaaaaacgggtacggatgagactgaaagaaaaccctaaaggagaactctgagaattcgatctaggatgaagcttcaagggcataggagaagtattttgggcgcttttagacttgtgggaccc

SEQ ID NO: 14272 - DNA, 483 bp, Homo sapiens
  misc_feature 100, 107, 108, 110, 114, 132, 133, 152, 159, 199, 222, 223,240, 276, 289, 300, 318, 324, 330, 331, 332, 339, 438: n = A,T,C or G
gagtacatattttttagacaacagtttttgtaccacggcggcggccgcccgggcatttatttaaaagcagctcattcaacagaggtttgtctttaaccgnaaaacanngngcangaccgactaccctagccnngccgcgaccgagggacgcnagagagnccaagaggaggaaaacacagacggcaaacaagggcggggngccccacacggcccagaaacacnngaagcagaaggcagcanccagggccagagagggcgcgcagaacccagaagccncgagggcaaggcnaaccggccganaccgagcagaaacagaangagccnggagcnnngcgggcnaccgaaggccaaagacgggaaaaggggggaacaaggcaaaaggccggcccaacaggagcggacccaacaagcccgggaccaaccagagagagcgaaacnaggcccaaaaaacacccagggaggccgccaaaaaaaaaaaaagaa

SEQ ID NO: 14273 - DNA, 417 bp, Homo sapiens
aggtacgcgggggggggctggttcagggtctgaaacagagtttggggcttgtttgggattagtgaagctactgcctttgccgccagcgcagcctcagagtttgattatttgcaatgtcaggctttgaaaacttaaacacggatttctaccagactagttacagcatcgatgatcagtcacagcagtcctatgattatggaggaagtggaggaccctatagcaaacagtatgctggctatgactattcgcagcaaggcagatttgtccctccagacatgatgcagccacaacagccatacaccgggcagatttaccagccaacttatgcttttactccagcttcaccttagcctttctatggaaacaactttgaagattagccccctttatttaaagagttagggatcaattttgacc

SEQ ID NO: 14274 - DNA, 466 bp, Homo sapiens
  misc_feature 13, 81: n = A,T,C or G
ggtgagtcttgancgcggcagttctctagacacgcgccgcggcaccactctttgaaaagttctagaccaggttgttacaanccacgaaaaacacaaagagcatgggctgttaataatgagccatatctcacaaaatatggccacaggaatcctattacaaacatctacaggtgacttcagattccattctccaccttctgccttaagatacgaagccttgacatgaccacatcccagtcagcataagctccttctagatggcgggatatctcagttcctgcttcatagctacgtcggccatgaagtaagcaccagttatcaaaaataatcacatcacctggattcatcttgaaggtaaacttggatcctttgctgttcatgaggtcaacaaactccttcagagcagcataaaaaggctgaactctttcaacaggcacattaaatattgtgtccccagttgcgttat

SEQ ID NO: 14275 - DNA, 598 bp, Homo sapiens
  misc_feature 18, 55, 101, 102, 103, 104, 105, 107, 114, 152: n = A,T,C or G
gggcgagcccccagtaanccgcgcgagtgctggagcaagcggcggcggccgaggnacggtcctgtaaagggagggggtgaaaccaggttgtggaaaccccnnnnngngaggcanaagggagaaggtagagattgctggcacaacagagaagncccacccgggggactcaaccccaactccactgagggcagccccccccggacgggggggacaagggccgaaagggagggcgggtaggagggcggccggctccaaaaaccaaggggaacccccccgggccggcggggaagccggaaatcaaagggcaaacccgaaaacccgggcgaccccaagaagggggggggcccccggggaccccaaaaaaaaggggggccccccccaaaggggggggggggaaaaaggggccgccccccaggggggggaaaaaggaagggggaaaaagagggcggggccccccccgggggggaaaaaaaaaggagagaaaagcccggcccacaaaaaaagccccacccaccacacacccagccccgaggggaggggggagaacaaaagggaaaaaggggccccaggggggggggggggagaaagcacaaaagag

SEQ ID NO: 14276 - DNA, 281 bp, Homo sapiens
  misc_feature 55, 56, 57: n = A,T,C or G
gatctgccatgtgattacggcgatagttcttcccaaggacgccgcccgaggactnnnctttttttttttttttttttttttacgccatatcctttccgggtcgggagtgggtaatttgcgcgcctgctgccttccttggatgtggtagccgtttctcaggctccctctccggaatcgaaccctgattccccgtcacccgtggtcaccatggttggcacggcgactaccatcaaaagttgatagggcagacgttcgaatgggtcgttgccgccaccccgggt

SEQ ID NO: 14277 - DNA, 482 bp, Homo sapiens
  misc_feature 22, 23, 24, 73, 105, 106, 109, 113, 114, 115, 124: n = A,T,C or G
gcgcggcccctcgaattcgggnnngatgcaggccacagcggcggccgcccgggcagggactaaggggagcgcngtcaaccaaaggagggctcagaacaggcccannccnccannnccagggagnggccaagacaacagaaaagcgggcaccgcttcaggaaaagaaatcggggctctattacaacaggtgcgagaacagtggaaaaaaagtggttaccaaatggaaaaagaggaacgtctgagggacataaagaagacctaaaactgaaggctactaaaaagcagagcatttctggtaagaccaaattttctcccctcccccttaaagaggttttagagactacaccagaaaaaaagacagttgaggggacctctgtagaacaacaagggtcctatttcgtgaattaaatatttcaagaaccaaacagagaaccaccttgccggaaccgaatgaaaccaccgaaaaggaccccgggccggcc

SEQ ID NO: 14278 - DNA, 500 bp, Homo sapiens
  misc_feature 26, 111, 113, 114, 158, 159, 164, 173, 174, 194, 198, 210,221, 242, 266, 334: n = A,T,C or G
ggatctaaccatctttgaacgacggncaatgttgcagaccacggcggcggccgcccgggcaggtattcaggacagattttttcaacccgattggtggccaccgcgaccagngnnggagcagcaggcgtgccagcaggagggggccgcaccacagccannaaccnggaggccanngggcagccaacacaagaccngccncagaaccaggcnggggaccgganagaggaccggaccaccacggnggggaaggaggaaagggaagcccngggggccagcaaaacaccaccaccggaaacaaaaaggcacaaaagaaaggcgaggcaggaaccagccngaggggaaaagcggaagccaaacccaaacagcaagaccggagggaggaaaacaacgcccccgggggacaccacccgaaacccccgcgggcccccggggcccagagccccagaaacagggaaaaccaagggaaacaagacccggggaaaggggcccgggcccccggg

SEQ ID NO: 14279 - DNA, 630 bp, Homo sapiens
  misc_feature 50, 71, 107, 108, 111, 114, 115, 116, 117, 168, 179, 196,198, 204, 221, 253, 261, 300, 363, 391, 406, 461, 486, 489,534, 536, 545, 554, 555, 623, 628: n = A,T,C or G
gagtaaacaacctcgtactcacgccaggtgctggccaaaaccgccgccgnccgggcagagacttgagtctnaaggagctaaatcaccccgaggtggataacacagcnnagngcnnnngggaaggggggcgctgaaacgccggggacaccaggagcgcacgacaagacnagggagggagnccgggaaggaaagggcnangcagcngaaggaaggagggggcnccaagaggaagagaagagccgagagaaagcanaagggccngaagaaaagccaagaaggcaagggaggaagaagagaggncgagacaaggcgaagccagccggggccagggcccgaggagaccgcaacaaccgcggcggcacnaccccaaaggaaaaaaaaagacaccccnccaaagaaaaaaagnacacaaagggcccccaaacccaaccaaaaaaaaaaagaaaaaaaaggaagaaaangaaaaggaaccccccgggcccgcanccnaagaaaccaagggggaaacaccccccgggcccggccaaagaaaanancgaacaaancaaaagccnnaaaccggaaaaccccggccgacacccccggaagaggggggggcgcccggggaacccccaaacccaganagggncg

SEQ ID NO: 14280 - DNA, 399 bp, Homo sapiens
aggtacgtttgggagcctgagctggaactgaagctggggctgcagcctgggccttggtttgatccttggccttggccttggccttggccttggcctttggccggcacagcctgagccccttggcaatacgggcacgagcacgctttccaagcttggggtgggcaatgtaagcaagtcgatcgagcttgcggctgacaccctttgggatcttgggcttaacactccttgggctttacgagggctcttgatagccctcggccacagtgcatctcatgggcctttggcatttgtttgggcctggcattctttctttagggccctttttttgttgttgctttcattggccaaaagcggcatgttatcctaaggaaacttttggggttccaacccaccttaagc

SEQ ID NO: 14281 - DNA, 396 bp, Homo sapiens
aggtactgaaagagcccaacacaattaccctgtaaactctctgttagggcaaccaccaccacctgtcttccaggacacatttttagatactctgacaggccactgcatctcagattcaggggagaaaataagttgtcacctccccttcaaaggttccagagtaaacaaatggtgccatcattcaagataacgtgctgatcaccctcctcccaaaaagcaagagcttgtttatggttgaggaatcggcgggattgtctgaatgacacattatacagcagccccccacggaattttctgcaacactcttgggatcttgtgcttgggtggaaacatttgccaaatccagtttctttaatgagggcaccttgtgttgtaaattacaatgccttggctctt

SEQ ID NO: 14282 - DNA, 467 bp, Homo sapiens
  misc_feature 99, 307: n = A,T,C or G
gaaaccgacatatattgatatacggcgaggcgaatcgcacactgcaccggcggggcgggcgcccgggcatgtacatgttgtgggtgccgctccgggtgntatatcgcagccaaatcccgaagttcttcacccgcaggggggacttctcaaacacctgcccacagtagacaatctcccctgaagacttcttcatcttctttaactgagattccaaagtacgcggggagtgaactgagggccaccctgggaggaagccgactaggcgaattcacttactgaccgcgcctgggctgctcctgagacatgngaggaagaccagtgaaggctggagtgaaaatgatccgtgttgcggaaaccttgcaaaagtgtaggtggacggggagttaaaaaaatatttattgacccccgaaatggtgtgagcggaattcctggccccggaggggaaaaactttggaaacatctttcgg

SEQ ID NO: 14283 - DNA, 474 bp, Homo sapiens
aggtacaaacctccagctcactcagataaaggaacatgaacgacctatcacagaaatgcctttgtttggccagccacggtggatcatgcctgtaattccaacaatgtcggaggcagatgtgggcggatcatctgaggtcgggaagttgagaaccagtcatgaaccaatatggtacaaaccctgttctttactagaaaatacaacaactatgccagtgcagtgggtgcgtgcgatagcgctattaattctccagcatagctttggtgtagggcatgtagtgcataggcatgcgaacttcgtcttagtaaactcacacggtagtgttgtgtaaggcttttgccctcgttgcaagccccgtagaaatacgcctaactcaatgtggcaaccttcctagggccttgtggtccaaactaaaggaaggctaataaaacttgggttcgtttacactacatacaagacaaaacataatctcat

SEQ ID NO: 14284 - DNA, 443 bp, Homo sapiens
ccgggcaggtacgcgggagagaagtttccgggactgtcctcacgacagtccggtttgtagattccctgatctgcaattcttcccgttccttcatggatttgaaggctctcctttcttccttgaatgactttgcatccctctcgtttgcttaagagttgggacaaatgttggattaactggtgtgaacccaagctccaccacatacttgtgaaatacacctctttcctgaccaaatgactctgaactgatggaagttgattggcagggagggtggctcgcataaaagtaatgggcacgactcttcaatttcttcttccctaacccattcccgcacttattctttttccgtactcccaccggaaaggctgcaataaaactctggggaaacaacaattggtaaagggaagccgctcttggtgtgaatacccgcggccttcttggga

SEQ ID NO: 14285 - DNA, 387 bp, Homo sapiens
aggtactccatcgggatctttttcacctacgcactccagttctacgtcccggctgagatcatcatccccttctttgtgtcccgagcgcccgagcactgtgagttagtggtggacctgtttgtgcgcacagtgctggtctgcctgacatgcatttttggccatcctcatcccccgcctggacctggtcatctccctggtgggctccgtgagcagcagcgccctggccctcatcatcccaccgctcctggaggtcaccaccttctactcagagggacatgggctccccctcaccatcttttaaggacgccctgatcagcattcctgggccttcgatgggcctttggtggtgggggacctattgaggctctcttatgaagctgatccacg

SEQ ID NO: 14286 - DNA, 420 bp, Homo sapiens
aggtacttttttttttttttttttttttgctttccattttttttagcacaaagtataaactctttcacaaatacaaaaattaaccaggcatggtggtgcatgcctgtaatcccaactacccgggaggccgagacgagaatagtttgaactttggaaggtggtggcttcaagtgagccaagaatcgggccacatatagctccagtactgggcaaacagagcggagacatccatttttagaaatacaagaacaaagatcaaagaaaaacttgtttcccagggcttttccctgcaatggttcgtggccccacaagtccaatttctaattttataggacccacttttgactacattaagattcccaatttcttggggaggttcctttaaaacagggttaaaaggcgcctttttcctggtttatt

SEQ ID NO: 14287 - DNA, 513 bp, Homo sapiens
  misc_feature 16: n = A,T,C or G
gctctgaacacttganccctccaatgttctcgccacggcggcggccgcccgggcaggtatttatccgtaacttttttctcccctgcgattggtaacatccctccaggcaaacagcagctgaaaggttgtcaactgctgtgtgttaaggtgcttcttctgcttcctatagagttcaaggtaggactcatccgtgaagatagggtttgatgaatttctttgaggcagaatgtcacctgcatccgtatgccaccaccacctgtcagactgcaacagggcctgacccgtttgcccgacgcctcctcaccatcctcccaagcccttcaattttttggtccattagaataattataaggccagcgtttaaatgggggttggtccaattcccccgggggccgttaaggattggaagcaatctttctcttcgtggtccacgaaggggaccgttatttgctttctcaaattcaacccgcacgacttggattattttggcctttgctttttgaagcttcccac

SEQ ID NO: 14288 - DNA, 376 bp, Homo sapiens
ccgggcaggtacgcgggggacctatgagcagaggaaaatcgtggagttcacctgccacacagccttcttcgtcagtatcgtggtggtgcagtgggccgacttggtcatctgtaagaccaggaggaattcggtcttccagcaggggatgaagaacaagatcttgatatttggcctctttgaagagacagccctggctgctttcctttcctactgccctggaatgggtgttgctcttaggatgtatcccctcaaacctacctggtggattctgtgcacttcccctactcctctttctcattcttcgtaatattgacgaagttcggaaaacctcatcattaaggcggacgcccctggccggctgggttggaagaaggaa

SEQ ID NO: 14289 - DNA, 394 bp, Homo sapiens
ccgggcaggtacttttttttttttttttttttttttttttggggcttattcagtcgctttattaataaaagagatcaattaagctttcctctccccacccaccccggaggtgccgggctttgaatcctcgggaggaaaaaatggcagggctgcaagcttcctccccaagtttccaggagcacctgccaccagccttgaacacctcccccaccgaggctccgaaatccacaattcctggctcgtaaaactttgccaaaacggaggggaggggacaacacgccagcgttgttccacccattcaccggccggaaataaagccaccccacaggcttttttgaagccgcctggcttgatcccacacaattcttgtagaggagaaagtttcccagggggg

SEQ ID NO: 14290 - DNA, 463 bp, Homo sapiens
ccgggcaggtacgcggggagcgtcataaactttgagtgctttaaaaccgcaggtaacgatgggaaaggaactcctgtattcacaggggaggttgactgcacctacttcttcacatgggacacggaatacgcctgtgttaaggagaaagaagaacctccctttgcggtgccaccgaacgggaagaagacgctatgacactgtccgcgcctggtctccgccatgccagaactcagaagcatgaaattgtggaacgcttgttggaatgtgcgaggttcagcaccggtataactaggagtaaatgaaaggcaatcttttttttcattttaaatttatttttgttccaccacaaagatgtcttgttcaaggtcaagtggcacagcgtccacgcagtgagtttgttctctccgtagaggaacggcggggcaagtttgttggtggccaggatgggaattaaaaaaaatcg

SEQ ID NO: 14291 - DNA, 371 bp, Homo sapiens
ccgggcaggtacaaaagtcccagtccttccgcagttctaggtttacagtcaggctcaaccttacttgccccgctcctgcatgaaaacaagtgcgttttatacagcctctgccacccagtggcatagtttaaggctctatattatattttaaaattaaaggttttttttcctatcatacacatcaatttggaacctgctggtgactcttctaccacagagggtaaataaaaagaccagtttttaaagtaagaggattcagctcatcttataaaagtataatagttttcggccagacgtccattaacatctgtttaaattagatacagacacaatgccaaatattagaatcataaatgtaattttggagataa

SEQ ID NO: 14292 - DNA, 360 bp, Homo sapiens
ccgggcaggtacttctcctccatctcagcatagtgttggtctttcactttacgcttgtcgctcttcccatcatcctcgccggagccatagtccaggggtgggggctcatccatgtcattcttccgctggtagtttcgatacataacccaatggaagatttccagctgaagctccttggcccaggagcagtgccagtaggatagtcctacccacttgacaaagaactctcgctctgatctgccttgaagaggacgggggggtgggacatctggatttccatctgcctgttgaggggctggcactgctacaggtggctccccccaccgccaatgtaggatcttctgcactcgacccttcagc

SEQ ID NO: 14293 - DNA, 376 bp, Homo sapiens
aggtacaaaaggcaacatactgtagggttctgtttatatgaaatatccagagtaggcaaatccatagagacagaagacagactagagattgccagagggtgggaggaggaatgagtaactgcttaatggggatggagtttcctctgggatgataaaaatgtcctgggactagatagtggtaatggctgcacaaagttatgaagacacttaacatcactaatgataaatctgacgttatgcatacgtcaccacagtaaacatacccctgcagtggaataggttctgagaccatttagaggtcgcacagaaaattagaagatttaaaaagaaaaattgattctcagacaaggtgcctgaataggaacagctccagtct

SEQ ID NO: 14294 - DNA, 381 bp, Homo sapiens
aggtactttttttttttcacttttttttttttctttttttttttttttttttccattgggggcacttttatttacagccaaggaaaaaagaaacctaccttttttttaaaatgggaaagcttgtttgtatgaaaccaaatatttcatcatcacttattttctatcctgttggaactaagttttacatttttcatttccaacagagatttgaattttaatgtcccagaaatttaaaaaagatggctttaaaatgtcctatatgttggcagtcctcccctgaaaacttttttggcttatctttggttctgagctacagtcttcgcagagactaaattagtgactggccaccataaaaaaattgcccctcctggctaaaatggc

SEQ ID NO: 14295 - DNA, 408 bp, Homo sapiens
ccgggcaggtacttttttttttttttttttttgatgtcattttgtgtaagggcgcacactgctgcgaacagagtggtgatagcgcctaagcatagtgttagagtttggattagtgggctattttctgctagggggtggaagcggatgattaaaaaaaattcctgctacaactatagtgcttgagtggagtagggctgaaactggggtggggccttttatggctgaggggattcacggggttggagaacctaatttgggtctgaatttgcgctgactggctgcctaggtagggaggcctctattacctgtgggatgagggctttgggatatatgcgttttaaaaagggggcttattttggttcgtggggtcttcattgagtttgcgagttgttcggataaaattcatga

SEQ ID NO: 14296 - DNA, 438 bp, Homo sapiens
  misc_feature 308, 309: n = A,T,C or G
ccgggcaggtaccacaatagcagggggatgccgatggagggaagggtcatgaccccaaaggctgcccagtccagaaaatgaggggagaatcgcctgtcaaactcccgctgagccaggattcctccctgtccaggtgcactggtagagccaatcacaacgggcccatcctcctgggccaggtaagtaattgttgccgaggtgaagttgacccgcgtacctcggccgcccgggcaggtacggccagggctattggttgaatgagtaggctgatggtttcgataataactagtatggggataaggggtgcnnggtgtgccttgtggtaagaagtgggctagggcatttttaatcttagagcgaaagcctataatcactgcgcccgctcataagggggatggccatggctagggttatagatagttgggtggttggtgtaaa

SEQ ID NO: 14297 - DNA, 354 bp, Homo sapiens
ccgggcaggtacttggaggtggggcccttgggattagtgtcctaaaaagagacacagcgagctccctcactccttccaccatgtgaggacgcagtgagaaaacagctatctacaaacctggaagcagaccctcaccagacaccaaaactgctggtgccttggtcttgaacttcccagtctccagaactgtgagaaataaatttttgttgtttataagccacccagtttacggtattttgttatagcagcccaaatagaccaagacaatacccaatatatacttactgactgatgctgcttgagcaaccagcacagcttatggttcctaagggcctagcacagtgcctggtacct

SEQ ID NO: 14298 - DNA, 416 bp, Homo sapiens
aggtacttgcacatttctggactacaaaggcatttcttcctgcaatgacgaagaataaccatggccatattgtcactgtggcttcggcagctggacatgtctcggtccccttcttactggcttactgttcaagcaagtttgctgctgttggatttcataaaactttgacagatgaactggctgccttacaaataactggagtcaaaacaacatgtctgtgtcctaatttcgtaaacactggcttcatcaaaaatccaagtacgagacattgctcacctacagtgacgtcgtgggcgcggatgtgctggacgaggtggtgactgtgctcagtgacactgcgtgggacgcagagcttgcaatggtgagagagcagcgcaaccgtctgtgtgaccttctgggcgtacctgcccgggcgg

SEQ ID NO: 14299 - DNA, 271 bp, Homo sapiens
ggaataccccctgagacggcgagcgttcgacccgcgcggcggccggttctcgaaggactaacgtgccgtacaatgccgaagcacgttttcaagctggcgcaggaccacgccaaggaaggcgacttcgtgatggtgctgggctaccctggccagaccaaccgccaccgtctgccgttcgaagtggccttcaccttcgactggaactatccggccttcgtgcaagcctcgggcgagaccctggccatcatcgaccgcgagaccaagaacgacc

SEQ ID NO: 14300 - DNA, 202 bp, Homo sapiens
acgtcggatgacatgttaccatgacacaaaacgacaatgaccagggcaccacaccaagaatcatctacctgtattacaaccagacatttgcactcaaataaagaggtgctgccgtatacttatccggtgctggaggcatcatgaatgggaaccagacacagctggaaagcaatcgggtaacagagcgccaaccctgtacctg

SEQ ID NO: 14301 - DNA, 487 bp, Homo sapiens
aggactgacgctactctgcaatatcgggcgaattggtgctccaccgcggcggcggccgaggtacatataatttgcctggccgggcacggtggctcacgcttgtaatcccagcactttaggaggccgaggtgggcggataacgaggtcacaagttctagaccagcgttgcctaccaagtttagcaattccgggaatgccaactgtccttacagtcactctcgtatttgcttagctatgagaataatttggggctaacttcaccaaaaaagaaaaacaggcgagaacgtcactctagtaacaataaaagccactggattttgctttcatcaaatgtggcaccttgtgaaccacctttcttaaaagtatttattttaacctttaaaaatttctgccaagtagagctttcttcttttacactgagcaacccacttcagtgccagcagcctacgggcacagaagccaggcaatggttctgggacacagtttg

SEQ ID NO: 14302 - DNA, 381 bp, Homo sapiens
  misc_feature 21: n = A,T,C or G
ggaactgaccacctctgtatntcgggcgaattggtgctcgcccagcggcggcggccgaggtaccttttttttttttttttttttttttacacgcacaatggaagctcattgcaaggatacacacaaatgttgatgtgcaagggtcctcccaccatcagcacactatcacaggtcccatcctcctatcttctggaagtcaagaagttcaaacccgtttcacttgcattcatatgacccaaagacagattgccaccctgtgggtaaagtcctactcagcaacatttaccttcctaacaaacttttatgttcaagagatagcacctaacgggggcaaaaaacatgattggaaccacttttctcaataagaaactttgtataggc

SEQ ID NO: 14303 - DNA, 434 bp, Homo sapiens
aggtacgcgggggcaagcggttcagctgtctgctccctagcagccggccttcgggtcgggcgtctccgccggctactgccgcttcagttctcccggtgtggccacgagtcggtagccatcctaatggatatgggttggttcctgttttctatttggaactttaaaaaaaattaaagcaggttgcactgctgtgatccatcctcatctcctaaagatgcatcctgacttatctccacacttgcacactgaagaatgcaacgtcttgattaacttgcttaaggaatgtcacaaaaatcacaacattctgaaattttttggttattgtaatgatgttgatcgggagttgagaaaatgcctgaagaatgaattccttacttaacagaacaacaatcttggagaccggcaagtcaccgggtgccacccactgttaccaa

SEQ ID NO: 14304 - DNA, 443 bp, Homo sapiens
ccgggcaggtactttttttttttttttttttttttttttttttctctttcatatattttaatgtaaggtagttggcaatgacttttttgaagactgtagaccattattttgtagtatttctctcaaagtgaattggtctgttctcatgatgaggagtcacatcaatattttggccaggaatactacatcagggatgttgggttcttcattgctttctaaacagctttgttctcaaaaacttggcggctacaaggaattaaatgtgaatgggaaaggaagaaagaaaaacacagatcatagaagctgtgccttcgaggaaataaatcctcttaagggggggaggtgtcctctttgatctgagggcacacctctgggagagaggccagaggctgacagtcagcctcgtcagccagatgcgtcatcagccctgggaagggctgcct

SEQ ID NO: 14305 - DNA, 428 bp, Homo sapiens
aggtaccccattaactgtgaatgaatctgagcttggtttcctttattgcttcctctgcaatatgattgctgaaacacattttaaaaattcagaagcttgtcactcctgttaatgggaggatcagtcacacatgtgtagtactctgctatggtgctggcttcctttaaactcaggatagatgccaggtgggctccgtttccgtaagactgacactcgagctcggcatcagaccagttcctcagcttcctgaagtaaccatagcaattggacttgtggtaaaaccatccaggagcacagctgggtctcatgatgatatcacccaggactcctgttttggccaggcagctcagcaataggagcagccgcatgcttctggaagccatcttcctcctaccctgaggatgtagctagtgcaaggatctcagaga

SEQ ID NO: 14306 - DNA, 430 bp, Homo sapiens
aggtacttttttttttttttttttttggaagtagaatacagttatcaaaacgttaatttctaagcattagcattatgcaagaaaagagctgataaatggcaaggaagtaattcatccatgcatttattcatgcaatgacctttcaacaattttctttttttaattctactctggtgcaaggcctcactgataacttgggggaagatggctgacaaaaaaaaaaaaagaaggaaaggggaaagggaagggcatgcggaagaggaagaggaaggggaagaggaaggggaaggaaagaaaaaaagaaggagggaggaaggggaaagggaaggacaagggaggaaggaagggttattacaggaagatgaacctgttaatggcacactcaaaggacacaacagagctgaggtgagggagaccagaaacaggatga

SEQ ID NO: 14307 - DNA, 433 bp, Homo sapiens
ccgggcaggtacgcggggggcatcatggtttttgaaggctttagttctgctttctgcctctcctccacagccccaacctcccacccctgatacatgaaccagtgattatttttgttcaaggagaaaaacatttaaaatttggtttggattccttaaaatggaaggcaaccttccacaactggcctggctgggaagaatggtcctgccagggcccgaataagaaccctggggtgggggggggattgggggttcttcatgtaaggggattcctggtggtggggtgaaaatccatgccgttgggattttttgggaatccaacttgggttcaagaaatttgggtgaattgcttaaaatccatttttaatttttgaccagttggcttgaaactgaactctcattcttaacctctgttggacccggcacctttttggat

SEQ ID NO: 14308 - DNA, 435 bp, Homo sapiens
ccgggcaggtacgggggaatggaatggaatggaatgcaatggaatggaagcttccggaatggaatggaatggagtggaatggaatggaatggaatggaataaacccgtttgcaatggactggagtggaatggaatggaatggaatggaatggaatggaatggaatcaactcgattgcagtcgaatggaatggaatggaatcaacccgactgcagggcaatggaatggaatggaatgcaatggaatggattcaacttgaatggaatggaaagaatggaatggaatggaatggaatggaatggaatggaatggaatcaactccattgcagtcgaatggaatggaatggaattaacccgaatagaatggaatggaatggaaatggaacggaacggaacggaacggaatggaatggaatggaatggaatggaacggaag

SEQ ID NO: 14309 - DNA, 535 bp, Homo sapiens
aggtacgcggggtagtaaacttggaaccttggaaatgaccaggccaagactcaagcctccccagttctactgacctttgtccttaggtgtgaggtccagggttgctaggaaaagaaatcagcatacacaggtgtagaccataatgtttcttaaatgtgtgtaatttttgtcctcatctgagatcctggggaagtacatgtgccattgcctggagtacaatattcacttcaattttcttcttgaggaacaacagtataaggaatgcggggtgtccttgatgttaattttgatggggattacagtagtattgataagaagtgggttgtggaatctcaacacctgtagtagtagttggtagaagttgtacattgattgcttgtgaacacttgtacccattgaaaagccatctgaatgcagaaaagacttggaaggggcatcaaacgtcaacctatgaactactttcatcagccaaaggtaatgggaaactttaaaaaaccattaaccccctatttcctgttcccttgagaaggacact

SEQ ID NO: 14310 - DNA, 441 bp, Homo sapiens
aggtactttttttttttttttttttttttagtagggacggggtttcaccatgttggccaggctggtcttgaactcctgacctcaagtggtctgccacctcggcctcccaaagcactgggattacaggcatgagccaccatgcccggcgcatcactctttttaattttttttttaagttgcttcttccattcaggcctaagctggaaacaccactgtctgataaacactggccacaccaacgacatggtaggccagggggtgatagcaatcttccagtaaatcagcttttcagtctaaacataccagtcatcctacttgaaagaaatgtgtccctggggacaacctgtgagccttagccttctgtagggagaagcactcttgaatgggaggaaatttgggagcgaatattttttttaagacagaacctaagcggaaatcttt

SEQ ID NO: 14311 - DNA, 356 bp, Homo sapiens
ccgggcaggtacaccatcccttccattggactggctttgttggaagaaaagctcagatatagcaatgagaaataccaaaagtttaaggcagtggaagaaagcctgcgtaaagagctggtggatatgctaggtgatgatggtgtgttcttatatccctcacatcccacagtggcacctaagcatcatgtccctctaacacggcccttcaactttgcttacacaggtgtcttcagtgccctgggtttgcctgtgacccaatgcccactgggactgaatgccaaaggactccctttaggcatccaggttgtggctggaccctttaatgatcatctgaccctggctgtggcccagtacct

SEQ ID NO: 14312 - DNA, 179 bp, Homo sapiens
ccgggcaggtaccactggcatcgtgatggactccggtgactgggtcacccacactgtgcccatctacgaggggtatgccctcccccatgccatcctgcgtctggacctggctggccgggacctgactgactaccttatgaagatcctaaccgagcgcgggttacagctttaaccaacca

SEQ ID NO: 14313 - DNA, 435 bp, Homo sapiens
ccgggcaggtactgaagaagagatgctgtggttgagatttgttttcctctctcctgggttttagatcttaattctcgttccttgttcacaccactggtatgctttatcctggtgttttccaaatgctctgatttgtcagagttgttgcctgtgaatgggaggatggaccagctgggattagcctttgcgctgtccttggaaggaaccattttgggtttatttttcgttgcgtctagtgctttgaccttcttggcatgtttacttcctttgtagtgggcctcggcctggctatctgagttaaagcgaagctgacagacattacaagaaataacttgtttcttctttgggggaatggatactccaaatgtatggttaataaccgctttttgcacaggatccattgtgttaaaatttggaaagagcccaacagcagag

SEQ ID NO: 14314 - DNA, 433 bp, Homo sapiens
ccgggcaggtacagagggctggggagaggatgcaaagctgcagttggatgaagatgggtttgtggaggctacagaaggtttggggaatgatgctcttggcaagggacaggaagaaggaggtggctgggatgtagaagaagatctggagctccctcctgaacctggattttatcccctggggcaactggtggggctgaagatggtttctttgtgcccccaaccaagggaacaagtccaactcagatctggtgtaataactctcagcttccagttgatcacatcctggcaggctctttcgaaacagccatgcggctccttcatgaccaagttggggtaatccagtttggcccctacaagcaactgttcctacagacatacgcccgaagcccgccaacctatcaggctctgccctgcctaccctccatgtatggct

SEQ ID NO: 14315 - DNA, 435 bp, Homo sapiens
ccgggcaggtacgcgggtatgcttgactggtgtttcttttgttgttgtttgtttttctttcaattggaattctgtatttaagatgttatgtcagctgacacatgggacactcctgaagaggtgactggccccccaccctgtttggcggtgagtttccgcaccatcggcctcagaagtgtccctcttgcttcgtctcttgttcgcttgctttgtaaatactttggtcccaagctgagacaattgctgtgtaaaacgtgaagagtcaatcccaaagggtgttatttgtcagaagaacttgccgtgtgccttcaccgaaggcagtcaagtctgcagttggatttttctcactggtgaatgacaagaaacagggataattttgcactgcggagatattaccggggttgtctatttgattatttatagtacctcggccgc

SEQ ID NO: 14316 - DNA, 466 bp, Homo sapiens
ggagctccatccgcggtggcggccgaggtacgcgggtaagtatagactaattaacctaagctacctttaacaacgtagaatttagatgggttcatatatgtgagaaaaacctgaatataggacaggggtccctcttttttccccacctctgtcgcccaggctagagtatagtggtgtgatcttggcccactgcaacctctgcttcctaggttcaagtgattctcctgcctcagcctcccaagtagctgggattgtaagagtatgccaccacgcccagctactttttgtatttttagtagagacagggtttcatcatgttggccaggatggtcttttaactcctgcccttaagtgatccaccagagaggagatcctcggcctccccaagtgctgggattataggcatgagccaccgggcccagcctactttctaattaatttaaaaagagaagtgaatatataactc

SEQ ID NO: 14317 - DNA, 438 bp, Homo sapiens
aggtactgcagccacgttggccttcttggtattctttgaatacaagggagcttctacttcaaggcatttacattggctgttgccttagcttagaacgctctttctccatatagccgcagagcccgctctctcacctgactcatgtctctgctcaaatgttaatgatcaagaggcagtccccggcctcccccttaaaattacaacctgtcactctccaatcctttcctcacgattttctcaaaagcacttaccgctaaccaacattatatctaaattttttttgtctctttttattggaatgtaagtttcatgtaagcaggaactgtatatcactgctataccctcagcatttaaaacaatggctgtacctccggggtggcgctggggttggctccatgaccaagatctatgggggacgtcagagaaacggcgtcatgg

SEQ ID NO: 14318 - DNA, 434 bp, Homo sapiens
aggtactaatactcctgttaaaattcaacagctttattgtgaaagaatccagagatctcacactgaaaaaatactaacacagctcatatataaattacttatctataagaacaattatagaaggaatctaaatggggcaattttaacaaaccaggcaaaatatcacatatacctgaatataaggtaactccaagccatgagtataagattaaggcagttactttattttgaacaaggaagtggcataagcaactcagtgtgtgccccttagggtgggagctcttccccctaccactccccaccccaaggcatcattttggagaaaaaagtgtcttctatctggctagctgtgttatctaggattgcaccttcttacacggcaggcgcggcatcacgtccagatgggcatttaaggaactgcatttcgggagatg

SEQ ID NO: 14319 - DNA, 352 bp, Homo sapiens; identical to SEQ ID NO: 5150

SEQ ID NO: 14320 - DNA, 131 bp, Homo sapiens
acatttgtaataaggttcatgtatattctttcatgtttttataatttttttttcgattttgtttatattttcggttactttaaaataaatttctttatttttataacttttatccttgtggtatacttttc

SEQ ID NO: 14321 - DNA, 522 bp, Homo sapiens
aggtacatggtgaaagtgccttatacaggttgaataaaaatcactgccattttcagaatattgatggcacctgaggacttgaaattgtgtccagaactggtgggttcttggtctcactcacttcaagaatgaagccgcggacccttgacagtgagtggtaacatttttttaaaaggcgggcgtgtcccggagattcgtatgctttctgatgctacattaatgtgtttcggtagttttttatcctatcttggtgggtttcgtaggtatctcgtcttggcatcagggagttgtaagcttgccaatatcccttccgctgggtgaagttgtttacaagtcttcttttccctgcgtaaccctgctcccggggcggacccgcatctaagtagactaggttggtatccctccccgggtcttgctaggtaatttacgataattcaagactttaattctaattacccgtataactctttaaaagggtgggagcccccggttaccccatcatatattgttaccccttttaaa

SEQ ID NO: 14322 - DNA, 469 bp, Homo sapiens
ccgggcaggtactttacaattcattcgtgaagctttagccaaagaccttgaaaactaacagttgtgctcttccagttttcatatgtgaattcagtgcaagaaacttggtgttctgtttcttcttttaagctctatgcaatcatgcaaacatagtgatcatagcgtcaacatggtctggagtgtgttgcagactacagaacattgttctcccttcaagcgctgtaaagcaccaacccggatagtggcaaggcacagtaaggaagggctgtgatcgggtccccttttggtgtaaaataagattcctgtgtgcttgctttatggtttcgcaatggttgggccttgggtgactggtagcaaaagcttgctgttgaagagagtgttccttttcccattctgtgaacttttccttggtgcttccaaggagggggcacggttaggtttctgaggtaacctttaccttacccataat

SEQ ID NO: 14323 - DNA, 429 bp, Homo sapiens
ccgggcaggtacagggaaggcctttcgggcagggcacatggttcactgccccatgacgtgataccttgaagcacaccattacagacaagtgggcccccattaatcacccgagcaggtgcttttgccccctgtccagcgtccagcacacagcatgaacttggtcaccttctgagggtgaacttgcgcacacacgtcattggaaataacatggaggtccacacactgaagtttctttggggtcaagaactcctctggttcaatgctgccccagcctgaggcgtagcaaatggtccccagtgctggctcctgggtgggcaggtccatgaccttcacagcatccgtgagctcggcaggctctgacaggcggaacaacatgaggtcgtggctggagtcatcacctggcctgaggaatcgattctttaggaggct

SEQ ID NO: 14324 - DNA, 450 bp, Homo sapiens
ccgggcaggtactgttcctgttggccgagtggagactggtgttctcaaacccggtatggtggtcacctttgctccagtcaacgttacaacggaagtaaaatctgtcgaaatgcaccatgaagctttgagtgaagctcttcctggggacaatgtgggcttcaatgtcaagaatgtgtctgtcaaggatgttcgtcgtggcaacgttgctggtgacagcaaaaatgacccaccaatggaagcagctggcttcactgctcaggtgattatcctgaaccatccaggccaaataagcgccggctatgcccctgtattggattgccacacggctcacattgcatgcaagtttgctgagctgaaggaaaagattgatcgccgttctggtaaaaagctggaagatggccctaaattcttgaagtctggtgatgctgccattgttgatatggttcctgg

SEQ ID NO: 14325 - DNA, 491 bp, Homo sapiens
ccgggcaggtactgttattatccctatttgccaatgagagaaagaaggcaagatagcttaaggaagttttcctaattgcccagctagaaggcaggacacatttgccagcagggggccgtttgcccccatgtgtaagggaggcagggcccatctctcccacggcgaggttgagctgattactttctgagaacagttagagtgggtgcgtgatctgaaatgggttacctcggtccgctcttagaactaagtggattcccccgtgtctagcaggaaatttcgatattcaaagcttattcgatacccgtcagaccttcgagggggaggcccggtaaccacagctttttgtatcccttttagtggagggtataaattgacgcgccttggtcgtaattcaatgggtcaatagcttgatatcctgttgtgaaaatttgattattccgcttcaacaattttccaccaccaacattacctatccccgggagtcataaaag

SEQ ID NO: 14326 - DNA, 446 bp, Homo sapiens
ccgggcaggtactttttttttttttttttttttttttaacttttcacttcttttatttgttaaaatagtcacatccatatacatgaaaagatttgaccattttgcattcattgattgtggctcttgccatctcgtggcatccaggatcctggctgaaaggttttaccagtgctgctgggagccactgagggtttttcctttccaaagtatggagcataggcatggcctttaatttgagtttgaactggtggaggcaggagttcctcactggtctctttactaaggagtttttctttttcataaaaatcttggctttttattttgatttcttctctgtgtttttcattctttagtatttcctccatagtaggtggagtctttcttgttcttctaatccaagcttcccattctgttggaatatcccctgcttcatagactacttcttt

SEQ ID NO: 14327 - DNA, 130 bp, Homo sapiens; identical to SEQ ID NO: 5023

SEQ ID NO: 14328 - DNA, 448 bp, Homo sapiens
aggtacgtttgggagcctgagctggaactgaagctggggctgcagcctgggccttggtttgatccttggccttggccttggccttggcctttggccggcacagcctgagccccttggcaatacgggcacgagcacgcttcccaagcttggggtgggcaatgtaggcaagtcgatcgagcttgcggctgacaccctttgggatcttgggcttaacctccttgggctttacgagggccttgatagcctcggcacgtgcactcatggccttggcattgttggcctgcatcttctttaggccctttttgttgtgcttcttggcaaagcgcatgttcctcaggaacttggggtccacccccttaagagattcgtatctttgtgatcggggtttcttgataccatttctgtgccattttcgggactggttgtgtgtggtgtggttcttggactt

SEQ ID NO: 14329 - DNA, 454 bp, Homo sapiens
ccgggcaggtactttttttttttttttttttttttttttttttttaggtattttaatattttagctctaagagtgtaatagaggggggtcaatggaattttatcctaaatactggcataaatctgagtgctcgtctttccccaaataatgatgtttctaaatgggaagttcattagaaacattcttctcttcttcatctcttagggtgatagctagcaacatacccttccttatctacgaaaattatttcttaattataagaatcatcattaagtttatcatttctttttttttccaaagtgtaataaaaatacagaatttgcaggacatgaaacagaagaggagaaaggagttttataaaaaagtggagatccgcgtactgggattacaggcgtgagccactgtgcccagcccaaaatgttttcttaaatgtgttctgtgcctgggcttggtg

SEQ ID NO: 14330 - DNA, 512 bp, Homo sapiens
aggtactttccttgacaggcaagactgttggccagggctcgcttgacatactcctcctgcgcagccttaaggttctccttcttcccgccccaggccttcatggcagaggcctgcagggctcggccgaggtacgcgggtatcctgaggagcagaatgccttctgccagctttcttcacatgagaccaccagtcctcctttcagtctccaacgagttcgagaagtaatgcccttaatacaatagaatgtgagaccgattattattgaaaacccatccgggtccgcggagaagcatgaccctgtagaagaatctgtttgctcattaatgagtagggattaaccttggcttttgtgaaatgacaacatgttttgcaaaaaccttaatttcccagattaaaggaaaggttagaaatttttggaagggacactagcaacccccagagtttcttaagaccttgggattgatataactttcattcacttgaaaggtgtgataaaaagaaagaaaaaaagt

SEQ ID NO: 14331 - DNA, 430 bp, Homo sapiens
ggtcttggcgctcctgcttgtgtccgccgctctatccagtgttgtatcacggactgattcaccgagcccaaccgtacttttagtagagacagggtttcaccatgttggtcaggctggtcttgaacacctgatctcaggtggtccacccacctcggcctaccaaaagtgctgggatcacaggcgtgagccaccatgcctggcctatttaatcttttcatactgctgtcaggtccttcaaggctatgcttctgattgcccacacactttacttctgagtatttcatattttacgggtaggtagggtacctgtccctgcgtttaatataatatcggtattttatctagcatttccttttctttttactatcttatacgctttattcttatttagtttgtgactggcataatatttagacctattttcaatttc

SEQ ID NO: 14332 - DNA, 162 bp, Homo sapiens
aggtaccggctcagttcccgaggcccagagccccgcgtcccggctccttcagcctcgctcgccacaaccaaccatcctgcaacctgcacagaggacccgggagtccggatggcggcggataccggcagtgcgggaaaccacttacctgctgctctccagaga

SEQ ID NO: 14333 - DNA, 57 bp, Homo sapiens
aggtactttttttttttttttttttctgatgttgagagtcagttttattgccatctc

SEQ ID NO: 14334 - DNA, 525 bp, Homo sapiens
ccgggcaggtacgcggggaaaaaggagagacatggaaagggagacagccaggtggcacctgcagcggctgccctctggggccacttggtagtgtccccagcctacctctccacaaggggattttgctgatgggttcttagagcccttaaccagcccctggatgggtggccaaaaaaataaaggggaccaagccctttcattgtggtgggtgaccgttggttagttcaccttgttatagggggtaacagtaaatcatgtttttgtttctttaatgggggttggaggaaattattagaaccagttggcccctttggttggcgaaggggaaagacaaaatttgtaaaaatggaaaactttgccccctggaggcaacttccttgggtggccagagttctttccacccttgacaccatttgggggtgggggggcttccctgggggaggggggaggaactacaggcacttttcctttacttcattcccttcccctggaacccctgccttccttagaccaccccttggaagt

SEQ ID NO: 14335 - DNA, 412 bp, Homo sapiens
aggtacctgcccacagccttggtccctgggggctagactgctcaactgtggagcaattcattatactgaaaatgtgcttgttgttgaaaatttgtctgcatgttaatgcctcacccccaaacccttttctctctcactctctgcctccaacttcagattgactttcaatagtttttctaagacctttgaactgaatgttctcttcagccaaaacttggcgacttccacagaaaagtctgaccactgagaagaaggagagcagagatttaaccctttgtgaggccccatttggatccaggtctgctttctcatgtgtgagtcagggaggagctggagccagaggagaagaaaatgatagcttggctgttctcctgcttaggacactgactgaatagttaaactctcactgcca

SEQ ID NO: 14336 - DNA, 528 bp, Homo sapiens
ccgggcaggtacgcggggaggcattgaggcatccatcgcaggggcttctgctgagggggcaggcggagcttgaggaaaccgcagataagtatttttctctttgaaagatagagattaatacaactacttaaaaaatatagtcaatatggttacctaaaaaaattgctttagcagttaaaagtattttaaacgtaaattttataaatagccttaaagaatatataaaggagaaaaaatattgaaagaccttaagaaagagtaagccatggaaggaaaggtaaatagaataaaataggattttctaaaaaacattgaactggaagggtttgaagaattgaaagaccttacattacaatgtgtaggataaaataaaatgttaattattaaaaaagtaaaaaaattgaagaatagaaaagggtaccttaccaagagccccctcgaaattttaataacacaaattatgaaaggggccaatatgcttttttagcatttaaaaaattggaagggttgtaactttaaaaccagcct

SEQ ID NO: 14337 - DNA, 242 bp, Homo sapiens
ccgggcaggtacgcggggtggcggctacgacccattcgaacgtctgccctatcaactttcgatggtagtcgccgtgcctaccatggtgaccacgggtgacagggaatcatggttcgattccggagagggagcctgagaaacggctaccacattcaatgaaggcagcaagcgcgcaaattacccactccccacccggggaggttgtgtcatatacaaataaaacgagaagaaaaaatgtgcct

SEQ ID NO: 14338 - DNA, 261 bp, Homo sapiens
aggtactcccagacatggatggttcactttccagggctgtcattgatgaaaatgctttgggatgagtactttttttttttttttttttttttttataatataatctgttttattttacacttctctgattattgaaatctaaatagaggtttttgctaacaaacaaaaaggataattaaaagacagcaaggacacgattaaatgttgagtgcaaatgaagggttgtatgaggccccatcctggggaggctgtacctgcccg

SEQ ID NO: 14339 - DNA, 455 bp, Homo sapiens
ccgggcaggtacagacaaggtaactgagacagtgatgaatggcggcatgaaggaaacgctcagcctcactgtagatgccaagacagagactgcggtcttcaaaagtgaggaagggaaactgtctacctctcaagatgctgcttgtaaagacgcagaggagtgtcccgagactgcagaggcgaagtgcgcggcgcccaggccttccagcagcagtcccgagcagaggactggccaaccaagcgcaccaggtgacacttcagtgaatggccctgtatgacgggtgacgtctgctgctgctgactgaggactgcagaccgccaccactcaggggctctggaggggtcagctggagcccaccaagctgtcactgctgcactcactctgcaagggattaggaccagcaacctttatattctaaattctaagacattgtacctcgggcggtctagaactag

SEQ ID NO: 14340 - DNA, 192 bp, Homo sapiens
aggtacgcggggaggggcgggcgtcggggacattaccggacaggccttgtccggcaataccaagtttcatgcaggctcttgggaaagctggtgctgctgctgcctgattcccgccgacagaccttgggaccggggccaacactggcagctggagatggcggacacgagatccgtgcacgagactaggtttga

SEQ ID NO: 14341 - DNA, 557 bp, Homo sapiens
ccgggcaggtactttttttttttctttttttttttttttgagacagagtctcgctctgtctcccaagctggagggcagtggcacgatctcagctcactgcaagctccaacttccgggttcacgccattcttctgcctaaacctttcaagtagcttggactacatagtgctccgccaccgttgcccggctaatattttttgtatttttagtattaaacaggtgttttacacattgtttatccgggaatggttttttgaatctccttgaaccttatgaatctcactccaacctataatactcctcaaaagttgtttgagattataaggtttgttatgccatctgtcgccctgttgcatagaaactttttttttttttttatcactaaatattaaaaagcctttcccatttctttttttttcctcccaattcttgttttttcccaataaacataaattaagatttttggtcttattaaatttttattttgagtttggtttgcctgtttttttaggtttttttaaagggggaagtttcttcaattatttttttcttaaaaa

SEQ ID NO: 14342 - DNA, 461 bp, Homo sapiens
aggtacatttcctgccccagatctgggatcaccatttcttcagcaaactctggttcctttgagagggaaatggtatttagagatcacaatctgaatgctaggggtgttggttactacttgttattgcttttaggcatttccaggagagagtgctagaaaatatttttactaaggtaaaaaaataaattatgagccaggagtggtggtggtgtaatcccagcactttgggaggctgatgccagtggatcacctgaggttggagttcaaaaccagcctgaccaacatggagaaaccctgtctctactaaaaatacaaaattagccgggcatggtggcacacgcctgtaatcccagctactcatgaggctgagacaggagaatcgcttgaactggggaggtggaggttgtggtgggcccatatcacgccactgaactccagcctgaccaacagggagagccctt

SEQ ID NO: 14343 - DNA, 459 bp, Homo sapiens
gtgggtgagttggctgccggtgagttgggtgccggtggagtcgtgttggtcctcagaatccccgcgtagccgctgcctcctcctaccctcgccatgtttcttacccggtctgagtacgcgggattgaaaaactttttgagcgttatggtgaaaatggaagattatccttttttggtttggagaaacttttaacaaacttgggccttggagagagaaaagtagttgagattaatcatgaggatcttggccacgatcatgtttctcatttagatattttggcagttcaagagggaaagcattttcactcacataaccaccagcattcccataatcatttaaattcagaaaatcaaactgtgaccagtgtatccccaaaaagaaaccataaatgtgatccaaagaaaaagacagttgaagtgtctggaaaatctgttgataaacatatgcatggccctaatc

SEQ ID NO: 14344 - DNA, 437 bp, Homo sapiens
aggtacgcgggagtctctttggaaacttctgcaggggaaaagagctaggaaagagctgcaaagcagtgtgggctttttcccttttttgctccttttcattacccctcctccgttttcacccttctccggacttcgcgtagaacctgcgaatttcgaataggaggtggcaaagtgggagaaaagaggtgttagggtttggggtttttttgttattgtttttgttttttaatttcttgatttcaacattttctcccaccctctcggctgcagccaacgcctcttacctgttctgcggcgccgcgcaccgctggcagctgagggttagaaagcggggtgtattttagattttaagcaaaaattttaaagataaatccatttttttctcccacccccaacgccatcttcactgcatccgatctcattatttccgggggtgc

SEQ ID NO: 14345 - DNA, 562 bp, Homo sapiens
ccgggcaggtactcgggggcggcgacgacccattcgaacgtctgccctatcaactttcgatggtagtcgtcgtgcctaccatggtgaccacaggtgacggggaatcagggttcgattccggagagggagcctgagaaacggcctaaccacattccaaaggaaggcagctatggcgcgccaaattaacccaacttcccgaccccgggggaggttagtgactgatctaaccaatatataaaatataaacaaaaaagttgtgtacctttggggccgattcttaagaacttagtggattcctcccggggcttgcagggaatttcgataatgcaaagccttatagaatacccgccgaaccttctagagggagggtcccgtgtatcccccaaactttttgtttcccttttaaatgaggggttaaattggccgcgccttggccgtaaattcaatggggcataagctgtttttcctggtgtggaaatttgtttattcccggttaacaaatttcccacacaaaccattaccaatacccgggaaccataaaagtggtaaaagccttggggtt

SEQ ID NO: 14346 - DNA, 270 bp, Homo sapiens
  misc_feature 244: n = A,T,C or G
ccgggcaggtacttgattaaggtagcgtctgctggcttcctccttgtgcagttgccctttttcccttccacaactattttgtggggaggaactttgaaactattaaatattgtggaactgggcacagtggtggctcacgcctgtaatcccagcactttgggaggctgagacggttggatcacttgaggccgggagttcgagaccagcatgggcagcatggcagaaccccatctctttctttttnaaattaaaaaaaataaataagtacct

SEQ ID NO: 14347 - DNA, 472 bp, Homo sapiens
aggtacgcggggctcactctttgggtccacactgcctttatgagctgtaacaccgcgaaggtccacagcttcactcctgagccagcgagaccacgaaccccaccagaaggaagaatctgtgaacacatccgaacatcagaaggaacaaactctagacatgccgcctttaagaactgcaacactcactgcgagtgtccgcggcttcattcttgaagtcagtgagacgaagaacccaccaattccagacacattttggcgacctagatgggacaatcgcctatcaccgagtggtgagaccatcgcctatagctgagcggcgagacaatcacctatcgccaagcaacaagcagatgaatggtgaaacgatacagcagagaaagagagaagaggaacatttgaacgccgagaggagttcagccgagggtggtcggagaggtttggccacccagcaggaagattatcttcccgtgcg

SEQ ID NO: 14348 - DNA, 425 bp, Homo sapiens
aggtactctctgagaaagatcgtgtcctctgtcttgttgggggtgaagtaaaagaaggttgcttggatctcctgaaccgacttattgtacgccattgcgttctggaatggcagaaaaaggaaatatcattggcagccgcatctaagaactctgtgcagagtggagaatcagatagtgatgaagaagaggaatccaaagagccccctatcaagcttccaaagattattgaggttggcctttgtgaagtttttgaattgatcaaagagacacgattttctcatccatccctgtgtctcaggagtctccaagccctgctcaacgtgctgcagggccagcagccagaaggcctccagtctgagccacctgaggtcctaaagactctcttccagcttcttttggaaatcaccgttcgaagtacctgcccg

SEQ ID NO: 14349 - DNA, 463 bp, Homo sapiens
aggtacatgtgggagaaaaacttaagtgtgatgagtgtggtaaggaattcagtcagggcgctcatctacagacccatcagaaagtccacgtgatagagaaaccatacaaatgtaagcaatgtgggaaaggtttcagtcgtagattagcacttaatgttcattgcaaggtccacacggcagagaaaccttataattgtgaggagtgtgggagggccttcagtcaggcctctcatcttcaggaccatcagagactccacactggggagaagccattcaaatgtgatgcatgtggtaagagcttcagtcggaattcacatcttcaatcccatcaaagagttcatacaggagagaaaccatacaaatgtgaggagtgtggtaagggcttcatttgtagctcaaatctttacattcatcagagagtccacacaggagaaaaaccctataaatgtgaggaatgtgggaa

SEQ ID NO: 14350 - DNA, 471 bp, Homo sapiens
aggtacgcgggggatcctgcttgtcgccaaggcaggaagtgagtttctcactgcaattccgggcggtgtcacgagtgaaaagatttgttcttttttttcggctgagatcctagctggggctgggaaactcctgcacaactctagaccaggaagccagcccgtaccccaacccccaccaaagccacctgctcttcttctgtgggaggccagtccacattcgctctcacccgagagagatattcagctggatccaaaatgactgatcaagggaaggaaatcatgtcaagcgaagccttgaaaaagctgccctgagacggtgtacccccgaaagaatgttggctcaattaagaaaccttgaggggataaattcaacccagtgtggttaaaaaagacttccaaactaagtttgattgtgcggttggtaccttcccgggccggccgttttaaacttttggatcccccagcctggag

SEQ ID NO: 14351 - DNA, 470 bp, Homo sapiens
aggtacgcgggggatcctgcttctcgccaaggcaggaagtgagtttcgcactgcaattccgggcggtgtcacgagtgaaaagttttgtttttttttttccgcggagatcctcgttggggctgggaaactcctgcagaactggagaccagtatgccagaccgctcccaaacccccaccaaagccacctactcttcttctgcgggaggccagtccacattcgctctcacccgagagagatattcagttggatccaaagtgactgatgaagggaaggaaatcatgtcaagccaagccttgaaaaaagctgccctgagacggttgtcctccgaaagaaagttggctcaacttaaaaacatcatggagattaaaatttatcccattgggggtaaaaaatacttcctaacgaaaattgttttgtgcgggtgggtacatgcccgggcggccccttttataaatatttggtattcccc

SEQ ID NO: 14352 - DNA, 363 bp, Homo sapiens
ccgggcaggtacggtgatattggcggacttaaggacatcgaattgtttatcaggaataaagtattatgtgtgttttctgcggccctggataatgttgtagcattcagggtcgattgagtaaaaaaaatgtagagatggtttcctgtttgtttttgcttctagttttcattcatttgctatttattctcttctggctttgcttgtgtatgcatatatataaaaccattattattattatcattatgcttagtatctagtggaaggcttttattcggttctgtgaatagtcattttgtttcctaagaacttccagcaagttgtattcattccattcatctagaattcctaggctgcctttgtcgg

SEQ ID NO: 14353 - DNA, 350 bp, Homo sapiens
ccgggcaggtactttttttttttttttttttttttggcactctatccttttattccttcccaggctattgcaggaaaagtcttgtttcccaaacgctgtgcctttctcctcttgccttcaaccctggaggggcccaacttacacaagtggcttatttggaaaaagggaatggaggttgattaaagaaagcttagcttccaaaacaaccacactctttgggttttctttgaccttaaggtaactccttctaagtcctttggctgatttcccatttccaaaaaagcccaaggcctccatccatggctcttttctgttgcttctcagtaatactcaaagacaatctcagtgga

SEQ ID NO: 14354 - DNA, 357 bp, Homo sapiens
ccgggcaggtacgcgggaccccaacctgagcacatccctcgacgatgccttcctgctgcgcttcctccgagcccgcaagtttgattacgaccgggccctgcagctcctcgtcaactaccacagctgtagaagaagctggcccgaagtcttcaataacttgaagccatcagccttaaaagatgtccttgcttccgggttcctcaccgtgctgccccacactgaccccaggggctgccatgtcgtctgcatccgcccagacagatggataccaagcaactatccaattactgaaaacatccgagccatatacttgaccttagaaaaactcattcagtctgaagaaacccaggtgaatgg

SEQ ID NO: 14355 - DNA, 346 bp, Homo sapiens
aggtacaaatcctctgaagcctttgcagttccagtcccaagattacactcatatacttgcaaatgtgcaaaataaactccatacaagtattgtcactggtgcaactacattcactctaattttctttcttgctacctctttagcaagagcacgtgaaaatccaactaatcctcctttactggcactgtaaacggactggccagagttgccttttaagccaacaatgcttcctacattaacaatagaccctccctgttgttgaatcatagtcctcatggcagctttacaggtcagcatggaacccaagaggttagtatgaagctgagataccatatcttcagttttc

SEQ ID NO: 14356 - DNA, 384 bp, Homo sapiens
gagctccccgcggtggcggccgaggtacaatgcaaacagtgccgcttccagtgctacccacacgggtgcagcctcacgggagagttgcggagagagggaatgcgttcagttcagccagcggacggccaggggtaagcggcccctagtgggtcacatggcctatgatgtctggagaccgcagatcttcaccctctggagtctcatttgcagagtctcatttgtcgtccggtcactgtggccacctcaccctcgtcaccacgggcctttcctgtgccgtgctcactctgacactgagatgctgccaggcagttttttttttaaaatcagtggagtaagttctaagggagccccatgtgcttaagataaaaacgtagctggtaaagt

SEQ ID NO: 14357 - DNA, 393 bp, Homo sapiens
ggcaatttggagctcaccgcggtggcggccgcccgggcaggtactgtaacaaaaagctggctttaggcgtggcttgtagaatcaatctaactactagacaagttacatctcatatatgtgtggcttctttttcttcttttggggggctacaaggaaggtttggagaaattatttccatcatacctttttgttagcctttttccatttctggccagtaagtaatcccgttcctgacaacagtccctttgttttctcaagtggtctgatgaaggactgcaaaccacagctcttgtgttttttgcaccatgggttttaaaatccgtcctttgcctcccacaaggagctactacccaagggaagggagaaaaattaattggtgacctttcgcccggt

SEQ ID NO: 14358 - DNA, 352 bp, Homo sapiens
ccgggcaggtactgagtgaagacaccagagtgaaggagagaggccatgctgtgtccgagaagctcctactggggtggaagggacagctccacaaaggctgctcttgcaggggctctcctgcagcaaggtgcctgctgactgtccccagactgtctcccgacacagagggatgcaaaggcagcctcttcctgctcagtggaatagggaaattatatcacctttcacttcccactctcacttctgcccctgctacccttagtctttggcttttgctgacattttcccctcttatcttttctcctgaccaagttctaggtatttcatagggcagtctaggtgagggttggaaccc

SEQ ID NO: 14359 - DNA, 361 bp, Homo sapiens
ccgggcaggtacccgattaaaccagagcaaaaaactaccttctgcaggtcagggagctaatgacatggcattggccaaacgttcccgcagtcgaactgctacagaatgtgacgttcgtatgagcaagtctaagtcagacaatcagatcagtgacagagctgctttggaggccaaagtgaaggatcttctcacactggcaaaaaccaaagacgtagaaattttacatttgagaaatgaactgcgagacatgcgtgcccagctgggcattaatgaggatcattctgagggtgatgaaaaatctgagaaggaaactattatggctcaccagccgactgatgtggagtccactttattgcagttg

SEQ ID NO: 14360 - DNA, 352 bp, Homo sapiens
aggtacttttttttttttttttttttaggttttttttttttttttttttttttttttttttttttttttttggacaatggttatttagtttttatttcataatcataaacttaactctgcaatccagctaggcgtgggagggaacaaggaaaacatggaacccaaagggaactgcagcgagagcacaaagattctaggatactgcaagcaaatggggtggaggggtgctctcctgagctacaaaaggaatgatctggtggttaagataaaacacaagtcaaacttattcgagttgtccacaatcagcaatggtgatcttcttgctggtcttgccattcctggacccaaagcc

SEQ ID NO: 14361 - DNA, 364 bp, Homo sapiens
  misc_feature 32: n = A,T,C or G
aggtacttttttttttttttttttttttccgnctccccaaagctttatctgtcttgactttttaaaaaagtttgggggcagattctgaattggctaaaagacatgcatttttaaaactagcaactcttatttctttcctttaaaaatacatagcattaaatcccaaatcctatttaaagacctgacagcttgagaaggtcactactgcatttataggaccttctggtggttctgctgttacgtttgaagtctgacaatccttgagaatctttgcatgcagaggaggtaagaggtattggattttcacagaggaagaacacagcgcagaatgaagggccaggcttactgagctgtccagtggagg

SEQ ID NO: 14362 - DNA, 364 bp, Homo sapiens
cggaccaggtacgcggggagacttttgccacacacaaatttgtgaaaattaaacgagatgtggaaggagaacctcagtgattttattccctagtgaggcctctgagggcctacacactgcctggcagaacataccactgaactagtatgtgctagaggagggcacaaacatccgctccttacctaggcctgctggctctggttttctatgcagatgattaattggatcggggggtgagtgttttgcttttctggaggcaaggagagctttgagggttggaatattgggaggcataccttagtttacttaaactagcctggaaaagcagggagtctagggaaaattaccccctaaggggtcaagc

SEQ ID NO: 14363 - DNA, 359 bp, Homo sapiens
aggtacgcggggtgggcgctaagatggcggcggcgtgagttgcatgttgtgtgaggatcccggggccgccgcgtcgctcgggccccgccatggccgtcaccatcacgctcaaaacgctgcagcagcagaccttcaagatccgcatggagcctgacgagacggtgaaggtgctaaaggagaagatagaagctgagaagggtcgtgatgccttccccgtggctggacagaaactcatctatgccggcaagatcttgagtgacgatgtccctatcagggactatcgcatcgatgagaagaactttgtggtcgtcatggtgaccaagaccaaagccggccagggtacctgccccgggcggccg

SEQ ID NO: 14364 - DNA, 355 bp, Homo sapiens
  misc_feature 237, 254: n = A,T,C or G
aggtaccaggagctgcggtgcagggacggcaggctgccgttcacctggtccagggcctctgactgctccacttggatcaggggggtgtagcactgtgtccagtcccggtagggaggggttgctggaggggtggcccacgaccgggtcgagtgactcggtgagtacaggggaatggaatggaatggaatgcaatggaatggaatcatccggaatggaatggaatttaatggaatgcanagcaatggaatcaactncgattgcatggaatggaatggaatgtaaaggaatacattggaatcaacccgagtggaatggaatggaaaggactggaatggagtggaatggaatggattgg

SEQ ID NO: 14365 - DNA, 353 bp, Homo sapiens
ccgggcaggtacgcgggggtctgccgcggtggccgggtgccgatttgacaagatcaaagctgcaggaaaatggacagtgaggttcagagagatggaaggatcttggatttgattgatgatgcttggcgagaagacaagctgccttatgaggatgtcgcaataccactgaatgagcttcctgaacctgaacaagacaatggtggcaccacggaatctgtcaaagaacaagaaatgaagtgggcagacttagccttacagtactcgtcttggtgagagcgtgagctgctgagatttgggagtctgcgctaggcccgcttggagttctgagccgatggaagagttcactcttgttt

SEQ ID NO: 14366 - DNA, 342 bp, Homo sapiens
ccgggcaggtacatggcatcagctctgtcttcaggaatctttggctgtgtgggaggataaaggatgtgatttctttctttctctcacccaacgtgcttattccatttctttgattaaatactggtatcattgaggctgggtgttctgacattaaagccaccagtaactgtagcacatcatgaatattttcatcctcatcctttaggtgtaatgccgctactgtcagctggattaataacccagtagtaatattttaaggtgtgcattatctttaataactgttcctattctgcgtatggtggtgtagatggtagcagttccaataaattcagcagacaaatc

SEQ ID NO: 14367 - DNA, 352 bp, Homo sapiens
ccgggcaggtactaaccaggcccgaccctgcttagcttccgagatcagatgagatcaggcgcgttcagggtgatatggccgtagacgtctttacaaaattcctgacaggtggttactgaatctctctatgaactttccattcaaaactttccaagtttttccttatgtggaaccgaaatctttctttctcccgtgaaactttactactatcagataattgaagacagatctctttgtattctcttcaagcccaaaccaattctgttccttcaatctaaatagtggtaatatgaatgtttaagaaatgaaataagaaacatgtgcaggcactttggaaggtgctaagtgactg

SEQ ID NO: 14368 - DNA, 351 bp, Homo sapiens
aggtacctgtgcacatttaagatagcagcactcagtccatgccctattatccatcttaaaagttcacacattattgtttactgaataatatttctactgtctttacccccaaacattgcaaaacctgcaatggaacaatgctgtgagttataatgtagaaattttttttttttttttttagaaaatcagttacttcattttcttaatattctgaattcaagttatcagatctctatacctaggtcatactcatgaagcaaaaatgctgcacaccactgaaaataataacgttatagatgtctatcaaaattcatgaaaaccagccaggcgcagtggctcgcacctgtaatc

SEQ ID NO: 14369 - DNA, 340 bp, Homo sapiens
aggtacaactgtcccagcatgtcagttacacatactggccctaaatgttcagcataatttaaaagggaaagaaaaaagttggcttttcagacaaaattttgtgtgaactgaacaacgtcagactatgcttctttgggtccaaataattttaactttacagctctcagatgttctggcagctcattctttgtccatttcacctattatacaagtgtttctgggtccaagccacagagcaaaatagacacaaataaatcaaataataaatgtttcatataaaggagaaaatgctaatggtctgttatctataccagcagtccccaacttttctggcaccagg

SEQ ID NO: 14370 - DNA, 355 bp, Homo sapiens
aggtactggtcgcagagtctactccttcaacagtcccagcttcttcagggcctcccttctgtgttcattggggacaccctttggggagatcttgacactgacacagggggggcgaggaagcttgtcacggctctgtccttggtaggacaggcgcttggagctctgctcctgctccaggtcagccagcttgcctacctggatacctgcaaaatctttccccgtgcccagggaggccgggcggggccgagaattacgtaagacactgggcgagatcttgtccaagaaggagccctttcccagagaagtgctggttttggggctggcatctttctcagttgaaaggtagctgctcagt

SEQ ID NO: 14371 - DNA, 353 bp, Homo sapiens
  misc_feature 353: n = A,T,C or G
aggtacgcgggctcctacttggataactgtggtaattctagagctaatacatgccgacgggcgctgacccccttcgcgggggggatgcgtgcatttatcagatcaaaaccaacccggtcagcccctctccggccccggccgaggtacagggtgtgacaacatgacctgcatcatcatttgcttcaagccccgaaacacagcagagctccagccagagagtggcaagcgaaaactagaggaggtgctctctactgagggggctgaagaaaatggcaacagcgacaagaagaagaaggccaagcgagactagcagtcatccagacccctgcccacctagactgttttctgagccn

SEQ ID NO: 14372 - DNA, 352 bp, Homo sapiens
  misc_feature 352: n = A,T,C or G
aggtaccacaaattaatggttaaaatgcatccctcatacgacaatgtaacttcttcctctcactgttgatggcctatcttcctgaaaacattaatctgggggtgagaacttgggagatacacacagttgggttcaccataaatgaggagcctcactgacagtggaagatgcacaggaaaagaaagaagactatgggctgcttccttagaattgtcttcctgcttgctgtgttactgctagagcttcctgtgtgggctccatatggtccctattcttcccaccactcatgaaaacaccaaagagcaggctcagagtgaccacagccaagccccagctctgccagcaggccccn

SEQ ID NO: 14373 - DNA, 355 bp, Homo sapiens
aggtacaagagtgattctggcatgcctataaactttccaactccttctttatattctgtcaagacttcatgatgttctgctagggatgacagcgtaagctgagccatggcaggaaccccgtggatattatgcagcgtgtgatgggtgaggtgtggggcggagccagtcttggtatacagaaggcagcctggaatatccatggtgtggtcccctgttttgcccaggttttttatttttcctaggcgacagccattaactaccttggcaagactcagcttcatcctaagggattcttctaggtcctgccaacaaaccattcgactctttcagtcttcagacccctcaaactcctcac

SEQ ID NO: 14374 - DNA, 355 bp, Homo sapiens
aggtaccactggtttgcaaatagagaaacctctaagactcttcttactcatttccttgaccaaaataaaactatgagtggaaaatggagtgatgagcagtaagcacactggaaaagtgggatgatcttgaagcaaattgctgataatcacttctgggattcagactgagacttgagcaagcttcaaggttggatgactgaattgaagacttccatgttaaattggttatcttgagaaggatacaagttaatttcagatattgatgatgctcaaatacttccccgctcaactagagtcagacatttttcacaaagtgaagaaactggaaatgaagtttttggtgctttgaatgagg

SEQ ID NO: 14375 - DNA, 347 bp, Homo sapiens
aggtactttttttttttttttttttttttttggagtaggtgttgtagtaggagatggcacagtggtgtgtatggtgggtgccactgttgaagttttgtctttatcacacaggaactcatttgtgctcactgtgccattttggacaaaagcttgtacctgcccgggcggccgctcgactgacacccaccctgacaagtgtccatgatgctgggccctgagggaggtgaaggctttgtggtcaagctccgtggcctgccctggtcctgctctgttgaggacgtgcagaacttcctctctgactgcacgattcatgatggggccgcaggtgtccatttcatctacactaa

SEQ ID NO: 14376 - DNA, 344 bp, Homo sapiens
aggtacaacagttgatgatgaagaacacgatgataaggaagaagaggaggaggaagatgatgactgctggcttgaagacttgttgttgtttttgctctttcgaccactccgtgagtcggctgctgatgaactggcattctgtgttaatgttgtcataagtgccgaagatgatgaatagccaactgtttccctggccattgaaaattcttttcccaactgaaagtcattattcttaaatgcttcataactggcttttaaacttgatgttcttcgtccctccttcatctgagctgtagcctgaactgcttgagcagctgccatggtaattgcccctgcaccagtta

SEQ ID NO: 14377 - DNA, 362 bp, Homo sapiens
aggtactttttttttttttttttttttttttttctttttttttttttttttttttttttttttttttaagaggaaaacccggtaatgatgtcggggttgagggataggaggagaatgggggataggtgtcttaccctgcgcggtgttaacctggtcaccttctgagggtgaacttgcgcacacacgtcattggaaataacatggaggtccacacactgaagtctctttggcgtcaagaactcctctggttcaatgctgcccccacctgaggcgtatcacgtggtccccagtgcctgctcctagaccgggcacctccatgaccttcacagcatccctcagctcttcaggcctctgacaggccg

SEQ ID NO: 14378 - DNA, 259 bp, Homo sapiens; identical to SEQ ID NO: 5209

SEQ ID NO: 14379 - DNA, 357 bp, Homo sapiens
ccgggcaggtacgcggggggagctaaagtggtcgtgattcatgctgtcgcgggaaccccgaaggtggggccccacgtaacaagaagatgacccgaagttgctccgcagtgggctgcagcacccgtgacaccgtgctcagccgggagcgcggcctctccctccaccaatttccaactgataccatacagcgctcaaaatggatcagggctgttaatcgtgtggaccccagaagcaaaaagatttggattccaggaccaggtgctatactgtgttccaaacattttcaagaaagtgactttgagtcatatggcataagaagaaagctgaaaaaaggagctgtgccttctgtttctctat

SEQ ID NO: 14380 - DNA, 197 bp, Homo sapiens
ccgggcaggtactttttttttttttttttttttttttttttcgcattcaacttaaatgcttttattgacaatgtcttggaacaataagcaaaccccgcgtacccaactctcagccagagatggtggaggccgtcaagaagcacattttaaacatgctgcacttgaagaagagacccgatgtcacccagccggtacct

SEQ ID NO: 14381 - DNA, 357 bp, Homo sapiens
ccgggcaggactccggtcggtgtcagcagcacgtggcattgaacattgcaatgtggagcccaaaccacagaaaatggggtgaaattggccaactttctattaacttatgttggcaattttgccaccaacagtaagctggcccttctaataaaagaaaattgaaaggtttctcactaaacggaattaagtagtggagtcaagagactcccaggcctcagcgtactgcggcgggtaggcctaggattgtgggggcaatgaatgaagcgaacagattttcgttcattttggttctcagggtttgttataattttttatttttatgggctttggtgagggaggtaggtggtagtttgtgtt

SEQ ID NO: 14382 - DNA, 474 bp, Homo sapiens
catcaaccgccacccttactgcctagtcacacacgtcagggaggctgccctcagtggagttggggttgagaccccagggtgggacttcacagttttgccagcaatctctaccttctgacttctgcctcgcagaagaggtaagggagagggggagccattctggccaagggggggcccattttttttgaagctccagtacccttggggcccgttttaagaactagtgggatcccccggtgctggagggaattcccatattaaagccttattcgattaccggtcgaccctcgtagggggggggccccggggtaccccaagctttttggcttccctttttagccgaggggtttaaattggcggcggccttggggcgttaaattcattggggtcaataagcctggtttttccttggtggtggaaaaattggttgttatcccggtttctaacaattttttcctctacccattcaattac

SEQ ID NO: 14383 - DNA, 633 bp, Homo sapiens
  misc_feature 198, 278: n = A,T,C or G
ccgggcaggtactttttttttttttttttttttgagaacacgaagtttgtgcctctgtgtgcgtcccccaggtctggggagtgtgccagtgtgggctaccaagtgcgtgcgggctgcaacgtggcagactctttgcggccctgcgcgtgggggttgcagaggccgatgtgctgcccaggccccttgaggcgcttcccncaaagttgagtcgtgtgtggaccttatcaagggttgggccccggcctttacccaatgggcccctggggcttaaaataatntttatttttttgggtaatttttttaagttagaagaaccgggggtttttccaacccatgggttggggcccaagggcctgtgttccaacggaaacttctcttggacgcctgcagggaataaatgcccaccgcttgggcttttcttgtccctttccccaaaaaggtggcttgggggaatttaccagggggcggttgaagactcaaacccagtggcccccggggcttgagaggccttttgggaattccttttttttaaggccttttggtgggttttaagtttaaaaaaaagggggaattttcctttaaggaaaaataattttaattggaatagggtttccccaggaaatttttcaaaat

SEQ ID NO: 14384 - DNA, 299 bp, Homo sapiens
aggtacttcttgcccttgtagaatttcctgaggttttctttctgagtctggttaataactgtgagaacacgggcaatggatttccggacgactcggatcttagagagcttggaggccgcaccgcctgtcactttggcgacgcgcagctgggacagctccaccttcaggtcgtccagctgtttcagcagcctcctccttcttcttcccgcgaagatctcgagccttgatcttggccattgctgcacaagccgccaacgccgccgcccgctccgagggaaagagccccgcgtacctgcccg

SEQ ID NO: 14385 - DNA, 439 bp, Homo sapiens
aggtactttatttttttttttttttttttttgggcactacctccccgggtcgggagtgggtaatttgcgcgcctgctgccttccttggatgtggtagccgtttctcaggctccctctccggaatcgaaccctgattccccgtcacccggggttcaccatggttagggcacgggcgaactaccattcgaaaggttgaatagggccagaacgttcgaatgggtcgtcgccgccacggggggcgtgcgatcggcccgaggttattctagaagtcaccaaaggccgtccggcggcccggtcccccgggccggctctagaactagggggaatccccccggggcctgccggaaatttcggatattcaaaagctttatgggatcccccgttgtacccttttaggggggggggcccccgggtaccccaaactttttttgattgcccc

SEQ ID NO: 14386 - DNA, 288 bp, Homo sapiens; identical to SEQ ID NO: 5217

SEQ ID NO: 14387 - DNA, 340 bp, Homo sapiens
ccgggcaggtacttttttttttttttttttttttgcaggttgaatgcagggttttattgagtggtggaggtggttctctgaaggatggatgcacagctggaagcggggatggcacgggaagataatcttcctgctgggtggccaaacctctccgaccaccctcggctgaactcctctcggcgttcaaatgttcctctgctgtctttctctgctgcatcgtttcaccattcatctgcttgtctgggatggtgaagacaactgtttgctcatttgcttggcgctaggtgatagtctcgccgctcagctataggcgatggtctcaccactcggtgataggcga

SEQ ID NO: 14388 - DNA, 429 bp, Homo sapiens
aggtacacacacctatggtgcccacaggtccagctaggaataaatgcacaaagagctccaccatctgagattaccactcaacttttaaagacaaattcttatttcatccctccaaagataaacatcacatgggaaaaatgttttcacaatcaaattctttaattatgccagttgaaagggatgccttttcttttaaggagaatgcaacatggagaaagttttaaaggcagggcagtgaagagaagggacaagaacgttttcaaccccagctcctttagatgggagaataaagtctggcccattccccacacaacacattgcagttggggaatggcccagccgcctggcctggtttccctcgggtattaattctcaacctggtggctttcaaggcccctgaattatttaaccaaaccctttaaccctcaa

SEQ ID NO: 14389 - DNA, 501 bp, Homo sapiens
aggtaccactttgtccagatggtttatactaacagtgtaatttatggaggaacatgctggctttgccttctagggagtgctgggagccttcaggtgactgaccctttataaaagaccatgggacaccccagggtttagggtgaggcttctccttcgtatgggcccccggcgttaccctgggcccggggccggctccgcttcttagaaacctagggggaatccccccccggggctgcagggaatttcgattattcaagctttatccgatacccgttcgaacccttcgagggggggggggcccggttaccccaggctgttgtgttttccctttttagtgtagaggggttaaatttggcggcggctttgggcggtaaatccaatgggttcattaagccttggtttttccctggtggtgggaaaaattggtttaattcccggctttcaccaaattgtcccacaacaagacaattaaccgaagcccccggggaaggccattaaaat

SEQ ID NO: 14390 - DNA, 357 bp, Homo sapiens
  misc_feature 351, 357: n = A,T,C or G
ccgggcaggtacgcgggcagatgcctccggcccacagttccaccaggcagcgggagaggacctgctggccccaccgcacgacaccagcacggatctcacggaggtcatggagcagattcacagcacgtttccatcttgctgcccaaatgttcccagcaggccacaggcaatgtgaagtattcatccggccaaccaatgtttcctgacgtacgcgggggagagagagagagagagttgtcaggaaagctgcaggttactttgagacagtcgtcccaaatgcattagaggaactgtaaaaatctgccacagaaggaacgatgatccatagtcagaaaagttactgcagcttanacaggn

SEQ ID NO: 14391 - DNA, 355 bp, Homo sapiens
aggtacttctgctccacgaggaaggggatcgccaggcactaccgcatcaagcacaataatgtccgagcccagccagaaggcaagaacaacctcttcaagtgtgccctgtgtgcctacaccaaccccatccgcaaaggtctggcagcccactaccagaagcgccacgacattgatgcgtattacactcactgcttggcagcctccaggaccatcagcgacaagcccaacaaagtgatcatcccatccccgcccaaggacgactcccctcagctgagcgaggaactccggcgggcagtggagaagaaaaagtgctccttgtgctctttccagtcgttcagcaagaagggcatcgtgt

SEQ ID NO: 14392 - DNA, 411 bp, Homo sapiens
ccgggcaggtactgtgtagaattaagcaaacaagtgatgtttcagaagtaacccattactgcttaaaataaagcctacatcaacacttaactcaaacgaggacaattgttatttagtttttatttcataatcataaacttaactgctgcaattccaggctagggcatggggaggggaaacaagggaaaaaacattgggaaaccccaaagggaactgcagcgagagcacaaagattctaggatactgcgagcaaatggggtggaggggtgctcgctatgttgcccaggctggagtgcagtggctattcacaggcgcgatcccactactgaatcagcacgtgggagtttttgaccctgcttcccgtttccgacctggggccgggttcacccccttcccttagggcaacctggg

SEQ ID NO: 14393 - DNA, 597 bp, Homo sapiens
tgtctctattaggcaatggactcacccgtggcgccgcctcttttctgacatcaaaaagccagctgaagatgagtgggggtaaaccccaagacgcccatgaaaaggctggcccatgggcccctgggagaaaaaaactgaacccagggccctttttgggatcctttatggcccttggggttcttgccccgcaccgggacccccccattcttcttggtgaacttttcccttgggaagaccttcaactttccttaagaatggaaggaaaagttggaaagcctttattcaaggaaagaagggggtggacccaacctgaacccaacccttttcaacagggcctgggggtggggccccgggaagggcttggggccttgggggccgaaggtaattcttcctttcccgaaaaaggggctttcacctttctttaaaggcaaccggacctataagtaagcccctttttcttggaaggcccccaagtccgaaacctttttttggaaaagggggcccccccctttggccaaaaaggtttaaattaagggggggccttttttttggccccttaaaagtcccctttttttttccccttttgcaaaggccccc

SEQ ID NO: 14394 - DNA, 153 bp, Homo sapiens
aggtacctgcaggcctcctacacctacctctctctgggcttctatttcgaccgcgatgatgtggctctggaaggcgtgagccacttcttccgcgaactggccgaggagaagcgcgagggctacgagcgtctcctgaagatgcaagaaccaggc

SEQ ID NO: 14395 - DNA, 449 bp, Homo sapiens
tggtggtgaagctgtagcctcgctcagtgaggatcttcatgaggtagtcggtcaggtcccggccagccaggtccagacgcaggatggcgtgggggagggcgtagccctcgtagatgggcaccgtgtgggtgaccccgtcttccagaagtccatgacaattggcccagtgggtgcgccccaaaaagccttaaggggggaccagcacggggcctggatggccacgtaccttgggccgctcttagaaactagtgggattccccccggggctggcaggaaattcgatattcaaggcttaatcgaataccggtcgaacctttgaagggggggggccccggtgaccccaagctttttgttttcccttttagttggaggggtttaaattggcggcgccttgggccggtaaattcattgggtgcattaagccttggtttttccctggtggtggaaaa

SEQ ID NO: 14396 - DNA, 608 bp, Homo sapiens
  misc_feature 113, 185, 210: n = A,T,C or G
aggtactttttttttttttttttttttttttgggcacttttttatgttgccacctatgtgtgagagtgctggacaccttttgaaaccagaagtttctgtgggacctggggtgnggttcaatatgccactcaggctgcggttcaaacttgtaggcaccgctgtgcctgcgtgccccccagtgtggngctttttttgccagaagacctaacnttggcgcttttcaaccattggaaaagcctctcaattgaaggcctttttccccccaaaattttcaaaaaccttttggggcttttcttccagacaatttttttaactttttttcttaaaccgcaaggaacacttcattgtggaggagggggattaatattaggattgtggggcacaggccccttttgtgctgattggtgctttgtttcccaaattggcttggttcctggggaaatctcacatttttgattttggagcgccacctttttctttttttcaaaagggttcaattttgtgttgcttgggccacccctttcttcggggggggttcaattggaatttttgccccaatgccaatttctttttcttttcccccggggaatttttttgtgcccggggat

SEQ ID NO: 14397 - DNA, 411 bp, Homo sapiens
  misc_feature 274: n = A,T,C or G
aggtactgatcgtcttgttatcactccattaacagatagatgctatatcacgttagctcaggccttgggcatgaacatgggaggtgctcccgcaggacctgctggcactggcaaaacagaaaccacaaaagacatgggaaggtgtttgggaaaattatgtgggtcgtgtttcaattggttcagaatcaaatgggattttcagaaggcctaggaaggattttcaaagcaagaaaagaaagaaagaaacagttcattttttctgatggtgattgtngttgatttaaaatccaggaatttggaaatcttcttaaacgatgaaccctgggataatgctggggcggcccaggaaactaccaagaaaaaaccttaaaaaatcccagtttaagaaactgtttggctatgaatgggttc

SEQ ID NO: 14398 - DNA, 416 bp, Homo sapiens
aggtaccaggctgtttgtgatcgtatcagccgctatgtgaaacagcctttacctgatgagtttggcagctcacccttggagccaggggcctgcaatggctccaggaacagctgtgaaggagaagatgaggaagaaatggagcatcaggaagaaggcaaaagagcaggcttttcagaaaaccggaagggcagtgggggaaaagattgagccaggaaatgaccccagtgagaccacccaaaagaagatcaaagggccagccctgcccaaaaaggctttttaccttcagttcttgtggaacttcctatgggaacaggctggacataaatttcacttggcagcctgatgggaaaaacttactttaaaacttcaaactctggattctaccactgggccattgggaattggggaacaggtga

SEQ ID NO: 14399 - DNA, 634 bp, Homo sapiens
  misc_feature 140, 141: n = A,T,C or G
ccgggcaggtactttttttttttttttttttttttttccccatgttatttgcctttgccagaaagagtgtttttacaattaggcattgtcttttaaagttcaccccatgaagaagggcaatacttcaaaccacccccctnntcatttaatttataagggttcggttgttggcattctcgccaaaaaacggttttatcctttctctcccaagcctttgggtgcttcaatggaaaaattctttttggaaaaatcccctggccccaagccttggaccttctttgaggggataaaaatttcctcaaacctatttaagaaccgaattttttttctggttccctttaaccaggggggggggaggccattttttcggttcctaaatccaatttttttcgaaaggggtttcttgcccccatctttatcttaaaaaaaccgtggttccataaaaggttaattccgggtccccactctttaaccctttcctttcccccacccctttcggttgggagccccgggagagcccccccttaaggcccaattgggtttgtcaaaattgaggggttaaaaccccctcttgttgttcgaaccttataccaaaagaaggccgttgctctttttttcctggcccaactcccaa

SEQ ID NO: 14400 - DNA, 168 bp, Homo sapiens
aggtacgcgggtgagtgtcccgcggggcccgaagcgtttactttgaaaaaattagagtgttcaaagcaggcccgagccgcctggataccgcagctaggaataatggaataggaccgcggttctattttgttggttttcggaactgagggccatgattaagagggggcg

SEQ ID NO: 14401 - DNA, 200 bp, Homo sapiens
aggtacttcgggaaagtgctcatggcctccaccagctacctgccttcccaagtgacagaaatgttcaaccagggcagagccttcgccacggtccgcctgccattctgcggccacaaaaacatctgctcgctagccacaattcagaagatcccgcggttgttgggtggggtgcccgccgaacgggttaccctgccccgggc

SEQ ID NO: 14402 - DNA, 418 bp, Homo sapiens
aggtacccctccagccggacaacccgggcgaggacgcaccagcggaggacatggccagatactactcggcgctgcgacactacatcaacctcatcaccaggcagagatatggaaaacgatccagcccagagacactgatttcagacctcttggatgagagaaaggcaacagaaaaatggttccccagaaactcggcctttgaagaaccctgcaatgtggtgatgggaaatgagacttgctctctggccttttcctattttcagcccatatttcatccgtgtaaaacgagaattccacccattcctaccaatgcatgcagccactgtggctgaatttctggcaatgtttttcccttttggtcattaattgtaataatatgtgtgttttaaaataaaaggattcatggcaattcaaaaaa

SEQ ID NO: 14403 - DNA, 651 bp, Homo sapiens
ccgggcaggtaccaactgaagcagcacaatattgctggcattctgtttggagtaagtatgcaagtagggggcatgcatactctccttctggttttaagtaatcgtggtaaccgtgggagtaagtagtagtatgggttggtcaacttccaacttcttgtcacctccgaaattcctttcaccttgacttgattttcccaggtacacaaggaaggctcaaaccttgatttggttatctcttttggttttgggaacctggttgccccattggaaaaaaatttctttcaaacctttttaatagggccccattttggggtttttccaaccagggaattgtggccaggttggtttttatcaattttggaataccaatagaagggaaagtaaccattctaacccctcggggggaaccccgggtccaattaagtccataaggaactccccaaggatttttttggcccaccaagagggggggcatatccttaattcgcctgggtgatatcttggggcaatttggcggctccttttttgtcgggctccaaatgtccatgggggaaacaagtaaccccaatcgtttcaatccttttggtttttgggttatggttgtaacaataactaggccaggcataaccggtttccctaaggcttccccct

SEQ ID NO: 14404 - DNA, 433 bp, Homo sapiens
aggtacgcgggtcaattcattttcagagcactttaaagtctgatatttctcgatgtgcactgtgatgcctggaaccttcctctggaagtgctgattttatggactgaggactggtgactggtctgtgatagaagcaaattccaatttccaaaatgtaatttagacaaaaaaattattttttttaagaaatggggtttttaattgtaaaaagtatctttttcagcttcctgttctattgtgcttttttcagatacaaacattttttgtctatggtgaaactgctgtaaaatggacgcagaggaaattggcctaaaaaagggacagggtggttttgtaactcattgggatgaatggattgatggtcacctggtgcccactttgggacagggggccgttttttctttctggaaatttgaaagggggaaaaggctca

SEQ ID NO: 14405 - DNA, 654 bp, Homo sapiens
  misc_feature 26, 27, 93, 506, 604: n = A,T,C or G
aggtactttttttttttttttttttnnttttttttagagcacccgaagaaaccccgtgcctccgggggtggtagtctctggggggaccccttntgatagtgcgtgtgaagaaccatttcagggcctccacgaattatgaacccttttcaaggcagaaaggcgcctttgggccgcgggagtccacaagtgtggatccacggaaaaagggccttggaggaatggaaaaccacggtggctctttggggcaaggccaaattccaaccaaggcgccgggggccaaagggaggtgggccttccccggaaggccctccggcaattctccccccggggcccggtttcttagcaaccttaggtggggattccccccccgggggccttgtcaggggaaaatttccggaataatgcaaaggcctttgtattcggagtgatcgccgtttcggatctctttctctagagcgggtgggtgtcgctctgtggttaccccccaggcctttttttggtttttnccccttttttaagttgaaaggggggtttttaaaaattttggccgggcgcgcttttgggggccggttaataatttccaatgggggtttcatttaagggncctgggtttttttcccttcggttgggtgggaaaaaaatttgggctgttat

SEQ ID NO: 14406 - DNA, 402 bp, Homo sapiens
ccgggcaggtactggggtccgcgtcggagcagcaactgagggcggcctcgtccgtgaggccgccggacgggggctgcggttctgccatggctgcactgcagtatcacagacgacgggacccaaggaacggaggagtcacccacccccgcgtacgcgggcccgggcgacacagcaggactcccgtttcctatgaaaaaaatattttagaggccaagagactggacgcaggggctcacacttggaatcccagcactttgggaggcctaggcggttggatcacttgtgggtcaggagttccagacccagcctggttcaaacccgggataaaacccccattctttactaaaaaaataccaaatatttagggacagggcgccaattgggcctccccgccttgtaaaa

SEQ ID NO: 14407 - DNA, 536 bp, Homo sapiens
aggtaccgcaagggaaagatgaaaaattatagccaagcataatatagcaagggactatacccctatgaccttgctgtgcataatggaattaacctagtgaaataactttgcaaggtagtagccaaagtctatagaccccctcgaataccagtatcgaggcttacgcttaaagaaacagcttaaaaaggaagcaacacccccggtcttattgttaagccaaaaaataagttggggaaagtatttaataggggtaagagggccgacaaaaaccttacccgaaggccttggttgaattagcctgggttttgttcccaaggattaggaaatccttaagtttgcaaactttttaaaaaattttggccccaaccagtaaacccgctttttaaaattcccccctttgttaaaatttttaaacctggtttaagtttctcaaaaaagtaggggatatcaaggccttctttttgggggaacaaccttagtggaaaaaaaaaacccctttggttttttaggaaggaaggtttaataaaaaacttttt

SEQ ID NO: 14408 - DNA, 528 bp, Homo sapiens
ccgggcaggtaccgagacaccgaagggtgctccaggcacacgtcgcagccagacagctctctccgataaagggcagtgaacctcgtgcccttgtcaaggctacgtggtgccaagggatagttgtcccgccccttcagggggtctcttaagctgttagggggggccttgtggccagggggcccaccccccaatgggagggcttctttgggttagggggggggaagcccccggggcttgggacccgcccaggggggaaagaaaacccgctttgtcggggggggccgcggaactgccttccttccttggtagaaccttcctaaaaaatcaaccggcagttcccgggccttgaggggagggaggggtaatggttcggggcctccccccaataaattggggagttcccctgccaaacgtccaaggtggggggcccccttttcccttttcttggtaaccctttcggggcccggccttcctaagaaaccttaaggtgggggaatcccccccccggggggcccttggccaaaggga

SEQ ID NO: 14409 - DNA, 444 bp, Homo sapiens
ccgggcaggtacgcggggaaaaaggagagacatggaaagggagacagccaggtggcacctgcagcggctgccctctggggccacttggtagtgtccccagcctacctctccacaaggggattttgctgatgggtttcttagaggccttaggcaagccctgggatgggggggccaagaaaataaaaggggacccagcccctttcatgggtggtgacgtggtaagtcacttgtaagggggaacagaaaacattttttggttcttatgggggtgagaaattattagacagtggccccttggttgccgaggggaaggcaattggaaaaaggaaactttgcccctgtagcacttcctgggtggccaggttcttcccaccctggccacaattgggggtggggggcttccttggggagggggaagaccttcaagcccctttccttccctct

SEQ ID NO: 14410 - DNA, 436 bp, Homo sapiens
aggtacgcggggtcctctggccgccgcgcgggagagaggccgagatggcagatgagattgccaaggctcaggtcgctcggcctggtggcgacacgatctttgggaagatcatccgcaaggaaataccagccaaaatcattttttgagggatgacccgggtgccttggcttttccatggacaattttccccttaaaggcaccccaacacatttttctggtgatacccaaggatacatatatcccagattttctgtggcaggaagtatgatgattgaaagtccttcttgggacaccttaattggattgtttggcaagaaaaatgtcgctcgctggatctggggccctgaattaaggggtttatcgaaatgggtgggtgaaaatgaaggttttcaacatgggtgggacaggtcctggtctattccacggtttcaatctt

SEQ ID NO: 14411 - DNA, 611 bp, Homo sapiens
ccgggcaggtactttttttttttttttttttttttggaatgtccattttgtgtgtaagagggcgccagaaactggctgtcggaaccagaagagtgggtgaatagccgcccctaaggcataagatggttagaagattttggaatttaggtggggccctattttttttctgcttaggggggggttgtgtaagtccggggattggagtttaaaggaaggtaatttcccctggcttaccaaaccttattaaggtgggcctttggaaattggggaagttaagggggcttggagaacttggggtgttgggggggccctttcttaatgggcttggaagagggggagtttcaaggggggttggggagaaaccctcaaatttgggggcctcgtaatttgtggccccttggccttggcttggcctttaggggaaggggagggggcccttaactatatattggggggggttggaagaggcttttggggcaattttaaccccggtttttaaaagaaaggggcggccttaattttttggtttggttggggggtttcttcaattggaagattttggggaaatttggtttaggggaaattaaaaaatttccaattggcccctaaaa

SEQ ID NO: 14412 - DNA, 136 bp, Homo sapiens
aggtacgcgggctcctacttggataactgtggtaattctagagctaatacatgccgacgggcgctgacccccttcgcgggggggatgcgtgcatttatcagatcaaaaccaacccggtcagcccctctccgggccc

SEQ ID NO: 14413 - DNA, 425 bp, Homo sapiens
ccgggcaggtacgcggggcccaaactcaccacctggccgtggacacctgtgtcagcatgtgggacctggttctctccatcgccttgtctgtggggtgcactggaatagccaggtctggctgggtcggcacaacctgttttgagccctgaaggaccacaggcccagaggggccccctggtcagccccaagttttcccacaaccccgctctacaatatgaaccttctgaagcatcaaagccttagaccagatggaagacttccagccatggacctcatgctgcttcgcccggtcagaagcccgcccaggatcaccagatgttgtggaaggtcccctggggccttgtccccaccccaaggagccccagccactgggggggacccaccctggcttaccgccctaaaggcctggggggcccgttctttcc

SEQ ID NO: 14414 - DNA, 457 bp, Homo sapiens
aggtaccttgctgactcagctacatacataaggcctcaagccttgctgccagttcttaaaggaactgtgttctcttttcacttttcctggcttatggggcagtagagggtttccgacctcaaatgccaataccaggttaggttaggaaggcacccttagggctcaacctgcctggcttccttcgtaattaaccaccccactggtatttctgtgggtgggttgccactcctgctctgccctggtgtccaatgtcacccttttccttaatccaggcacaatccttggccccaaggaaaaacccctaattttgggggtccattccatgtctacttcttatcttcctctctttaacttcgtttcctggatgtttttccaagtttgggacctttggaatttcccaccccgctaggggcttcctgggccttcccagaaggtacaggaaggatggggcgccccc

SEQ ID NO: 14415 - DNA, 440 bp, Homo sapiens
aggtacttttttttttttttttttttttttcgtcactacctccctgggtcgggagtgggtaatttgcgcgcctgctgccttccttggatgtggtagccgtttctcaggctccctctccggaatcgaaccctgatttccccgttcacccggggtcaaccatggttagggcaccggcggacttaccaatcgaaaaggttggatagggcaaacgtttcaaatgggtcgttgtcgtcaacccggggtaccttgcccgggtcggcccgcttctagaacctagggggatccccccggggcctgcagggaatttcgattatcaaagcttaatcggatacccgtttggaccctttaagggggggggggcccgggtacccccaggcttttttggtttccctttttaattgaagggggtttaaatttggcgcggctttgggggcgttaat

SEQ ID NO: 14416 - DNA, 443 bp, Homo sapiens
tggtggtgaagctgtagccgcgctcggtgaggatcttcatgaggtagtcagtcaggtcccggccagccaggtccagacgcaggatggcatgggggagggcatacccctcgtagatgggcacagtgtgggtgaccccgttcaccgggagttccattcacggatgtccaggtgggtaccctggccccgggccgggcccgaggtaactcctcgttcctttcgcccttccaggcatacaccggaatggcccagccttgggcaatgggcagccggccgcatggttcctggggtggtagaaagatgtttgccagcctgggacccactggtaccttgagccaccccaggggtgaactaaggggttcttcaaatgaagggaacctggcccggtttttaagaaactagttgggatccctccccggggccttgcaagtggaatttttccaatc

SEQ ID NO: 14417 - DNA, 522 bp, Homo sapiens
  misc_feature 279: n = A,T,C or G
ccgggcaggtacaagcaagcagctacttccatgatacagtgggaagataaaaagggctcattgcaggtccaggccgtgtacctggtaaatgccaggcttggccctgccccgccacccccactggggaaaaaaaatgccaagaaccctgttttgccagcccagttttttttaccatggtcggcttttcttcttacccaagggaggattttcttttggccgttcattctaagaatgaaaacaaccacctggggactttatattaccagctgggacattganaagttaacccaaattttgaagtggcccttgtttcctttcaaacaaattttttaacttttcaggatggctttaagaggatggattcggagcccacccggatggttgcaacaaaaaattattcccttttaccctttttaaaattaggttttttttcctttttaaatgtaaaggtttttaaaaggaaaaaaaccctatttttaaaacggagttggaattaatttaacccggggggaaaaaggtttt

SEQ ID NO: 14418 - DNA, 431 bp, Homo sapiens
aggtactaatactcctgttaaaattcaacagctttattgtgaaagaatccagagatctcacactgaaaaaatactaacacagctcatatataaattacttatctataagaacaattatagaaggaatctaaatggggcaatttttaacaataccaggcaaaatatccacattataccctgaattataaaggtaaacctcccaagcccatgagtttaagattaaggcagttactttattttgaacaagggaagtgggcataagccaactcaagtgtgttgccccttagggttggggaggctcttttccacaacccacttccccacccccaagggcatcaatttttgggagaaaaaaaggtgttctttctaatctgggctaggctggtggttaatctagggattggcaccctttctttacaccggggcaggct

SEQ ID NO: 14419 - DNA, 497 bp, Homo sapiens
  misc_feature 135, 136, 164, 165: n = A,T,C or G
ccgggcaggtacatccctggccttttgcatccagttctgcatgaggctctcccaggactcatggggtatgtcgtaaacccaggcttggtgcctcctctagcatgctgaagcaggctcctccttgcggtcacgtcnnggcgggagggaggggtattagagggggnngaagtggcaggatgtttggaatgaaaaaacccttctccttttccgaagggagtttggggtccttttaatgcagaaaaccagggctggaggcctggatttgttggtcggatttctgggtcttggttggtcctggggctttggcttgggagcttccctttcgagggccttgcagccaggccagctttcttcaaaatcgccggcccgaaattcagccacccgaattccggcctttccggccttcgcctttaaggcccccattttccccaagccaaggctttccggggtttccggcccaatgggcccccctgggggaaaaggaagcaatcttaggg

SEQ ID NO: 14420 - DNA, 436 bp, Homo sapiens
accttgatccggggagtcgggatggcccgagtaaactccatcacattcatcccaagaagatggcagagcttctgcgcaactgtattttctggcatggaagcttgatcagtatttctctcctttttgaaagaaatattttccaaactggtagccactggaaggatacttactttaagccattggacagaaatctttttcatgggagaagcccattatgtgcattgctttccatggtcctcctgggaaattatcttttgtcttgctgtccccggaattagggaatataagccatttggagaggaaaaccctgcagttaatttaaaatcctttcaaggaaggcaaaattcaaaaacttttaaggtggtttctcccctggcttccagaattaaccaaccctgggtaaaaaagaattatgaaaaaaagggaacccttcggg

SEQ ID NO: 14421 - DNA, 421 bp, Homo sapiens
aggtacagattattcagttccattgtaatttcccaaataattttagattataattttcagaaaggatttttaacatctgctaggctaattccatcatattagtatatgaaattatcttttctccagttatttattaatctttctaaatatttttaaaaatacaggtatatttttcacaaacaaaaattttatttttcccccacaacaaagaattatcccacttctctagtaatttccatcgtgcaagaatgtaggaatatagactaataaggcctaaataggaatctaaaaagggcaagtttaccctaaaaccccttcttgttctaacccattattaaaggccccaaaggtttacccttagaggtcacaatttggtaagttaaccaaggtggctaattttctctggggtttggttttttgc

SEQ ID NO: 14422 - DNA, 439 bp, Homo sapiens
aggtacttcttgcccttgtagaatttcctgaggttttctttctgagtctggttaataactgtgagaacacgggcaatggatttccggacgactcggatcttagagagcttggaggccgcaccgcctgtcactttggcgacgcgcagtctggggacaggctccaccctttagggtcgttccagcctggttttaagcaggcttccctccttttcttttcccgcgaagatctggagccttgatcttggccattgcttgcacaaggccggccaacggccgctcgcccgcttccccccggggtacctggcccggggcgggccgcctcttagaacttaggtgggatgccccccggggctggcaaggaaatttcgaatatccaaggctttattccgaatacccggtcgtaccttcgaaggtggggggggccccggggttaccccct

SEQ ID NO: 14423 - DNA, 606 bp, Homo sapiens
  misc_feature 374: n = A,T,C or G
ccgggcaggtacttttttttttttttttttttttggacatgggagtctcacgtccatgcactccaggtctggtagttgtcagttgggcgtccatgctgtggtcttcaactggcagacctgccggcctgcccagtgtttcaaggtggatgcctgccgtggccctcagtgcccttccctgaaggtaggcctgggggaacttaacaggggcggcccccggcccaacccaacggcccccaaggcttattttttttttttgggtaattttttttaagttagaaagaaccgggggttttttcgcccaatggtttaggcccggggaatggggttcttccgaattcttcccttggaaccctttgttggaattcacaaccccncggccctttggggttctttcccccacaaaggtgaccttgggggaattttatcaaggggctcttggaagtgcacacacttggttggctcctcagggcgcccttaatgccccttcaaaatttttttttcttaaaaaggccagttaaaaggggaatttttttaaaagaaagtttttaggttgggggggaaaatagggccaattggaacctttaaccggtggttttttaaaataaa

SEQ ID NO: 14424 - DNA, 380 bp, Homo sapiens
aggtacttagggtaagcattaacaatattattcaaaatgttatatagagttcaactgtatacaatagagcatttattaaagtgtgtccaaagcgcttataaataaagcatcttcgagacaggcggctcacttgaggttaggaggaaagcagactggccaacatggtgaaaccccgtctctactgaaaatacaaaaaaattagccaggcgtcatggcgcacctgtagtcccagctactggggaggctgagacacgagaaccgcctgaacccgggaggtggaggttgcagtgagccaagattgcaccactgcactccagcctgggtgacagagtgggactctgtctcaaaaaaaaaaaactaaaaaaaaaagtccctgcccg

SEQ ID NO: 14425 - DNA, 313 bp, Homo sapiens
gacattggtgaagaagaggtggaggaggttgcctggggtctgggagttgatctgctctttgctcccgcgtacctatttcggtttttgttcttaggaagcttggccactctacatgggaagtcactagcttcatgtcggatatcctggtaaatggccgcccagctcccggacttgtcgatctgctcgaactccttttccatctccatgacgggccagggcggctgctgcgcctccttctcggcccactgcgccgtctgccgctctaggccgcgtcgcgctcttagccccgaggcccgctgcaatccccgtacct

SEQ ID NO: 14426 - DNA, 47 bp, Homo sapiens
aggtacgcgggggccgccgccgccagattctggaggcgaagaacgca

SEQ ID NO: 14427 - DNA, 428 bp, Homo sapiens
  misc_feature 386, 389: n = A,T,C or G
ccgggcaggtaccctcacatcaatcagtcactgaatgtgtggcattctagaaagggacatgaccttgagcaagggggctgtctacagctgaggcaatccttgaaggggctgacagatgaagattgtctgcagagagccttccctgcagctggagcaaaaagtccttcattgaccgtgaatctggacagctcatctggtgcccagcacaaatatattttactttagagtaaaattctgtgggggaagatggacaatatacaagttcaagaaaaaaaaagagatgacaaaattttgactgtaaagaacagcatgttcatgtattttttaaaattgatgatgttgaatagtaaataaatacagtatttaaatcctttggatcaatccanaanaaaaaaaaaaaaaaaaaaaggtacctcggccgctctaga

SEQ ID NO: 14428 - DNA, 411 bp, Homo sapiens
aggtacaggcatggtagcctcatgtaaattagacatggagagagctggtggttttacttctttcttttcatctggtaaaagggccctaacaggctcagtctcattagagtaggtgaggtggtcaccaacacgaaggtgagaagctggatctgccaaagaaggctggtggctaccctgtggacggtcttcatcagagtcctcttcctcaattgacggaataagggaaggtgttgacaagatttgcttgataatactgtatcgggcataaaagcgggtctatgaggttcttgacttgcttagttacccggtcattgcttttcttgaacaaatatttcttcaaatttgcccaatatttccgcttgaggctctggatgctgctgggtgagctgcgtagatggtgtgaggactcct

SEQ ID NO: 14429 - DNA, 351 bp, Homo sapiens
ccgggcaggtacgcgggggggctggggcacgtcaccgccgaatggcagcctccagaaagccaccgcgagtaagggtgaatcaccaggattttcaactgagaaatttaagaataattgaacctaacgaggtgacacactcaggagacacaggtgtggaaacagacggcagaatgcctccaaaggtgacttcagagctgcttcggcagctgagacaagccatgaggaactctgagtatgtgaccgaaccgatccaggcctacatcatcccatcgggagatgctcatcagagtgagtatattgctccatgtgactggcggcgggcttttgtctctggattcgatggctctacgg

SEQ ID NO: 14430 - DNA, 353 bp, Homo sapiens
aggtacagtagtgcactcttggctcactgtagcctcgacctccggggctcaagtgatcctcctgccttagccccacaagtagtgggactataggcacacaccaccatgcccatctaagtttttgtattttatgtagagacaaggtttcaccatgttgcccaggctgatcttgacctcctgagctcaagtgatctgcccacctcggactcccaaaatgctgggattataggcgtaaaccaccatgcctggccttaaatcaactttagagtcaacatctcttatcactggagcttctggagaaactccatcacgtggtgctctctttcctgatgtgttgtgcccaaatagcttgc

SEQ ID NO: 14431 - DNA, 375 bp, Homo sapiens
aggtacatcacagaactcacacgggagagagaccctatggctgtgatgagtgtgagaaagcttacttctatatgtcttgccttgttaaacataagagaatacactcaagggagaaacggggggattcagtgaaggtggaaaatccttccacagcaagtcacagcttaagtcctagtgaacatgtgcaggggaaaagccctgttaatatggtaactgtggcaatggtggcagggtcagtgtgagtttgccccacattcctgcatttcatgataaaacagtttgcctgttttgattcatattagcctcccagcgggaatgcctgaagtttggccatggtcccatggggccttttgggctccctgccactaattatgg

SEQ ID NO: 14432 - DNA, 604 bp, Homo sapiens
ccgggcaggtactgtgctgttgggcttagaaggctgcagacggtctccaggtggcatggctgtaggagtcatgcaatagtaagttttccccatatgtggctatcatgcaccttagggggggtacctttttatttctttgtttttatattttcattttatattttgcaactttttaaaatgatgaaacgcggctttctataatatcttgaagaaacatgttgtaaaatattcaaagcttttttttatttgttatataaaaattattatatatttttttcttattatagaaaaatgatagtgcgcttaaacccaaacaagtgtgatctaaaggttttttaaaatagataaattcggcgccttatatatacattgtgggtacatataatatttttctatattctttcattacatatctgtgtacactcaccacaaaattggttagatatttttttttttaataaaaccccctattaacaaggttttttctcccattgatataaatcccctgtataagtttttattgtggtgaataatccacaaaacccaattaaactcccctgtcgtgataatcctccttgcggggacccctgcacttttctttatt

SEQ ID NO: 14433 - DNA, 350 bp, Homo sapiens
ccgggcaggtacacagattggtatacacatatatttccttgctctgtctgctgagagggcctagatgcagcaaacagtgattatatgtagcacctagatcctggtttctaataaccattctccaatagaagcaaccagggctcttggagaagtggtcagttctaggactggagtaggaaatatataaattgagctttgaacatattatagtgccaaaaagtaaagtgctttaaaaaaccccacaatgaagggggcatgtcagagggacacaggagccagctgaagagctcccagtggcccaagctggaaggaactatttgaacaacaaaataaaatactaacaagttgtc

SEQ ID NO: 14434 - DNA, 401 bp, Homo sapiens
ccgggcaggtacaaaaaaaacaaagctctctttccttctctggtgatggtttggtaggattcttttgtctctggaagcagtgggactgaagttctcttcgtcctgtgcacacacagacacccccacacagttgggatcactggcttacctgggcccatcccatgtggattttttcatatatttattaattagcaatctaatgaaatcttattataattattcgactatctttcttaattttttatattatcggatttatacattttgtcgttttcatgtactttatttctttctatttcaagtatttattctcttctacttttttttttctaataaaatgtatccatattattttgtattcttatctattacatttttctattactattatctttatttta

SEQ ID NO: 14435 - DNA, 149 bp, Homo sapiens; identical to SEQ ID NO: 5266

SEQ ID NO: 14436 - DNA, 423 bp, Homo sapiens
accggccaggtgctatttttttgttttttactttttgagagaagatacttgtgttccaggttttgattcagtccactataagtctagacggtcttcttaaagcaccaacattacttgagtctttggataaaattgagaaaaagagtctacaaagtatttgtggactctacaggaggcaggtaggctgacaactggcagtaaagacaaagatgtcaggcctgcggtcccggcactcaagatggaccctgagattgatgctttttgataaaggcttggaaagtgatggaagagagtaattggaaaactgttccacttttggccaaccgcctttttcattgaatcctattgtgcttaaaaggatgttaaaaatttaattgtgaacaacctgtttgaacatgtaccatgaaatgccttgatagaaca

SEQ ID NO: 14437 - DNA, 385 bp, Homo sapiens
ccgggcaggtacgcgggtaaaaatgaaagcaccagctggtaaagttttcaaataaagacataaataaggtttgatatgactcagtgtggtatgttccctctcttcctaggaaactgaaaaacagagtagcagctcagactgccagagatcgaaagaaggctcgaatgagtgagctggaacagcaagtggtagacttagaagaagagaaccaaaaacttttgctagaaaatcagcttttacgagagaaaactcatggccttgtagttgagaaccaggagttaagacagcgcttggggatggatgccctggttgctgaagaggaggcggaagccaaggggaatgaagtgaggccagtggccgggtctgctgagtccgcagcactcag

SEQ ID NO: 14438 - DNA, 179 bp, Homo sapiens
aggtactcagcctggtcgggtggcagctcgcggcgcagctcgtccatggtaatgtagttcttgtccccagccaggatcttgaaggaagccatgacttggtctgctgtatctgtgtcggctgtctcgcgggacatgaagtcaaatgaaggcctggaatgtcactcccgcgtacctgcccg

SEQ ID NO: 14439 - DNA, 164 bp, Homo sapiens
aggtacatgtaaaaaatgtgttagataatgggaggcaggacagagagagagccaggtgagtggggagtcacgctgaggcaggacacagaggcaatcagactagcatgtggcgtttcctatggagggcaagatggtcagaacggagaagctgcggtcacagcccg

SEQ ID NO: 14440 - DNA, 478 bp, Homo sapiens
ccgggcaggtacgcgggtcccctgaggaattcaaccacagacattctcaaggaaacacaagagaaattctatggcctaccatatgttccaaatactgcctggcagctgcgattcaagccacctcgtggggtataggtgctagatattaactcttaccctcatgttcctagagcgggtcgcactccaatggtttatggaatggagttgttttttctatcaggtataccttttcaaacaaggggcatgtccgtggagagtcgcctaatctgtcagggaaagaatgcttgtgcaccaacggttgtgagtgacagggtgagtcacacatgacttcattggttttgtaaaggttattgcttctcataaaagtttgtaccctattctggtttgaattgaactttccgtaaaggtgtccccctcgttttttcccgaactttggaattctggggaactttcgaaaaactttttccttcattggaag

SEQ ID NO: 14441 - DNA, 242 bp, Homo sapiens
aggtaccaacagccccttccctcccaagttaggtgagcccttgggccagtgtatgggcagaaaagcagatttgtgtccttcagaagggaaatgtaaaaaggtgaaagctctagttgaagggcagtgagaggggctggaagtgggagaaaaggtctcttctggccggtggtctgggtgcagcaagggcactctgagaaggcagaatggaaacgcagggctggaggggcatgggtacctgcccg

SEQ ID NO: 14442 - DNA, 363 bp, Homo sapiens
aggtacttttttttttttttttttttttttggcgttctacagtctcaatcgtgtatagactaatgagaaaaaatgaaaatgagtttcattagacagaccacttttgttggactcagtcttgagctgatcaaatgaggcagctgaactgagactgaatcttccctgtgattagctcaactcttgaagtagccaggcacaaattagctggatgtagtggtgcgagcctgtagtgccagctacccaggaggctgagaggcaggaggattgcttccgctgaggagttcggggctgcagtccccgcgtaccacaaaccatagtaacttacacagggggaaaagttactgaaataaaaatgttttatat

SEQ ID NO: 14443 - DNA, 459 bp, Homo sapiens
ccgggcaggtacgcggggagacaaaggtggctttgctttgctgaagttactgatataaagatcagcgcctgaaacagattctccgggatattaccggagacggattgttttattattaggcctttccttaggtggacatttttcatttttgaattaccacagtccttttaggcctggtgcgtgagtgccatggcctgttaatcatccagcgacctatgtggaggtctgtagtgcactgaaagtaatcaactttgagagtccaaggtccgtgtgggactaggcacgccctgtggcaaaggggccgactaatgtaaaccatatgttcttcttaccataacaaaaaaaggcggtgcttgctcgattcattggcattgtttcttccgccaggaaagccatatatgggcaccccttttggactttaaaaaccctttttgaaaaaacggcttgggatataaggac

SEQ ID NO: 14444 - DNA, 366 bp, Homo sapiens
ccgggcaggtacatattttttaaaactggttagcgatagctacatgacccaattatattttctatatttatttgattatcagccagtaaactcatagtgaagcagctgcgcactcccccaacaattgagaattgaacaaatttccagagagaagtgaaaaatatcaaaaattaaaatcctaaacttgaagacaagttgagagaccatttagtctggccacctgtatccaagattcatttaaaaccaagcagcggccaggcacgatggctcacgcctgtaatcccagcactttgggaggccgaggcgggcggatcacgaggccaggagatcaagaccatcctggctaacacagcgaagccctgtttc

SEQ ID NO: 14445 - DNA, 384 bp, Homo sapiens
aggtactgcagacatctcttctccgttgtcgggtgccgtctctgctccttgtggttattgctcagccctggcatccccaggggaatggcagcagtgaggtagatgggaggacatttctggtcagggaactggcatcccattcagcatctcaggactcacaggccaacatgtgttccatggctgggaattgcctaccacccacatcagcttctgtttacctttttggcatcaaataatgaacagtgtttggaaatctttctacaggcaattacctccccaagagaagccttccttattttggagtaaggtcctaagatagctggatgaatcaggaaaaccatgtcccctctaggtattattaatataagcaggaagggatctact

SEQ ID NO: 14446 - DNA, 385 bp, Homo sapiens
aggtactttagttctcctttcctcatcagggctaaaactgctattgttgctcaagcctgaatcgctgtgaatatagtgaagagtggagtccatattcctcacactccagagtccagataatgtcactggccctccgcaacatggcctcaagtcccgatcttctgctcagaatactgtgttgcttgctgcagtgaaatggtccgatcagaaacaaagcacctctcaacagcatcgctgattaaaggcacagaatcttcttgatttattttacaatttggtagctcatttatatccagttcatcttgcaaatcacttctcttttctatactgatggtctcttcatgtacatccaggctggaagcacgtagtgcagcggacagcactt

SEQ ID NO: 14447 - DNA, 502 bp, Homo sapiens
ccgggcaggactcgggggttgaaaaccttgctcattttttaatgcgaaggctaagtgtcaccccctttctctgcctctggcttggccttgctaagggccaaggaaagaaagacattttttagggggccagccagtcccaaatgcccaaatgaaagaccaggttctttgcccttgattgtattgaaaatttgacaatttgtgggcaccttattttttttttttttggggcccaattcaggatattttcttatggtttcttaaagagaccaatggccctgcttgttaagaaataggctacacatacgttgggtatgtaataaaatttaatcactcccagaaaggccaggcaatgaaccaggaaatgtctcttcgggtggtagaccacctttgtgaaagggggaaaaatttgccatgattccttggtttgcaaaaattagatagggaaaaagattcccctttgggtaaaaaagaaccacctgtctcttggtttagggcattcggg

SEQ ID NO: 14448 - DNA, 326 bp, Homo sapiens
ccgggcaggtaccagctactcactacctgggaggctgtggtgggagcatcttttgagcctggaaggtcgaggctacagtgagttgtgactgtatcactacactccagcctgggaaacagactgtctcaaaaaaaaaaaaaattaaaccaacaattggctgccttctgaccttcacatcctgtataggaatggaaatggtggctaaagtcagcactgaaggtcccacaagctctccctgcctcccctctatctactgcatgatccttcaactgaggccagcccaagtgcagagtagcttgcaaaacccaagggaccccgcgtacctt

SEQ ID NO: 14449 - DNA, 537 bp, Homo sapiens
ccgggcaggtacagggaaggcctttcgggcagggcacatggttcactgccccatgaccgtgataccttgaagcacaccattacaggacaagtgggtcccccaataaatcacccgaagcaggatgcctttttgccccccttgtccagccgttccaggcaacacaagcaatggaactttggttcaaccctttcatgaagggtggtaactttggcgtcaacacgacggtttattttgggaaaaataaccattggtaggggttcccacaaccacctgaaaggtgtttctatttggagggtctaaaggaaaccttccttcttggtttacaaaattgctttggccccctaaacacttgaaggtcggttatgccaaagattgggtacacccccaagttgccttgggccttcccttggaggtgagtggccaagggttctccatttgaacccttttctaacaaggcaattctcggttggaaggccttccgtgccaatgggcttttttggaacatggggcgtggaagccaagcccattggagggggg

SEQ ID NO: 14450 - DNA, 359 bp, Homo sapiens
ccgggcaggtacgcggggaggcccttcgacggagaacaacaagaaaggcgcttccggtgtctgttgccaggcgcgggcccagtgggccgtaggggcgacattgttgccgtcgtctttccccccccagtcccggggatggagatgtcgggactcagcttttcagagatggagggctgccgtaacctacttggcctactggacaacgacgagatcatggccctatgcgacaccgtcaccaaccgcctggtgcagcctcaggaccgccaagatgctgttcatgcaatattagcatacagtcaaagtgcagaagaacttctgaggcgtagaaaagtccaccgagaagttatatttaagtacct

SEQ ID NO: 14451 - DNA, 507 bp, Homo sapiens
ccgggcaggtacttactacaaagcttccaaaggaaaattgcctattaaatggatggctccagagtcaatcaaattttcgacgtttaacctaagctagtgacctatggatgttttggtgtgtggtatgtgggaagatacctggatggcatggtggtgaaagcctttttcaagggagtggaattaaccaatgaatgtaaatccgggtccgaaatttgaaaaatggggggaaaaggaattacccaaatggcccttcccaaaatatgttaccttccctaaccccttcttacaggcccctttaatgaactgaaaaatgccttggggcccctaattggaccccccaagccagggccgggccccaagggttttaactggaaactttaaaaagccttcaagtcttcaagccaccaaattccttggaagggaaaagagaaaagggcttcaaaccaaaggaaagaagccgccattgaagggattgggaagtcccaagaaagtaacagggcccaacaa

SEQ ID NO: 14452 - DNA, 660 bp, Homo sapiens
aggtacaaagagggtttttaattatcccagtcatctccaacagttgcacctttggggtggaatgtggacccattctggtatttgagcagaaaatttttcttaattggaaagggaaagggtttcccttctggcagaaacaaactttacagaaatgaattttttcaacttttaaacaccttggcaagccaagtttcctttggtattgaaaattcctggggttccaatgaaattttcttcaagatatcattccccccaaaggggcgagcccttccaatgggtgggacccctcactcaatggggcctaggagaagaacaatttcacttttttgggggggagatttattggtatgacttggccatggtttcaattaaactgcgttttaccccttggtgggttttcaagttgcccctcttatagccttaacctcaaatggatggtttttttcaaagagtgtggccttttaaaaattaaacaaacccttactctgaaatatgccttgaggtatgatgtgttccacctacctttaaagtttttctttaaattccctctttggaaacataaagtaggtaataaaaaccccatgggccaagttggaaccaacttttaataaaaggtttgggggccttgggtttaaaaaaaaaaaaaaaccaccaaatttt

SEQ ID NO: 14453 - DNA, 428 bp, Homo sapiens
ccgggcaggtaccctggtgttcttctgattggcactgactcccacacccccaatggtggcggccttgggggcatctgcattggagttgggggtgccgatgctgtggatgtcatggctgggatcccctgggagttgaagtgccccaaaggtgattggcgtgaagctgacgggctctcttttcggttgggtcctccaccccaaagattgtgatcctgaaggtggcagggcatcccttacgggtgaaaaaggttggccaacagggtgcaattcgtggaaatacacacggggccttgggtgtaaaactccatcttcctgcaactggcaatgggcgaccaatcttgcaacaatgggttgcaaaaaatttgggggcccaccactttcccgtgtttccctttaccaacccacatgattgaaagaaatttcctttg

SEQ ID NO: 14454 - DNA, 496 bp, Homo sapiens
aggtacgcgggggcctgcgcggctgtcggttgatggggaggtcaggtctgggaaactaggccctggggttttccctgagcaggagcggtgcccgagggcctcaggcgttaagtccaggaccctgaaatggactggtactccagccggttggtcgttcacattctgcacttgtggtgcgtttatgccttcccacataaattacaatcggtaagcctctcaggtgctcccatctcaggccaagtcaagaacttcttaatgaaacaaaggttgacatctttatcccagtcagttcccttttgaaagggggacactcttgtaggaaaaacaaatttttcccaataaaaacaagactttttttgaagtcaaaccataaaggaagtttggatatcttgggattaaaaggtctttatactttcaacccaccaaaatgggaaaacaccctcaaataccaatatatgccccgggtaggcttaactttccttaatcccccctaact

SEQ ID NO: 14455 - DNA, 387 bp, Homo sapiens
aggtacctgcctgctggacccctccacctggaggccagcccatgtctcaggcccagccctagcctcttctcctcaaattctaagtgttttctctttaggtttccctggctttgtgaatggatcatgtgtctctaggtataaacctgacatcatctttccacccggcttacctccaccagatctccccagttctgtctccatcttctacctgcagctgctctgttctcatggtcactgctgcatcactgagtctggacccttgttatcattttcaaactggcctccacgccctgctccctcctccacctccccatcctcttgtctcccctcccctctgaatccagcccagcggggcttctcctgcctccatcacatcacagaagtcct

SEQ ID NO: 14456 - DNA, 383 bp, Homo sapiens
aggtactcctccatggcgctggcgtctggccgcgcagtcaggccacgcccccagcgtagacgcacaccggcgtcggagctttccgcctattaccgggcagcgattgggtcgctataccgcatgtcacgccaaggacgcactctcattggccaatcgagtttctgccatttgttcattgcctcctgagcgtattccagttactttcaggctcggggagtgaaggcctcgttgagagaaggtctcattcggtgttttgggaagagagtcgtgtgggcccaggtatcgtatcggcgacacgagagagacgggcggtgtgacagccttccactacctgcacgagtgtattggtctgtctgctatcagctatgccgttgcccgttgcg

SEQ ID NO: 14457 - DNA, 382 bp, Homo sapiens
ccgggcaggtacgttgaccatctttgcagcagggctgttttgtctatatgatgaaaacgagaaacagcgcccgacacctggcccttcgcagctctcgcctttcgcagctctcgcctaacaggaaagggaagaaagagccccgcgtacttttttttttttttttttttttgcaaatgacttagatttaatcatcggaagcaaactaaatggaaaccttacaatagagaagaattacatgtcagtgtcttttggaaaactgagctgggacagaaagggactgggggctgccccccaacctgatcccttctgaacaaagacgtccacagtgttcctggcactctggctcaggaaaaggggagactctgctgattctgtgcattgt

SEQ ID NO: 14458 - DNA, 492 bp, Homo sapiens
ccgggcaggtactttttttttttttttttttttttttttgagggggaatgctggaaattgtaatgggtatggagacatatcatataagtaatgctagggtgagtggtaggaaagttttttttataaggaggttgtattaagtttggtccgttaccgggaaatcggggggtatttgctgccttcgaattccatatagaaacaagggtagggttaggaaagatagggggttctttggttgcaccaacaattatgttgtgcggttaagaagttttcagggggaagaaagttgccgttccattattgttttgtttcccttagggaaaggatttggtattttggttgaagaggcttcgctttaatttaattaattaaattgtttttgttgttattttcgggctttttttaaaggacattatgggtctgaaaggggggctctggccgtgctgttatttctaaatgtttttgaaagcccctgaaaacttatgttttccg

SEQ ID NO: 14459 - DNA, 469 bp, Homo sapiens
aggtccaaatttttagtttgaaaaaatgaaaaagttctggagctggatgatggtgttggtagcacaacattatgaaggcacttaataccactgaactatatagacagttaaaatgacacaatttggtgttattattttaccaccataaaatgtttttgaataaaaaaagctaaaacaggcaagggccgtagtctatttttttggaaatggtgcaggattgtaaatatctcccacatcctcattatctttgaacatccttattttacttaaattgttctataagactttatatagtataatatgatcaaaatattgttatttttatttatgttattgtgatggggctttctttatttaactatttttttattgattggtgactatgtatttcatgtgaatcaattctagttagattctccatttttgagttcttaatttaatatatatgaatctaattttttgttccatt

SEQ ID NO: 14460 - DNA, 620 bp, Homo sapiens
  misc_feature 252, 306, 315, 467, 469, 477: n = A,T,C or G
aggtccccggggcaaaatgcaaatgctagttttgaccagtaagtccggtccaccatcccagggggagaactccaacctcttcaatcacctccaggcctccagccccaaaagtcttgattgaagggatcagaaacccagcttggaaaattttgtggttgggaggggaccccgttttcttcttgttcccccccaagagttacccttgattcttccttggcaccaaggaaaaacttttgtaaacttccccaaggnaatgtgtaaattttccttttcccttccccttcttgggacttgggggacctttcncctttttgncaattttgtacaagggagacccctttcatttctttcaacccattcctttcggacaaaagaaagggtggttcctttcttctttggttctacaacaatattttttttatatgtgttactccctcacacaaattggaattttggttggccccttncnttggctcncaaatgtccaagtctccttggggaagtaacacttttccctaaattggttggttggccaatcttgggggaggttgtgtgagggctttttgggggggtctatctctaattgtaggaaaattgtttttggggcccgtttggcacct

SEQ ID NO: 14461 - DNA, 711 bp, Homo sapiens
attttcaactatttcatgataattctttgatatttttaatatatttttcaattttgataaattttaccgttttcatattttttgtgtgttgtattatattctaggtatgtttatttcatcatttttaatttggtcgttttgaccgctatacactcactatgggcgattggacctccccgcggtgggcggccgaggtacgcggggagacggaacttcagccgctgcctctgttctcagcgtcagtgccgccactgcccccgccagagcccaccggccagcatgtcctctacttcacttcaaccgagtgcccttgcctaacgggcctgtcatgccggagggttaaagaacaaagccttggccccagaaaagtattgactcatccagtcgttggagccagggtagtcttgagcagtagctgggattcgaagggggggttggaccagttctcggttctccaattcgggctatacaaaacctttcaattgggatccgggtccttcaaaaaagtattgggcaattcaattttctttttgtccgaaaatttctattccaaattacaagtccttgtcaagccccatgggacttccccgttggaaaagaaaaggaatccatacttgaaggttcaaaacccacaaaaaattttgtggcaacacaagtctttgggaagtaaaactatttcgggccaaaactttttcatttcaaagtggctca

SEQ ID NO: 14462 - DNA, 492 bp, Homo sapiens
acgtactttgtactttttttttttttttttttttaaagacaaggtcttgctctgttgtccaggcctggacaacacagcatgtgcagtggtgtgaacatggctcactgcagtccttcgacttcccaaggctgaaagtgaatccttcccgtactcagctttgaagagtatgcctggaacacacagagtgtgttgccaaccaatgccccagactagattctttaaaactttctttgttaaaagaatgcgggttctttggtcaatgtttagccccaaggcctggttacttgaaaactttgcttggggcttcaaggcggattcccttccctttgccctttgggccttcttcaaaagttggcttggggaatttacaagggcccgttgaggcccacctgttggcttaacaaccgaaaaatggtttggaccaaagggccttgttggtgacaaatccctgaaaattttgttcattaccaatttttgttgggacggaaaagg

SEQ ID NO: 14463 - DNA, 471 bp, Homo sapiens
ttatatgtggatttttaactatgcagtgtcagcaccccaacactactcaagggtcaactgtaaagtatttttttaatccaagaatgaacaatgttttcaaagacataatgctatttaacacttaaacatacttatagtgcaaacaataacttttaatatgccaatagggaaaccataaataatttcatggtgcactttgctttttattggcaataatttcaacttttattgatgggtaagttctggtaaaacttgaaacctcacaggtatttttccaatggttatggcccaagtagaagttaacaaatgtttaaattaaccagaaaattcaaggttggattggggtttaaccctaggggttagttacccttgtggccggcttttaaaaaactaggttgggattcccccccgggccttgcaaggaaatttcgaattatcaaaagcttaattcgaatacccagtacgaccctt

SEQ ID NO: 14464 - DNA, 373 bp, Homo sapiens
aggtacagtagtgcactcttggctcactgtagcctcgacctccggggctcaagtgatcctcctgccttagccccacaagtagtgggactataggcacacagcaccgtgcccatctaagtttttgtattttatgtagagacaaggtttcaccatgttgcccaggctgatcttgagctcctgagctcaagtgatctgcccaccttggactcccaaaatgctgggattataggcgtaaaccaccatgcctggccttaaatcaactttagagtcaacatctcttatcactggagcttctggagaaactccatcacgtggtgctctctttcctgatgtgttgtgcccaaatagcttgttctcatcagatgacttattt

SEQ ID NO: 14465 - DNA, 284 bp, Homo sapiens
aggtacagcctttccgtttagtgaggttctactaaagggaatgccaactttgtggttgacatgggtgatccttgggtttcgtcacgcatgaaattaacaaataaaaaatgttcaaggccaggtgtggtggctgatgcctgtaatcccaatgctttggagtctgaggtggaaggattgcttgaggccacaaatttgagaccagcctgggcgaaagagcgcaaccctgtctctaccaaaaaaaaacaacaacaaaaaacttagctgagtgtggtggtacctgcccg

SEQ ID NO: 14466 - DNA, 287 bp, Homo sapiens
ccgggcaggtacgcggggagagctctcggactttcggaagctctcggtgtgggtgcgacccgagagaaggagcggggctggtggggctgctgcagccgtcacaggaaataagtaatcatggtgctcaacagtttggataagatgattcaactccagaaaaacactgccaacatcaggaatatttgtgttttggctcatgttgaccatggaaaaactactctggctgactgtcttatatctagcaatggaatcatctccagccgcctagcaggcaagttaaggtacct

SEQ ID NO: 14467 - DNA, 412 bp, Homo sapiens
gaccttagaaagtcacacatctgcgcgcctgtgcggtccctgcttctgcggatgctgaggcacgtaaaaaaatttgaagaagggaattcgagcggtcgcccgggcaggacgcgggatttttggtttggtttttctctggttttgggtgtgatgtaagaagagtttttttgtttagattgtattaacatcaatttttgcacacttttgttcataattttatggtgagtattttacatattgtctttgattttacatggaatctttttttaacttttaagtattacttttttggtattaaattttttttgttttttatttttttatgttttttaactatttgtgtattttttttaatttttttttatttataatatttattttttttggtttcctcttttattttgtttataat

SEQ ID NO: 14468 - DNA, 367 bp, Homo sapiens
ccgggcaggtacaccacccagtggcttcattctggcttagccgcagaggcaagaaagggaccccacttgctcccatgcccacctcaagaaaaaacataaaacaattttttttaaaaaagaaaagaaatctacctcagttgacaggattccacctttagggtttcttcaacttttaagtcttacctgttgagtgtaacttttgtagcatcttgcttttccaagcaagctagtgaggcatgacagagcagaagtctgtaaatgtccctgtgatggacctctttctagcatgttgcagttttattttttaataaaatggtcagtgaaatgaatgtaaaggtaattgggttcaaaaacccagactgggttt

SEQ ID NO: 14469 - DNA, 372 bp, Homo sapiens
ccgggcaggtacgcgggggagaacatcatgaaatccaacattgacaagaagttctctgcgcactacgacgcggtggaggcagagctcaagtccagcaccgtgggtctcgtgaccctgaatgacatgaaggccaagcaggaggctctggtgaaggagcgggagaagcagctggccaagaaggagcagtccaaggagctgcagatgaagctggagaagcttcgagagaaggagcgtaagaaggaagccaagcggaagatctccagcctgtccttcaccctggaggaggaagaagagggaggcgaggaggaagaggaggcggccatgtatgaggaggagatggaaagggaaagagatcaccacgaagaagagaaa

SEQ ID NO: 14470 - DNA, 366 bp, Homo sapiens
tcacggtctgcgcgatcatccagctcaccacgatgtgcgtgttcttggggtcggggagcatgcccttggccgtatcgtactttttttttttttttttggtataacagctctttatttctgtgagttctactaggaaatcatcaaatctgagggttgtctggaggacttcaatacacctccccccatagtgaatcagcttccagggggtccagtccctctccttacttcatccccatcccatgccaaaggaagaccctccctccttggctcacagccttctctaggcttcccagtgcctccaggacagagtgggttatgttttcagctccatccttgctgtgagtgtctggtgcgttgggcctccag

SEQ ID NO: 14471 - DNA, 452 bp, Homo sapiens
aggtacacgtagagatcattaatacttttaaaagttctacattaattgacttggaatccttagaaatggagtggtgacatgtcagtatgagaacaggcaaaaggtaaatttttttttttttacaaccttaagttaatctccaataataaaaatttgctgatcatgaattatactccagttgttgggtcttatatatttcactccactaaaccaactgcactactgtctatcatttacacatgtagtattttacaaacattttaaattttgtaataagggtcaacctcaagaaacgcaattttgtgcaaagggaagataggttctcttatgacatttactaagaagttattgtcacgctctcttacaataggttattttcgcgcttccttaggcaaacacaaaggtccttgtaagatttatcattcctattttctgtagcaaaaaacctggtt

SEQ ID NO: 14472 - DNA, 402 bp, Homo sapiens
aggtacgcggggagggagctggagaaagaaggagggggagagactgccagagaggaagagaaaagaaaggaagaaacattagaaagaaaaaggagggaaaacggtataaagagagatcaattacccacccttaaatagctagattggggggggaggggggtggtgtaaggtccagggttgctgcgaacagaaatcatcttatacaggtgtatacgcagcgtgtctcttaaatgagtgtaaatcttgtccctgtgctgtattcctggggatatactgagccattgcctggagaacattatcacctcagattttctcttgcatgaccacatcattaggtatggggatgatcctggtttttattttggtggtggttacccttaggttcgccttcttagaatctag

SEQ ID NO: 14473 - DNA, 363 bp, Homo sapiens
ccgggcaggtacgggggagctggccggggctcacggtgtttgacccgtcggtcgtgcgtgagaggaaagggaaggaggaggtcccgaatagcggtcgccgaaatgttccggtgtggaggcctggcggccggtgcttttgaagtagaagctggtgcccttggtgcggaccgtgtgcgtccgaagcccgaggcagaggaaccggctcccaggcaacttgttccagcgatggcatgttcctctagaactccagatgacaagacaaatggctagctctggtgcatcagggggcaaaatcgataattctgtgttagtccttattgtgggcttatcaacagtaggagctggtgcctatgcctacaagac

SEQ ID NO: 14474 - DNA, 363 bp, Homo sapiens
ccgggcaggtacttgcttctgccacctccgctgagtaacctgtaggcataggtgtcagatgggcagggagtccagtggtcacatttttgccttttggggactggagctttgaggacaggcctctccccgatgctgccgatgctataggcagcactggacaggggtgcatctggaatgagctctgcgagcaggtacatgctgcacgcacacaaaagacactgagaatatttttaagaagccacacatcacagaatttgatagtcaacttcatgcaatgagttccttttatatttcatcaaaaggtttacttgcccctttacttgttccaaatttccaagattaactcttaaatttgaaaaagtt

SEQ ID NO: 14475 - DNA, 363 bp, Homo sapiens
aggtactttttttttttttttttttttttttttggcttacttaacacatattttatttattggaaaaggcattgacacttagctcagattcttaaccttgccatccatatctaagtaagctattttatttttttattttattttgggtggagtcttgctctgtcgcccaggctgcaacctttgcctgtcaggttcaagcgattttcgtgcctcagccttccaagtagctaggatcataggcatgcaccaccacacacaggtaattgtgattttatttttttatttttagtagagacgggctttgaccacgttgactaagctagtcttgaactcgtgaccttaggtgatccacctgccttaggg

SEQ ID NO: 14476 - DNA, 359 bp, Homo sapiens
  misc_feature 144: n = A,T,C or G
aggtacgcgggatagagtttgcttctgagtgtctgctttgtttagtagaggtgggcaggaggagctgaggggctggggctggggtgttgaagatggctttgcatgcccagcgatgcgcctccctgtgggatgtcaataccctgngaaccgggagtggcccttggctcactgtgttctgcatgggttggatctgaattaattgacctttcttctaaatcccaaccgaacttcttccaacctacaaactggctgtaaccccaaatccaagccattaactacacctgacagtagcaattggctgattaatcactggccccttgaagacagcagagtgtccctttgcaatgaggaggagatct

SEQ ID NO: 14477 - DNA, 262 bp, Homo sapiens
ggccactgtaaccaagaaagtggctaagagcccaaagaaggccaaggttgcgaagcccaagaaagctgccaaaagtgctgctaaggctgtgaagcccaaggccgctaagcccaaggttgtcaagcctaagaaggcggcgcccaagaagaaataggcgaacgcctacttctaaaacccaaaaggctcttttcagagccaccactgatctcaataaaagagctggataatttcttacaaaaaaaaaaaaaaaaaaaaagtacct

SEQ ID NO: 14478 - DNA, 364 bp, Homo sapiens
aggtacgcgggggatccgtcctgatgacacagttcgaactcttatcttcatccacgtccgaggacagcaccatctcttcaactggccaattacatgatccaataaattcccctttgaggctttgtggttaacgttaggttgggctgcgttacttctggggccttcgtgtccgaggccagcacaccaagaccactggccggcgaggccgcaccgtgggtgtgttcaacaagaaataagtctgtaggccttgtatgctaataaatagtttatataccaagcaaaaataaaactatggcctcaaagtgatctggctggataagcctcccacagggcgggggtttctgggcctgaggccactcccccg

SEQ ID NO: 14479 - DNA, 369 bp, Homo sapiens
aggtacagcagaactgcatgatcagctgtatggtagccttgaaaaccaacaggccacaatcacagtgaaaacctcaggttggcagccactggaggatacaaaatgagtttggatctccttcaatgccccattcccagagaactgtcattatttgacctgctggtagttccctaaaggacgtgcaaggatgtttttatttgactggacacttgaagcttgccctgtatgaacagcccccatcttcccatgcttgtcaaaaatcagaggcaactaacactgcggcttcctgagagtctcactctgtcacccaggctggagagcaattgcacaaacacttggctcactgcagcctcaacttcttgtcctcaa

SEQ ID NO: 14480 - DNA, 372 bp, Homo sapiens
aggtactcagtggcttgagctccagggtcactttctgcccagaggctgactgatagtgcccatcactgcaagggcctagatgggctgggcgcaagcttcccagcatgctctgcagctttttggtcttcacctttcccttactctcaaggaggctggttaatctatccaggaattccagaagttgttgctctcgttgccggggctctggccaggcagggtccagggctgcagcccgagagaagccctccagggcctccccataactctcttcatatttatgcaacgtcgccctgttcagatgaaggtcaggattgctagacgcttttctgtcaactttctctgcttgggcataggcactgagggcttgctggg

SEQ ID NO: 14481 - DNA, 373 bp, Homo sapiens
ccgggcaggtacctgcattaaattttcattttagaagagaatcttggttttggtaattcatttttttttaagatcattatgtgcaaaacaccaagttttaaaaataactcacagaatggccttagttttcaatgtctgatggtatatttgtgagttgtgttatctgtaatatacatcccagaataaaggagtgaattaaatagtctaaaaaaaaaaaaaaaaaaaaaagttcaagttgtgcaaagtgagaaagatctttgtgggcacaaaaggaatccctcatctggtgactcatgatgcccgcaccatccgttaccccgatcccctcatcaaggtgaatgataccattcagattgatttagagactggcaag

SEQ ID NO: 14482 - DNA, 85 bp, Homo sapiens
aggtacgcggggagctttgctcactcagctaatgggatggcaaaggtggtggtgctttcatcttcaggcagaagcctctgcccat

SEQ ID NO: 14483 - DNA, 373 bp, Homo sapiens
aggtactcccctagcgcaaagtggcacgtcgccagctggatgagcgccctctgatgctccagggtcccctgccctgtgatctgtggctgagaaatggatccctggagagctgctaagtgatgcgggctggctatcgcctttttatattgaccctgatagatgatcatatcagtgaggaagattcttaaccaaagccaagtatccgtcttccaggccaagcaaatccttgtaaattctttgtcaaggaattctagggaatagagcaactcccagctctccctggccaatttaaagctttctaacacttcagtggagttagcaagttcggctttattgactacaatgtgacgatttcttcctttcgccgaacagt

SEQ ID NO: 14484 - DNA, 369 bp, Homo sapiens
ccgggcaggtacgcggggagagcgaccaaacgtcccgcgccttccaggccgcactccagagccaaaagagctccatggcggcggcggccaagcccaacaacctttccctggtggtgcacggaccgggggacttgcgcctggagaactatcctatccctgaaccaggcccaaatgaggtcttgctgaggatgcattctgttggaatctgtggctcagatgtccactactgggagtatggttcgaattgggaattttattgtgaaaaaaagcccatggtgctgggacaatgaaggctttcgggaaaacagtcgaaaaaagtggggaatcaatcggttaaaggcactctaaaaccaaggtgattcgtgtttg

SEQ ID NO: 14485 - DNA, 151 bp, Homo sapiens
gcaccttggccgcgttcagagtgccgatgagctcccccagactctgcttccgcccgttcatcttccagtttcccccaacgaagaacttcctggagggcgccatggcgctggagccgaggcgctgaaggtcagtgtctgcccccgcgtacct

SEQ ID NO: 14486 - DNA, 437 bp, Homo sapiens
aggtacttcttgtggtgcagcagcagaaccaagccgccccctagcagcatgagccctggggcacccagggccactgccatgatgtccaggactagtggggacaagccgtccactggagggaagcccacacccaagaaccatcacccagctggagtaggggttggtccccaatagcccaggggccctgtgggaagccctccgaacggttcagattggaagggcaccagaaaagtttatttcttgggaactctcaaaaggaaaggctttcggaacaattggggttgaacttggcgggaagaaagaggtattgccttaagggccaaggaattgaaaataagggggaaacgccttttgtgccaagggagcaagggggccttgattattctccgggaccccccccgggcctttcttggggaaggtaaaaggcccaccttggg

SEQ ID NO: 14487 - DNA, 354 bp, Homo sapiens
aggtacaccaaggcgaccacagcagctgcaacctcagcaatgaagatgaggaggaggatgaagaagaacgtcacgagggcacacttgctctcagtcttagcaccatagcagcccaggaaaccaagagcaaagaccacaacgccggctgcgatgaggaagtagcccacgttgacaaactgcatggcactggacgacagtggcccgaagatcttcagaaaggatgccccatcgattgacacccagatgcccactgccaacagggctgcaccacacagaaagatgagcaaattgaagaggatcatcatggtcttaatgaagctgaagcactgcatggtggctcctgttcagggctct

SEQ ID NO: 14488 - DNA, 407 bp, Homo sapiens
tgggaatgcgatcactactatagggcgagtcggagctcacctgccgcggcgggcgggtccaccatacatggattggagtgcattggtcccagtaataagtgttgtgccagctcggggtcagtgaaggccagagacagcagattgggcctgacccccaccaaatcatcaagctcttacatggtatctatgtagtctccctgaatggtttggcgttggctcttcacatacctttggtcaatttcctcttgagctttagatatttctgccatcatttcactctgtgagggcaatgtctttagacctttaaatacctgagtggcccagcgtccttggagctctgaaatgggcataatggctcctaagggctgaatcaagcctatgattgcaagacttggcctttccaggtt

SEQ ID NO: 14489 - DNA, 241 bp, Homo sapiens
tgggaatgcgctcactccattactgtagaggcgaatcggagctccaccgggggggcggccgacgtgcgctgtcatcatgaaggcggcctccggggaagccaagcccaccgttcataaaggcggggctggaactcaaactctaactaagctcagttggggcagccaagaagcccaagaaggcggctggccgcgcaactccgaataatagcgcttaagaaaccaccgaagaaagcgaagaagc

SEQ ID NO: 14490 - DNA, 369 bp, Homo sapiens
ccgggcaggtacatggttcgaagccactatgtaacagaaacactctctgaagaagaggctgggttccctttagcttacacagtgaccatccacaaagacttcggcacttttgagaggctcttcaaggcgatttatatgccccaaaatgtctactgtgtgcacctggatcacaaggcgacggatgcctttaaaggtgcagtgaaacagttactcagctgcttcccaaatgcttttctggcttccaagaaggagttcggatcgtctatgggggggatcttcaggcttcaaggcctaaccgtgacctggctgggaagaacccttgtggcccctctgaaagttcccctggaagtaatgtcattcaacaacctg

SEQ ID NO: 14491 - DNA, 320 bp, Homo sapiens
aggtacgcgggcaatgacatgtgtgctagagcttactctgagaaggtgacagagttcatgttgtgtgctgggctctggacaggtggtaaagacacttgtggggtgagtcatccctactcccaacatctggaggggaaagcataattcacccattcctgtgttgagcacatgcttactgggcacctgctacgtgaccagcattgccgtagaccctgggaagcagcagtgaacagtcaggagctgtggatggtgctggacagaaaaatgacagggcctggctcagggtgattctgggggtccacttgtctgtaatggtgtgc

SEQ ID NO: 14492 - DNA, 409 bp, Homo sapiens
ccgggcaggtacgcgggggagactagaattcctggaggctaatccactgtgctattgatctgatgttcagagtgtagtggtcctcctggctccatgctgatttccaaggactgagaatgcacatatggatcgaacaaatctagaaattcaagcttcttctatttgctaaacaagaatacagttgcatatcaacctaaattgatataaagtataaactgggaaaagtttctacccaaagattttgtgaaacacctggcattctacctacaacagcatattatggcatcccttaacccctaaaagacctttgtcctcagcaaatgtgaccgtcttcttggatcctcagcaatgcaagggttcagagtgccagcatctctacatctgaggcctagctgccttttgcatgcct

SEQ ID NO: 14493 - DNA, 428 bp, Homo sapiens
aggtacagagacagaggaaggggggctccaaagccaagagagggaaccccacctgccacagataccagctaggtatatatacagaggctggaggaggcagtgtctgatttgcacaggctcaggggattggtttgactaggcatgtcattcacgtagcccgcaggaaaagctggctctcccaccctagccttttaatatgcaaatgcagggcaccatgatcttctacacaggtggggatacttcggggtgtccatgtatccaggaatgtggggaaagggcaagaagtccacaggaatcgccatgtttgggtggacccactttctaatggctggcatttggatatcgggtaactggcctggctttaagagctggagctttacaagaaacttttccagacgtgctttaaaaaacaaaaacttcctaaggac

SEQ ID NO: 14494 - DNA, 14 bp, Homo sapiens
aggtactcctccat

SEQ ID NO: 14495 - DNA, 331 bp, Homo sapiens
aggtacaccaaggtggtgcattaccggaagtggatcaaggacaccatcgtggccaacccctgagcacccctatcaactccctattgtactgttcaaaaaggaatgccccacaagtgttaccatggcaaaactggaagagtctacaatgttacccagcatgctgttggcattgttgtaaacaaacaagttaagggcaagattcttgccaagagaattaatgtgcgtattgagcacattaagcactctaagagccgagatagcttcctgaaacgtgtgaaggaaaatgatcagaaaaaaaaaaaaaaaaaaaaaaaaaaaaggtacctgcccg

SEQ ID NO: 14496 - DNA, 134 bp, Homo sapiens
aggtacgcgggggctcctcagcggatgtggcagccccgagccatggctctcgccgtccgagtcgtttattgtggcgcttgaggctacaagtccaagtatcttcagctcaagaagaagttagaagatgagttccc

SEQ ID NO: 14497 - DNA, 464 bp, Homo sapiens
ccgggcaggtacctaccagaacctcgacatggtggtgtcatctgccattggatgccagctgggcagagacccccacgggctccgagtcgtggtggtcaccgccgagaaaattgttcacatccacattctggctgtgtagccactccacagatgggtggtctcttgggatcagaatgcccctccactcatgagactcttcattttgtccactttgacaggaaaagtgggaatgtatgcagagctctcaaaagaaacaaaaaaggccaaaacggtgccttcagccacatcctctgaattggccctgacttggactaaatgcactaatgcaaaatcccttgacaaaagcgcataggttatttcaaaccagcattgtttttatgtaacctggtttaccgcatcttctcagcagcttctgaccactgctcaattttctcctttacagccattgttctggtggacaaata

SEQ ID NO: 14498 - DNA, 504 bp, Homo sapiens
  misc_feature 468, 477: n = A,T,C or G
atgtacgcgggcctcccagatggctgctgctgccccttcagtccaggcctgtgatggttaattttataggcttaactgggctaagggtatccagatagctggtattatttctgggcgtgtctgtgagagtgtttctggaaaagaatagcattttaatcaatggactgagtaaagaaggttgctcttaggccaggcgtggtggctcacatctgtgatcccagcactttgggaggttgaggcaggtggatcacttgaggtcaggagttggagactagcctggccaatatggcgaaaccccatctctactaaaaatacagaaattagcagggcatggtggtgcatgcctgtaatcccagctacttcgggggctgatgcaggagaatctcttgaacctgtgagggcaaggttgcagtgagccaatatcgcgccactgcacttcaacctaggtgacagagcgagacttcattntagatacgngaaaagaatatatatgtgtcctgcccg

SEQ ID NO: 14499 - DNA, 282 bp, Homo sapiens
ccgggcaggtactttttttttttttttttttttgacaattgctttattcagaggatcccccaaggatgcaacggatcgctgctgtgtcactcatgactgttgctacaaacgtttggagaaacgtggatgtggcaccaaatttctgagctacaagtttagcaactcggggagcagaatcacctgtgcaaaacaggactcctgcaaaagtcaactgtgtgagtgtgataaggctgctgccacctgttttgctagaaacaagacgacctacaataaaaagtacct

SEQ ID NO: 14500 - DNA, 465 bp, Homo sapiens
ccgggcaggacctgccctgccctctgctatgaaggtctctgccttgtggatcatgggactccccttggaggatctgtgcaaaggggggctgggacacaaaggataatgtcctatttgggagggcatgaagcaaaggaactggacagggattggtgggcttgtgaaactgatgtttatcttggatacccacgaagaggctgggtctattcacatgaagatcgaaaagggaccctgcttccaatattccctattacatttcttcgagctacgtccaggggcttagaagaaaatgctcttggtcctgaggggttcccagtgtttgttctgtacatcacattttaagctgtttcccacctttttaaagatgacaattgaattctcctttgggcccttgccattaaagggcaaaagcaaatgtcctgggtataatctcatccatgaactttttgagtgcgccctcacatg

SEQ ID NO: 14501 - DNA, 461 bp, Homo sapiens
acgtacatggtggccaatcaaacaggccacacccttgttgcaagtcccgcgagaggttcagagaactctcccgttttacttctgcctcaggcctcaaccaccacaggaagtggaactctatacctccacctctcctggctgggtggagcctctaaactcaagattctgccttgagctggggctctcccctcaagttgacagggtccagagcaaaacctactgaataaaactgcagaagccaggcggaaggaaagaatgcttgaactggaaagaggcccgggaaaattattaagggtccttgtcccgggccggcctgttctttaaactaagggaaatccccccggggtgggagggaattttaatattcaagccttaaatgaatacccgggccacaccttaaagggggggggctctggttctccaaattttttttttttcctttaactggggggtgtaaattt

SEQ ID NO: 14502 - DNA, 416 bp, Homo sapiens
ccgggcaggtacagtagtgcactcttggttcactgtagcctcgacctccggggctcaagtgatcctcctgccttagccccacaagtagtgggactataggcacacagcaccatgcccatctaagtttttgtattttatgtagagacaaggtttcaccatgttgcccaggctgatcttgagctcctgagctcaagtgatctgcccaccttggactcccaaaatgctgggattataggcgtaaaccaccatgcctggccttaaatcaactttagagtcaacatctcttatcactggagcttctggagaaactccatcacgtggtgctctctttcctgatgtgttgtgcccaaatagcttggtctcatcagatgacttatttgctatgatatatatacttcaagagctgctatatgtat

SEQ ID NO: 14503 - DNA, 438 bp, Homo sapiens
aggtactttgtttttttttttttttttttttttggacttctaaaaaataatggctatactaattcatgtttccatgaactgtgtgcaagagttcccttttttctacatctttgccaacatttgttatttattatgattattcttttttttgagatggagtcttgctctggtgtccagactatagtgcacttggcgcattcttggctcactacaaccgtctgacttccgggttcaagcaatttttctgcctaagcctcccgagttgctgggattacaggttgtccaccactgcacccaggtaaattttgtattttttagtatatatggggttttaaccattttgggccagggcttgttcttaaaaactttctggaccttcatgaatccacccccgccttcaagcctttctttaatagcgtgtaaaccatctgggggtgc

SEQ ID NO: 14504 - DNA, 325 bp, Homo sapiens
ccgggcaggtactccagggtgccccccaactcctgcagccgctcctctgtgccaggccctggaaggaactttcgctccacctcaatcaagccctgggccatgctacctgcaattggctgagcaaacgtttgctgagttcccaaggatgcaaagcctggtgctcagctcctggggcgtcaactcagtacttgcggtcagtggcgttgctgatctgggggaaatacgcgtcgaccaccaagaagaaggccgaggccaggaaggccagcaccccgatggcactgccatagcggcaggcatcctcgttgcggttgaacacgcagtacct

SEQ ID NO: 14505 - DNA, 405 bp, Homo sapiens
aggacaaatcctggtgcaactacattcactctaattatctttcttgctacctctgtagcaagagcacgtgaaaatccaactaatcctcctttactggcactgtaaacggactggccagagttgccttttaagccaacaatgcttcctacattaacaatagaccctccctgttgttgaatcatagtcctcatggcagctttacaggtcagcatggaacccaagaggttagtatgaagctgagataccatatcttcagtttttgttcttactaaaagaccatccctgttaataccagctgcatttaccaagaaatttactcgacctaaatgtttctccatctcttcaaatgtattttgaacatcatgttctttagcaacattacagctaaatgccaaatgatctccg

SEQ ID NO: 14506 - DNA, 288 bp, Homo sapiens
aggtacttttttttttttttttttttttttgcaaatgggccctttatttctgaactgccaccactgcacggataaggccacttgggttgcaggcacactgtggagtgtcaggggacagagaggagaggggctgcacaccaaaactgccctgtcctcacggagaggaaaagcggccgaagtacggggggcctgtggatgctgcgcctctccgaacgcaacatgaaggtgctccttgccgccgccctcatcgcggggtccgtcttcttcctgctgctgccgggaccttct

SEQ ID NO: 14507 - DNA, 412 bp, Homo sapiens
aggtacatttcttcaatcacaaaatttttcaccaatctatttatgtctagtatcagaaagttaagcaaggagattgcaaaccaacacaacacctttagtctggattttcccggagccccatttgtgttagtgtcctcgggctactgtaacaagttctcaataatgtggtagcttcaaacaacaggaatggaatctctcatagttcagaagtccagatcagtttcactgggctaagatcttggagtcatcagttctggctccttctgaagctctagggagcagtctgatttagctcttccagcttctggtggcttctctctcccgggatgtggacacatcactcagttcttggcaacctggttgcattcttaatttggtcctgtaattcttcattgctgtattaactttctga

SEQ ID NO: 14508 - DNA, 401 bp, Homo sapiens
ccgggcaggtacacttttcaccccacttcctctgccatcttggtcctgctgtcctgaggagctacctgtgcaccctgcctccggctctcctgagcagagagatcctgatggctgactcagaagcactcccctcccttgctggggacccagtggctgtggaagccttgctccgggccgtgtttggggttgttggggatgaggccattcagaaaggaaccagtgtctcccagaaggtctgtgagtggaaggagcctgaggagctcaagcagctgctggatatggagctgcggacccctggctagatacataagccaaccctcgagcagaggccgccttggatttgggggcgcttccggtttcttgatcaatggctctctggccttcggtctttgggtgggggg

SEQ ID NO: 14509 - DNA, 414 bp, Homo sapiens
ccgggcaggtacttgctgaggcaactgcaacgcgcagcatggctgtttcaaatattagatatggagcagcagttacaaaggaagtaggaatggacctaaaaaacatgggtgctaaaaatgtgtgcttgatgacagacaagaacctctccaagctccctcctgtgcaagtagctatggattccctagtgaagaatggcatcccctttacggtttatgataatgtgagagtggaaccaacggattcaagcttcatggaagctattgagtttgcccaaaagggagcttttgatgcctatgttgctgtcggtggtggctctaccatggacacctgtaaggctgctaatctgtatgcatccagccctcattctgatttcctagattatgtcagtgcccccattggcaagggaaagcctg

SEQ ID NO: 14510 - DNA, 363 bp, Homo sapiens
ccgggcaggtacgcggggggagtccttgcagggtggcctgggtgactgctcaccagcccggccctccccagggttctgggccagagcctccctggccgttggagcgggagctgtgggtggaacacttctgaattgggagattgcctcggacctccagacgccgaacatctcagcacatcccgctctgggctttaaacgtgacccctcgcctcgactcgccctgccctgtgaaaatgttggtgcttcttgctttcatcatcgccttccacatcacctctgcagccttgctgttcattgccaccgtcgacaatgcctggtgggtaggagatgagttttttgcagatgtctggagaatatgtacct

SEQ ID NO: 14511 - DNA, 413 bp, Homo sapiens
ctccaggaacgccgaccactccactttaggtatcatacgcgccacgaagttggggttgaattccacagggcagatacggacctcggtggcctggaggcgcagggggaagccacgggaccccaccccccgcacatgcgagctcagcagattgtgggtaagcagtttcatgtcgccgcacaaactcccccgcgtacctcggccggggcagaagttgagaccacccagcagaggagctaggccagtccatctgcatttgtcacccaagaactcttaccatgaagaccctcctactgttggcagtgatcatgatctttggcctactgcaggcccatgggaatttggtgaatttccacagaatgatcaagttgacgacaggaaaggaagccgcactcagttatggcttctatggctgc

SEQ ID NO: 14512 - DNA, 356 bp, Homo sapiens
aggtacgcgggggcagttccttggagagcttggagccgcgcgccggagggaataggaaagcttggttacaacccgggacacccggagcttcaggatggttcgtaccttactagttacccagcaagtcactaacatacagaaacattcatcatgagaagcaagaaacactacccatcccttctgcattttagcaacttgttactcctaagcaacagtgctcacatcactgaggtctgtgaacaaagttcacattttacatccttaaagagcatttgttgttatctgaacctctgctctgctcttcccaaagcataaactagtgtttttatgaataataaaatcttcgtacctgcccg

SEQ ID NO: 14513 - DNA, 194 bp, Homo sapiens
  misc_feature 40: n = A,T,C or G
ggtatgtctctctacttatgtcgaattgaagctcactcgnccgggcgggcgcccgggcaggtacgcgggggagaaccccaataataacccgatccaccccaacctgcggtccaccgtctactgcaacgctatcgcccactgcggtgaggaggagtgggacttcacctgggagcagttccgaaatgccacactgg

SEQ ID NO: 14514 - DNA, 466 bp, Homo sapiens
ggtatgaccatactacttcgggcgaattgtacctgcccggcgggcgggcgcgcgggggggttccggttgtctggagcccagcggcggatgtgagagtccgtagggagcagcttccaggatcctgagatccggatcagccggggtcggagcggctgctcaagagttactgatctatgaaatggcagagaatggaaaaaattgggaccagagacctgttaccattgaacaaggaacatcataatggaaatctcacagacccctcttcagtgaatgaaaagaagaggcgggagcgggaagaaaggcagactattgtcctgtggagacagccggtcattaccgtgcagtatatttctctggaaatcctggtaatcttgaaggaatggacctcaaaattatggcattgtcaaagcattgtggtggcttttatactgctgattgctgggcttatagcttcggattatggtgg

SEQ ID NO: 14515 - DNA, 320 bp, Homo sapiens
ccgggcaggtacaaggttaatattattttgatgaattctgtattcattcaactgctaaatcacaggatacaagacctgggttgaactttttcttaaatagtttacatgggcagtccctggtttgctgggcagtttcctgtctcatcaaatccctggcaagctgggagggagggaggagatgctgagcagcctctatggtccttcttgaaccaagctgctccctgctggatatgacaatggctcagaagcagactagcaattctcaaaggacagggagaaaaatcaccacagttgctggcagaaaacagccagcgtacctg

SEQ ID NO: 14516 - DNA, 165 bp, Homo sapiens
ccgggcaggtacgcggggcctttccgggctgtctgacacgatgcaagtgtcagcttgtgttggccggttgcctttctttcgcaagaggggaaaatatcctcacagactttctgtgttctcagagacgatcttcttccctagaaagaagtcgcttacggttggcgt

SEQ ID NO: 14517 - DNA, 418 bp, Homo sapiens
ccgggcaggtactgctcgcctccgttcttttgatgtaagcgccctgcgagctttatttgaatgttcctgttcctcttccctttgtgccttccgcttctttccctttttggaaggtgctctgtcatctacatcttcttccagtgtttttctttgttcttcaggttttgcacatgatcttttcactcagggcccttggatattctgactgctgagaactttttggcttcggctttgtctagaaacttctgatatttggcaatcttctcatccagtgctttaataacggctttggtgtcgtttcccacattttcctcctcaggctccgaggaagactcttccgcatcatctctttggtgctcctgttcctcctcctcttcatcataaaagctctgaaactcttcctcaagatctgacacct

SEQ ID NO: 14518 - DNA, 468 bp, Homo sapiens
gaacgctatcactacttagggcaattgagctccccgcggtggcggccgaggtacttggttcttttttttttttttttttgctgctccagtcaatgaaagggacactttattgaggctccagggccacggggcctgggcaggaggctgcccttcaaggaaagaaccaccttatttgaccttcttcttgggacgcacgttgttggtgtgaccacactttttcttgcgacagttgaccactcgagggtgaaggcgagcatagcacttgcggcagatcatcttgtcgcaggtgtatttttgggcaagctggcggaaagaaggctcaataatgccacctcgcaggcgcaacaccatgtgcagggtggactctttctggatgttgtagtcagagagagggcgggcattctccaaatgtttgcccgaaaatttcaaaccctggtggtcaaggtgggaatccctccttggcttgaa

SEQ ID NO: 14519 - DNA, 419 bp, Homo sapiens
aggtacgcgggggatcacctgaggttgggagtttgagaccagcctgaccaacgtggagaaaccatgtctctgctaaaaatacaaaattacctgggtgtggtggctcatgcctgtggtcccagctacttgggaggctgaggcaggagaatcacttgaacccgggaggcggaggttgcggtgagctgagatcgtgccattgcactccagcctgggcaacaagaacgaaactccatcacataaaaaaaaaaaaaaaaaaaggtccgcgggggaggcgaacaatggcggagctgggcgaagccgatgaagcggagttgcagcgcctggtggccgccgagcagcagaaggcgcagtttactgcacaggtgcatcacttcatggagttatgttgggataaatgtgtggagaagccagggaatcgc

SEQ ID NO: 14520 - DNA, 476 bp, Homo sapiens
ggaaattatcactactactacttagggcgattgacctgcggggggcggccgggcaggtactcgctgtggcagctgcaacgcgcagcatggctgtttcaaatattatatatggagcagcacttacaaaggaagttggaacggacctaaactacatgcttgctaaagaagggggcttgagctctatagataggctggggagcacttaattttttccaatttaaaaaggggattgtttcctggggctttaacccccctgacctttgataaggatgggacaaagccatctgggcagtcaggggcaaggactgttggaggagagttagcccaagtataggctctgcccagatgccatcacatccctgattctgcggatgcttcgaagcaccttccctgagaagggaagaggggaatctttggactaggttcttggctccagacctggaatccacaaaagccaaaccagctcatttcaacaa

SEQ ID NO: 14521 - DNA, 350 bp, Homo sapiens
ccgggcaggtactggcttctttaacagcgatgaacgttcttttccctcctgggttgttcatccacgacagtctctccctgtgctccttcatcacctttccctctctctttgatggctacagagtggtagggcctggtgcttagtcgatgaaggaatgggaacccatttacagtgctggttgaaaattcccgccagagcgctggaaacctggcgctcagatcttctctggtgatgaagaggcgaggaatcaagtgactgatctggaagaaatatctcgcagcactgcagctaacatcacagaacttaagtgtgttttgtgtgtgtgcccacacgtagacaaatgtgtacct

SEQ ID NO: 14522 - DNA, 421 bp, Homo sapiens
aggtactgacttctttttcttttcttcttgcctgcttcgttcagccttgacaactcccttttctgctgcatcaggctttcctttagctcgatatgcagcaatatccttttggtatttttccttcagcttggcagccttcttttcataaggctgcttgtcatctgcagcagggttatttccacatatgttccaggtgtttcgtaacatcaccaatggacaggccaggaggctctcctttgatttttgggcgatactcacagcacaataggaagaaggccgaaggaggcctcttgggtgcattgggatccttgaacttcttttttggctcccctttgggagggatataggccttcattactctttcataacgggccttgtccgcttttgccatatcttcaagatttcctttgtctttgccagg

SEQ ID NO: 14523 - DNA, 418 bp, Homo sapiens
ccgggcaggtacttttttgattcttcttttttccctggctctcatcatcctgcccagcttcagtccattccagagtcgaccagaagctgggtctgaggattaccagcctcacggagtgacttccagaaatatcctgacccacaaggacgtaacaaaaaattctggagaccccaagtggtgaagtccagactgagggagccacctggagccaaggatgcaaatggctcaacaaggacactgcttgagaagatgggagggaagccaagacccagtgggcgcatccggtccgtgctgcatgcagatgagatgtgagctggaacagaccttcctggcccacttcctgatcacaaggaatcctgggcttccttatggctttgcttcccactgggattcctacttaggtgtctgccctcaaggg

SEQ ID NO: 14524 - DNA, 479 bp, Homo sapiens
  misc_feature 236: n = A,T,C or G
aggtacagtgccatttcttagaaatcactcctcacgggaacacacacttatgagtgacgtgtagagattttagttagttagttagttagttagttattatgtgcgcggggaggtggggggacggagtttggctcttgctgcccaggctacagtgccatggcccttaggggacttaaaggaggtcacccttatggcagaggaggacacgttaattctggagcgtaaagggccgcaancgaaagggtggcaggggccccgcgctttttaaaggcttgacaatccctggcgggctcaggccctgttcgttttccaagcacttttgggaaggcaccaaggaaagggtggatcatttttgtggtcaagcgaggtttcgaagactcagccgtgggccccaacgtggggaagaaaacccccgttcttctacttaaaaaatttagaacgaacgaaggcctggcccggctcttagaacctaggtgggg

SEQ ID NO: 14525 - DNA, 404 bp, Homo sapiens
aggtactcctaggcctctctgggagtggccttctgcgtttttaaattttatttattttaaatttttctttttcttttttttttaagacagagtcttgctctgtcacccagctggagtgcaggcgcgatcttgctactgcacctccgctctaggtcaggtgattttttgctcagcctcctgagtagctgggattataggcgcctgccattacgccaggctaattttttgtatttttagtagagacggggtttcaccatgttggccaggtggtcttgaactcctggccttaagtgatctgcctgccttggcctcccaaagtgctgggattacaggcatgagccaccacgcccagccttctttatttttaagatggggtctcgctctactgtccaggctgcagctgg

SEQ ID NO: 14526 - DNA, 413 bp, Homo sapiens
ccgggcaggtactttttttttttttttttttttttttttggtttgctaattgctttattcaaaagttgagaccacccagcagaggagctaggccagtccatctgcatttgtcacccaagaactcttaccatgaagaccctcctactgttggcagggatcatgaactttgggcctactgcaggcccatgggaatttggtgaatttccacagaatgatcaagttgaccacaggaaaggaagccgcactcagttatggcttctacggctgccactgtggcgtgggtggcagaggatcccccaaggatgcaacggatcgctgctgtgtcactcatgactgttgctacaaacgtctggagaaacgtggaatgtggcaccaaatttctgagcttcaagtttagcaactcggggagcaaa

SEQ ID NO: 14527 - DNA, 414 bp, Homo sapiens
ccgggcaggtacaatatttaagacacaaattcattaggtatgggctcaggacagcttgctcttatttaatacttgcgtgcttgtggttttgcacaatggatgggtattagagtttgccttggatacttggcattgattagactgttctgaaatttggttatgcttaagccaaaaaattctgtttattgttcttcaacaagaatagatgtagccactttaaaaatagttacattgttttccagattaagtaaatatttcagttaggagaatacatatttttatttttattttcagtttttgagatggagtctcactctgtcacccaggctggagtgccgtggtgtaatcttagctcactgcaacctctgcctcccaggttcaagtgattctcctgcctcagcctcccgagtagct

SEQ ID NO: 14528 - DNA, 38 bp, Homo sapiens
aggtactttttttttttttttttcccggggagtcggcc

SEQ ID NO: 14529 - DNA, 410 bp, Homo sapiens
  misc_feature 279: n = A,T,C or G
ggcgcggtggctcatgcctgtaatcctaacactttgggaggccaaggcgggcagatcacaaggtcaggagattgagaccatcctggctaacacggtgaaaccccgtctctactaaaaatacaaaaaaaattagccgggcgtgatggcgggcgcctgtagtccagctactcgggaggctgaggcaagagaatggcgtgaacccgggaggcggagcttgcagtgagccgagattgcgccactgcactcccgcctgggccacagagcgagactccgtctcanaaaaaaaaaaaaaaaaaaaaaagtacctcggccgcccgggcaggtacttttttttttttttttttaaagtaactggtctgtaagtgcatatctctagaacgtccccgcagatgaatgagggccagtggcct

SEQ ID NO: 14530 - DNA, 385 bp, Homo sapiens
ccgggcaggtacgcggggcgcttgcgcgggttgagggcggtggctcaggctcctggaaaggaccgtccacccctccgcgctggcggtgtggacgcggaactcagcggagaaacgcgattgagagcagtgtgtggattacactatcactggaaagaattcctaatttgagaaaaaaggaaaaagactggaagatgcaaaccttggttcctgttagtggaaacactgtaaggtcccagaaatggaaaagaaaatgaaataaatcagcagttatgaggcagagcctaagagaactatggcaacatcaggtgactgtcccagaagtgaatcgcagggagaagagcctgctgagtgcagtgaggcgggtctcctgcaggagggagtacct

SEQ ID NO: 14531 - DNA, 416 bp, Homo sapiens
aggtacttctgcctcagcatctcggagaatgtagttctgctcatctggaaaacagaacagcacatactctgaaaagtgtggacacgtgaagtgtggcaagtgtgacccacaaaattctcgcccatattcagcgtatggaccagtttgctgactgctgggccgggaccacccacatcatgacagaaatgcagggatctgttcaccaacggccagaaatacaaaatcaatccctgagtcaaccagcagatagaaaggctgctttttaggtgaaaggagaaaaagaatgtctataatttggaaaaacaaaaaatgatgaataaaaaaaaaaaaaaggttcgcgggtaactgggtttttaaaatagctgaatgtaatatttcatcaatataacctttcccccattctttgtggttggggt

SEQ ID NO: 14532 - DNA, 521 bp, Homo sapiens
tgaaagtctcatactttggttatggcgctccccgcggtggcggccgaggtactttgtttttttttttttttttttgcttcgggtgaatcactttaatgctgttaacggcaagtctgtaaaaggttcaggacaaagttcttttttctttcttttttaattataaaactaacagctgttagaatctttttttctttttttccttttttctttttccccaccttccaaaatacttctggggagatgcatttttaattttaaaatatataattattgcacaaaccaaccaaagaggttatattaaactaaaggaaatatattacaatagagaaaaacccccatccccgtcaaaaaaaaggattcagcatttctcttccattcccacccccccttacttgaaggttttgaagtgggaaagtggaccctccactcttctcgggtggtcccttgaccccacgaatcccctttcacttcattgggggaggcccacccagatttagggtcccctgccccggggcgggccg

SEQ ID NO: 14533 - DNA, 419 bp, Homo sapiens
ccgggcaggtacttttttttttttttttttttttttggattttttaatagagatagggtttcaccaggttggccaggctggtgtcacaactcttgacctcaagtgatctaccacccttggcctcccaaagagctgggattataggcgtgagccaatgggccccggcccacataaaaattttttattagctactacagcttaaagtagctgctatgggagtgtggcctttttgattaaatactagctgatcaaccctagaatataaattcttgttttataacatttagatttaaataacaataagaatgtaagctccatgaaggcaagaatgcctttttattttgttcactgctgtgtctaaaataatgcctggctcaaatatttggtgaatgagtaaatatgctgactttgctgaagta

SEQ ID NO: 14534 - DNA, 438 bp, Homo sapiens
  misc_feature 4: n = A,T,C or G
tgangaggacacactatagggcgaatggcaacttgaacctccacgggggcggcggccagacatgcaggaagttgccagtgttactttaattggactgccttcgtaattcattgcctctgcttcaacaatgtgcaactcatcctttgcaccagcccctaaactgaccgttcttaaagataactggtgctcattttcatcattatccaccttaaagtgataatctttgtcggcctttagttcacaaccgaaaagatagttctgggggcctcagggggctcattgtccatgtccatcgaatcttccatcgggtgggcggccccccctttaggtagaaaaaaaaggcgcccgtgatataaaaaaacgctgctccaagagaacaaaccgcgcaggacggaatcacaccagggaaaggacgcaggctccccgcgtacctgcccg

SEQ ID NO: 14535 - DNA, 425 bp, Homo sapiens
  misc_feature 22: n = A,T,C or G
actcagtgagatctggccgagngacgcgggggaatccagaagggaaacttgcactggataattaaaaactgctggggagaaaactggggaaacaaaggagtcatcctcatggctcgaaatattttcaacgcctgtggcattgccaacctggccagcttccccaagatgagactccagccagccaaatccatcctgctctaccaattcttccacgatggcgcagtgtaacgatgcacttcggaagggagttggtgtgctatttttgaagcagatgtggtgatactgagattgactgttcagattccccatttgtttgtgcttaaaatgatccttcctactttgcttctctccacccatgacctttttcactgtggccatcaggactttccctgacaggtgcgtacctaccctaatgggcgttctcc

SEQ ID NO: 14536 - DNA, 554 bp, Homo sapiens
  misc_feature 22, 36, 41, 136, 153, 241, 255, 270, 290, 292, 310, 311,342, 345, 400, 431, 443: n = A,T,C or G
ggagagcacacagaacggcaanggactcagcgtatnttcgnggcccgggcagggacgcggggaaggccagcttgaagcccagccggtgggaagcggaggcccgcaacgcccaacagagagagcctcgaaacggganccggccgcatttcgagncacagcgggcacagaccccggcagagggacagcgccaggcccaggaggaagaggccccgcaggacaacaaaggccaaaccggagggcngagaaacgccaccnaaacggcgcccagcnggaaaaaagggcgaggaacncnaaacccgggcgacagccnnaggacagcaagcaaaccgcccaggcagaacncangccaaaaagaccaaccaacccgccccggagaggggggaagggcaaaagaggacgngcggaagaaccaacaggacagccaaaaagcncgggagggcacngaaggccaagcaagaaggcagggggacccccggggcccgcccaaaaaacgaagggggaacccccccggggcgagcagggaaaagccgaaaaacaaagccaaaaccgaaaag

SEQ ID NO: 14537 - DNA, 516 bp, Homo sapiens
aggtacactgtgtctctatgtgaatatggacagttagcatttaccaacatgtatctgtctactttctcttgtttaaaaaaaaaaaaaagaaaaaaaaaaaactgtacgcgggggaggggctctgccttctgcagtggcgctgtttgggcccctggcggattgtaagctgctggtttttgcgcttggaaacaccggcaagaagggttcggctttttttcgtcgagaatcccggccacggataatttgctggccaaaagagtcctcatcccgcattggggtttgaaacctattcagcccttcccgaagaaaaaaaaaatttggggattctaaccaatttgggaagggcaaaaaaactttgggggtttttggaaaaaggaaaaaccccaaaaggtttttgcaatttttggggggccccaaaaaaaaaaaaaaactccttcgtggggctgtctttggttttttgaaaatacaacaaatataatctttttttcctcccgaacccgggaaaaaaaaaaaaag

SEQ ID NO: 14538 - DNA, 594 bp, Homo sapiens
  misc_feature 32, 59, 76, 78, 79, 91, 171, 172, 178, 180, 182, 263, 264,284, 314, 330: n = A,T,C or G
ggaggtaacccactaagggaagaccaggagcnccctcggggtgagctcaggcccggggnagagagatctgaagggngnngcctaagacaangacacatagaccacggacgggagaagcccatggaaggagggatttagctacccacagggcgggttttcttgagaaggagnncccacncngncacccggggccgaagggccaaacgcaaagaaacccgggaacaaaccggaccccccggcccgcccgggaaaacaagggaaannccacccgggccacaagcccncccggaggaagcgggggaaaaaccagggcntcccaaccaccacgcnggccaaagggaagaaagcccccaaggtaagaagaccaggggttgggcacccaaggccgggttccaggccggggtaccaccgaaactgcccgggaccctccaaaggggaaacccaccctagcgttgcgccgcccagcccaaaaaggaggccgggggaaataaacaaggccaagggaggcccaacttggcggcccagagacaaaaattgtcccccaacaaatcggccctgaaggaaacaaaggggttgcgcgcccatacaaaaaag

SEQ ID NO: 14539 - DNA, 447 bp, Homo sapiens
  misc_feature 205: n = A,T,C or G
ccgggcaggtactttttttttttttttttttggtaatcattgttatcgtttattaaacaacagggccacattcaaacgctttccaattctctctaaataacagcctaacgctgacgtttttgttggcctgtatctcataattatttttatttagaggaatttggtaattggcggggttggggtgggaggtggtctattctaccanatgttttcgaatttaacactctgcctactcatacttccgtggtatgctttcgtattcttcgcacacatgcaccatgcgatttcctgtttccggcgaacaaattaacagttaagaggttttattctcatatgaccccccattttctgtgtctccagccttattacaggtgtctgggcatttctgctttcacgtagagcatagtggcagatatattttccttaatccattcctaccagcttgtg

SEQ ID NO: 14540 - DNA, 356 bp, Homo sapiens
ccgggcaggacgcgggggcctcgacggcatccccttcacagtggatgctacgagccagatccactgcattgaggactttcacaggaagtttgccccaagatgctcagtgtgcggtggggccataatgcctgagccaggtcaggaggagactgtgagaattggtggctctggatcgaagtttttacattggctgttacaagtgcgaggagtgtgggctgctgctctcctctgagggcgagtgtcagggctgctacccgctggatgggcacatcttgtgcaaggcctgcagcgcctggcgcatccaggagctctcagccaccgtcaccactgactgctgagtcttcctagaagtacct

SEQ ID NO: 14541 - DNA, 570 bp, Homo sapiens
  misc_feature 533, 535, 539: n = A,T,C or G
aggtactatttaatatatttctccatgaactttttgtgaaattcagatcgcagtgtgtcatttacaaatcttttgtctttcttctggtcatctacaccttttgcacagttcttgaagacaacgtcatcatcccaccttctttaactttgaagttggcctgaggctgggatggggaaaaggagaaggtgatttgagccaactttcaaagcagtattcaagcagagacctaccctctcatacaaagataaaatacagacagactactcaggatgcccctgaagaggttcgtaaccgtgacttcaggagagagttggaagaaagagagagagctgctgcaagagagaaaaatagggatcgtccaacccgagaacatacaacctcctcttcagtgtcaaaaaagccacggttagaccagattcctgccgccaaccttgatgcagatgaccctctaacagatgaggaagatgaagattttgaagaagaaagtgatgatgatgatactgcagctcttcttgcagaactggaaaaaattnanaganaaccaggaaaaacaaaaggagtacctgcccg

SEQ ID NO: 14542 - DNA, 441 bp, Homo sapiens
ccgggcaggtacattcccctctgcgttgaatgatagcgtgtgcgtgttccaccactgtgccctgttcaaagttagctgggtggctgtgccctgctcaaagtcacttgggtgaggggcgcccgtgggagccaaaaatcccatcttacacccaccccctgcacactgtggagttgggctgtgacatgctggagaaaggtgtctttgtctaattattctgcctaaaggcatgccttttgttaattagtaaaaggaagccttatttgtgctctgcaaagtgggggtgctggttaggaagtaatttgtgtttgaaccacaccgaccaggaatgatttaatttaaattaattggaatctttgaaacctttcttaccccatgggaaacgcaaaattaggtttccccaaaattatttattaaagaacctatgaaaattatggttggatt

SEQ ID NO: 14543 - DNA, 422 bp, Homo sapiens
ccgggcaggtacctctctgcattatcccgccagacactgtattttatgcattcatgtctaggatacagtgtgaaaattaaaaagtttagagggcagatgcaattgtggcaagtgacctgccaataaagcaggtgcagctatagaagctggcataggtatatccttaatggtgctttctccctgggcttgtctttttgttgtttttttccccctatattcagagctccttgagaagtgataaacacctccagctttctaacatcctccccacaccatctcaccatatccatctcccagcatccatctgcattcagctaagggcgggaaactgacccagtgcctgtgttgcagaccatttctgaggtctccaccatccaaggaggcacagccgtcattactgtcctccatgccttcagcagccc

SEQ ID NO: 14544 - DNA, 465 bp, Homo sapiens
ccgggcaggtacgcgggggagactgtcccaagggtgctgaagaatccagtggcaggggttctggctgctttccatctgaatgtgggatgggaggggtgttcatgatcatttggatatagcaatctacttctgagaaatggaacacaagggagttacctatcacctttcacttattaattccaaaaagatgactacaaccatgtccatagctcatgattcaaacagttttccatatcacattttgggtggataggatgatttacagtatttttcttttaattggcatcacccacttaaccatttcctttacattccttttttgcatagttgtggtttttctttattatttaaaccatcgattctgaccatcgtaatatacttttgccatggtatttgatttttacagaaacctgttgtcattgactttatgttatactcattccttaaaaaaacccctgtttttct

SEQ ID NO: 14545 - DNA, 430 bp, Homo sapiens
  misc_feature 164: n = A,T,C or G
gagtggcaaagcaggcaaacacgtcgtcggtgcaggagaagtgggtgaggtgcgggaggatcacggactgaccccggcactggccccacatgtacctcggccgaggtacgcgggtcacacatgacgggtttggcttcatgctggcgtttggggacatggcctgngtgcccttcacctacagcctgcaggcccagttcctgctgcaccacccgcagcccctggggttgcccatggcctctgtcatctgcctcatcaatgctattggttactacatcttccgtggggcgaattcccagaaaaacactttccgaaagaatccttctgaccccagagtggctgtgcttgagaccatctctacagccacagggcggaaactgctggtgtctgggtggtggggtatggtccgccatcccaactatcttggagacct

SEQ ID NO: 14546 - DNA, 433 bp, Homo sapiens
aggtacgcgggggccgccttcgccgctggctccgtctgttggggggcgaacacgccgcggtcctcgtcgtgatggctctgagagattcctctgcgaatctgtttttagctatcaagtggcatccacgcttaaacaggtgaaacatgatcagcaagttgctcggatgggaaaaactagctggtttggtagaagaagctggaggctgacgagtggcggtttaagcccatcgagcagctgctgggattcaccccctattcaggttgatactgcctggatggtcacctctggtgcgcagcaagtgcaaagccagtgggggactttctcacagtttacatagccatccagagatccacagctacgtcactgaattgttaatgcccatttgtacctggccgggccggccgacccggcaaggtccctttttggtttaaca

SEQ ID NO: 14547 - DNA, 428 bp, Homo sapiens
aggtacttttttttttttttttttttttttttatggcaaaaatatttattattgaacaactgagtgtttcattcacttcacattttacacatacttaacacaagcagaaggggaagtttcagtgtcagaagcaggggtcgttctccttaactgaaagactattaggaggagagcctttggtgattagcaatccaaatttgatattttttaaaacaccattaaaaataaaggttgcctataaaatatggaaacacataatattttctgaaaatctttttggaagaatgtctttttatcttcattggtactatcttagacattttgagggttatttaacacagcattccatctgcttaacatttaaatttagacacactgattatctgttctactctcctgaatagttaagtaccttggcccgtctagaa

SEQ ID NO: 14548 - DNA, 429 bp, Homo sapiens
ccgggccggtactcgggcatcttcaataccagcaagaagctattcagaagaatgttgaacagtcatcggatctacaggaccagttgaatcatctgttgaaatagaatgacatgtaagagtgctgtaggactcctttgcctaatgctgaggagtaaataccttacacagctggtcctctgggtttggttttttattttcttctccaaaagttaagttagaaaagttctgtgttagggccgggcgcggtagctcacgcctgtaatcccagtactttgggaggccgaggcgggtggatcacgaagttaggagttctgagaccagtctggccaatatggttgaaaccccgtctttactaaaaatacaaagaattagctgggcatggttgggggcgcctgtaattccatcttacttgggaagctgaggctagag

SEQ ID NO: 14549 - DNA, 114 bp, Homo sapiens
ccgggcaggtacgcggggaccaagattaaacgggcatctcagaagaagcacgtgaacccggtgcaggccctcagcgagttcaaagctatggacagcatctaagtctgcccaggc

SEQ ID NO: 14550 - DNA, 718 bp, Homo sapiens
  misc_feature 206, 221, 277: n = A,T,C or G
ccgggcaggtacctgattctttgaacatattattgaactccaaaatgaattcgacctccattcaggcttcctgaaatctctgaagttgctgaaatttgtatataattttccttttccaatgcaagatctgctggtgacgggaatgactgtctggttttattatggtttataaattaataaatgggctatttaattctggaaaaaanaaataaaaaatttanggtccgcggggtcctggaacatttatgttccttttaaagaaacaaaaatcaaactntacagaaagatttgatgtatgtaatacatatagcagctcttgaagtatatatatcatagcaaataagtcatctgatgagaacaagctatttgggcacaacacatcaggaaagagagcaccacgtgatggagtttctccagaagctccaatgataagagatgttgactctaaagttgattaaaggccaggcatggtggtttacgcctataatcccagcattttgggagtccgaggtgggcagatcacttgagctcaggaggtcaagatcaacctgggcaacatggtgaaaccttgtctttacttaaaatacaaaaactttaattggcatgggggtgtgtgctcataagtccactacttgtgggggttaggcaggaggataacctgacccccgggggtgaggtacagtgagccagagtgcacttctggactttggccgtttaa

SEQ ID NO: 14551 - DNA, 378 bp, Homo sapiens
ccgggcaggtacgcgggagatccgtgcactgccttcagctctgggttgaacttacagctggactagaggatgggaaggcatcaaaaggaacccagcccaccaggaactaccagcttaggctctgaccaggaaagacaagtgttcaaggctttggggaaacttaaacccaacacgccatttgccgcgacgtcttcaatgggtttggaaacagaggaacaggagcccagcatcatcgggaagctgaaggtcgctggcatgctggcagtaggcaaagaagtcaacctggtcctactgctcaaaaacctgagcagggatacgaagacagtgacagtgaacatgacagcctggaccatcatctacaacggcacgcttgtacct

SEQ ID NO: 14552 - DNA, 827 bp, Homo sapiens
  misc_feature 302, 303, 304, 305: n = A,T,C or G
gtacaatttgataagttttgacatacactcttgaaaaaccattaccacagtttaaacaaacaagcaaaaaaactaaacatgtctatcacctcctacttttttctctataatccgtctcacctgccccaagccccatatacattggtatgctttgttacttagattagtttggattttctaaaactatatgtaaatagaataatacattatgtattatttgttgtctggattctgttagctcagcataattatttggaatttcacgtttttgcatacatcagtagttcattttcatattactnnnntggtgttatattgcatacaaatattacaatttgtttatccattcacttgctgatggatatttgggttggttccagttttagctatttcaaataaaaattatgagaacatttatttacaagtcttcatatggatgtatgccttatttttccttaagtaaatacctaaaagtggctaaatcatctgattggtgtgtctttagcattaagaaatggtaaaactgttttccgaagtggcttaacatttcacattcccaccatcagtgtgtaagaattgcatttttttggacagggactagtgtctaacgcctgtattcccaacaacttaaggaagcccagggcagccgaatattttggggtaggaatttaagacccgtctaaccaatttagtgaaaccctggctttcttaaaataacaaaatttacccggtgtggtggcaaatagccatggtgccaagcttctcggaaggtgaggcaggagaataattgaccctgggagggaaagcgctttatggccagatttcct

SEQ ID NO: 14553 - DNA, 334 bp, Homo sapiens
aggtacttttcttttctaaaaaaagtctttggttacggatttggtttttggatttgtgtttgtattatctttcctctctcagaaaaagaaatttcatgctttaaataaaatccagagacacaccctttcactgtgatgcaaaaaaggaaagggttcttgttacttgagaatttgtttctgatttaaacaaacgagacttagtttaataaaagaaagagaaaaacaaaagattcccaggttgttatgtgcttcttctgcaagcagagaggcaaatgttaatgacaattccatataccaaaagacacattttttacttcaaagttttgtccttgtg

SEQ ID NO: 14554 - DNA, 531 bp, Homo sapiens
aggtacgcggtggggtggcctgtgcggcgttggtccggtgcgtcctgttctacagctatggccgggccagctgcagctttccgccgcttgagcgccttgtccggagctgcggccttaggcttcgcttcctacggggcgcacgggcccaattcccagatgcctacgggaaggagctgtttgacaaggccaacaaacaccacttctttacacagcctggccctgttaggggtgccccattgcagaaagccactctgggctgggttattgctagcttccggaacgaccttattctgcaccagctattactaccaggctctgagtggagaccccagcatccagactatggcccctgcgggagggaccctgctactcttgggctggcttgcctcggctctttgagctcccttttgcttaattactgggttttctgggcagttttttttttaaagagtttggagtaaaaagaagattaaaaaggaaaggtccttcatgaacatatttaaaaataaaggttcctttccgggagggcgg

SEQ ID NO: 14555 - DNA, 822 bp, Homo sapiens
  misc_feature 96, 341, 534: n = A,T,C or G
ccgggcaggtacattgagctctctctggcatgctccccactctagttagaggggctggggtatggagagaccgtcccagccgggcgctgcagcctnctactcctgggcctccttgcgggtcaacttgtagatctcagtgggtcgtcacatgggtgatagtggtggtgagctggagttcttccccactatggacacccagatcgccattggactggtcttctccatagtttttatgggatggtgcatacaagaacatcagagcaaagacatacagattccacatcccatagatgcctgtgaaaaaggcactgttcacttggactgtgatgccgccccatttncaaggggccttcgttccctgactaacgatgaagaagatgacagtcatggcagcgcaggccaaggtgataagcatgaggaacttgaaccctaaaaatagcccctcatagtgtagccgccggactttgctcataactggcaggctggactgcttcccactgatgttccgaacacctgaaataccatgaagcatanaaacaggaagtgaagcagaggcagattccacccacgatgatgaaggccatggccagcttttgttcaatgtctgtagtccaaattctgtaaaagggattctgagtttgacctgggccggtttgaactagtggtacccccggcttgcaggaattcatattaaagcaattgattccgtccaactcgaaggggggcccggaacccaagttttgttcccttagggaggttaaatggcccttgccgaaacattggctaactggttcctgtgagataggtatccgttacaattcc

SEQ ID NO: 14556 - DNA, 600 bp, Homo sapiens
  misc_feature 147, 156: n = A,T,C or G
aggtacgtgtccaggggatgtcgccaaagcctttggagctggagcagattttgtcatgctgggaggaatgttttcgggtcatacggagtgtgctggagaagtgattgagaggaacggacggaagctcaagctcttctacggatgagnctctgacanccgccatgaacaagcacgcaggaggagttgctgagtacctttctcggggtgtctgcgtaactgcccagacttgccttggtttggtcagatgacacctcctctgggactggctagccagcgttcatgtctacattattgatctcgtcttccggtgtgtgagtcactcacctgtgagctcctagaggtcagcgactaaatctggttccatggggtccttgggccctcggagccctagcacaaggcccactactcagttggctcttaatcaaatctgtgaaacgaaatataaagttgcttttctactagaccttgttgggacaccaaggagccggcgtcggttgcttaacttggatgcggtgccctgacctaaagggaggcaaaagggttgtgaacgtgacatgactggtgacctacaccgagaagcttgagggtcttttaagctct

SEQ ID NO: 14557 - DNA, 356 bp, Homo sapiens
  misc_feature 55: n = A,T,C or G
cccgtccaagactatttgtctttgagctctgttctctcacacgtgtccggcctgngctggctggcctcctacctgccctccttcctccgtgtgcccaagtggattattgccctctacactagcaagttctaaccctcctggctgacacgtacgtctctgcttgtcttcccatttggacttggtggtttgtcctgtctcagtgaaacagcagcctttcttgtttacccataccctagatatgaagagaagccctctgctgtgtgtccgtggtgagttctggggtgcgcctaggtcccttctttgtgccttgggtttccttgtccttctttttactttttgccttaatattgaaaaat

SEQ ID NO: 14558 - DNA, 421 bp, Homo sapiens
  misc_feature 421: n = A,T,C or G
aggtacgcggggctccctgcctcaggctctcaccctcctctcctgcagctccagctttgtgctctgcctctgaggagaccatggcccagcatctgagtacgcggggacaattatgtgtcttggagttgctcttctcgaggagtatctttcagaaagttaagaaggatacccaggaattgaactcagctccacaccaagcagacgtaatagacatctacagaactctccaccccaaatcaacagaatatacattcttttcagcagcacaccacacctactccaaaactgaccacataggtggaagtaaagttctcctcagcaaatgtaaaagaacagaaattataacaaactgtctctcagaccacagtgcaatcaaactagaactcaggattaagaaactcactcaaaaccatgcaactan

SEQ ID NO: 14559 - DNA, 432 bp, Homo sapiens
agagctaattccctcttggcttcaaaatccatcctatgcttggagatgctggggctgggattctacaaaccacattctggctttgtgccctgataggctcagcccccagggggagctagaaggaatctgctaggctaaaggaggaagtaggaagtggccccttgctcacttcctgtttgcttcctgttcactttctatcagcttcctgtcccttgccagacaggttgctaaccctagcagtgctttttcttcacccaggcagtggcaactcctcccagaaacatttcaatgcagtttttggttttttcaacactcacaaaagcagcctcatgggggtcccctcagagacaccaacaaaacaatcttccctatttaaaggagggggcaccatccccacaggaattttcttagaacttaaaaataccacctgca

SEQ ID NO: 14560 - DNA, 424 bp, Homo sapiens
aggtacacctgcaaggctgtcaacagtcttggagaagccacctgcacagcagagctcattgtggaaacgatggaggaaggtgaaggggaaggggaagaggaagaagagtgaaacaaagccagagaaaagcagtttctaagtcatattaaaaggactatttctctaaaactcaaaaaaaaaaaaaaaactcaagatagtaaaagcacctagtgtgatagattatcggttaggtcatttgtgggttgattcttcagaaacagcagttgatacctagcagcgttattgatgggcattaatctatgttagttggcaccttaagatactagtgcagctagatttcatttagggaaatcaccagtaacttgactgaccaattgattttagagagaaagtaaccaaaccaaatatttatctgggcaaagtg

SEQ ID NO: 14561 - DNA, 342 bp, Homo sapiens
ccgggcaggtaccatcatccgatgtatagcctttccagcgaactttgtaaagaactttaccctcctcggtcttcatgtccaggatcttctccacctcgaacacatcctctccgtcctcctcactgtcgccaaaggcctccgctcctctcgcggctgcgtcattatcttcgcccactactccaactccttcttcgacttcggccaactcctcagtgctgtcggcagctgacacagggactgcggtcacccttgctccctccgcaacctgctccatcctagcagctccgcaaaccgccgagaaaaacccgctgcgacaaacaccccagcagcccccgcgtacct

SEQ ID NO: 14562 - DNA, 197 bp, Homo sapiens
aggtacttttctcgtcctttccccagggtgcacgtaaccctcaagcactaggaccgtgcggaatccaggctgcgatggcaccttcatttaccgcccgcattcagttgttcctcttgcgggagctaggctttctcataggcttagtaggccgagcagctttagtcttagggggcccaaagtttgcctcaaagacccct

SEQ ID NO: 14563 - DNA, 480 bp, Homo sapiens
ccgggcaggtactgacatcaaggactcaaaagcttattaccacctgcttgagcaggtggctccaaaaggagatgaagaaggtgttcctgctgttgttattgacatgtcaggactgcgggagaaggatgacatccagagggcagaatgcatgctgcagcaggcggagaggctgggctgccggcagtttgtcacaaccacagatgtttgtccaggggaaccccatgttgaactttggcttttatttgccaaccctttttaacagaatacccttgccccttgcacaaaaccagagaaaccaaggacatttggactgggggggctccttgaaaggttgaggacgaagagaaagaggcgggacattttaaggaaactgggatgaaacctcccctggggttgttaaaaccctcggagttcaaatccatttttgttaccctcggggcccgcctcttaggaaacttaggtgggaatcccccccggggc

SEQ ID NO: 14564 - DNA, 344 bp, Homo sapiens
ccgggcaggtacgcgggtgataccttccgagtggagtttctggtggtccctgtgggaggcctctcatttttagttaatcacgatttctctcctcttgagatcctctggaccttctccatctacctggagtccgtggctatccttccgcagctgcctatgatcagcaagactggggaggccgagaccatcaccacccactacctgttcttcctgggcctctatcgtgctttgtatcttggcaactggatctggcgcttttactttgagggcttctttgacctcattgctgtggtggccggcgtagtccagaccatcctatactgtgacttcttttacttggacct

SEQ ID NO: 14565 - DNA, 490 bp, Homo sapiens
aggtacagattagtgtgcacagagatctctgtagaaagagtagctgccctttctcagggcagatgatgctttgagaacatactttggccattacccccagctttgaggaaaatgggctttggatgattattttatgttttagggacccccaacctcaggcaattcctaccttttcacctgacccttgccccactttgccataaaccttagctaaagttttgttttgtttttcaacgttaatgtaaaggggcaaccattgccaaaatttaattcagaggataaagccttaggttaaaagttcatagaagtttcccattgaacctatattgacttgggccaacacagggatcctttttgtattttaaggggatttctgaggattttttgcctttgaagcaagggaatttaagataaaggggctgtttccttttaaaaatgttcttgaaaaattggaaaacaggaatttttcaaaaaaaaaaaaaaaacccct

SEQ ID NO: 14566 - DNA, 426 bp, Homo sapiens
ccgggcaggtacttttttttttttttttttttttgagacggagtttcgccctttcacccaggctggagtgcagtggggcgatctcggctcactgcaaccttcaccctccagtttcaagcgattctcttgcctcagcctcccaagtagctgggattacaggcacccaccaccaagcccagctaatttctgcatttttagtagagatggggtttcgccatgttggccaggctggtcttgaacttctgacctcaggtgatccacccgccttaacctcccaaagtgctgggattacaggggaaaaggcaccgcgcccagcctgcacagcactattttgaggacttacttagttttgaaacatgaatttttctttcatctcactcacctttacctaataaatcatttaaaaatgcaaataacaccttttaa

SEQ ID NO: 14567 - DNA, 199 bp, Homo sapiens; identical to SEQ ID NO: 12773

SEQ ID NO: 14568 - DNA, 782 bp, Homo sapiens
aggtgctttactcgaaaaaagcggagtaagagaaactaacgttgacttagcttgagccattcagaatggacagtttcttttttccattatgtaaagaatccagattatatcgcaataaccggaataaacttttacaactggaatatacaaaaacattttgaaatgttttttcatctactgatgttttatataaacaggattttttaggaataatttatacacagaaagtcattttatgtaacaaattggacatgttattacctttttttttcttacttaaaaaaatttttttttaacaagaaaactcagaaaatgcattatttgcggtgcatccattccataccgccttctggttcgattttttgtatcccagacaaagggatacccagaggtagacaaactctggcaaacctcttacctcaacctcactggcttagaaagcagacaggtgttttcaccgggcgtctattccaccggtggatgtgtgtgcaacgcccaacatccaaatgaaaaagtggaaaacaaaaccccaggtgttttcaaaaatttcttctatgtagcgcaaaaaccccaagtgtttcccatgatagaaatattgtggaattggggagacatggacaacaaatcaattggaattaaggaagtgatttaactttaaaaccaattttgggagagttaaggttttataaaaatcttttctgtttggaataccatattcgggttcttgatataaataaaaggggtcttatgtgtctacaaagcatttgagattggaagagggg

SEQ ID NO: 14569 - DNA, 803 bp, Homo sapiens
accgggcaggtacctgatttttcatgagccttacagacacacagagacacatacacattgatcttaaaattattctcagtcactgatatgcaaaggaccacactgtctctgcttacaggagtatttagaaatgtttcacattttactgaagacatagagatgatgctgctgcttaggtgccttttagcaagctatgcaaacaatcctgataaaacaagatacatagagagttaatctggcttctgagaatttaccaagtgaacagagtacgcgggggatgatcgtggactacaaggcgttcataccgggtgggctcaacctcggtagccgggtgcttaccatgctgtagcaaatcctctgcatggtggtggtggctgacaagaccttggagctctaccataagatctattgggtcagttacaaacataccgttcttttaaactgttttaaatgcaagtgagtatgcatgcactaatggtcacatatagtgactggttttattatgacgggagcacccaggtcacagagtctttcgctgaaccagacactgggacctcgggtatttaataactaatgtatttcaatgactgacaggaataggaattcatacacagatatttgacactttaagaggggtataatgcatcacttggataataatagtcatacgggataaaatgtgtacaagtgatattatagttaatagttattacattgtataaaattttatcctttcatatatttaacacatatctacctgatataataataaataaacttgggtgtctataagttgagttatt

SEQ ID NO: 14570 - DNA, 791 bp, Homo sapiens
ccgggcaggtacggccagggctattggttgaatgagtaggctgatggtttcgataataactagtatggggataaggggtgtaggcgtgccttgtggtaagcccgcgtaccatcttttccagagagagaaagtggaggtccagctgccagagctctaccacaaaataggtgttggcgcaatggcatggtctccacttgcctgtggaatcatctcaggaaaatacggaaacggggtgcctgaaagttccagggcttcactgaagtgctaccagtggttgaaagaaagaattgtaagtgaagaagggagaaaacagcaaaacaagctaaaagacctttccccaattgcggagcgtctgggatgcacactacctcagctagctgttgcgtggtgcctgagaaatgaaggtgtgagttctgtgctcctgggatcatccactcctgaacaactcattgaaaaccttggtgccattcaggttctcccaaagatgacatcacatgtggtaaatgagattgataacatactgcgcaacaagccctacaggaagaaggactttagatcataaggcaatgcatgaaccacagaagctgcatggttaaaatagcggcctgtgcccaataccctcggccgaagtacacgcctgggccttcgacagctgtttctattgaagtgttgttgctgatacctatcccagacaggggacctttctaccagacccagtgttagcacaacaaatagcatggaacattcacgaacagcccctgctattgttacacagcttaaccataaccggg

SEQ ID NO: 14571 - DNA, 687 bp, Homo sapiens
ccgggcaggtacgcggggacacagggctcttgctcttgcagaatccacaggtctttcttgaggaaatctgtagacagaactttgtgctgcgtttttatctacggaaggaacagacgagtgtcgctcctagaaatctagcactggagaaacgaggaaaattcttccagcgatggtctgccactcagagctgaggaagcttttctactcagcagatgctgtgtgttttgatgttgacagcacggtcatcagagaagaaggaatcgatgagctagccaaaatctgtggcgttgatgacgcggcgtcagaaatggagctggtgaatatgcaggttttgatgagacgcagccaacagctgaatctggtggaaaaggaaaagtgattaaacttttaaaggaaaaatttcattttaagaaaataatcatgattggagatggtgccacagatatggaagcctgtcctcctgctgatgcttacattggatttggaggaaatgtgatcaggcaacaagtcaaggattacgcccaatggtatatcactgattttgcagagctgctgggagaacctggagaataacattcattgtcatacaggtccaaacaactttagatgaatttttcccagttacacggaatgaatctgtttgcttacaattgcctattaccacttgctttagagaggtgggacctg

SEQ ID NO: 14572 - DNA, 119 bp, Homo sapiens; identical to SEQ ID NO: 10958

SEQ ID NO: 14573 - DNA, 495 bp, Homo sapiens
aggtacgcggggagagaccagagctgccaccgctgctgcttccaggagtgtgcaggtggcagctgccgctgagcccgcggcggaggatggcagggcttgttccagaaggcttgagggtccccgagtgcaccgccctaccaccaatttctggtttttcctgtgggagcccaaggagcaagggcagaatgaggaacatgatgtttcttaccgacagttactcatgacgtctccatccaggactgaggggggcatgcttctccatctaggactgggggcatacttctccatccagtattgggggtcttactcctacatacaggacttgtgggtcatgctgcttcatccaagacctgaggggtgttcttttctgcgcttccttggatggcagtctttcccttcatgtttatagtgacttaccattaaatcactgcgccgcttgttcctgctcaaaggcttcggttgcaggacaggatttggattatgcgttcctgcccg

SEQ ID NO: 14574 - DNA, 850 bp, Homo sapiens
  misc_feature 611, 772: n = A,T,C or G
ccggcaggtactgagtataaaacaatataaaacaatatgagaaggtctctctcttccctcaagagtgtatgactttgctgcccaggatgatcttgaactcctggcctcaagctattaatttcttcccaactcagcctcccaaagtgtgggattacaggcatgaaccacagcgcccagcttaacaggatttttcagagagaaaaagttttttaattttaatgaaatccaccaatttatctattttttcttttacggcatgtgcttttggtgtaatgtctaaaaactatacctacgcctaggttgtaaagatagtctgttttcagttttatagctttccattttacatttagatatatgatccattttgagttaagtttgtattacatgtaaggttggggttcctttgttttggtctttgacaaatggaagtccacaacatttattgaaactcttcttcctccattggttttaagataaatccgttggccatacttctgaatgtctatttatggattccctatcttattttattgatgtgtatttttgtctctcctccatggatacatgaaggaaagggccttggacacaaagcagtggggaaaggggctggngggccacacagagaaaggagaaggcactaagatcaggctcagcagcttctggatctgaggcgccggaaaatatttatgggtcaatctggcagcccctgggccttaagttggactgtgttacaatgaaaaagccgtcctgggtgcacccacaaggttacttnggcggtctaagactagtggaatccccggctggaggattcatattcacttattgttaccgcaactcaagggggggccgt

SEQ ID NO: 14575 - DNA, 356 bp, Homo sapiens
ccgggcaggacaccatcccttccattggactggctttgttggaagaaaagctcagatatagcaatgagaaataccaaaagtttaaggcagtggaagaaagcctgcgtaaagagctggtggatatgctaggtgatgatggtgtgttcttatatccctcacatcccacagtggcacctaagcatcatgtccctctaacacggcccttcaactttgcttacacaggtgtcttcagtgccctgggtttgcctgtgacccaatgcccactgggactgaatgccaaaggactccctttaggcatccaggttgtggctggaccctttaatgatcatctgaccctggctgtggcccagtacctt

SEQ ID NO: 14576 - DNA, 203 bp, Homo sapiens
gcatgctgcagacccgtcagggcgatgtacgcggggctcttcctttctccgccatcgtggtgtgttcttgactccgctgctcgccatgtcttctcacaagactttcaggattaagcgattcctggccaagaaacaaaagcaaaatcgtcccattccccagtggattcggatgaaaactggaaataaaatcaggtacctgcccg

SEQ ID NO: 14577 - DNA, 135 bp, Homo sapiens
ccggcaggtactacttctccaaactcatagaatttatggacactttcttcttcatcctgcgcaagaacaaccaccagatcacggtcctgcacgtctaccaccatgcctcgatgctgaacatctggtggtttgtga

SEQ ID NO: 14578 - DNA, 839 bp, Homo sapiens
  misc_feature 497, 568, 776: n = A,T,C or G
ccgggcaggtactcagaattgaccaattcaggaggtgtaaaaataaacagtgttctcttctctaccccaaagccactactgaccaaggtctcttcagtgcactcgctccctctctggctaaggcatgcattagccactacacaagtcattagtgaaagtggtcttttatgtcctcccagcagacagacatcaaggatgagttaaccaggagactactcctgtgactgtggagctctggaaggcttggtgggagtgaatttgcccacaccttacaattgtggcaggatccagaagagcctgtctttttatatccattccttgatgtcattggcctctcccaccgatttcattacggtgccacgcagtcatggatctgggtagtccggaaaacaaaaggagggaagacagcctggtaatgaataagatccttaccacagttttctcatgggaaatacataataaaccctttcatctttttttttcctttaagaattaanactgggaaatagaaacatgaactgaaaagtcttgcaatgacaagaggtttcatggtcttaaaaagatactntatgtggttgaagatgaaatcattcctaaattaacccttttttaaaaaaaaacaatgtatattatggtcctgtgtgttgaaattaaaaaaaaaatactttacttggatattcatgtaatatataaaaggtttggtgaaatgaactttaattaggaaaaagctggcattagctttcatctgtgtaagtgacaccaatgttcataatatnctttattttgggaaataatgtattttataaaattttaaaaagaggaagactacttcaggttag

SEQ ID NO: 14579 - DNA, 401 bp, Homo sapiens
ccgggcaggtacttttttttttttttttttttttttttgggacaagatcttgctgtcacccaggatggagtgcagtggcatgatcatggctcactgcagccttgacctcccaggctcccaccttagcctcccaagtagctgggaccacaggcacgtgccaccatgcccagctaatttttattttggtagagacaaggtttcaccatgttgcctaggtaggtttcaaactcctggactcaagtgatcctcctgcctcggccttccacagtgttgggattacaggaataagccactgtgcccggccctttttctcttctgtaacagagtttattactgcctagctagcaggttatttggccctcacatgtgttgaggcaaactctatactatattcttactct

SEQ ID NO: 14580 - DNA, 406 bp, Homo sapiens
aggtacgcgggggtaaccacctgggaaaacttcacagaaaatgagagtttcagatactgagaatagaaccactaagaagcagaaaagagaagatattctcgtgggggagaacaacggctgggaggggaggaagcatggccaaggcaaagaggtgggcattaataagaactgcttcttgctgccgccatatgaagaaggacgtgttcgcttccccttcctccatgattgtaagtttcctgagacctcgccagccatgctgaactgaatacaacatgtttaagaccacagaacatctgcataggctgtaaatttcgttgaatgatggatgcaaagatggaagacagatggatagaggaaaagacagaatcagatactggatgagttagtacctgcccgggcggccgct

SEQ ID NO: 14581 - DNA, 348 bp, Homo sapiens
ccgggcaggtacgcggggggctgaggcaggagaatcgcttaaacttgggaggcagaggttgcaataagccgagattgctccactgctctccagcctgggcaacacgagcgaaactccatctcaaaaaaaaagaagaagaaaagaaaaatggcaacccaggtatgcaactagaaaaatccagactatggaaaaaccctgcaggataaaagatcaatttcttcagcaaataaattgtctatggtgtgtgtgtgtgtgtttgaagtggggagttagaggcgtgagtgagcataagccaacatattcattattattattattattgttaaacttttaagttcaggggtacct

SEQ ID NO: 14582 - DNA, 305 bp, Homo sapiens
aggtactcgcccagctccttatagagggtctccatgttagaatgcatcatccgcagcttgttatactgttcctgtgcatccttcacaaagctggtcattttttcaacaaacttgtctttttcatctgtggcagctgggaaattctgaacatcacgttccacatcagaaatttgtttcttcatctgatctaggttcttttgcaagttttcagcagaaactcggctggctttctccacatgggcaagctcgtctggaaaacttgaagacatcgggatagtcattctcccccgcgtcctgcccgggcg

SEQ ID NO: 14583 - DNA, 363 bp, Homo sapiens
ccgggcaggtacgcgggtggttgggggaattggaggcttctaggagaggagctggaggccacggttcaggaagtcctggggagactgaagagccaccagtttttccagtccacatgggacactgttgccttcattgttttcctcaccttcatgggcaccgtgctgctcctgctgctgctggtcgtcgcccactgctgctgctgcagctcccccgggccccgcagggaaagccccaggaaggaaagacccaagggagtggataacttggccctggaaccctgaccctgtgtctcctgcccggtggcagtaacaaagccttctgtctgcccagaaaaaaaaaaaaaaaaaaaaaaaaggttcctt

SEQ ID NO: 14584 - DNA, 155 bp, Homo sapiens
ccgggcaggtaccaggccgcccattgtgtccttgcccaggaccccgagaaccaggcgctggcgaggttttactgctacactgagaggaccattgcgaagcggctcgtcttgcggcgggaatccttcggtgaaaaggactctttgtcgaggctggt

SEQ ID NO: 14585 - DNA, 421 bp, Homo sapiens
ccgggcaggtacgcgggggggaatgtaagggccacttcagcaacagaaaggagtggtggagcggcttctcatcagaaaaacagaactttcagtgcctgacttgagatgtaaacttgatgggaaaaattattttagttttggaaagatcctcttcagaaataccactatcttcctgaagtttgatggagaaccttgtgacctgtctttgaatataacctggtatctgaaaagcgctgattgttacaatgaaatctataacttcaaggcagaagaagtagagttgtatttggaaaaacttaaggaaaaaagaggcttgtctgggaaatatcaaacatcatcaaaattgttccagaactgcagtgaactctttaaaacacagacctttttctggagattttatgcatcgactgcctcttttagg

SEQ ID NO: 14586 - DNA, 167 bp, Homo sapiens
aggtactcagagtgaggattttctgcaacctgcgtttgtccctccagcatctgctctggctccatggcggaccctgcaagtcacagtccccggataccagtccgcgcccaagccgttcgttcttaagagccctgcactgcgccaccagctcccagcacaaacagctc

SEQ ID NO: 14587 - DNA, 428 bp, Homo sapiens
aggtacgagggcatccctgggtggccgagcccatcaggcccaccccaggctctagtgaggagtgcggtggctgtccaggacatctgaggacatcgctgtggggcaggcattgtgggatgtgtgtagctcagtggaggtggggaggaacggggagagcaggtgctggcagggaatgaaagccctacagtgtaagagctggatgaaacttcagagctcatctagtcaaagtccctcattttacagatggggaaactgaggcactgagtggggaacatgactccccctcggagacaaagccagggctggaagctgtgtcttcagagcctcaaccctatgctttttttctcctagagtatgctgccttccaaaatcaaatattgagcccaagaagacatgtccttcatacccgcgtacccggggattttagg

SEQ ID NO: 14588 - DNA, 453 bp, Homo sapiens
aggtacaaagatgaatgcaacacggtgcccgccctgttgagcacatagttcagctgccggccccgcggcggcagcgcgctgcagcccaggctgatgtagacaggcagcttctcctgggtcagcgacagccggtacttttttttttttttttttttcggcctaaaagcggtagaaatttaataaatagatatgaattgattgattcattaatagtataaaaagaaaatttgggggtggttttttacattttttagaaacaaattagatgatgtatgttaacttttattttttaatacttgctatttataaaatactattatttattattatccaatgattaattactttaattgtaatatttttcattataatttattctgtctcacattattataatagtgctccttttttattaaatttatttattactttttaataattgttaattttttc

SEQ ID NO: 14589 - DNA, 116 bp, Homo sapiens
aggtacacgctgcccaagggcgttcgtaacgggaatgccgaagcgtgggaaaaagggagcggtggcggaagacggggatgagctcaggacagagccagaggccaagaagagtaaga

SEQ ID NO: 14590 - DNA, 429 bp, Homo sapiens
ccgggcaggtacgcggggggttctgccctgcctgaggaggaggacacagcacaagggcacattgcccatggctgggaacatgacccagcctgaaagatacaggggatcatgttaaaaatagcagtattatttttcgtctcaatggtattgtaactaagttatttactcctcctgctcctcacccctgtagggaaaccttggagaggagagtggcaggtgggctgcctgctgtgttaagaggacttaatttgtgatgtaaggcactggcaggaatggggggcgggccagggtgggaagagaagaaatagccaaggctattttggtgagggtttttgtttttaaggccaaagaaaatttaatttgcttttcccttaggaatgaaaaagggattgggggaattgcctgaattccgggggggggggggaccct

SEQ ID NO: 14591 - DNA, 830 bp, Homo sapiens
  misc_feature 10: n = A,T,C or G
aggtactttnttttttttttttttttttttttttttttttttttttttttttttttttttttttttttttttttttttttttttttttttttttttttaaaaaacccaaaacttttttggggggcctaatggggcccttttaaaaaaaaccggggtgccccacccccccccctttggggttaggggggggcccctccccggaaccccccccggaatcggggggaaccaattttgggggcccctattcccccagtccggggggtttttttttttttaccctgggccccccaatttttctttttttggcccgggggggggggcccccttttccccagggtgcctttttgagggggggggggctttaaacccaaagggggggcccaagggggggtttttttgggcaccttttcaaaaaaaggacgtccctttggaaattccgttttgggggccgctttaaaactagggggcccccggcgcggggggaattcagtttaaacttttttagcaccccctccctggggggggggccccggcccccctttttttttcctttagggaggggtaaatcgcccccttcggactaaatgggcaaaaccgtgttccgggggaaaatgtgttccccttcacaattccacaaaaaattaagcccgggggaattaagtggaaacccggggggcccttgggggggcccccccccattttttcggggcccctcacgccccttttcacaggagaaaaccttgcgggccccctatttaataaatccccccccccgggagaggagggtttgtaagtggccctttcccctttttgaaaaaaaacaagggggg

SEQ ID NO: 14592 - DNA, 703 bp, Homo sapiens
gcgtatcgactaacgactactatagggcgactccgagctgcggcggccgaggacgcgggcactcctctctctcttcctctctcacacgttctccaacccaaggaggccagacagagggacgtggtcactctctgaaaagttcaacttgagagacaaaatgcagtggacctccctcctgctgtgcagggcttttcctctcccaggcccagtatgaagatgaccctcattggtggttccactacctccgcagccagcagtccacctactacgatccctatgacccttacccgtatgagacctacgagccttacccctatggggtggatgaagggccagcctacacctacggctctccatcccctccagatccccgcaaggactgttggaggagagttagcccaagtataggctctgcccagatgccatcacatccctgatactgtgtatgctttgaagcaccttccctgagaagggaagaggggatctttggactaggttcttggctccagacctggaatccacaaaagccaaaccagctcatttcaacaaaggagctccgatgtgaggggcaaggctgccccctgccccagggctcttcagaaagcatctgcatgtgaacaccatcatgcctttataaaggatccttattacaggaaaagcatgagtggtggctaacctgaccaataaagttattttatgattg

SEQ ID NO: 14593 - DNA, 850 bp, Homo sapiens
  misc_feature 435, 510, 513, 514, 516, 518, 519, 521, 525, 526, 527, 530: n = A,T,C or G
ccgggcaggtactaagcttgacagcttcctaataattaaaaactcttctgatgctatcagtggttatgttcaaaaatgtcaatttttaaatattatagaataaaatgtgccaacattttagaagatttgcataactcagtgaaccaatacttttcaaatgaccaaaacataatgttacaaaatcatgcatggataaaaggtgcattgaaaatgcaaatgaggccaggtgtggtggctcatgcctctaatcccagcattttgggaggcagaggctggaggatcacttgaggccaggcatttgagaccagcctggccaacatagcaagatcctatctctaaaaataataagagtaagagaattagccaggcatggtggcatgcgcgtgaagtcttagctacttgggaggctacggtgggaggatggcttgagcttangagtttgaggttacaggaagctatgattgtgccactgccctccagcctgggtgatggagtaagaccatgtttcanatnntntnntntttnnnttntttggttccttggccggggacagcaggcgttgcgccacgtcctggcgttgtagaagaagacataggcttgcttggacttgatctggatttattgacaggggagacactgtgtcattaaaattatgcccctggccggtgtccttgttgcagcaaatgttgtgagtggccttcacgcatgccccataatggggggaaccgcgatagggcatatttgtacctcggcgttctagactattggatccccggctgcgggaattgattttaactttttgataccgtaccttagggggggccggtccaactttttttccttaagtagg

SEQ ID NO: 14594 - DNA, 502 bp, Homo sapiens
  misc_feature 22, 68, 74: n = A,T,C or G
cgtatcactcacttaggcgatngtagctcacgcgtggcgccgagtactttttttttttttttttgcancactcnggaaggccagaacagacagggtttcaccatgttggccaggctggtctcgaactcctgacctcaactgatccacccaccttggcctcccaaagtgctggatacaggtgtaccacccacccatccaatataggacatatcttagagatataagttcattctgcttggtccagtgaagcaatgtaatctatcctaccagtaagtagagactacctacacagtactgaaagatctagccatttcaagaggtcaagggacaattctgtaaataaattgcatctaagtagttccttactactcacaacatgctctaatagtgtgaagaaattaattcttatcccaaagaatatacttttcctagtaatgataggcttcatataattggaatctaagaatgctttaacaattctaccatcccgcgtacctgcccg

SEQ ID NO: 14595 - DNA, 126 bp, Homo sapiens
tcgctcccctgctcctccttggtggctctctcagaggactccagagttgtatccccaggccgtcttgtttgttctgcactcctgctccccttaaatagctcctccctctccccgcgtacctgcccg

SEQ ID NO: 14596 - DNA, 324 bp, Homo sapiens
ccgggcaggtaccggagccccagccctggccctgagggagaaggaagtcagggccggggctgccccaatcctgtctcctgtgcgcaggtgaacggattcaacacccttggggaaaacattgctgacaacggaggggtgcggaagcctataggcctacctcaagtggatggcagagggtggcaaggaccagcagctgcccggcctggatctcacccatgagcagctcttcttcatcaactatgcccaggtgtggtgcgggtcctaccggcccgagttcgccatccaatccatcaagacagacgtccacagtcccctgaagtacct

SEQ ID NO: 14597 - DNA, 856 bp, Homo sapiens
  misc_feature 10: n = A,T,C or G
aggtactttnttttttttttttttttgagatggagttttgctcttgtcaccaggctgaagtgcagtggcgtgatcttggctcactgcaacctctgcctcctgagtagctggaattacaggtgcccgccaccatacccagctgtttttgatttttagtagagacagggtttcaccatgttggccaggctggtctcgaactcctgaccactgatccacccacctcggcctcccaaagtgctgggattacaggcatgagccaatgtgcctggccattcctgtgattttttagaatttttcacttttcatataaagttgcattttatcatgaggaaaatgttttggctgaaaaacatatgcccaaaaaaaaaaaatcagttttcactatttttccagcttgcctagggaaacgtcctcccctgagcaaagtgggatgtgcatggctcttttttgtgattaagcaggcatcaaatgggcaggtttcattttcactgacacaaaaacatgtggcttaagcaggaataaaaatctgtctactgacttctggcttcaatctttgcttcagttaaatcagagaacccttcccttctttgccctttaatttccccaggccgaagccggttcagcttccgtaaaggcccccagttttaattatgcttactggaccttaatttaataccttgccgggcgggccgtctaaaactatggattccccggctggaagaattctattttaagctattttaaccgtcaaccttagagggggcccgggccccaattttggtcctttaatgagggtaaatggccccttggggaaccagggacaaggtggtccgtgggaaattgtattccctacaat

SEQ ID NO: 14598 - DNA, 745 bp, Homo sapiens
  misc_feature 389, 610: n = A,T,C or G
gatcgcaacttctactaaactcgatatggagctatcaccgggtggcggccgcccggcaggtacccccagctacctcccatgtttccaggtatcattggctcttaactcccacaagcctgccttttggctacccatcccaacaatatcaagagggaatgactaagtatcagctagaaacttagccatgtctcaacattcctgattatctgaaaagctgtcgatgcccttttacaggtttatggtgacagacccgtatcatcttaaagtatgttcatagttaaggcttgacttaagaaaataagagaaccagacataatggaaagacctcttcaataatgttgtcatgcctctcagtgaacgtgctcacagtcacacttggtttggctccncaaacccacaatagaaaaggaaaaatgagtattttgtttttcatctgttttgtatttaaaggcattgggttacttcctcctgccctcttttcttccctgaacaagagtttacaactcctcatggcttcttaataagtgaagtaggtgaaaagcctgagaagctcacagcaaggtttgccgtcccaactatgcagctgagaggtcgccagctcctgtgcctncccagccccactataaatggcagtatgtttgttcatgtttcctgaaaacattttctttaaaaaggaaaagaaaaaaatgccaaacaacacccaacccaaaaaaaaaaaaaaaggaaaaaaaaagtacctgggcgt

SEQ ID NO: 14599 - DNA, 486 bp, Homo sapiens
ccgggcaggtacccagacaggatcatgaacacgtttagtgtggtgccttcgcccaaagtgtcagacacagtggtggagccctacaacgccaccctctcagtccaccagctcgtagaaaacacagacgagacctactgcattgataacgaagctctctacgacatttgcttcagaaccctaaagctgaccacgcccacctatggtgacctgaaccacctggtgtctgctaccatgagtggggtcaccacctgcctgcgcttcccaggccagctcaatgctgacctgcggaagctggctgtgaacatggtcccgtttccccggctgcacttcttcatgcccggctttgccccactgaccagccggggcagccagcagtacgcggggtagaagacattgctatttgagctttaaaatgtagtaatttctgaattaccaacaagaccttatttaaatgctgagagctgcattatgatgaagcattagtct

SEQ ID NO: 14600 - DNA, 868 bp, Homo sapiens
aggtacttggcacacacaggatggtgttttaaagagtgggctgcaccccccacacgccatttacatcagcttcataaacacttttcttcctccctgtaacttaaccttttttcccttttatgaagttgagaggctttatgaaataagttgcattgcacatccgtgcagaaatctttctgactttgaaatttttaggacgtcagctgtcagatacgaaaggtagatatcaggtaagaatctggacttaggaaatagtcacaaaactgtcataggttgtaattttatcaacattcgcttctagtaaaattaaagtcaattaagaaatagaacttgggtcaaaattctgttacaaagcttcataatttgtcccgaagcatatggtggagcattctgagaaatttgctttttgtgtgtttgacattcctaatttgggagtccttcagctgaattactattcttttagaagttgagacagcaggtaagcaaaggacctagttcatgtaaacatggacatcatgatggctatttaaaaaatatttgttctacaccttctcccctgaggcttggggagtgtgttcagccgctgcagtttctctgctcatggaggtcttgtttggatctgtgctggcggctgagcatttagtgtgagccagtgacccatgaacttgccgctctgtgagggccagagtcagggccagtcatggtaattggccctgaggcaccttcagaaccctttatgtctctcgtgagccctctgtaagaacgttctttttggtgtggttgaggcctacccgtcgctatctgggaaaccttcttagtgctatgccaagtttcaccagcaaatgggggtgcctgagccctgggtggg

SEQ ID NO: 14601 - DNA, 359 bp, Homo sapiens
aggtacattatactacttaaagcaaccactaaaaaaattaatacaaaaatacaaagaaatatatttaaaaaacactacaaatatatcaaatggaattctaaaaaatgttaaagacaaaaaaaaaaaaaacccaaacaaaccaagaaagaagcaacaggaaacacaaaaaactaatcataaaatagcagacatagcactaacataattattgtaaactttaaatggtctaaatacaccaataaaagacagaaatatgcaaactggggccagacacagtgacacatacctgtaatcccagcactttgggaggctgagactacaggcacgcgccaccgcgcccggccccgcgtacctgcccg

SEQ ID NO: 14602 - DNA, 406 bp, Homo sapiens
aggtacttcactgctctaagtaggtgccccactttgataaagtgctgtcccagtctgtgctgtcccagtctggaagggtcgctacccatgaacgtagcagccatcctgctattgggtaagtcatctgcatgatgactgtagcctgttctgccatgctcttatgagtctgaagggcagcatatgcagttactaactgcttcccagtccagggggtcattatccatgaacatacccatcctgctattactaactgcttctctatcaataaagacaagctcagctccatagttggggccaaaagcctactggcatactcaagcactccgtgcactgctataggccctaactgaaactatctgtggtcacatgcacatctagcctaaatgggcacctctgatcaactacc

SEQ ID NO: 14603 - DNA, 408 bp, Homo sapiens
ccgggcaggtacaaacaaatccagaatatgaagactgcaataaatatctaactttttaatgcccagacactgacaaacatccacaagcatcaagactatccaggaaaacatgacctcaccaaacaacctaaataagtcaccagatcccaattctggagcaacggagatatgtgacctttcagacataattcaaaatagctatgttgaggacactcaaagaaattcaagataacatagagaaggaatatagaattttctcagagaaactcaacaaatatattgaaataattaaaaagaatcaagcagaaatcttggaattgaaaaatgcaattgacatactgaagaagacatcagagattttaaataacagaattgatcaagcagaattaaaaattactaagcttgaaa

SEQ ID NO: 14604 - DNA, 417 bp, Homo sapiens
aggtacttttttttttttttttttttttttttttcacacttggaagtcacagcacagcccacacttaaggaacagagagtcaggctccccttgctccttaatggcagagtagctacataaattatttggaatgctacatggcaaatttatctctttctccccttttttgtttatctatcactaattatatatcagtatggactcatggatatttattttatatttcgggttacaacttgttagtattttattttgttgttcaaatagattccttccagctttgggccactgggagccttttcagctggctccctgggtaccctctgacatgccccccttaattgggggcgttttttaaagcaactttactttttggccctataatatggttcaaagcttcaatttatatatttccct

SEQ ID NO: 14605 - DNA, 312 bp, Homo sapiens
ccgggcaggacgcgggggggggaagctgagggctgagaccaagggctaaagctgggagactgaaaaaatgcagaccgccggggcattattcatttctccagctctgatccgctgttgtaccattattttatgttgtgccagtgaatccggttgccagaaataagtctgaatgttttcatgcatctttttcttaaatgcaagagcttctactgactcttaacaagcatgcttacccaaattttgttgcatgcttttaagtagcattagctatgcacacttgacatttttaaatatccctttcctagtgtacct

SEQ ID NO: 14606 - DNA, 405 bp, Homo sapiens
aggtacattaataagacacctcagaagtgaatcaaacctagtttttactaaaatgatgggataaaggtagtgtctatgctgaagagcagcttcacttgtttccccacagaaaaaggcccaaaatttttggaggataatttaaaaactaagccaataaggccaggcatggtggctcatgcctgtaatcccagcactttgggaggccaaggcgggcagatcacctgaggtcaggagttcgagaccagcctggttaacatggcgaaatcccgtctctaataaaaatataaaaattagccgggcatggtggcatgcacctgtaatcccagctactcaggaagctgaggcaggagaatcatttgaactcgggaggtggaggctgcagtgagccaagatcacaccattgca

SEQ ID NO: 14607 - DNA, 408 bp, Homo sapiens
ccgggcaggtacactggaggctggagcctgcggatggcatggctctgcggctcaccttgctgcagttggtggtggtgacagagactgcagcttgactgtagtgaatttggaaattatctgtctggaagctctgagtttatcttgggacctcaagaagagaggatcacccaactcacagcaatcaaactccaaatggtgctataaactgaaccacacatggacacgtcagtcttccgaggacctttagatcaaccccaggaggagccctagctgctgttccccattcgacgcccctttccagcaggaagtagccagaagacatcgtcgcccaaacctctaacagcagttagtgcggcatctccacaggggggaatgtttgaggagttattgataaattattttaggcat

SEQ ID NO: 14608 - DNA, 199 bp, Homo sapiens
aggtccccggggacacaggcccaggtgtgtaggccacagcagccgcagtcctgaaaggctgcaacacccagacctccaggagagaccaggcccaggatgcctcgcctgttcttgttccacctgctagaattctgtttactactgaaccaattttccagagcagtcgcggccaaatggaaggacgatgttattaaattat

SEQ ID NO: 14609 - DNA, 463 bp, Homo sapiens
ccgggcaggtactttttttttttttttttttttttttttggagcttattagaacatttatttttttctgaatgacaggccgggagtgggagtagctgaacagggcatgttagtggtgtgagtgctggcttaaacgaaggagctggaatgggggtttgtgatgtcgggagaggagggcttggaaacagctgaacagaacttcccgatgctggggtggaggatacccatgaatgggctctgatcaaacaaaaggcgaaacactggagtctccaaaaaaaaaggtagcttcaaagctccatgactttgaaggccctttgattgtcctagtgtggatactcatattttccgtgaaatatgatggccagcgttacactttacaaggggcttgtccaggtcttaaaaaactgtggtggggaatcccccccagcgcgtcagaagagatgttttctggtccaaaactctat

SEQ ID NO: 14610 - DNA, 458 bp, Homo sapiens
acctgccaggtacacataacccattcataatgtagtatagacaccaaaatgctaagagtgatacaatacattactgatgtgtggattaattcaagttcacgcatctacttgtggtacagcacatctgtcaaaaggtgattatgagtcaatcataaaacgggtttgattgttcccacattatacctatataatggacaccttctagctagcgaagcaatgcggtttgctagtccacacttcacaggcctgttgtgagcggagcgtctagtgtctgccatctgccttaaacgaaccttgctaagtatgcgatttttctgtacaccctttcttgctgcatgctttgtaccaggttgcgtgacttctctatgtgggttgtagcagcggattcttaactctaacaaccgacactcattgatgaacatggcatggtgataccactcggcacggttcataagaag

SEQ ID NO: 14611 - DNA, 402 bp, Homo sapiens
ccgggcaggtaccccggaaactattttggattaaggtcaattaggactaacatctaatacgtgtattttggtttcctcacctctaggcacagaccccacaggctcctcggacactgggtccatcacctcctgccccatcatccactccaacaccaacagcccctattgccactctgaaccagcctccaccacttcttcgtccaacactgcctgctgccccggctcttcaccggcagcctcctccactccagcagcaggctcggttcatccagccccggccaactttaaatcagcctccaccacctcttattcgccctgctaattccatgccaccccgtctaaacccaagaccggtgttgtccacggttgggtggtcaacagccaccatcacttattggaatt

SEQ ID NO: 14612 - DNA, 834 bp, Homo sapiens
  misc_feature 11, 696, 697, 701, 703, 704: n = A,T,C or G
aggtacgcggngatgctgcattgtgtcgggagttgctgacagccatggcgccgcaggtctggcgtcgacggaccctggagcggtgtctgacggaagtcggcaaagccacgggtcggcccgagtgcttcctcacgattcagagggattggcatcaaagttcacttctttaacaaaagtgctttatgactttaataaaatattagagaatggtaggatccatggaagccccttgcaaaaacttgtgatagaaaattttgatgatgagcagatttggcaacaactggaattgcaaaatgaaccaattttacaatactttcagaatgcagttagtgaaacaattaatgatgaagatatcagtcttctcccagagagtgaagaacaggaacgtgaagaggatggttcagagatagaggctgatgacaaggaggacctagaagatttagaggaggaggaagtgtccgacatgggtaatgatgatcctgaaatgggtgagagagctgaaaacttaagcaaatctgatctgaagaaaagccccgttttcagtgatgaggattctgaccttgacttttatattagcaaattggaacagcagaacaaggtgcaaaacaaaaggacgagaaaaccaagagaaaaggtccttgatgatgataaatcttcaaacctcttggaatggaagccccttttgaaaaaaattanncaantnnttaaggtcttggcgggccgccgtttagaactagagatcccccggctggggaaattcattcaagtttttgaacccccactctaggggggccggtcccaacttttttccttttggggggtatattgcgctct

SEQ ID NO: 14613 - DNA, 405 bp, Homo sapiens
ggccgcccgggcaggtactttttttttttttttttttttcccgttccctagcacgctctctttctagttctctctctttttctctttcccgatcccgttcacgttccctctctctctcccgctccctgtctcgttctcgttcccgatctctctctctagccctttcatctctcctatcatccactctgtctactcttcgttcctctcttctttcatcacgctcaagctcgtcattccttccctgatgtcgaattggtgagcttggtctttgatctctctctctgttgtcacgacgggtctcgctctccatgtcttctctcaaaggaagaatcccttgcttgatctctgttggctctttcaggatatctatctctttcaggatagctacttcgagtttcccagctg

SEQ ID NO: 14614 - DNA, 851 bp, Homo sapiens
ccggcaggtacttttttttttttttttttttttagagatagggtcttctctgtcacccaggctggagtgtggtggcacgatctcagctcactgcaaccactgcctcccgggttcaggcgattctcctgcctcagcctcccagtagctggggttacaggcgcccaccaccacgcttggctaatttttgtgtttttagcagagacgggggtttcaccatgttggccaggctggtcttgaactcttgacctgaagtgatccgcccgcctcggcctcccaaagtgctgggatgacgcgtgagccaccatgcccgacgtgaagacaggaatttatacccatggagtgcaagaagggaccttgtaatttttaacacgtgacacttagtggcagatgagacctaatgaagccaggcccaccttccacaccaaattataaattcccctggagcagagattaaatgttttattcaccaacatgcccagatccctcgcaatgcctacgcttgacaaacacctgttggcaacaagtgcacgaagcagtctaaggggaaaattaagtcttcacgaggagaattactcgggccctacagctagagtatttcgaggtcatcccaaccggggttcacttttgaaattttgggttttgggttttttggattttcacaacaaaattgagtggaattgtactaaattgtagcacttatgttatttacgctttttatgctcacgtcgcagaagtcaaatgattctgagtaatcatcctgtataaaagtattgaaaccttcccgcctgctactcagacaaatcgttatcctatcaatctacgttgacttccatcatttgagtcattcaacg

SEQ ID NO: 14615 - DNA, 402 bp, Homo sapiens
gcggccgggccggtaccccgggaaacctaaggattccagggcccccaaggtcctccgggatccggggatttttttaagggggccagcatcccatacaacgggcaaagctatccaggttccggctaacacattttctaagtcgccagtgctgcttacagtttgaatacatgaaaatcctgtttctgagatgtttgcgcacgtgcttattaggaaatgagtctgtatggaaatctcaccacagataatggttaacgaaccgggtcgacatcacaaaggagggtggagactctttttactaacttgaatgagacaaaagcagtggtgtcagtttataatcctgatgcatttcagtaataatgtagaaaaacattattttaaaaaagttccaacacacagccatga

SEQ ID NO: 14616 - DNA, 877 bp, Homo sapiens
  misc_feature 151, 152, 164, 165, 179, 180, 262: n = A,T,C or G
aggtactggggtgagatgatctgaagggtgtttccaatgagaatgacacaaataccaaggactggagaagcccttggaacaattgataaagcttcccacatttttttttttttgagatggagtctcactctgtcacccaggctgaaggcannatcgcatgatcnntcggctcactgcannacctctgcctcctgggaatcaaggggaattctcctgcctcagccctcctgagtaagctgggattaccaggctcccaccacancctggctaatttagtatttttagtagagacagggtttcaccatgttggtcaggctggtctcgaactcctgacctcaggtgatccacctgcttccgccttccaaagtgctgggattacaggcatgagccactgcgcctggtcaatttcccacattttcttaagattatgtttgggccacagaagctcaacccaaagctatcttataaagctggaatggaatctctatttcaacaaggtgatatccccaatatagtaattcaaccctttgtttattccaataattaggacctgggtccgccttggataaaggtaaattatctctttctctgacatcttattgagcatctccccatttgcggaaatattccattatatgaacatctccctctaattcgcttaatctcgcaaattcatgtgacttggtgtattatgccgggttatctcgtttataacttcaacactccccgcttcttgtgatatcattggtgaaatgtgccactccgctcgattattggctcaatcctccgccttatgtggggcgtatttctgtataacccctttcaaccttcacattatttcgcgcaacactcggattatagtccttgtatacgtccc

SEQ ID NO: 14617 - DNA, 838 bp, Homo sapiens
ccggcaggtactgattccaattgatgggatacatgcccttaatacagaaagtttccattatttattcaaatatcaaaattaagattattgagaagtttattgctttatggctgggcaagatgctactagcacattttaggtaatatattctttattaaaaactatgaggtcattctgtttaaaactttcaagataattcacggaaaacagatatatctattcaaattaaacattaaagggccaggctactagctatagacatttatatgtgaagcagctcttttttttttttttttctgagaccgagtctcactctgtcgcccagggtggagtgcagtggcccaatctcagctcactgcaacctccgcctcctgggttcaggcaattctcctgcctgagccccccaagtagctgggattacaggcgcgtgacaccacacccggctaatttttttgtatttttaggtaagatggggtttcgccatgtttgccaggctggtctcgaacttctgacctcaaataacccacccggcttggtcttccaaagtgctgggattacagacctgagccatggcgcccggccaatgaagcaacttcttaaagaaataagacatgaaaataggtctgtcctgggtttcttcacataattgaaatgagttacccccgaagaacaattattgtaccctttttcttgtaggaactttataaaaaaaaaaaaaaactagattttagaggccattcgggctaaaaattcatatgctagaaggcttagaaataaaaccccctaaaaaaaaaaaagtccttggccgtctaaaattgggaaccccgggctgaggaat

SEQ ID NO: 14618 - DNA, 356 bp, Homo sapiens
ccgggcaggtaccatgttattttagatgaaagccattacaaagagttgctcacacatcatgttagtcctcctcctgctagcccaagttctgaatgctcacttattcgtatgggatttcctcagcacaccattgcttctttatctgaccaggatgcaaaaccctctttcagcatggcgcatttggatggcaatactgagccagggcttacattagggggctatttctgcccacagtgtcgggcaaagtacgcgggaatgttcaagctttagaaagatcagagcaatttttctctttcagtccaaactaagactctctgtatttaaatctctctggggcaagagggctagatttccta

SEQ ID NO: 14619 - DNA, 348 bp, Homo sapiens
ccgggcaggacgcgttggaggataaatcatttattaaataggtctgcttatcaggaggggcgtgaaggctcccaaaaggaaatgctggcacctgggcccagaagccagggcctctaactcctggggttgatttcttcagtgaagttgcaccctacaaagggaatatggccattttttactcaactgaaggctgatatcaggcgattagacagccatgcattctgcgtttgtctggaatggattgtagagagatggacttatatgaggactaccagtccccgtttgattttgatgcacgagcgaacaaaagctatctctacttgtctcctactggaaagtcatctacac

SEQ ID NO: 14620 - DNA, 838 bp, Homo sapiens
ccgtgcaggtacagagagcagaggctcctgttctgtcctcgccacccacgagggtgacactgcttgtaaatggtggctgtgctctcccagcaagaaaaaagcacaactaaatccacactgcacacagacgcagacagaaagccttcagggctctgttttctgctccctgccttgccaggtccacaagcagagaggagtgtcaggcacatggccccgctgtcaggctccccagtgagctgcgggctcagcaggagctgcccactgacacacaggggacacccactcctgccaccttgggagcggttgccagacagagccgcactgggtgctggtgtcatccagggaccccacacacttgcttaaatgtgatcctgcttccctctgcacagctgcatcctctcctcctgcaggactgtctggaaacttggctctcagtttgctctcccttctctcctctgcctgccccaagcccctctttctaaaaaagtgatgccatgttcatggggttatttcttgaaaatacttggcggcctccatgcttctggtttctttgagccaggtgggcaggaaggcttacgaaaaatgcctgggctccccccgcaggtgccggaagatggggtagcgatggtactgtgcctccacctgctccggggaggagattcccttatttgggctggccctttctacccttcacggatccgggtttcagaaacttgagaaccacttctggaaacagcggaaccaggccctttaagaagaccaatggtggcaggaaacggatggccagatttacttcagcatctaataggtttctggattggaaataactctaaggact

SEQ ID NO: 14621 - DNA, 465 bp, Homo sapiens
  misc_feature 16: n = A,T,C or G
ccgacaggtacgcggnggcctttgcaatctccacgttgcgatggatccttggacccacttttgttaactcttaaactttgtgtctttgtctttatttcttttctcattccctcgtctccaccgggaaggggagagcctgcggtgtgtatcaggcagggtcccctacatctttggcacccaacacggtctccttgaacccaggtgaagttacacctgagcgtggtcgttgtgaagaacggtctgtccaggaactcccgagaacgtgtggtcggccttgcggtaagcttgtgcactcggagcattccagggacaccatgggacaatccaaaagtaaacattctgcatatttacattttattaagctcctcttaaagagggcaggaattaaggctagcacagaaaatttgattactctgtttccaacagtagagcaatatcgtccttggtttcctgaacatggtacct

SEQ ID NO: 14622 - DNA, 436 bp, Homo sapiens
  misc_feature 63, 65, 77, 86, 96, 131, 132, 133, 195: n = A,T,C or G
acccaaggacccgcccacccagcacattcgggaaggttgcagtaacacccctaaggttgaagngngacccccgcggnggcggccgnccgggcaggnacgcttggaaggggcagaaaaagcccaaaaccaannnacccagcagagccagcccccactcaaggagaggcaaagaaaggagacacagcggagacaccnggaaaggccgccccagaggaaaaccgccgacaacggccaccacacaccagccaaaacaaaagagattttttttcgaaaagggcaaacgccccgcgagccccccggcgccggaacaacgacgcccccggcgacgagccacaacaaaaccccgacacccccacccgaccaccgaccacaccaaaaacagccacagacaaaccacaaacacaaccaccacgcccaaccgccgcaaacaagcacc

SEQ ID NO: 14623 - DNA, 367 bp, Homo sapiens
  misc_feature 309: n = A,T,C or G
ccgtgcaggtacttttttttttttttttttttttggaaacggagtctggctctgccgcctaggctggagtgcaggggcacgatctcagctcactgcaatctctgccgcccgggttcaagcgattctctgcctcacctcccagagtggggattacaggtgtgtgccacaacgcctggctaatttttgtatttttagtagacacgaggtttcagcatcttggccaggctggtcttgaattcctgacctcgtgatccacccatctcggcctcccaaagtgcagaaccagattcttaactgccacagactctngtattatgtaatttatatacagaacacaaagcacttgatttgcttaactgatgtacct

SEQ ID NO: 14624 - DNA, 956 bp, Homo sapiens
  misc_feature 30: n = A,T,C or G
atggacccatatcactactataggcgattngagcatcaccgtcgtggcagccgaggtactgtttgtcctgcatccggcagtggcggtgtgccaaacagtttgaaaacccaatcattaagtcttgtccagaatgccgtgtgatatcagagtttgtaattccaagtgtgtattgggtggaagatcagaataaaagacgagttgattgaagctttcaaacaggggatggggaaaaaagcctgtaaatactttgagcaaggcaaggggacctgcccatttggaagcatatgtctttatcgacatgcttaccccaatgggcggctagcatagcctgaaatacctaggaaacagatcagttattaaggcactgtaaggattttaatatacttaccattttgcattctattaagaacccataaagcagtcatagtactcataaatgaacatataaacaaactcaaacttactaaacattttcataacttacttcaagataaagattaataaatttccttatcgtataatagattaacccataatcttagtattaacatatacatttcacatcaaacatataatactagtaaatgcaagaatatataataaacattcttattaactctttaaatcatatgtaagagagacataatacagatcccatatgttaatatataatttcacatttacatgattcttaataatcatcaaatacttgacacagatagcaattgaagatatacacaacatataaatatacaatattataattatatacattatatataatataactcattgagacttacaactcactatgatacattctattatatacattctcacactatgacttatagtcatatatacacttacactacaagatagcatatattatcactctgtcacactcactacagtaatacatataatcacagtcacatttatagacatatacttct

SEQ ID NO: 14625 - DNA, 357 bp, Homo sapiens
aggtacgcgggggcctgagccaaggccacgtgatgatgacagacggcactctggctttcctggagctgtctctatggtattcttcccagcccacccgtccctttggtagcggcagtcacgtgacagactccggggtgggtgctaccaaatacagccatgaagaaaaaggtgctgttgatgggtaaaagtgggtctggtaagaccagcatgaggtctattatctttgcaaattatattgccagagacacacgtcgccttggcgcaacaattgatgtagaacattctcatgttcgatttctgggaaacctggtattgaacctgtgggattgtggtgggcaagacaccttcatggaaaat

SEQ ID NO: 14626 - DNA, 432 bp, Homo sapiens
aggtacatagtggccgtggcagcctccgtgtctgtcttccatgtcactccactttatagctctgaggtttccagtccaggatgcatttggcatagagccaggaacaccgggaatcctgttgagtgtcacccagaaatgttcgtggggctgaggtgtccttggaccaggagagtaagtcaagtgcgagctggtcttggaggacgaagttagcaaagtcccttgtgagagccacgtaggccgtgccaaagtaaatcaccatgtcatgaggaggaggagtttttaattttgttgttttaatcacgtaggaatttttgtggtttaacagttcttggtggacgtatttagtccgtccaacagcgtggtcaggaggcaacacttcgggggtggtattttttcctttaaatcccttcagatactgaactaattccctgg

SEQ ID NO: 14627 - DNA, 488 bp, Homo sapiens
ccgggcaggtacgcgggaaccccagctttccctcccccttctttcgatcagagatcggcggagaccctcgaagtgcgcaaacttgacactcaccctgaccggactggggttttaaggggtgtggcaggaggttttggactcgaagagttttcccccaaatgtttgagaaattcaggccagagcacacaagcaaaggaatggaaaaaattttgcaacaactaagtttaatttaatacttaaacaggggggaaaatcatttagaaacacagaaaaacccacagtttgcatcttcagacattggaattaacaaaattttttggaaaaagtttgtgttttttcacgtgtgatttgctctccaccctgtttaaccttccccaagtttttaaaagccaaaaaaacaaaaggccaattgaatccctaaatgtaaaaactatttgaacccttgaggaccgttttttaaaaactttaatggaatcccccccgcggtt

SEQ ID NO: 14628 - DNA, 438 bp, Homo sapiens
tgagcagtgagagagctgacgggcagagcagactgcatgacagcaaagggcagaccaaactcctgcagctgctgaccaccaaatctgatcagatggagccctcgcccttagccagctctttgtcggatacaaacaaaaactccacagggtagcttggcctgggtctgggtttacacatggaaccttcgctcaaggagaagcataaaattttgcacagacttttgcaggacagcagttcccctgtggacttggccaagttaacagcagaagccacaggcaaagacttgagccaggagtccagcagcacagctcctggatcagaagtgacttttaaacaagaagccggtgagcctcaattaaaaaaatattttataggtaagtaccttggccggtttagaaccagtggattcccccgtctgcaggaattttatatcaagc

SEQ ID NO: 14629 - DNA, 439 bp, Homo sapiens
aggtacttttttttttttttttttgttagggaatggtaattttctgatgatatctgtgttcagaagggactgaaatttatacatttacctctttgaactcagaaagtatcagaggactgcaacataaaaccggcccatacaagagggccccgggctacgaagacaaggggtcttgcccaacgctcgcctacctcccagctttgccgggaacgccgtcccactcaggggttcaatgcagaaacaccctcctaagggaaaacgggacgccactccctacccaggagacgcccccacagggctggagcttctattcgaagcccatttctaaggacaccacacgcaggcctcagccaacctaagaggcaggatgatgccctccgtcctgagagaccactgaacacggcccaaggggctttttcatcaaaattcatttttttgc

SEQ ID NO: 14630 - DNA, 459 bp, Homo sapiens
ccgggcaggtacgcgggatttaaagacctgacagcttgagaaggtcactactgcatttataggaccttctggtggttctgctgttacgtttgaagtctgacaatccttgagaatctttgcatgcagaggaggtaagaggtattggattttcacagaggaagaacacagcttcagaatgaatggccagcgcttactgagctgttcagtggagggctcatgggtgggacatggaaaagaaggcagcctaggccctgtggagcccataccacttgacaaatcaagggacttgaatgatcccttttgcaagcaataggctttcctaagacggaataacctattttaacaacacaacccagaaacctggcccaaatgcctttgggacactgacttctaattggcaataatagggatgcccaaaaaaggggttgcctggtccattaatcagataaatgtgctccg

SEQ ID NO: 14631 - DNA, 491 bp, Homo sapiens
aggtacaaagaaaaattcctctgtcttgagatactgttaatctgtaaccctagccccaaccctgtgctcagaagcgtgtgctgtgttggctcaaggtttaatggatttagggctgtgcaggacgtgctttgataaaatgtgtttgtaggcagtatgcttggtaaaaagtaatcaccatttctccagtcttcaagtacgcgggggcctttgcaatgccatgttttgtgcatgttgctctaacttcccggagaggcaatcagggatgacggtctccctcggtccagacttggcttgatgtttttcttgttttctgttttcaggcctttcagggataattttttttaggaagtacctacttggtaacagtagttgtgaccaaattattccaagactttttttacatttaattacccacgactggatttgcttttcagtttttaagacgtattcaaaaccctatttagacttgtaaatctttccctcctgtacga

SEQ ID NO: 14632 - DNA, 440 bp, Homo sapiens
aggtacgcgggggcccttgctcactagaaggagccccctgaccccttcttccaaaaatactttttgtctttgtcttcgtttctgcattcatcccccttcgttcactcccataacaaccaacagcgacaactggcacctaggacagggacgtgagtgaaggactgctggagcatagaaactgacactgacaagaagaacgagaatgagaaaccctgcgacgagtctgctgacagctaatataagtctgcaaaatcagctggaccaccaaacggcaattgagagctgcacaacctgcaattacctttattcaattaatgcaaaaacaaaaatggggagatgctacaggccgaaagaatgaaggtcgtgaccaactcagtataccactgaaggctatatgagcaaacagaaaactgttctcatgaaagcaggatgttggaaaa

SEQ ID NO: 14633 - DNA, 435 bp, Homo sapiens
aggtacactgttaaccaagtaaaaatggtatgctgaaatagttaactagggcatatttgaagaattttgtttacttttaaaagaggaaaaatcacttccaatcttcccttccacacattcctaacaagcctgcactatacctgcttaaaactgaaaatataaacaattacatgggccccacttcattacagaatgcattttcctgtacttgaaaactggaacagcttgggaatgccatggggtttgataatctgccagggacatgaagaggctcagcttcctggaccatgactttggctcagctgatcctgacatgggagaacaaccacatttttctttgtgtgtgcttctagcagctgttcgggaggaccttgacccaatagtgttcccatgctgtttcttgtgaaatgctctcggctatgtagcagcttttga

SEQ ID NO: 14634 - DNA, 429 bp, Homo sapiens
aggtacaataatattatctttatgagcagcatggaaatttcattcctgatctggaagaataaaaggaaagaaaatgtcaggtgaaagagtaagtagcctccaacttaagcagacagaataattttctttaaaatgaaaagaacattttaagctgtctttccccctaaaagatcagatctagaaagggctggaaatgaactgtgcccaggaatctgggggtgctctccagtaaggcgaactgaggctcatttgcagccaagacttggaactcgggatgagacctaatgggctattgctgccatctggctgccaaaaagtccctaatagatggattttccaggctgacccaactgtggggcgggggggggtcctctggcttctgtgtcctctgaagcgtttgctggcctcaccctttttgaactgaccccc

SEQ ID NO: 14635 - DNA, 436 bp, Homo sapiens
ccgggcaggtacttttttttttttttcttttttttttggaaccgcggttgtttaaaagcctgagggaacctggaggggggctcccactctctaccttctttcctccgagtttgtgactccgagatggacaaagtgtgtgctgtttttggaggcttccgaggcattggcagagctgtggcccagttaatggcccggaaaggctaccgactggcggtcattgccagaaacctggaaggggccaaagccgccgccggtgaccttggcggagatcatttggcatttaactgtgatgatgctaaagaaccatgatgttcacaatacatttgaagagatggcgtaaacatttacgtagagttaatgttatggtaaatggcccttggtgtatacaggggaggggctttttggttagtaacaataacttgtagatatggtatgc

SEQ ID NO: 14636 - DNA, 428 bp, Homo sapiens
aggtacgcgggcaatatcctgccgggcagcaagccatacagcccaggcctctcccgcccataccaaggccagcatccttcagaaaaagcatccccgaggaggaagacgaatcgttaaacatctgaaagggtcaggccagcatcttagaaaagcattcccgaggaggaagacgaatcgttaaacatcttaggtcagctctagcctctcggaatttgtcttcttcagtggaaaccccgagaagactgatcagttcttcagttctaaaacaatggcccagggtttggtgacgttcgccgacgtagccatagacttttctcaggaggagtgggcctgtctgaactctgctcagagggacctgtacacctgtcaaacggtaaccgcaggtgttctaaggccagctcatgtaagacagaaaccttcccgtggag

SEQ ID NO: 14637 - DNA, 390 bp, Homo sapiens
ccgggcaggtaccttccccgagatggtggataaacttatcttgctggacacgccgctctttctcctggaatcagatgaaatggagaacttgctgacctacaagcggagagccatagagcacgtgctgcaggtagaggcctcccaggagcccttgcacgtgttcagcctgaagcagctgctgcagaggttactgaagagcaatagccacttgagtgaggagtgcggggagcttctcctgcaaagaggaaccacgaaggtggccacaggtctggttccgaacagagaccagaggctcgcctgggcagagaacagcattgacttcatcagcagggagctgtgtgcgcattccatcaagaagctgcaggcccatgtcctgttgatcaaagcagt

SEQ ID NO: 14638 - DNA, 427 bp, Homo sapiens
ccgggcaggtacaaatggacaatatatatggtatgtgaccattgtgtaaaaaactgtaatagataactccagagggatagaaaacttgatggtgactgcctttagggagtggcagtgggcatggacctgggaaggcagatgtagttgtcatggtacaagatcgcggtgctggtgctgctgaacgagatgagccgcacaggcgagggcgccgtcagcctcatggagcggcggaggctcaaccagctgctcctgcccctgctgcagggcccagatattacactgtcaaaactttacaagttaattgaagagtcttgtccacagctggcaaattcagtgcagatcagaatcaaactgatggctgaaggcgagttgaaggatatggaacagttttttgatgacctttcaaattctttctctggaactgaac

SEQ ID NO: 14639 - DNA, 341 bp, Homo sapiens
aggtacacaggaaagggccctgacaagaggatgggactgcagttgtggctgccagagtcttgctttgtcgcccaggttggagtgcagtggcacgatctcggctcagtgcaacctccgcctcctgagttcaagtgattctcctgcctcagccttcctagtagctgggattacaggacaaggagagggacaaattccttcttggcatccttatggccctgtgacctgctaatgaatgctgactctgagttgctactagaatttggtttccttgtggcttcccaggaattggtctcactctgctcactctgtctcccaagctggagtgcagtggtacctgcccg

SEQ ID NO: 14640 - DNA, 424 bp, Homo sapiens
aggtacgcggggaaaattcagcaaaacataggtgtgattgcagcatttacagttgcagtccttgctgcgggtatctcctttcattacttcagtgattagggtgaggcacaaagagtttcttgatcatccagagaacattgacagacaattatgaataataaagatgttaacaatccatctgtatttaaaacactagcagccagatctgctgccatgatgcctatttggtgtgtttctgattaaaatgaaatcacaagctgccttgtttagcctgctttacattgtaggtggcccgcatttccagaaataacgttatgcatctagatggaagctgcatgtaacaaatcattattatctatttttaaaagcttcaaaatgatgggatatgatcatagattttagtcttactaatctgaatcacatg

SEQ ID NO: 14641 - DNA, 425 bp, Homo sapiens
aggtacacgtcccagaaagaaatacgctataacacccaccagcctgagggctgcattgctgtggaagcaggaatggatacccttatcatgcatctctgcgaagaaactgccccagagaatcagaagttcatcttgcaggaggatggatctttatttcacgaacagtccaagaaatgtgtccaggctgcgaggaaggagtcgagtgacagtttcgttccactcttacgagactgcaccaactcggatcatcagaaatggttcttcaaagagcgcatgttatgaagcctcgtgtatcaaggagcccatcgaaggagactgtggagccaggactctgcccaacaaagacttagctaagcagtgaccagaacccaccaaaaactaggctgcattgctttgaagaggcaatcattttgccatttgtgaaa

SEQ ID NO: 14642 - DNA, 425 bp, Homo sapiens
aggtacctctgagtgtcgatccagctgccttgtgaccaggacacttagaagaagcatggaccctgcaagaggatgggctcaaggacagcttgcctgactgcagccataagggtgaagcctcttcaggtagagaaggactccaggtcatttggccaatttaatgccgacagaagaggccaccatctgaatgtaatttatctcctctttcatctcctttcattcccctcctcctttttttttttttttgggacagagtctcactctgttgcccaggctggagtgcagtggcgtgatcttggctcactgcaagctctgcctcccgggttcacgccattctcctgcctcagcctcctgagtagctgggactacaggcacccgccaccacgcccagctaattttttgtggttttagtagagacaaggttt

SEQ ID NO: 14643 - DNA, 440 bp, Homo sapiens
ccgggcaggtacctaaaccagtctgcgtgaactgcaccatgttagagaacagcaggaacaaaataggctacaaggtcacaataagaagccctggatggtagcatcaaagacgaaacatttaaaaaaccacagaatgaaatcccccaagatggcagctgctcattgtcaagattatttacccgcgtaccttcagtcctggccaagctttgaggctctgtcactgagcaatggtaactgcacctgggcagctcctccctgtgcccccagcctcagcccaacttcttacccgaaagcatcactgccttggcccctccctcccggctgcccccatcacctctactgtctcctccctgggctaagcaggggagaagcgggctgggggtagccgggatgttagccaagtccactgtccttcttggcgggaaaagcccattgaagag

SEQ ID NO: 14644 - DNA, 446 bp, Homo sapiens
aggtacgcggggcttttctttctttttcgtccttttccccggttgctgcttgctgtgagtgtctctagggtgatacgtgggtgagaaaggtcctggtccgcgccagatcccagcgcgcctcgtcgccatgccttggaaaattgaggaaatcaaggtctttcttgttcacagtccctactaaaggattccaaatttgttaagatcaagaaaaataaggacaacttgaagcttaaagtttgatgccagtagatacctttacaccctgatcttcactgacatcaattaaggcacagaaactgaagcattctttttgcttccggctttattaattacctattcttttttgtttaaaatattcttattttttatctgtattactcttacattattatccatccttaacatattctcaaaatttcccaatcaatttcccttttcattacgcg

SEQ ID NO: 14645 - DNA, 434 bp, Homo sapiens
ttattatcaaatcttattgtataccggcgaacccctctagggggggggccccggaaccccaagctttttggttcccttttaagtgaaggggtttaattttgcgccgctttggcagtaatatcattgggccattaggcttgttattcctggtggtgaaaaatttgtgtattccgtcttcaacatatttccaccaccaaccaatatcctaagccctggggaggcaataaaaaggtgttaaaagactctggggggttggccttaaaatgaactggaaagccttaaacttcaacaatttaaatttggcgggttggcagcctttaacttggccccgactttttcccaggtccgcgggaaaaccccttgttccgtggcccaagctttgctatttaatttgaaattcgggcccaaacaccgccggtagaagtaggtctggg

SEQ ID NO: 14646 - DNA, 435 bp, Homo sapiens
ggcgtggtagctcacgcctgtaatcccagcactttgggaggccgaggcgggcggatcacaagggcaggagatcgagaccatcctggttaacacggtgaaaccccgactctactaaaactacaaaaaaattagctgggcgtggtggcgggcgcctgtagtcccagctactcatgaggctgaggcaggagaaaagtgtgaacccaggaggcggagcttgcagtgagccgagatcacaccactgcactccatccagcctgggtgacagggtgagactctgtctcaaaaaaaaaaaagtacctcggccgaggtacgcgggatccgcagagttggagaagctgtcaatctggttatacctttccagggaaaaccaagaccagaattaacttggaagaaggatggtgcagaaattgattagaattaaataaacatttcgcg

SEQ ID NO: 14647 - DNA, 440 bp, Homo sapiens
aggtacgcggggctctctctttcactgcaaggcggcggcaggagaggttgtggtgctagtttctctaagccatccagtgccatcctcgtcgctgcagcgacacacgctctcgccgccgtcatgactgaacagatgacccttcgtggcaccctcaagggccccaacggctgggtaacccagatcgttactaccccgcagttcccggacatgaaccttatcgcttctcgagataagaccatcattatgtggaaactgaccagggatgagaccaactatggaatttcacagcgtgctttgcggggtcacttcccattttgttagagacggtggaaattctactaaatgggtagtttagcccctttaaggctccatgggatgggaaccactatgccttagtgattttcactatatggctaccatttcttggggcgtatttgtgg

SEQ ID NO: 14648 - DNA, 569 bp, Homo sapiens
gccgaacactacttatgcgattgagctcaccgcggtggcggccgtgcgtttgtggccgtccggcctccctgacatgcagccctctggaccccgaggttggaccctactgtgacacacctaccatgcgtacactcttcaacctactctggcttgccctggcctgcagccctgttcacactaccctgtcaaagatcagatgcccaaaaaagcccgcctttaagaactctggctggagaaagagtccagtatttcattataataccgggtgcataggaccgattttttcgttataatacccagatatctttcctctaattattcacgccgatatatttgttaaaaattctcaaactaatttttgaatatctatacttcctaatccaattatcatatataattgtagagcgccgtcttagaatttctaggttgaaatttttcattaaaaatattttatgttctaattttacttttacaattattcgaatatgaaatttcctaatggtataattccagattttaaatatttcacttttcgaaatttgcctttacaaatttatacgtcttcatct

SEQ ID NO: 14649 - DNA, 519 bp, Homo sapiens
aggtactcacatcacaatgtcattttgataggagcgttttgttatttttacaaggcagaatggggtgtaacagttgaattaaacttagcaatcacgtgctcagagcttttgcctgtcagttgtgtgtgtcccttattagcccttccctcacagttcttgctgaaggaggttgccttgttttgttttgctggctttgcatttaagccagaggatgccaaaaatttgacttcctaaaagcctttgagtacaagtaagtggtgggaaataaagcccgttttttacttttcctgggggcgtggtaaacctaaaaaggaagccgggtttttttttatcccttggaattgccccccttgggcccctatccattgggaccttaacggggggttatatatctctccccctttgggacctttggcctccaggacccgcctattgggggtgggaaaaaaccaccaaaaaactcctttttgttttaagtgagattacccttctaggaagaataacatcggggtgagtacc

SEQ ID NO: 14650 - DNA, 385 bp, Homo sapiens
aggtacacaatgaagatctggccacggagcactgcatagttccaaaggggcacgtgggcattcctcctatgggcattcagcagaccgtccacagaccagtagtggtttgcatccatgaatgttagctgaaaggccaacaacccatacagataggagtggttgttccatgatgtcttgtccaggagaaacacataccagtatggcagcaggaataacacacagcttatccggtagcacaggcccagcatcatgcccagtgcccctgggatttgtagggagaggattaagaggtcaagagatcaccacaggcccagtttccatccagtcaagtggcagtgggcgtagggcatccagcaaggggaagcggcacccgcgtacctgcccg

SEQ ID NO: 14651 - DNA, 425 bp, Homo sapiens
ccgggcaggtacaagaaacatggcaccagcatctgcttcttccccggctgcttccactcatggtggaaggtgaaggggagccggatgtgcatagatcatatggcaagagaggaagcaagatagcgagggagaaggtgccatgctctttttaaataaccggcttttgagggaactaattagattgagaactccttgttttttctactaagcacatcccaccctttagggacggttttaatgtatttattgtggggtatttccctcatgaccaaaaaaccttaccataaatgtcacatctccaactactgtggattaaaattttcaccttaatgaattttgtggggatcatacaatgcattattatatcctagtaatccaatttacctattttaaaacttgtactaatgtaattttaagaattttta

SEQ ID NO: 14652 - DNA, 394 bp, Homo sapiens
ccgggcaggtacaactgatggttcccccattcacaccagtgtccagttccaagccagctacctgcccaaaccaggagctcggctctaccagttccgatatgtgaaccgccagggccaggtgtgtgggcagagcccccctttccagttccgagagccaaggcccatggatgaacaggtgaccctggaggaggctgatgggggctctgacatcctgctggttgtccccaaggcaactgtgttacagaaccagctcgatgagagccagcaagaacggaatggcctgatgcagctgaagctacagctggagggacaggtgacagagctgaggagccgagtgcaggagctcgagagggctctggcaactggcaggcaggagcacacggagctgatggaa

SEQ ID NO: 14653 - DNA, 396 bp, Homo sapiens
aggtacgggggagttaccagctttggctgctcgcgcctccccaactcgggtaaagctcctcggcctcggcgtgctgcgcctccgcggctgccctgcgccagaattcggttccctcaaaattataaaagcaggaaagctcaagacaaagaaatccaacaaggctagtgatttcagtgatatggagaattggccaacaccaagtgaattagtgaacactggatttcagagcgtcctcagccaaggaaataaaaagccacaaaatagaaaagaaaaagaagagaaggttgaaaagagaagtaacagtgacagcaaagaaaaccgggaaacaaaattaaatggtcctggtgaaaacgtcagtgaggatgaggctcagtcaagtaatcaacgtaagagagc

SEQ ID NO: 14654 - DNA, 401 bp, Homo sapiens
ccgggcaggtacgcgggtgaggggacccctgcctgtttcccccatactgagttctagggaggtgctcaccccagactcttaggaagggtctagagaaatgagaggagcccaagccaggggccagctgccagaaagggttacctccacgcttctctcttccaaattggaaatgaagacaggttttcaaaggcacaggctccccctgccagcttataggatcttccttggtgtgcaatgggccagatacgggttggcagcttgcacccagttctgctttatctgaacttattttcctggggagaggtgcctttagggattgtggtgtctccaactgcgaattccctgcaacgtggggaagctgcactggctttcttgccccgtctgcctctctaaagctagcg

SEQ ID NO: 14655 - DNA, 400 bp, Homo sapiens
ccggcctggtatcgcggggttcaatcctgaagacacacgccaggcatttcagggcaggcacagcttaccacacccgctctgcgatatgagcctcctgaagaatcgattcctcaggccaggtgatgactccagccacgacctcatgctgctccgcctgtcagagcctgccgagctcacggatgctgcgaaggtcatggacctgcccacccaggagccagcactggggaccacctgctacgcctcatgctggggcagcattgaaccagaggagttcttgaccccaaagaaacttcagtgagtggacctccatgttatttgcaatgacgtgtgtgcgcaagttcaccctcataaggtgaccaagttcatgctgtgtgctggacgctggacagggggcaaaagc

SEQ ID NO: 14656 - DNA, 327 bp, Homo sapiens
ccgggcaggtaccggggcagacagcccggcgaaccgcgcaatgcgcttcttctgcctgcagcagagaaaaggaaagaaaactccgcaggggctccgttggcttctccacgagtgacgaccatgttttcccagatagaagaccggagccctgctcctttgcgatccgccgagggctgcagagagcatcctcatccatttgggcacccctgcccaggaagagcccggccatccctttccggactggatccttaagaggtgaattttcttccgtggattccgatttgctccgtctgaccagcctaggcaatccagcatcgcgtggtacct

SEQ ID NO: 14657 - DNA, 415 bp, Homo sapiens
ccgggcaggtacaaatacagcttcaaggggccgcacctggtgcagagcgacgggaccgtgcccttctgggcccacgcggggagtaaacatatggtgaatccaagagaataagagaattatttgctcaaagtcacacagctgaactgagactaggaacaagtctcttgattcctagtgatgctattccaagttcagatcaaattcgagtagcaccatctttaaaaagccaaagaggctcagtgtggacaaagacaaaagcggtctttgagaactggaaagttgaggtgacatttctagtgactgaaatagaattaataatttagcttaatgttttatcaatttatactaaaatatatttaatattttttaataaattatatatataatattttgattttattatattataatttac

SEQ ID NO: 14658 - DNA, 410 bp, Homo sapiens
aggtacgcggggcagtcaccgtgggtggtgtggcagctggaattgggggcctcgagctggctgccatgattgtgtccatgtatctgtacaaacgagtcctggccttgtctgtggagacggattacaccttcccacttgctgaaaaggtcaaggccttcttggctgatccatctgcctttgtggctgctgcccctgtggctgctgccaccacagctgctcctgctgctgctgcagccccagctaaggttgaagccaaggaagagtcggaggagtcggacgaggatatgggaatttggtctctttgactaatcaccaaaaagcaaccaacttagccagttttatttgcaaaacaaggaaataaaggcttacttcttcaaaaaaaaaaaaaaaaaaaaaaaaggttcctgcct

SEQ ID NO: 14659 - DNA, 130 bp, Homo sapiens
aggtacaaaagttaagctccatttaccactcacttgacagtgtcctttaaatctgaacttgctcttgctcatgcggagcttggctaagagaaaccagatcagaatgcaagctgtaggtgggtgggtgagt

SEQ ID NO: 14660 - DNA, 463 bp, Homo sapiens
ccgggcaggtacaagaatgtagaggaaccttggcggtcaacattccaccacccccgactgaccgagtatggtatggtttccgaaagccaccacatgtggagctgaaagctcggccaaaacttggagagagagaagtgactttagttcatgtgacagactggatagagaagaaactggagcaagagtttcagctgttctttaatatcttcctacagaaagtttttgtcatgccaaacatggatgatgtttaatataactataatgcaattagccatgggacccttggttttatttcctgccttccggaaaaacccaaccttgggagggttgtttaaacaccccaatagggggtggggttaaaattttgcccccataagttgaaaactacccctgggatgggggggggtttatgaacaccaactatgtatggagtagatattaaaaaagagacttacagggggct

SEQ ID NO: 14661 - DNA, 443 bp, Homo sapiens
ccgggctggtacgcggggggcgcggagcagcgacggctgcgataatagcgaggcagcagtgcagctttcagagggtccgggctcagaggggctatgattcggagggttctgccgcacggcatgggccggggcctcttgacccggaagccatgcacgcacagaggaggcttttctctggactgggatggaaaggtgtctgagattaagaagaagatcaagtcgatcctgcctggaaggccctgtgatctactgcaagacaccaaccacctgcctcccgagcacttcggatgtggggaccctgggaaggggggctccttggatattttataacccctttttaatttcaaaaaccccgaataaccccccgtgagcacttaattggtaaggccatgtgggggcatcgtaatcacaataaaaactacctatattttacgtcggacctc

SEQ ID NO: 14662 - DNA, 412 bp, Homo sapiens
aggtacttctttttttttttttttttttttttttttcccgtctccccaaagctttatctgtcttgactttttaaaaaagtttgggggcagattctgaattggctaaaagacatgcatttttaaaactagcaactcttatttctttcctttaaaaatacatagcattaaatcccaaatcctatttaaagacctgacagcttgagaaggtcactactgcatttataggaccttctgggggttctgctgttacgtttgaagtctgacaatccttgagaatctttgcatgcaaaggaggtaagaggtattggattttcacagaggaagaacacaccgcaaaatgaagggccaggcttacttgactgcccaggggagggctatgggtgggacatggaaaaaaaaggagccttggccc

SEQ ID NO: 14663 - DNA, 422 bp, Homo sapiens
aggtactgcactggacactgctcatccctgggtgtcaggcaggtggctgcaccctaggccaggcgcagaggcctggcaggcaggcttggcatggttggccggggcgggacgtacttcggaaatttcaattcctgctgatcttgataaaactataacagaactagccgactggctggtattaatcgaccagatgctgaagtccaacattgtcactgttggggatgtagaagagatcaataagaccgtttcccgaatgaaaattacaaaggctgacttagaacagcgccatcctcagctggattatgtttttacattggcacagaatttgaaaaataaagcttccagttcagatatgagaacagcaattacagaaaaattggaaagggtcaagaaccagtgggatggcacccagcatggcgttg

SEQ ID NO: 14664 - DNA, 427 bp, Homo sapiens
ccgggcaggtactccagccagggcaagagagcgagaccctgtctcaataaataaataaataaataaataaataaataaataaataaataaaaaaaaacaaagttgattaagaaaggaagtataggccaggcacagtggctcacacctgtaatcccttgcattttggaaggctgaggcaggaggatcactttaggcctggtgtgttcaagaccagcctggtcaacatagtgagacactgtctctaccaaaaaaaggaaggaagggacacatatcaaactgaaacaaaattagaaatgtaattatgttctaagtgcctccaagttcaaaacttattggaatgttgagagtgtggttacgaaatacgttaggaggacaaaaggaatgggtaagtctttaatgccgatatcttcagaaaacctaagcaaac

SEQ ID NO: 14665 - DNA, 389 bp, Homo sapiens
ccgggcaggtacagtcccattgtaagtgttgtttctaattatagatgtaaaatgaaatttcatttgtaattggaaaaaatccaataaaaaggatattcatttagaaaatagctaagatctttaataaaaatttgatatgaaaagcacaatgtgcagaagttatggaaaacctatagaggattacaacaggtaaacgttaaagagaatacattgctgacttatagtgatgtggctaagaagtacgccttgcaagaggagtctgcagaaggagagcccacctttcacctccagtttgcattcaatctccactgtcccaaggtcattgactgctttgcagcagtaagtgcctccatcataggggctgggcttgcgaatttccagggtacctt

SEQ ID NO: 14666 - DNA, 220 bp, Homo sapiens
ccgggcaggtactgatgtaaggggcgtcgcacctccttcccctctcgtcctccgaggtcagtttagcaacagcggctgggaaaggtgctgagagcagagttcggtctctccggaaaccctgactccattctcggtgatgggggtgggggaaagagggtgaaaatgttggagacgtcaggtagttttttaaataactcggaaagtaaagacgagggtacct

SEQ ID NO: 14667 - DNA, 265 bp, Homo sapiens
ccgggcaggtacgcggggggccgatcgcacgccccccgtggcggcgacgacccattcgaacgtctgccctatcaactttcgatggtagtcgccgtgcctaccatggtgaccacgggtgacggggaatcagggttcgattccggagaggggagcctgaaaaacggttaccaattccaaggaaggcagcaggcccccaatttaccaattcccgacccggggaggtagtgacgaaaaaaaaaaaaaaaaaaaaaaaaaaggagtccct

SEQ ID NO: 14668 - DNA, 327 bp, Homo sapiens
aggtacttcaggccctgtaggatctcaggggcgatatagtcaggggtgccgcagaaggtgctggcccggctctccccgaatatgttctctttgcacatcccaaagtcggcaatcttgatgtggccatcccggtccaacagcacattgtccaggttggaggcccctgtaaatgatgcccttgctgtgtagaaactgcagtccacacattatctcagcggcataaaacgtggcacggtagagttcaaagcggcctttgtcctggatgtggtacgcggggtattatatctgggaaatttgctaagactaaagattttcggtacctgcccg

SEQ ID NO: 14669 - DNA, 431 bp, Homo sapiens
  misc_feature 99: n = A,T,C or G
ccgggcaggtacctctgggtcatattgcagaaccctgcccttctttgttgactgaggaaagctcgctccctgcccaggtttttcattgttgatcgaaanaacaccaggtggtgaatagagcccctctaagtgctcagataatcattattaataggtctgcttatcaagaggggcgtgaaggctcccaaaaggaaatgctggcacctgggcccagaagccagggcctctaactcctggggttgatttcttcagtgaagttgcaccctacaaagggaatatggccaaagcggcactcaactgaaggctgatattaagcgagtagaccgccctgcatttctgtgtttgtctggatggattgtaaaaaaaatgaactttttaaagtgacaaatgtttccccttattatttgttcgttttgcgagaggattttccg

SEQ ID NO: 14670 - DNA, 424 bp, Homo sapiens
aggtacttttttttttttgtttttttttttttcgaaagcaaataaatttaatctttcattttcaattaatctttaatatttcagaagtatatcaacattgcctaacatgctattttacacacaatagatatataatcaatgtttattgacttaaaaaatcttgggtttagccagataaatttgtaatattttatgaactagttaaccctgagtcatgaatttacctttttttttttttttctggagacggagtcttgttctgtcgcccaggctggagtgcaatggcgcaatctcggctcactgcaacctccatttcccaggctcaagtgattctcctgcctcagcctcccgagtagctaggattacaggtgcctgccaccatgcccagctaatttttggatttttaagaaaaagggggttttac

SEQ ID NO: 14671 - DNA, 440 bp, Homo sapiens
  misc_feature 147, 157, 171, 184, 185: n = A,T,C or G
ccgggctggtacgcggggagagcaatcagggagacggctccccggccagacttggctgatgttttcttgtttctgtttcagccttcaggataattccttcagcagcaccactgtaacagagtgtgacgaagatccagtctctctacntgaagaccanactgattgctccangtctccagatggnnacctttttgagaattaccccgactcaagggctctggtttaagagcacgcgccgccctcttgggagccgcagtagcagaatgtagaggcgaccgtgctggtggacagcgtattgcgacccagcatgggcaacttcaagttcagggaggcccagttcctttttaaaaccggaaagcggaaggacccacggagaaggtcaggagacagaccatggggcatccagccagtcagagtgtcaggtgagagcaggaacaccc

SEQ ID NO: 14672 - DNA, 412 bp, Homo sapiens
aggtacagacccctaggcgtcctgacaggtggatttcgacaaggtcattgtgccctgccaaggcacagcgtagatctggaaagagcagaatgctttccttttcagatgtggctggtcatggaaggggcagttgtccaagttgggctgggtcttggtactcaaagctttttcaagttcctcaaaagcagctctttcggacttttctttctgttcccgtaattcctctccctgggtagtcatctgtttgatgcgactaccgagttgagcaatttcttcttctttcatttccagggtttcatgcatctgacgttttgtctctgcgattaccattcccttatcttgttcaagctgttcaattaagttctttgcatcacgcaactgagtgattagtttagtcttctcggccatatga

SEQ ID NO: 14673 - DNA, 411 bp, Homo sapiens
ccgggcaggtaccagccagcaacaccaaccaaatgctactctctttaaagtccattttccttcttcttttttttttttttggagacagcatctcaccatgtcctggctggtctcgaactcctgacctcaggtgatccgccggcctcaccctcccaaagtgctgggattacaggcatgacccaccatgccagacttcccattttactttctgcaagctgtttccctagcagctccctctaggggagaggtgaaatcttgcaagttgtagcaagagcacacaggaaacccctaactttcctataccccacccgcctcttcccctttctgtcccgggatacctggcggcaagagacttcttggctattgtccatgctcccagaatcaagcataaatgccagacacggcgattga

SEQ ID NO: 14674 - DNA, 419 bp, Homo sapiens
acgtactgagttcaaaaactgattacttaaaactgccacacgcaaagatgaaaaccaaagtggtccacaaaacattctcctttccttctgaaggttttacgatgcatggttatcatgaaccattctttgactactaaacttaaatggccaattgaaacaaacagttctgagaccgttctgacaccactgataaagagtggggtggcaggtattacggataatattcatttagccttctgatctttatgggcagactaggtgaccttgccagctccagcagccttcttgtccactgctttgatgacacccaccgcaactgtctgtcttatatgaccaacagctaaacgacccatacgtggatagtctgagaaactctgaacacacatgggcttgtcaggaaccatatttaacaatggtgg

SEQ ID NO: 14675 - DNA, 354 bp, Homo sapiens
aggtacaaaaaggaccttgaactcttaaattggaccagcaaactgctgcagcgcaactctcatgcagatttacatttgactgttggagcaatgaaagtaaacgtgtatctcttgttcatttttatagaacttttgcatactatattggatttacctgcggtgtgactagctttaaatgtttgtgtttatacagataagaaatgctatttctttctggttcctgcagccattgaaaaacctttttccttgcaaattataatgtttttgatagatttttatcaactgtgggaaaccaaacacaaagctgataacctttcttaaaaacgacccagtcacagtaaagaagacacaaga

SEQ ID NO: 14676 - DNA, 413 bp, Homo sapiens
aggtaccactcgattgtcaacgtcaaggagtcgcaggtcgcctggttctaggaataatgggggaagtatgtaggagttgaagattagtccgccgtagtcggtgtacgcggggaattttatctggaagaaatgatcctccctctcatggtagctagtgcccagagtggggaacgggaatgtcatatagtggtgcttacagatgatgatgtggttgattgggatgaagaatatccaccacagatgggagaagaatattcacaaattatttatagcacaaaattatatagatttttcaagtatattgaaaacagagatgtggccaagtcagttttgaaggagaggggtcttaagaagattagattgggaatagaaggttatcctacctacaaagaaaaagtaaagaaaaggcctgg

SEQ ID NO: 14677 - DNA, 486 bp, Homo sapiens
aggtactacacatttaattactatagctttgtaataagttttatttatttatttttttttttttgagatggagtctcgctctgtcgcccaggttggagtgcagtggtgccatctcagctcactgcaacctctgcctcccagattcaaacaattctcttgccaaggccccccgagtagctgggattacaggtgcctgcccccatgcccaagttaatttttttttttattttttaagtagaaacacggggttttaacccatgttgggccaggccttggtcttaaacattctggaccttcaggggggaatttgccccaacttggggccttcccaaaagtgcctggggattacccaggccttgaacccccctgcccccctgcccctgtaaataaggtctttaaaaattcagggaaacccgtggtggtatttctttcctaaacccaaattggaagaaaaactaaaagcccaccagtagcccttaaaagttg

SEQ ID NO: 14678 - DNA, 430 bp, Homo sapiens
aagcgcccgtccaccgcgtacagtctgagaaatgccagtggcctgacagcagcatacattgcacaaacccagggtttccaagagtgtgcccagtttctcttgaaccttcagaattgtcatctgaaccatttctataacaatggcatcttaaatgggggtcatcagaatgtatttttctaatcatattagtgtgggaacaaatcgaaagagatgcttggaagactcacaagactttggagtaaagaaagctagaactgaaggtgagaccgctttgcgggtgggaagagcacacttatttttcctttctgtaatatgcctttctttttatggctgagccgccaccttcgagatgaaaaccttcactttaggtgggtaatgcgcctggtggattgggctgtggactgtggaaaatttttcctgtacctggccg

SEQ ID NO: 14679 - DNA, 410 bp, Homo sapiens
acgtactacgtgctccgcatcgaagatggaaatgggcgacgggcgtttattggaattggcttatgggaccgaggtgatgcctttgacttcaatgttgcatggcaggaccattccaagtgtgcgaaacagcactgtgaaatggcgaaacatgcccagatcccataccagggccttaaactggacctgcgctgtaaggagggccagaccatcaagctcaacatcaacatgaagaacaaggaaggagcagctgggaatccccgagtccggcctgccagcacaggagggctgagcctgcttccccctcccccaggggggaaaacctccaccctgatccctccccctggggagcatttggctgaggggggatccctcgttcagccagcaatcgctcccagttcacgaggtgctct

SEQ ID NO: 14680 - DNA, 421 bp, Homo sapiens
aggtacagctcaaaaggcagttattgaggagtttgtccagacacttctggtgctcttgctttacttcctctgaggccatggagtctcccacctcaaaatcagagctaatcctcttcttgaggaagcgtaagtatagctcactgcgggcattcatcagggtgacctcagtcaggatggggtccagttctcttggttcgattttttctgttgtagaatttctccatcaggttgttctgaacatgccggaactgctggtggtagtccctttgcttgaagaacttgtctaccaccttctccacctgtctgtcacattccacctgcagatatttgaatcaggggatatagttctccttggcccataataggtctcctctattggctggtgggtttccactttgcgggcaaatcccttaaaacgaag

SEQ ID NO: 14681 - DNA, 416 bp, Homo sapiens
ccggccaggtacgcggggggcattgaggaagccttcaccagcaaggctgacctgtcagggatcacaggggccaggaacctagcagtctcccaggtggtccataaggctgtgcttgatgtatttgaggagggcacagaagcatctgctgccaccagcagtcaaaaacaccctccttttctgcattagtggagacaaggaccattgtgcgtttcaacaggcccttcctgatgatcattgtccctacagacacccagaacatcttcttcatgagcaaagtcaccaatcccaagcaagcctagagcttgccatcaagcattggggctctcagtaaggaacttggaatgcaagctggatgcctgggtctctgggcacaacctggcccctgtgcaccgagtggccatggcatgtgtggccct

SEQ ID NO: 14682 - DNA, 414 bp, Homo sapiens
  misc_feature 164: n = A,T,C or G
aggtacatgggactacaggcacgcgcctgtaatcccagctactcaagaggctgaggcacgagaatcacttgaacccaggagacggaagttgcagtgagctgagatcacaccactgcactccagcctggtgacagagcaagactccggctcttaaaaaaaaaaantataattaaatggagggagagagaataaacagaaaagaatgtggctgggaattgtgaatcagaagattataccccccaatttttttcaatccccttttctcaaataataaattagttaaatcagtttctgagttatgccactggctgatgaagagttgagaggtctctttgcagaatgatctttttgtttcgttttgtttcttcttctgcatttaaaaattaaaagattggtttgaggatgtgatgaaat

SEQ ID NO: 14683 - DNA, 410 bp, Homo sapiens
ccgggcaggtacaccagctttcccatcacccctgcaaccataggagtggtcttggcttcctagttatgttcctatcagggttgcctcactatcttctgggcttctctgctctttcgtcaccagtggaattctttatattaaatttcctctgttttaaagacttcgagtgggttatattttccttgctggaccgagttcaaatgaaaagtctgagttgtagggaaaacatcttttttattattattatttttatttatttatttagagacaggttcttgttctgttgcctgggctagagtgcagtggtgcaatcctaattcactgtggcctcaaattcctgggctcaagtgatcctcctgccccacccttgagttgataggactacaggcacacaccaccatacctggata

SEQ ID NO: 14684 - DNA, 423 bp, Homo sapiens
aggtaccaggtgaacaaggtttaccagaaagcgtttgatacaagaaaataagagctcaggatgagggaaaagagaaagattgagagaatttgtgccctcaaccatttcctcagactctaagaaagaacacgctctctccatgcaggtctgaagctcaactctcttattgcctcacttcatgtatacctcactttgcacaatctaattatgactgtaaagaaggtggggacacatgtatttggagatcacattttaaacacatgaggaaaagttgcgatttgaacttttgattgatttttggggggaggcaagaattattgtgggatgcaaataaatgttcctttgattgatcgacttgccaaatatagatttgtgtgcatcaggctatctttttttctttttttagagaagttcaatataagc

SEQ ID NO: 14685 - DNA, 354 bp, Homo sapiens
aggtacctcaaagccggaaaggtcagccccccgctgcaagttcttagattcctggaggatctgcagagtcaacattaggagtatccatccattcaccaaggccatcaggaatgtgctgaatgtgctgtaaagaagagttgtcaattgtgcacagaagataagaaatatatgatgaatagataattgaaaagagatcctccagaaagagcagaaggaagtttcttcaatgttctggcactaagatatggtgaacagacagatggaggccacaacattcaagctttattaaacttgccacagataccagtaacagcaattcaaagatgtgaatgggattaattcagggctgttgct

SEQ ID NO: 14686 - DNA, 357 bp, Homo sapiens
aggtacacaagtatatgagttttgtttaaagcactactgaagccaagataaactctggcttagcatgcccctgacggatcagtctagtaatcttatcagaaccaagattacctaaaacattaaccaaaggaaaagctccctcaccccaacctatggctgcccacatttttcagattgaatcatttcaattgtattttaaggttcattgactcttttccacctccaagctgctcctgaacacagattattattttttaattttgaaaactttctcacttctagaatttccacttgagcctgttattattgtagtttcttcttctctgctgtgatttcctatccatttattttaagggt

SEQ ID NO: 14687 - DNA, 288 bp, Homo sapiens; identical to SEQ ID NO: 5518

SEQ ID NO: 14688 - DNA, 252 bp, Homo sapiens
agtacgactaccaggatccatgagcttaaacaggccaaaatgagcacagtcatggataccgtaggccggaggcttcgggactccctgggccgaactgtggacctggggctgacaggcaaccatggagttgtgcaccccagtcttgcggacagtgccaacaagtttgaggagaacacctactgcttagaccggaccgtagagacactgctgctccgctgtggcaagaccatcatggaggagcagctagtacct

SEQ ID NO: 14689 - DNA, 103 bp, Homo sapiens
aggtacgcggggaggcgaagaacgcaaagctgagaacatggacgttaatatcgccccactccgcgcctgggacgatttcttcccgggttccgatcgctttgcc

SEQ ID NO: 14690 - DNA, 469 bp, Homo sapiens
attggaactccaccgtggaggcgggcgaggtactttgggaggccgagacgggcggatcacgaggtcaggagatcgagaccatcctggctaacacggtgaaaccctgtctctactaaaaaaaaataaaaaataaaaaataaaaacatttctgggcatggcggcggaggcctgcagtcccagctactccggaggcctgaggcaggagaatcgcttgaattcgggaggcggaagttgcggtgagccgagattgcgccactgcactccagcctgggcggcagagccagactctgtctcaaaaaaaaaaaagaaaagaaaaaagaaaaagccactccaggctcaactgatcaggatttgcactgcaacagcatgcccagggcacagtcatgtttgagaaatacggaggacctctgaagtgcttgattctgtgaactcacactgctgtaagcagacttgtttctagataggggat

SEQ ID NO: 14691 - DNA, 424 bp, Homo sapiens
ccgggcaggtacgggggagggtagagtgagaagcaccagcaggcagtaacagccaacccttagccattgctaagggcagagaactggtggagcctttctcttactcccaggacttcagcacctaagacagctccaaaacaaaccagaacagtcagctccggggaagcacgactgggcgagaggcacagaaatggacaccagaaataaggcccagctccttgtgctcctgactcttctcagtgtgctcttctcacagacttcggcatggcctctttacagggcaccttctgctctcaggttgggtgacagaataccctttgagggagcaaatgaacctgatcaagtttcattaaaagaagacattgacatgttgcaaaatgcattagctgaaaatgacacaccctattatgatgtatccagaaat

SEQ ID NO: 14692 - DNA, 431 bp, Homo sapiens
ccgggcaggtactttaatagttaagagaaaataagtttgcagatttttaataatctgtttgtaaaaggctatctctaagcctagtatgtgggtaattttacaggtgtgttttttgataactttaatataaaataaactcattttatttgtgccaaaaaaaaaaaaaaaaaaagtacagcaatgagcaaatccaacctcagatctgaagtgtcttccagtctggccctgacccagccattctctgcccttccttctccctttagggtagcccaaatcccattgccacacaacatctcaacttaccatccctttcctctatccccatcccctctgtctgcgtcacagaaagtctgtgtgttctgaagagttcagccttcctctaaccaaacctacactttctttaccaccgtgattctcagagccagcaagaa

SEQ ID NO: 14693 - DNA, 440 bp, Homo sapiens
  misc_feature 271, 272, 273: n = A,T,C or G
aggtacacgggggtgagcggaggagggtgctgcttatgcgagagcaggttttgggagctcactaaagcaggtccctgattctggtcttgaatagcggaggaggaaaagaagatgatgggggaaaagaaaagaagccatttatgcatccctccctaattcagtatccgagcatgagggagtgtcaagctagtggggaagaagagagggtttagttttgaatgaagttgggagtttttattattgcactgaactaaataggcattttattaannnaaaaaaaaaaaaaaaaaaaaaaaaggtccctgcccgggcggccgctcgaagctcgatggtatacaggcattcagagctcttggggtaagggtttgggaagtcagggctggtgatcaccccagtcctttgagtgaagaggttgtcactgcactccacttggcaggtcc

SEQ ID NO: 14694 - DNA, 450 bp, Homo sapiens
aggtacgcgggggaataagggaccccatcgggggccaacccttgagcacccctatcaactccctattgtagtaaacttggaaccttggaaatgaccaggccaagactcaagcctccccagttctactgacctttgtccttaggtgtgaggtccagggttgctaggaaaagaaatcagcagacacaggtgttgaccagagtgtttcttaaatggtgtaattttgtcctctctgtgtcctggggaatactggccatgcctggagacattatcacttaatttctctgaggacacagataggatggggtgtctgtgttatttgggggatacagagatgaaagaggggtggggatccacactgaaaaagtggaaagtgacatgtgctggacactgtccatggaaacactgatgcagaacctggaggcacaacgcaccagacactttacagtaggg

SEQ ID NO: 14695 - DNA, 355 bp, Homo sapiens
aggtacttttttttttttttttttttttttttggaagctgggatatcttacagaggaaggaaaaattaaccttttttactttctttctcactttttaaatcagccaaagtcaagcccgtttgccaacctgcatgtccatgcctgtaagcccttctcttggccaaggaagaaaggaagaaagaaaaaagaaacccaggggcctgtatcccctgattaaacacagcacagcactccaggcagacatgcccgggggcggctcctttgcaccattgacctcaggccagacacctcagcgccaacaatgggacctcggccttccggctaggtttgccccaggctgggcaggaaaccagct

SEQ ID NO: 14696 - DNA, 458 bp, Homo sapiens
gccgccgagccaaacttaaatggctgatgaagcctgtgacccccttacccactggaaacaaaccaaaagttactgaaatgcctaatagtgattctatacctgaagatgcataattgcattgtgattcagctgcagtttcacatgagccaacaccagcttgaccccagaggggaggggcatgaaaatgcagctgtgcagggtgcaggggctgccgccattgggccccctgtgcagcctcaggatgccaacgccctggagccccctctcaatggagacgtgactgaggatacacttgctgaatgtattgattccgtcagccttgaggcagaacccatatccgaaatacccctgcgagaacagaattatctggctgtggattcccctccaagtggaggaggatgggcaggctggggatcctggggcaaatctctggtgtcgtcagcatctgccacaatggg

SEQ ID NO: 14697 - DNA, 455 bp, Homo sapiens
gtggtggcctggccggccccggctctacccccgcttactttttttttttttttttttttaattcaaagccagttttactgcaaagtttgccttaggccctatacttggagttttacaagttacgtccctacatttgcataatacaacgaatttagcttaaatttggaaacagggtaaagttttgttccagaattgttgcaagaggaacactgggcgcaacttaatgatcttttcttttagattcttcctcatctttgaaacctttgcaagaattcctgaattcaaaaagagattggtgagatagcctgccccttttaattttgccccaaacccttgtggtggggccaattaataatctcctggaaaaatgtggggatttaacaaagttaaatgtttttgaaaaaattaccccataaagaaatgtggggaaactgaaaaaaccagtttaaaccttg

SEQ ID NO: 14698 - DNA, 298 bp, Homo sapiens
ggccgagaggtggttacattcgttgaaggacaccagctgcggaatttgcggctttggcagattgaaatcatggcaggtccagaaagtgatgcgcaataccagttcactggtattaaaaaatatttcaactcttataccctcacaggtagaatgaactgtgtacgcgggtttaagaagcggacggagctgttcattgccgccgagggcattcacacgggccagtttgtgtattgcggcaagaaggcccagctcaacattggcaatgtgctccctgtgggcaccatgcctgagggtacct

SEQ ID NO: 14699 - DNA, 441 bp, Homo sapiens
aggtacgcggggagctgtccgaagggggccaaccctaaggcaaccatgggcggacctgggcaaacccaataaagcggatttgcagcgcctggtggccgccgagcagcaaaaggcgcagtttactgcacaggtgcatcacttcatggagttatgttgggataaatgtgtggagaagccagggaatcgcctagactctcgcactgaaaattgtctctccagctgtgtagaccgcttcattgacaccactcttgccatcaccagtcggtttgcccagattgtacctcctcctgctcctcaagagtgtggtctattttgccatcatcacctgctgtctgcttagaagaacggctttctgctgcaatggagagaaatcataacagacggtggcacaaggaggccatcttttcctcatcggttattgtccctagaagcgtcttctgg

SEQ ID NO: 14700 - DNA, 298 bp, Homo sapiens
aggtactgtaaataggtcaaggctcattttaaaaaatatgttgaaggccggtgtgggggctcatccctgtattccaaccactttgggaggctgaggtggttgggtcacctgaggtcaggagttccagaggagcctggctaacatggcaacagaatgagactgtctcaaaaaaacaaaaaaatcagtgttcatgtgaaaacctgtgcgtcaatgcttatatcaactttatttgtaaaaaataaaaataaaaaactggaaactgaacaacaaagtggaccatacctatagtacctgcccg

SEQ ID NO: 14701 - DNA, 162 bp, Homo sapiens
aggtacgcggggcttttcacaagatggcgccgaaagcgaagaaggaagctcctgcccctcctaaagctgaagccaaagcgaaggctttaaaggccaagaaggcagtgttgaaaggtgtccacagccacaaaaagaagaagatccgcacgtcacccaccttcc

SEQ ID NO: 14702 - DNA, 379 bp, Homo sapiens
ccgggcaggtactagaagacacaccaagacctcctctgctggaaatgtccaggcatgttatactctttgtatgaattctggaaaaagtagtatatggtgccaaaaacttagaagatgcattttcctttggacatgaaatatgaatgcttttcttggttatttcaattcacagtaaatccttctgaagctgtaacctctgggatgccatctaggccaattccttgacaagtcaggctgccatacaaagatggtttccctgggggatgacagctcagccaggcctccccttcatccttcctgagggcttgcgcccagtcgctctgaatcctcaaaggcgccgccatctcgaccccgcctccaccagcccccccgcgtacct

SEQ ID NO: 14703 - DNA, 438 bp, Homo sapiens
  misc_feature 390: n = A,T,C or G
ggcgttgccgccgaggttctggagactgaggcgggagggtcacttgagcccaggaattgtgagattaacctgggcatatagggagatcctgtctctatttaaaaaaagaagctatgtttacactacactatagtctatttaaagtgtgaaatggcgttatgtcctttaatttaaaactcttgatgctggctgggttcggtggctcatgcctgtaatcccatcactttgggaggccaagacaggttgattacttgaattcaggagttcaagaccagcctggacaacatggcaaaacacgtctttaaaaaaagaaaagaaaaaagaaaaacagaaagaaaaagaagaaaaactacttgctgcccttacttgaagctcaattatttaaaacanagaaaaaaatgcacagatcaaaaaaaaaaaggtacctgcccgggcggg

SEQ ID NO: 14704 - DNA, 425 bp, Homo sapiens
aggtacgcggggaagcccaataaacctctcattctagctaaccgcgtcggggagcggcgccgggagaagggcgaggcgacttgcatcacggagatgtcggtgatgatggcttgctggaagcagaatgaattccgcgacgatgcgtgcagaaaagagatccagggcttcctcgattgtgcccgcgagggcttaggaagcccgaaagatgagatcaatacaggaaaccctgggagagtctgggagtttacttccaaataaattgaataagttgttacagaggtttcctaacaaaccttacctcaactgaaaatggacaagtattttcaatgactgaaatatagcttctgacaactatgcacaggcgttttagagacattggcattgccatgccctctttggaggggtggagaggcaaaacacttttt

SEQ ID NO: 14705 - DNA, 418 bp, Homo sapiens
aggtacgcggggctgttcttgtgacagcgagtaagttctcacaaggtctgatagttttataagggacttttctcccttttgctcaatacttctccttgctgctgccatgtgaagaaggatgtgtttgcttctccttctgccatgattgtgacattcccagaacctggaggccaggctatgacacagagtcaatcaataaccagggagatctgcgatatagcccagtcggtggggccttgctgccatctgccatatgacccttccagtcccaggcttctgaagagacccggtacgtgcggtgcagttttcaactgacctttcgacgcagaacttgagccatgaaggtaacaggcatctttcttctcagtgccttggccctgttgagtctatctggtaacactggagctgactccctggg

SEQ ID NO: 14706 - DNA, 404 bp, Homo sapiens
ccgggcaggtactttttttttttttttttttttttttgctggggtcagagttttaatcctgggaaaaagaatctggccgctgggccatgccctgggactagcccgctggtccctggtgtgtccgaatcagtgctccagtgcccgcctcttctccagcttcttctgtagctctgccgtcatgtctgccagccctgggggttcaggaccaggagctgcagctggctcagggatccccagtccatgcccaccgccctgacagccacccaggaccagctacagatttgcagggccccgtgcaacaggacagtgtgctcgaaggcattaagaatttcaagacagagacagcagaaccttaaaagacagggcgcttcggagtgtggggacttgtgtgactgtaccttggc

SEQ ID NO: 14707 - DNA, 426 bp, Homo sapiens
aggtacacaggccgggcacagtggttcacacctgtaatcccaacactttgggaggctgaggcgggtggatcacaaggtcaggagatcgagaccatcctggccaacatggtgaaactctgtctctactaaaaaatacagaaaattagccagtcatggtggcacgttcctctagtcccagctactcgggaggttgaggcagaagaattacttcaacatgggatgtggaggttgcagtgagccgagatcgcgccactgcactccagcctggtgacagagcgagaccccatctcaaaaaaaaaagttgtatgtgacagctaaccatagtaaaaaaaaaagaaagaaaaaagagagagaaagttgggacaacactaaatcattagtaatttgagcacatttcctccaaggcatatgctatttttcaacttg

SEQ ID NO: 14708 - DNA, 305 bp, Homo sapiens
ccgggcaggtactcctgcttggtgatccacatctgctggaaggtggacagcgaggccaggatggagccgccgatccacaccgagtatttgcgctccggcggggcgatgatcttgatcttcatggtgctgggtgccagcgcggtgatctctttctgcatgcggtcagcgatcccagggtacttttttttttttttttttttttttttatttaaaatgttctttttttatttgtcgtttaaaaacaaacttggaagaagcaaaatccaaaacttaccctttgcctctcgcaacataaatatgtacct

SEQ ID NO: 14709 - DNA, 101 bp, Homo sapiens
ggtggcccagggaggaccccttacagcaaccacagcgtcgggaatccgaaagggaaaagaggtgcgcaggcgccacacacggcctttacccccgcgtacct

SEQ ID NO: 14710 - DNA, 419 bp, Homo sapiens
ccgggcaggacgcgggtgccatttggagggtaggggatctgcttcccactgtgactgggctatgggattctgactaccttgcttacagattcatggtttgataaatttgttgtattcaaaaacttgaaatgcaggacgccattaagtgtctgtttatatttttggaatatttgtattacttacaattaattaataaaagtgggaaaaaaaaaaaaaaaaaaaaaaggttcctcggccgcccgggcaggtacgcggggggaatgtcttacgcaagctgacagtggatgtgcaattcttaaagaatgggcagattgcattcacaggaactacttttattggctatgtaggattatggactggccagagcccacacaagtttacagtttctggtgatgaacgagataaaggctggtggtggg

SEQ ID NO: 14711 - DNA, 475 bp, Homo sapiens
gtttaaggtacgcctatacactactatagggcaattgagctccccgcgggggcggccgaggaactttttttttttttttttttttttttcctggggtggttatttttcttttctgtgtccttccccaacagcagttggaattttcttttgaacacaaagtaaattaatgtttatactgttttttcacctgagtcatgtaaaaggtgactcctttcattttaaaaagttatatttaatttttgggggccttaattaaaatttaacatttaaccatgtgttttttttttgtaaacagtctacatgtcaacaaatggataagggttaacaaaggcaaatactgacttcatttgggttttaaacacgattatatgaatttttcttttttaattaaaaaaatgacataaaaccattcatataggtcctcttctttcaactggtttgaaatatagctttaaatatgggtagatcaagacaa

SEQ ID NO: 14712 - DNA, 357 bp, Homo sapiens
  misc_feature 331: n = A,T,C or G
ccgggcaggacgtctacagtgagccttgtggtaagcttgggcgctcggaagaagccagggttaatggggcaaactaaaagtaaagtctctcattccacctgatgagaaacacccagaggtgtggaggggcaggccaccccttcagggtagggtcccctccatgcagaccatagagcacaggtgtgccccaaagaggagcagagagaaggagggagagggcccacgagagacttggaaatgaatggcaggattttaggcgctggacttgggttcggggcacctggcctttccttgtgtatttctcctactgtctgcctaactatttaatacnggggaaaaaaaaaaaaaaaggtacct

SEQ ID NO: 14713 - DNA, 426 bp, Homo sapiens
ccggccaggacccttgcctgtgctggggtccacccctgccagtggcaccatgacctcgccaatgacatcatcccgagagaagcggtcaaagctgaggacaaggaagtgcagcaccaggtcctgcagctggctgtaggggatgccatagaaggtgaaggtctcgtcaaacacagggtccagggtcttccgcagcactctggtcttcacccgatgccgtttgtcaggaaggatggtcattttgatgtaggggtcagatccctgggtctggtcatccatcactggcagcccgtgggcctcctggattgtcaccaccagggcttttttcgggaagttatagtccactgagaaggtgagggatcctagcataacatcctcctctggaaatgatggaaaggtggttttgctctcccccagggtcaggcttgt

SEQ ID NO: 14714 - DNA, 423 bp, Homo sapiens
aggacttggccggtcaaaaaggggcattagggcagaaaaataaaataaaagtcatctaggtgggaagggaagaagtataactaaatagagatgggagaacgatatggtggttttgtgcatagtaatccaagggaaaactatagaaaatccaaaggcatgatttattaataaataaattcagcaaagttacaggatacaggattaaatatgcagaaattggttatctttcaatatagtatcaatgaataaatcaaaaatgatgttaagaaaacaatttaattttcaacaatggtcaagcttggtggcttgtgcctggaatcccaacactttgggagtctgaagcagaaagactgctagaggccaggagacccgcctgggaaacagtgagatcccatctttaccaaaacaaaccaacaaaaaacc

SEQ ID NO: 14715 - DNA, 421 bp, Homo sapiens
ccgggcaggtactttctttttttttttttgtttttttacaaaaagatggggtttctccatgttggcaagggtggccttgaactcccaacctaaggggatccgcccgccttatcctcccaaagtgctgggattacaggcgtgagccaccatgcctggcttaaggagatacataattaggggatccttaaaagaaatggaacagtttgtaagaaggataaatcttcatactttttgctaggagggaaaactattagggctacatactctataattctagaaccatttccttcagaaggctcctgggtgaccttttcaaataaaattgttaaaaatgcagcaaacgatagcagggtcattggtttggggtggaaaaaataagcccatctctggttgtcttccacatcagaaaatggtattattg

SEQ ID NO: 14716 - DNA, 233 bp, Homo sapiens
  misc_feature 171, 172: n = A,T,C or G
aggtacaatatgctgcagcataatttgtcaggccaaccttcacaccatattttggcagttcgtgtgcatacgctgcgcagactatcatatccccctctatacgggcataagcaatctgacaaatgatatctctgtttgtcacacgaactatcatcctgtcccgcgtacttnnttttttttttttttttttttacgaatgaggcaatttattaacccagcatggtttgttctaa

SEQ ID NO: 14717 - DNA, 428 bp, Homo sapiens
ttgctgagctggtgtggaacgtctgtgatcagattcattgggcttttgccagctctttttagattgtcctcttgagacctgtttacagaggaatggccagaggccacaggcactgcctcctgagaccatccacctgatgcgaagaaagctagaaaagcccaaccctgagaaaaatgcttgggaacacaacagcctcacaattccgagtccagcatgtgcttcggaggccagcctggaagtgactgatttattgctcactgctttggaaaatccagtaaaatatgctgaggacaatatggaacaaaaggacacagacagaattatttgttcaactaacattcttcataaaactgatcagacactccgaagggatgtatctcaaacaatgaaggaagcaaaagatgaacaagtgctttctcacaacttga

SEQ ID NO: 14718 - DNA, 215 bp, Homo sapiens
aggtacttctcctcttaaagaattggccattttcatttatcatgtaaattatccacttttatgcataacatactttccggcacgccggagccgcaaaagcctcgaccgctacgactcctctgtcgtctactgccccgcgtacgcgggggtagtggcttcgtcttcggtttttctcttccttcgctaacgcctcccggctctcgtcagcctcccgc

SEQ ID NO: 14719 - DNA, 555 bp, Homo sapiens
aggtacttttttttttttttttttttttttccattttttttttttttttttttttttttttttttttttttttttttttttttttttttttttttttgggcaacaaaaagctttttttccttttggcccagggtttgttgggatattaaaaaaacctcccttttggcgggggggaggggtttaggcaaaacccctttttttttgcggggggcccttaaaaagtcgtggggctaaaaaggcttttatccgcccttgaaagggaccctttcaaaaaaatttttccccagcccagctttggggccccccaccctgggggggttggtcagggggcccccccttttttggaaaagctcccctcccccatttgggaagggggtttcccgaaagtcccaaaaatgggggtcctggcgggcaaaccccggggcttaaaaatccaaaggggccgggttcaattttttctccagggcccggggaattttaagggggtcgggggtttacccccccccattttaagggggctttttaaagccccgaaaaaaaccccgccccctttaa

SEQ ID NO: 14720 - DNA, 565 bp, Homo sapiens
ggcactactatacgggcgacttggagctaatctcgagctggcaccgcggtggcggccgaggtacacgtagcgccgtcaatctcagctcactgcaagctttgcctcctagattcaagcagttctcctgcctcagcctcctgagtagctgggattacaggcgcctgccaccattcccagctaatttttgtatttttagtagagacggtttcaccatgttgggttaggctgggtcttgaaacttcctaaccctcaaggtttttccgctttgccctcgtccttcccaaaagtggctagggattaacagggcattaagtccaccgcgccccgtgccgcttttagaaacctagtgggattccccccggggcctgcagggaatttcaattatcaaagccttattcgaataccccttctaaccctcgaaaggtggggggccccgggttaccccaaaccttttttgtttcccctttttagttggaggtggttaaaatttgcgccgcctttgggcggtaaattcaattgggtccattaagcctgttttttccttagtgttgaaaaatttgcaatt

SEQ ID NO: 14721 - DNA, 360 bp, Homo sapiens
aggtacgttgtttagctgaaagggtcttcttagattttctgtgagcaccaatttgttcttcaagatacttctgctgcatttgaagcagctgttgggtctcctggagccactcttcatactgcttacgctgtgaatcattgacaaagcctggaccaaaatttggaggattcccgcgtacatggtgccaaccgcctcggggcaaactcgctcttggacctggttgtctttggtcgggcatgtgccctgagcatcgaagagtcatgcaggcctggagataaagtccctccaattaaaccaaacgctggggaagaatctgtcatgaatcttgacaaattgagatttgctgatggaagcataaga

SEQ ID NO: 14722 - DNA, 352 bp, Homo sapiens
ccgggcaggtacgcggggtggatcctgcaggaagcccaggggccttagacagcagatggtggggtgtgtgtgaggggtggtatgcgtgctgctctgagtttagggctgagtgtgcaagctaggagcagaggacaggtccaagcctggcttctcaccagtccgtctgaggtggaaaagaatccagcactctccccagcactattccgaccgtggtctcccatcccttggatgccatctcctattaggagggggagaaagaaacgcgtgccttataccaaggtgcaattaacagaacttgaacggtaatacccccacaataattcattactaaggacaaacggaggctgatatt

SEQ ID NO: 14723 - DNA, 102 bp, Homo sapiens
acaagagactctcggggtccccgcggtcggaagccaccatgcccaagaacggatggctgctgattacacccgcttgcccgccgaatccttccccgcgtacct

SEQ ID NO: 14724 - DNA, 397 bp, Homo sapiens
ccgggcaggtaccctcatcagaaaaagagcccgcgcattctcctgccgatgccttgtcggtcgtagaggacattgaacttgttcacaaactggttcatggtgttgcacgttttggtgatggtgccgaggtaggccatgagccccacgtcgttgcattgatcataaaaatctgtcttgaacttgtctgtgctgagcaccgggagacagtgacacagagcataggccttcccgcaggattctcatgatttaaaggggaacctcttcccgcttctagaaggcctttgaccgtacctttcggcctgctctagaaactagttggattccccccggggcttgtagggaatttcgaattatcaagcctttattcgattaccccgtcgacccttcgagggggggg

SEQ ID NO: 14725 - DNA, 462 bp, Homo sapiens
aggtacttgagcaaaataacttaaaaaaaatcttaagaggaggaggacaatgatattttctaaaaacatatttgaggctgggcatggtggctcacgccagtaattccagctctttgggaggccccggggggtgaactccatatgtcagtcgtttctaaattatctcttttcctttctactgattaaaccctccttttttatttatataatcaataaatgcatctctctcctaatcctttgtgcgttactccttcatttcacccaccaatcctttccttcattcaattcatttatctcatccgatactttcctcgtttactcctcttgctcaaataatctcatcattttccttcaatcttttatatcgatgtacttgtatttcatcacttcacttgattgcctcattttcattacctttctctatgggccaataacttcctttcatttcactttaagtattcc

SEQ ID NO: 14726 - DNA, 371 bp, Homo sapiens
aggtacctatgactctggcatcagattcctggcaccccagtcccactagctgtggtcccaagaatgaacctgcattttaacaagattcaaaaccattgcagaggccaggcgaggtggctcacacctgtaatcccagcagtttgggaggccgaggtgggtggatcacctgaggtcaggagttcaagaccaacctggccaacatggcgaagtcctgtctctactaaaaatacaaaaattagccgagtgtagtggcaggcgcctgtaatcctagctactcgggaggctgaggcaggagaattgcttgaatccgggaggcataagttgcagtgagctgattgtgccactgcacttcagcctgggtgacagagtgg

SEQ ID NO: 14727 - DNA, 368 bp, Homo sapiens
ccgggcaggtacgatcttggctcactgcaacctctccctcccgggttcaagtgattctcgtgcctcagcctcttgagtagctgggattacaggcgcgtgccactgcgtccggctaatttttgtatttttagtagagatggggttttaccatgttggccaggctgatctcaaactcctgacctcatgtggtccacccaccttggcctcccaaagtgctgggattacaggcgtgagccaccgcgctcagcctacaagcaattttttaaaaactgacacctattactgataaaattctctgtttaaaatcctatttactattttaaagataagtattagttttttttaaatacaatcccgcgtactttttt

SEQ ID NO: 14728 - DNA, 453 bp, Homo sapiens
aggtacgcgggattgagggtgcttaaaaatgctgaagaaactttaaaacatgattcttcttataattttatgtgattcttatagcacaatcatttttgaaaaaggaaaactaggctgggcgtggtggctcacgcctgtaatcccagccccttttgggaggcctaacgtgggtgggatcaccctgaggtccaggaagttttgaagaccaagccctgaactaacaatggaagaaaacccctggtcttctatctaaaaaaataccaaaaattttagcctgcggccgtgggttgggccacaatgcccctgttaaattccccaggcctcacttcaaaaaagggcttggatcgggagagaacaaattccttctttgcagccccccgttaagcataggactggcttttaaggggcgaagaccccaagaaatccgcccgcccatttggcaaccctcccaag

SEQ ID NO: 14729 - DNA, 259 bp, Homo sapiens
aggtacgcggggtttgagtcactggtgcgccaggatccccgctttgaaatctgtgtggaagtcattctggggcttgtctgctttcggctaaagggttccaacaaagtgaatgaagctcttctgcaaagaataaacagtgccaaaaaaatccacttggttccatgtcacctcagggacaagtttgtcctgcgctttgccatctgttctcgcacggtggaatctgcccatgtgcagcgggcctgggaacacatcaaagagc

SEQ ID NO: 14730 - DNA, 282 bp, Homo sapiens
ccgggcaggtacgcgggtcctgcaggaagccgcgtgactcccgcctcctccctgtgctctctggctctggactgtgactgcgcctggattctgccattgcgacacatttttgtgcctttcagcccctggtgtctgcagtgggggatttaaggcacccgctttcacttctttcttgtttggagttttttgttggaaccgccggcgttggctccgaatacttagcgacgccactggcggcaccttctcctgcgcccagtgatgtttccacggtgcctgtacctt

SEQ ID NO: 14731 - DNA, 425 bp, Homo sapiens
ccgggcaggtacgcggggactcacaagcttggaccgcatcctagccgccgactcacacaaggcaggtgggtgaggaaatccagagttgccatggagaaaattccagtgtcagcattcttgctccttgtggccctctcctacactctggccagagataccaccagtcaaaccttggacccaaaaaggacacaaaggacctctcgaccccaaacttgcccccagacccctctccagaggtttgggggtgatcaacttcatcttggacttcaaacattatgaaggaagcctttatattaaaatcccaagaacaaagcaaccaaactcccttggattaattatttcattcacctttggattgagtggcccccacacggttcaaagcctttaaaaaaaaaagtggttatgcctgaaaaatactaaaaaaa

SEQ ID NO: 14732 - DNA, 372 bp, Homo sapiens
aggtacacatggtaggctaaaaattaaaactgcttttccacaaaactgataaattactagattcttggttctttcatgatatcataacattaaatcattaaaaatataaggcaatttaatgtaaactactagcatttacaaaacagttaagttataaaaaactgtatttacaagcaaatgcaccaaataccagtgaacatgaaacaggagtgaagtttgctggagaacattaaaaattacttttcagtgggtttcacttcacatttcatgctgcactgggctctgacacgttcagcaccatgaagcaaacactttggcaactagaaatgttaccttctgtttgactttttttctaaaatgaaaaagccgtct

SEQ ID NO: 14733 - DNA, 409 bp, Homo sapiens
ccgggcaggtacccacagctggtattacaggctacaggagtttcaaggtagggaaggatggctgtgcatgggcccagccctgtggagggtggtggtcttcagccactccaaggccaccagatctgccactgaagtaggaccttgcttccaatggtgacaagccctacagcagatctacaggcagaccttaacagatacagggcaaattttctcttcttcgtaatttcctaggttttaaggttgggttgaccgtttttaccaaaacttcaacaacttgactagttccacaagactctggaagaacagatcctacccttcttctgctttggaatcagaaggccaggttttacttatttttcctttgtctacaaaggttgcttgtgtacataacaatcagcgggggaacatc

SEQ ID NO: 14734 - DNA, 353 bp, Homo sapiens
ccgggcaggtacacagggaaagataatagggaagagatgagggggggagttctccatgactaaagaagaaaaatatatgtaatttatgggtagaaaggaggaattctgcaaaattttgcaagtgaaatgaaaaacagtactcgaagtattcactatagggaagctcctcactaatggcctcttctaccagcagcgatgtctcatatgtccagcagcgggcaacatttcggacagtataaccaccaccacccagcacgagtagagggatattgaagctcttgacatattcaacgcattccccatgccctcggatgctgaggttaaagcagcccaatcgatcacagcccagagag

SEQ ID NO: 14735 - DNA, 367 bp, Homo sapiens
gagctccccgcggtggcggccgcccgggcaggtactgttgacatcagatctgctgggctggtgccactggagctgatgtggtccttgtgactcttactgcccccagcatggctctgctggctccagctggatggcccatctcctgtcagtaacctggtcccatctgttttgcagatgacccgttggcttcctgaccacctggccgcccactgctatgcgtgcgacagtgccttctggcttgccagcaggaagcaccactgcaggaattgtgggaacgtattctgctccagttgttgtaaccagaaggttccagttcccagccagcagctctttgaacccagtcgagtatgcaagtcttgctatagca

SEQ ID NO: 14736 - DNA, 820 bp, Homo sapiens
tgagcgctatacgactactatacggcgtataggaccattagcagctccaccgccgaggcagccgaggtacgcggaggagtgacctgtggctgtggagagcgacccgcggccttgtgtttcatagtttaccacctaagatgactttagtgactagatcggagatcatagatgaaaaaggaccagtgatgtctaagactcatgatcatcaattggaatcaagtctcagtcctgtggaagtgtttgctaaaacatctgcctccctggagatgaatcaaggcgtttcagaggaaagaattcaccttggctctagccctaaaaaagggggaaattgtgatctcacccaccaggaaagacttcagtcgaagtcccttcatttgtctcctcaagaacaatctgccagttatcaagacaggaggcaatcctggcggcgagcaagtatgaaagaaacgaaccggcggaagtcgctgcatcccattcaccagggcatcacagagctcagccggtctatcagtgtcgatttagcagaaagcaaacggcttggctgtctcctgctttccagttttcagttttctattcagaaacttgaaccctttctaaggggcactaagggcttcaatcttgaaagttttagagccaaaacattttctctatctgaagaattgaaaccttttggcagacggactgggaaactgagggaactcttcaaaaatgttttgaagattcaaatggaaaaccctaaaattttctttggaagcatttttggctagattaaggaatcctttccaaagttttttttaaacccccaacttggaacaggctt

SEQ ID NO: 14737 - DNA, 713 bp, Homo sapiens
  misc_feature 593: n = A,T,C or G
ccgggcaggtacgcgggggctgtctgggctcggggcgcggcggcagtcagctctatgttcgcggtcttaacctctcctctggccgagtccttgcaagaagtgaattacccgaccctgcaaaacacttactattttggagtttaaagtatgtcatcatggcaaagtttcggagaaggacttgcatcattttggcactttttattctatttattttctctctgatgatgggtttaaaaatgctgagaccaaatacagctacttttggagctccttttggacttgaccttcttccagaacttcatcaacgaactattcatttggggaaaaattttgatttccaaaagagtgacagaatcaacagtgaaacaaataccaagaatttaaaaagtgttgaaatcactatgaaaccttccaaagcctctgaacttaacttggatgaactaccacctctgaacaattatctacatgtattttattacagttggtatggaaatccacaatttgatggtaaatatatacattggaatcatccagtgttagagcattgggaccctaaaatagccaagaatatccacaagggagacacaaccctncagatgacattggctccaacttttatccttgattgggaagttacacgtcttgggatccttttgtcatagaaactcacatgagacaaatgcgctcaactttcaatgggggtccctcggcgg

SEQ ID NO: 14738 - DNA, 788 bp, Homo sapiens
  misc_feature 618: n = A,T,C or G
ccgggcaggtaccatgttgacaaaaatgccagatcaaatggatttgagaaataagcccaattcaaggctggctcagccctccacggggcctcccagggaaaggaattcctttatgttcttggaagcccttttctagaaaagccattccattcatacctttgtagagcagtgggctgggtgtggagggcagcgcggagggtatctgcaagagcctgtattttccgcctcccttgcccccactccttttatccttttaaaagtcctatcagccctgccttcgtcccttccgccctaagccctaagagtgggggaggtttaatacggccaatggatcttgtataaagtctacgtaagttttaatttaccagagctataagatggttaaagtagactaatggggactgctacagataaaatgagatacaaagaacatttgccaataaatgccataaaaatacagtagcttggaattttaatgaaatctgggcccttgtgttttttagaatgccttatatttcaagctggtcctaaactttaagtttgacatattagatctaaaatcttgggggggaaaaactggtcagaagaaaaagtcaaggtcaaaaagtttcccatagnggaaaaattgtgtggaaattggggttgttccttgggccggtttataaactatgtggttccccccggcctggcagaatattcaattcaaagctttatcgatacccgccgaccctcgaggggggggccccgggtcccaacatttttgttgcctttaaggggagggttattct

SEQ ID NO: 14739 - DNA, 1156 bp, Homo sapiens
  misc_feature 788, 912, 1006: n = A,T,C or G
aggtacatattgtatctgtgtaacattttgtatattccaggggtagggccgccccctgtatcatacctagcagaggttggagctggcacatggagaggaggttctaataattatttggggcatgggaagacttatttaattgattgcatagcgacagcaggaagggaggtcagagcgagccgcccagggcagagactattgcattctactcagagaaaaaagaacacaggctcccccacatgcataagaaaaaagggaataaggaatcgaagaagatcaccgtgagctagctgcgcaagaagcacaagcaatgcatatctagaatggaccttacagcctagtctcccagctgtgcacagatttacatgtagtgtgagttgggcgagacacagcccgagcaaatgtgtttgattcacttgtaggaccccaccagggatacttaaatgtatctctacggttgccaccccttgtgattatcagaaacaatgcacaaggcgcggcgaaagctcgcaaccctaaagtttcccctggaggaaccgccaacacttaagtctttaggggtgtaccgctatagttggagataggggacaaactccttgtgaccatgaaatagccgtctttgaaaagaacacgcacataaaccctatggaggtgggcgccatcctcaagaatatcactccaatcttggtcgccttgggcgtctaactcatactgagggcgctgtggcgatctgcactacattggtcgcgaaactgtgtttctctaggtttatagtgggacaataaccntctggtctgtatagtttaacaatttctgagacaggaagggccgtctagtccacattttcctgtgcagagaatggactctctgcgtgagcgtctcatattcaatcttatataaaaggtatatccncatatgtctctccgggtgggcgcgacgctaaatatatgaatgtcgaggcacatatacacttccatatatatatactcctcggcgtagatgactngtcgccaaatctgtagcgcgcccttttgtaaaccaatacatgcggatgtgacccattatatatagctgctctcacacaatgatatcggaagaatgaaaacatctcgtcgcacacacaccacacacgactgcgaaaatagatatagccgct

SEQ ID NO: 14740 - DNA, 684 bp, Homo sapiens
  misc_feature 593: n = A,T,C or G
ccgggcaggtacgcggggattgtggcagctggaggtctctgcatcgcttatccgtttattagccggaccaagattgcacagctaaagtctggcagagactccacggtatgactgtcctcactgggcctgtccacagtgcgagcgactcctgaggggaacagcgcggagttcaggagtccaagcacaaagcggtcttttacattccaacctgttgcctgccagccctttctggattactgatagaaaatcatgcaaaacctcccaacctttctaaggacaagactactgtggattcaagtgctttaatgactatttatgcgttgactgtgagaatagggagcagtgccatgggacatttctaggtgtagagaaagaagaaactgcaatggaaaaatttgtatgatttccatttatttcagaaagtttgtatgtaacaattacccgagagtcatttctacttgcaaaaggattcgtaacaaagcgagtataattttcttgtcattgtatcatgcttgttaaattttaatgcagcatcttcaaaacttgtcctgatggtgtcttattgtgtcagcaccaaatatttgtgcattatntggggacgttccttgtcacaggaagaatcttcttccgttgccttattgtttttttttttttaaagtcccttctctgtctttgtaccctcgg

SEQ ID NO: 14741 - DNA, 752 bp, Homo sapiens
ccggtcaggtactgtgaggaaggaaggaccactccacaagatctgtgttttgaacaatgatgcctgttagggaatgtgcaatagcaaaaatcaaaatttggggtggggccaagtgatctattctatttacttgtgctgaccgaattttttcttcaattaatttaatttctttagttgcctctggagttaacgttctttcactatttaattcctagtccactcttaagaaagagaacaaatctgacatggcataaatcggaatgcctagagttggccaaatccaattaatatctacaaatccaattaatatctgctaacaacttttgaaactcatttaatgcttttaatgtgtcttttcttatttctattttttgtggtttaatgttcctttcctatacctgcattcccaagtaacggaaaggagtagaggtttgaatcttatcagatgttattgtcagtcccgcgttggcaacctatgtctgcaaaaatgtgtaacgggcaattaatttggctcttggatctgcagcacacaaaatattaacatagtgaacaattaacaatttgaaaacttgtctcttactggttgccgaacttgagctgacaaatatgttgaactattaagcctttccttgagcaatactttccactgaaacctggtgggtgcgtttttattattaaggtggtgccgtaaaaacaaaatttgaaaatcctgtttggccgaggaatgttaaaaaaccatccttcaaaaaatt

SEQ ID NO: 14742 - DNA, 470 bp, Homo sapiens
tgaaatatagagcagtccgaataccctactaagtgaaaaaaactgcctaccgggccccccctcgatagtacttctagaattaattaacgcgggtctatcaacaaagaacccttaacacaccatactatattgcaatccctatggtaccagactgtcgcaaagaacatcttttgggaatgaagtcagaagaacagtttgctgtgaccacctcagagtctcaaaacccttcctcctccagcaagacccaaccacaaaaactgtctaaaggcgccctgagtttgagaattttagtgtcctgctctgggtttttccaggctgccttttttttgataccaggcttgccctgcctgtaccattttttactgcataggcaggctgacagctcagactgactgatggcggagcctgcctcacaaatgtgcatgcgctagtctcacagcaccaggcctgactgtgacctttcagtaaag

SEQ ID NO: 14743 - DNA, 405 bp, Homo sapiens
tagtacttctagaattaattaacgcgggtctatcaacaaagaacccttaacacaccatactatattgcaatccctatggtaccagactgtcgcaaagaacatcttttgggaatgaagtcagaagaacagtttgctgtgaccacctcacagtctcaaaacccttcctcctccagcgagacccagccacaaaaactgtctaaaggcgccctgagtttgagaattttagtgtcctgctctgggtttttccaggctgcctttatcttgataccagacttgccctgcctgtaccattttttactgcataggcaggctgacagctcatactgactgatggcggagcctgcctcacaaatgtgcatgcgctagtctgacagtaccagacctgactgagacctttcactacag

SEQ ID NO: 14744 - DNA, 390 bp, Homo sapiens
agtacttctagaattaattaacgcgggtctatcaacaaagaacccttaacacaccatactatattgcaatccctatggtaccagactgtcgcaaagaacatcttttgggaatgaagtcagaagaacagtttgctgtgaccacctcagagtctcaaaacccttcctcctccagcaagacccaaccacaaaaactgtctaaaggcgccctgagtttgagaattttagtgtcctgctctgggtttttccaggctgcctttttcttgataccaggcttgccctgcctgtaccattttttactgcataggcaggctgacagctcagactgactgatggcggagcctgcctcacaaatgtgcatgcgctagtttcacagcaccaggcctgactgtg

SEQ ID NO: 14745 - DNA, 376 bp, Homo sapiens
agtacttctagaattaattaacgcgggtctatcaacaaagaacccttaacacaccatactatattgcaatccctatggtaccagactgtcgcaaagaacatcttttgggaatgaagtcagaagaacagtttgctgtgaccacctcagagtctcaaaacccttcctccttcagcaagacccaaccacaaaaactgtctaaaggcgccctgagtttgagaattttagtgtcctgctctgggtttttccaggctgcctttttcttgataccaggcttgccctgcctgtaccattttttactgcataggcaggctgacagctcagactgactgatggcggatcctgcctcacaaatgtgcatgcgctagtctaacagcac

SEQ ID NO: 14746 - DNA, 867 bp, Homo sapiens
  misc_feature 131, 138, 165, 202, 215, 821: n = A,T,C or G
agtacttctagaattaattaaggcgggagaccatggggatccccagcatgatcctcctggggcacagtttgggaggattcctggccacttcttactcaatcaagtaccctgatagagttaaacacctcatncctggtnggacccatggtggctttcccctccganccaactaaccccagtgaggatccgtgccacccccagncctgggtcaaagnccgtggcattctgtcctaggacgttccaatccattggctgttcttcgagtagctgggccctgggggcctggtctggtgcagcgattccggccggacttcaaacgcaagtttgcagacttctttgaagatgataccatatcagagtatatttaccactgcaacgcacagaatcccagtggtgagacagcattcaaagccatgatggagtcctttggctgggcccggcgccctatgctggagcgaattcacttgattcgaaaagatgtgcctatcactatgatctacgggtccgacacctggatagataccagtacgggaaaaaaggtgaagatgcagcggccggattcctatgtccgagacatgggtcctgctgaggaagaatgaagcggcttcagcaatcagaaagcggctggacaggttggtttctgttatgatcaaagtgtgggcagagatgaatgtcaagtctttcaccatgaaaaaattaaccctggccgaatgtggtggcttacgcctgtgtatcccagcctttaaggggactgaggcaggaagatcgttgagcccaggagttcaagaccatccggggcattggcaagacctcttaccttnaatataaaaaatatataaagcgggccgccacgctgggagttcattt

SEQ ID NO: 14747 - DNA, 888 bp, Homo sapiens
  misc_feature 874: n = A,T,C or G
tatgtccagcgcgatcgcaccctaccttacgtaacggagctgggtcccgtaccgggccccccatcgagagtacttctagaattaattaacgcgggtctatcaacaaagaacccttaacacaccatactatattgcaatccctatggtaccagactgtcgcaaagaacatcttttgggaatgaagtcagaaaacagtttgctgtgaccacctcagagtctcaaaacccttcctcctccagcaagacccaaccacaaaaactgtctaaaggcgccctgagtttgagaattttagtgtcctgctctgggtttttccaggctgcctttttcttgataccaggcttgccctgcctgtaccattttttactgcataggcaggctgacagctcagactgactgatggcggagcctgcctcacaaatgtgcatgcgctagtctcacagcaccaggcctgactgtgacctttcagtagagtgacaattaatgtcattgttgcctaatgccaagtccctgtgaattggagaagaagggcacctctatacagttttgttgcccatggactcccacttgtcttctctgtaagacagacaggacagtcccatgatcccaagaagaggcagatgtgagagtctgtaaaaacatcaagcacaattccagaaataaattctgaaattccaaaggatgcaaagaaatcttgaggattcttaaggcctggctaggcattgtagttgtgagtcattttgaaacttgcccactgggattataggtacctaacgcctgtgttccccaaggccgggccgggagaggggctttttccacacttaaatgtctgcataccaagcaggcttagagttccccccctggtgttttgtggaangttgaaattttgat

SEQ ID NO: 14748 - DNA, 431 bp, Homo sapiens
agtacttctagaattaattaacgcgggtctatcaacaaagaacccttaacacaccatactatattgcaatccctatggtaccagactgtcgcaaagaacatcttttgggaatgaagtcagaagaacagtttgctgtgaccacctcagagtctcaaaaccctttcttcctccagcaagacccaaccacaaaaactgtctaaaggcgccctgagtttgagaattttagtgtcctgctctgggtttttccaggctgcctttttcttgataccaggcttgccctgcctgtaccattttttactgcataggcaggctgacagctcagactgactgatggcggagcctgcctcacaaatgtgcatgcgctagtctcacagcaccaggcctgactgtgacctttcagtagagtgacaattaatgtcattgttgcctaa

SEQ ID NO: 14749 - DNA, 386 bp, Homo sapiens
agtacttctagaattaattaacgcgggtctatcaacaaagaacccttaacacaccatactatattgcaatccctatggtaccagactgtcgcaaagaacatcttttgggaatgaagtcagaagaacagtttgctgtgaccacctcagagtctcaaaacccttcctcctccagcaagacccaaccacaaaaactgtctaaaggcgccctgagtttgagaattttagtgtcctgctctgggtttttccaggctgcctttttcttgataccaggcttgccctgcctgtaccattttttactgcataggcaggctgacagctcaaactgactgatggcggagcctgcctcacaaatgggcatgcgctagtcttacagcaccaggcctgac

SEQ ID NO: 14750 - DNA, 413 bp, Homo sapiens
tttttttttttttttttttttttgggatgctcaacctataatacccaaaggctctatttcagtagaatttattggtttgctgattatagcagtgacatagttgcattctagagaccttagaaaatgcagaaaatttcaagaaaaacatttaaattgtgctcatagtgaaactgagaggtgaccactcttaatattttgtggcataagcattccagtcttttatctttctcaaagtttcacataaactttctcaaaggccattaaatacttttccatagcctgattttttgtgaccacatagtatcctattatattgataataccataatttacctaacccatttttatatatttggattttttccaattcatcattattatgaataatggtgtatctcagtggttattacttt

SEQ ID NO: 14751 - DNA, 417 bp, Homo sapiens
tttttttttttttttttttttttttttggaccagagaggccccaaactagcagcctgtcctcctcagtagccccagcatcccttcatcattttgttgcccttctatgggcctagtttaggtctgagaggcatagttttaaaatttttattgttattaatttattctagagataaggtcttgctatgtttcccaggctggtcttgaactcctggcctcaagcaatcctcctgcagcagcctcccaaagtgctgggattacaggcatgagccaccacgtttggtcagacaggcatagttttacaaatatgtgggtggataaatgctgtccagtcttacttcatcacttttatcaattgaatgcttttggttggaaataacagaaaatccaactaaaagtgacttaaacaaaggaaatgt

SEQ ID NO: 14752 - DNA, 416 bp, Homo sapiens
tttttttttttttttttttttttttttggaagtagattgtttctgctaggcaatataatctgctaatgtgacagtttccctgtaacaatgtgtagcaaaactctgcaggattaatgagaagaatgtattgcctttgaagcagcaccacttgagtaaaaattcctcaaatgtgctctatgttatgctagtgtaagtatagcaccggaggatatttcttgggcctactttgcaagcctctgagaggtgctgtgcagctccgaccatgaactgctctcctaattgaagagggtcccaggaaggggaagggcactatggcctccattctacccagggagattgggtgaatatctggcatgtaattaagtgctagctcaggtcgggctgtttctggcatatagggtagccagcggtcaggg

SEQ ID NO: 14753 - DNA, 825 bp, Homo sapiens
tttttttttttttttttttttttgaggtggagtcttgctctgtcaccaggctggagtgcagtggtgcaatcttggctcactgcaaccttcccctcctggctgagttaacttaggagagcttcctggagagggcacctttgaagataggaaggatttcatgaagtctttactaggccactagagtagaagcagtgggagacttcctggagaagagctcatggaaagaaaaacctaccgctggccctttgggaactgctttgggcctctttagtcctaggctcacacgccccttagaaacaaagtaagaataaagccagggataatacagtgagtggccaagaacacagactctggagccagactacctgggtttgaatcccagttaccagccatgtgactttgatcaagttgcttaacctttgtgtgcttcagtttcctcatctgtaaaataaggggatggtaattgtgacttcccagaactatggtggagagcaaatgggttaagagtgtgccgctgtaaactgtagagtgctgggctttcattgggaagtattacctttcattgctgcaattgagactggttgctggggcagttgaagaggggagtaaagaaatggaatcattgggcaactaggaattccttgggacctggcccagttgccaccccaaaacattccttaggcctggaatagggcaaccgagcccctatgtgcccctggtccccggggacctgcacttatggcccaaaaaaccccttttaccacactccccttgatttccaacccgagagggttgcgggaaggggacaagccttttgggcaccct

SEQ ID NO: 14754 - DNA, 677 bp, Homo sapiens
  misc_feature 325, 609, 638, 643, 645, 651, 652, 654, 655, 656: n = A,T,C or G
tttagtacttctagaattaattttcgcgggcattgtttgcagaagacctggactggaatctaacactgtgagtactccccaggatccgtgttcctctctttagcccaggcatgcagttacattacattttccaaccttccttgcagttagctacgatcacgtgactgcattctggccagtggaatgtgtgtggaagtgatgtgggccaattccaggcctggcctataaaaatcccccactttttgttctctttctccatccaccatctgcatggagagctcccagcactagagggagaaaaagccaccagagggaaggagcctgngtccctgaatcactgtgtagactacctgccaaacatacaccctgaattgttatggcaataacaaataaactcctaatgtgttaagccatttaaattctggggttgttacagctgttagcccagtctgactaacatagcctcttaagaggctttggataagtttcctagcctccctgaacttcagtttcctcatctctaaaatgataattggaaaaacctttctgaaaatgactgagctaatatttgtaaaggctacatatgacttttgtaagccctaggcactntcgttttgtaggtgccttcctcaaaaaanaaaancnaaaaannannncatatggcggtcggcacccgc

SEQ ID NO: 14755 - DNA, 481 bp, Homo sapiens
  misc_feature 1, 2, 3, 145, 161, 208: n = A,T,C or G
nnnttttttttttttttttttttttttttgcagcacaaaaatctgggttttatttattcatttgtaaactcaagccagttctctattccactttttccaattatttgcttttgagagtctcaggattatccttccttcctctccnttccacattttctccncctgtgcccttctccgtggcccatgcttctctagtccacgacggtcnttgtttaagatcacacatgcggtttggtagattttccttcacctctctctttcagaaaaaaatgccaaaatggtgttttaagaagcttttattgagccaactgaacttcaacaaagcaaacgaaaacataaagtagggaaaggaaccctcttcaacaaatggtgttgggataattggcaagccacatgtaggagaattaaactggatcctcatctctcaccttatacacaaatcaactcaaaatgccccgcgttaattaattctagaagtact

SEQ ID NO: 14756 - DNA, 470 bp, Homo sapiens
tttttttttttttttttttttttttttttttaggacaaaaatctgggttttatttattcatttgtaaactcaagccagttctctattccactttttccaattatttgcttttgagagtctcaggattatccttccttcctctccttccacattttctcccctgtcccttctcctggccatgcttctctagtcccgacggtcttgtttagatcacaatgcggtttgtagattttccttcactctctctttcagaaaaaaatgccaaaatggtgttttaagaagcttttattgagccaactgaacttcaacaaagcaaacgaaaacataaagtagggaaaggaaccctcttcaacaaatggtgttgggataattggcaagccacatgtaggagaattaaactggatcctcatctctcaccttatacacaaatcaactcaaaatgccccgcgttaatttattctagaagtact

SEQ ID NO: 14757 - DNA, 404 bp, Homo sapiens
tttttttttttttttttttttttttaacttttgacagagactagatcttgctatgttgctgaggttgctcttgaactcctgggctcaaagaatcctctcatttcagcctcttcaactgctggtattacaagcatgaccccatatgggctggaagctgatttttaaaatactgagaccatatagatgacagcacccagagaaacagaaatattaactgaagttgttgctggcagaccattctttctttccacctttctttcttcctccctccccctcctccatctttttacttttcgtcctcttcctttctcttctttctctccttcattatccctttcactgtttctctttctccctttcttttttcttttctttcccccgcgttaattaattctagaagtact

SEQ ID NO: 14758 - DNA, 811 bp, Homo sapiens
  misc_feature 280, 522: n = A,T,C or G
ttttttttttttttttttattcctaattagatggggttgaaagtctttttagaggaacctctacgttttacagccttaatatcaggtgtagtgagtctcaccactttattcttctttgtcaaggttgattagctatctgagatctttgccttttcatatagattttagagtaagtttgtctatgtctacataaaagcttgctgggatttcgaggccgggtacggtggctcacgcctttaatcacaacactttgggaggctgacgcaggtggattacttanggtcaggagtttgagaccagcctggctaacagtggaaccctgtctctaccaaaaaaatacaaaactgggcgtggtggctcacgcctgtaatcccagtactttgggaggccgaggtgggtggatcacgaggtcaggagatcgagaccatcctggcaaaacatggtgaaaccccgtctccactaaaaaatacaaaaaaaattaactgggcttggttgccggcgcttgtagtcccagctactcangaagcttaggcaagaaaatggcgtgaaccccggaggttgagcttgcagtgagccgagatcgtgccactgcactctaacctgggcgactgagcgaaactttggctcaaaccaaaccaaaccaaaaacaaagttgtctgggcctgtgggctcatcctgtaatccaacactttgggaggccaattggtggacaacttaaggcagaattgagaacacccggaccatttgtgaaccccgcctaattaatctaaagactttcaagggggcccgtcccaccttggtccttaagagg

SEQ ID NO: 14759 - DNA, 828 bp, Homo sapiens
gggccccccctcgagagtacttctagaattaattaacgcgggactgctaacaattagtccatcactatcccctcaagtcaaaataatgcccatcagacctcaggggcggggtgactacccaagatagccatctgaacgtgcacacggacccaattttcctgtaacctcaaggtggtgtaaaaggggcaaccatctggtcatttcttcgagttttttttatattttgtataactcctgtgcacataataaaatatgtaagcctatttttctgctaatgtgtgtactatcagtttgttttatggactcacccctaaggagaaaaatgtaaatttacctacatgtgaaatttagtttggagcttggctgccgtggacctagctaaaactgggtggcctgggctctcccttcccagataaaacttctttttttttttctttctgaaaatggtaagggtggaatggaaccataatctattttttagagagtttggacagtggcagtaagaaaacaaatattccagcctggaaaactggcccttgtcatgctgcagcaaactttttttaaacagccacttttatgatcagaaaaccgatcaggttggccaaagagcctaaagttggagagaaattgattgagaaaagcaaatggctatagggggtagaaacttccctggtggatggaggagacacttcaagtgagcttatttaagccaaggggtggaagtttgccaacaggggacctaaagaagcctgaaagaaggaaggctacctgtaggggccggaaacttcattttttaaaatcgggaaaggaaggttatccaaatagaat

SEQ ID NO: 14760 - DNA, 916 bp, Homo sapiens
  misc_feature 2, 859: n = A,T,C or G
tnttttttttttttttttttttttaacttttaatttctgatcgagtcacagattgatttgttgagtagcttcagcacttcttcctttgtcatttttttctgtctgataagtcatgccatggacgttacccatttttatcccaaggcctcttacgttgacttgaaaagacggactatgtctttcagagatcttgtgggtatcacatcaatcttgacaaattttctaccctccaagtcatgatcctaagaacagcttgcctcccatttctccggtttgtgctattatgaaggccttattgtttcagccttcttcaatcttgagggttgttgtcactgtatgggtggttcagaaataagtaggtcctgttactatgaagggggtcacagcttttgttggcatatctaaactttgtggctcatggaacagtatgaatgcagaatgtagctttctccacttgtggactgctttgcatagctgccagaggcctccagagaagaccttcagggctttggggtctttatctgtagcacggatacttaaatttgtgggttcataggtcagctggatacagggcattttttgtgacaatttctggcattttttgaacaagacaaaattctttttacgaagattattgcatttgtactttggacggcttggagggaagtctggttggccaactctttgcaatggcaaacacatggcccttggttttcacaaattctggtagggataactattacagaattgtaattgcctttcacggtgaaaaatattaatttaataggaattacttttatttatataggccgggggaggaaacagaaataatggtaaccggcaacccaagggccttttnttgccctttatttgtcctttttttttggggccgagcccctataaaaaaaaaaaaaat

SEQ ID NO: 14761 - DNA, 370 bp, Homo sapiens
agtacttctagaattaattaacgcggggaatccggtgcggacgcacgcgaactctgcccgggagccgaggtgacgatctacccggtctcggtaataaatatttgcaaaacacatctgaccaaaatcctgttaacttcatgaaggctcactttatacgatgatttttgacgaaccatcttattaatgagattacaccaaaagcataaacaatttatacgtcaaactccgactgaaaaaaaaaaataaccgattaggatgttttttaaatgtactgtactctcaaataacatgacaaatttgacctgttcaattaatagaaatgaagtggctaaaaatgtgatacaacacccgctcaattcatcttttgcgg

SEQ ID NO: 14762 - DNA, 409 bp, Homo sapiens
ttttttttttttttttttttttttttttttactggaattgttgttatagtgcttccgttatttatttttattttttttattatactttaagttttagggtacatgtgcacaacgtgcaggtttgctacatatgtatacatgtgccatgttggtgtgctggactcattaactcgtcatttatattaggtatatatacgtgttcattgtacccttatcgactttgcagcatgcttatccatctaactattcatctttatttgccttcgttttttgagttcccttattcatcctaaaacaaaatataatgcctgactcatagtcagacttcacagtatttttaaatgaattacattgcattggggaaatataaatagtaatgtccttttatagaggaagtctaaaagaaatt

SEQ ID NO: 14763 - DNA, 409 bp, Homo sapiens
tttttttttttttttttttttttgggatgctcaacctataatacccaaaggctctatttcagtagaatttattggtttgctgattatagcagtgacatagttgcattctagagaccttagaaaatgcagaaaatttcaagaaaaacatttaaattgtgctcatagtgaaactgagaggtgaccactcttaatattttgtggcataagcattccagtcttttatctttctcaaagtttcacataaactttctcaaaggccattaaatacttttccatagcctgattttttgtgaccacatagtatcctattatattgataataccataatttacctaacccatttttatatatttggattttttcccattcatcattattatgaataatggggtatctcaatggttatta

SEQ ID NO: 14764 - DNA, 404 bp, Homo sapiens
tttttttttttttttttttttttgggatgctcaacctataatacccaaaggctctatttcagtagaatttattggtttgctgattatagcagtgacatagttgcattctagagaccttagaaaatgcagaaaatttcaagaaaaacatttaaattgtgctcatagtgaaactgagaggtgaccactcttaatattttgtggcataagcattccagtcttttatctttctcaaagtttcacataaactttctcaaaggccattaaatacttttccatagcctgattttttgtgaccacatagtatcctattatattgataataccataatttacctaacccatttttatatatttggattttttccaattcatcattattatgaataatggtgtatctcagtggt

SEQ ID NO: 14765 - DNA, 399 bp, Homo sapiens
tttttttttttttttttttttttttttttgaggaaggcacctacaaaacgaaagtgcctagggcttacaaaagtcatatgtagcctttacaaatattagctcagtcattttcagaaaggtttttccaattatcattttagagatgaggaaactgaagctcagggaggctaggaaacttatccaaagcctcttaagaggctatgttagtcagactgggctaacagctgtaacaaccccagaatttaaatggcttaacacattaggagtttatttgttattgccataacaattcagggtgtatgtttggcaggtagtctacacagggattcagggacccaggctccttccctctgggggctttttctccctctagtgctgggagctctccatgcagatggc

SEQ ID NO: 14766 - DNA, 401 bp, Homo sapiens
tttttttttttttttttttttttttgagagacaaacatgggccacatttttaagacaaacatggaccacaaccatgctgagagaacttagagtgaagtttacatggctatctttcttagtattagaaattttacctgataaacatcaaacatacgaccaacatagcatataaagcagctctacagatattttcctactgcccaaaatatcatataatgcacatgtaggtcacatgtgagtaggcaagagattctggaacacagaagcaagacaacaggatcacagcaatttcagtatgctctgcttgttataggaaatccccagaacattctccaattactgaacaaaaaaagcaataaaactcagatttgtctgcctggggagaaataaacagaaatagg

SEQ ID NO: 14767 - DNA, 401 bp, Homo sapiens
tttttttttttttttttttttttttttggaagtagattgtttctgctaggcaatataatctgctaatgtgacagtttccctgtaacaatgtgtagcaaaactctgcaggattaatgagaagaatgtattgcctttgaagcagcaccacttgagtaaaaattcctcaaatgtgctctatgttatgctagtgtaagtatagcaccggaggatatttcttgggcctactttgcaagcctctgagaggtgctgtgcagctccgaccatgaactgctctcctaattgaagagggtcccaggaaggggaagggcactatggcctccattctacccagggagattgggtgaatatctggcatgtaattaagtgctagctcaggtcgggctgtttctggcatatagggg

SEQ ID NO: 14768 - DNA, 404 bp, Homo sapiens
tttttttttttttttttttttttttgaaatatgcccacccatttcaggttgagccacggataaggagggcttagctcatgtctcctgtgggaattgaggcatctcaggaaacagtatagagttggtacagttagaatgagaagaagcctggggaaagaaaccaagagtgagaaatgcgtggctattttgacttagctggagcaaccctctcataacaggctgggaagtggacccgcgttaattaacgcgggggaaattgatgaacaaacaaaggtcatagtaaaagacagacttttggggataaaaacagaaactccaagtactgtatcaacaaatgcaagtacaccacaatcagtgagcagtgtggttcattatctggcaatggcactctttcaaatagagca

SEQ ID NO: 14769 - DNA, 396 bp, Homo sapiens
agtacttctagaattaattaacgcgggactgctaacaattagtccatcactatcccctcaagtcaaaataatgcccatcagacctcaggggcggggtgactacccaagatagccatctgaacgtgacacacggacccaattttcctgtaacctcaaggtggtgtaaaaggggcaaccatctggtcatttcttcgagttttttttatattttgtataactcctgtgcacataataaaatatgtaagcctatttttctgctaatgtgtgtactatcagtttgttttatggactcacccctaaggagaaaaatgtaaatttacctacatgtgaaatttagtttggagcttggctgccgtggacctagctaaaactgggtggcctgggctctcccttcct

SEQ ID NO: 14770 - DNA, 313 bp, Homo sapiens; identical to SEQ ID NO: 5601

SEQ ID NO: 14771 - DNA, 383 bp, Homo sapiens
ttttttttttttttttttttttttttttgaagaatcaacagactttatttttgatcacaaagcaaaagtttaagtgtattacttaaaattttaagacaaaatctggaataattataactaacacaaattttgaggtagaggaagagaattctagagataggtgagataaaattttcatctttgataatgagtagacaaaaacactacctttaacaagggaagaatttaaaaaatttagagaagaggaaatcataagtggtttttaaaatttattatacatatcggggtaaagataatccaacagaaaatgagatttgaacagacacttcacaggagatagacaaatgtctcaacctcattagtcaccagacaaatgcaaatta

SEQ ID NO: 14772 - DNA, 376 bp, Homo sapiens
agtacttctagaattaattaacgcgggactgctaacaattagtccatcactatcccctcaagtcaaaataatgcccatcagacctcaggggcggggtgactacccaagatagccatctgaacgtgacacacggacccaattttcctgtaacctcaaggtggtgtaaaaggggcaaccatctggtcatttcttcgagttttttttatattttgtataactcctgtgcacataataaaatatgtaagcctatttttctgctaatgtgtgtactatcagtttgttttatggactcacccctaaggagaaaaatgtaaatttacctacatgtgaaatttagtttggagcttggctgccgtggacctagctaaaactggga

SEQ ID NO: 14773 - DNA, 388 bp, Homo sapiens
tttttttttttttttttttttttgggatgctcaacctataatacccaaaggctctatttcagtagaatttattggtttgctgattatagcagtgacatagttgcattctagagaccttagaaaatgcagaaaatttcaagaaaaacatttaaattgtgctcatagtgaaactgagaggtgaccactcttaatattttgtggcataagcattccagtcttttatctttctcaaagtttcacataaactttctcaaaggccattaaatacttttccatagcctgattttttgtgaccacatagtatcctattatattgataataccataatttacctaacccatttttatatatttggattttttccaattcatcattattatgaataat

SEQ ID NO: 14774 - DNA, 354 bp, Homo sapiens
agtacttctagaattaattaacgcgggactgctaacaattagtccatcactatcccctcaagtcaaaataatgcccatcagacctcaggggcggggtgactacccaagatagccatctgaacgtgacacacggacccaattttcctgtaacctcaaggtggtgtaaaaggggcaaccatctggtcatttcttcgagttttttttatattttgtataactcctgtgcacataataaaatatgttaagcctatttttctgctaatgtgtgtactatcagtttgttttatggactcacccctaaggagaaaaatgtaaatttacctacatgtgaaatttagtttggagcttggctgc

SEQ ID NO: 14775 - DNA, 357 bp, Homo sapiens
agtacttctagaattaattaaggcgggctatttgtaccactacactccagcctgggtgacagagtgagactctctcaaacaaagaagaaaagataaacaaacaaaaaaaagaaaattgacatgttaattctaaaattaatatgaaaatttaaaaatttaaaataccaaagtaattttgaaaaataacaaagctggaaactggtcttgcctgactttgagacttgtaaagctataaaaattaagacagtgtgataataatctcaaactatacaaatagttaaatatgacagaacaggtagacccacatatatatagatagctgattttcaagagacatgcaaagttaattcatgggca

SEQ ID NO: 14776 - DNA, 359 bp, Homo sapiens
agtacttctagaattaattaacgcgggactgctaacaattagtccatcactatcccctcaagtcaaaataatgcccatcagacctcaggggcggggtgactacccaagatagccatctgaacgtgacacacggacccaattttcctgtaacctcaaggtggtgtaaaaggggcaaccatctggtcatttcttcgagttttttttatattttgtataactcctgtgcacataataaaatatgtaagcctatttttctgctaatgtgtgtactatcagtttgttttatggactcacccctaaggagaaaaatgtaaatttacctacatgtgaaatttagtttggagcttggctgccgtgga

SEQ ID NO: 14777 - DNA, 379 bp, Homo sapiens
tttttttttttttttttttttttttttggaccagagaggccccaaactagcagcctgtcctcctcagtagccccagcatcccttcatcattttgttgcccttctatgggcctagtttaggtctgagaggcatagttttaaaattttaatggctatttattaattctagagataaggtcttgctatgtttcccaggctggtcttgaactcctggcctcaagcaatcctcctgcagcagcctcccaaagtgctgggattacaggcatgagccaccacgtttggtcaaacaggcatagttttacaaatatgtgggtggataaatgctgtccagtcttacttcatcacttttatcaattgaatgcttttggtgggaaataaca

SEQ ID NO: 14778 - DNA, 487 bp, Homo sapiens
  misc_feature 27: n = A,T,C or G
ttttttttttttttttttttttttttnggaccagagaggccccaaactagcagcctgtcctcctcagtagccccagcatcccttcatcattttgttgcccttctatgggcctagtttaggtctgagaggcatagtttaaaatttttattgttatttatttattctagagataaggtcttgctatgtttcccaggctggtcttgaactcctggcctcaagcaatcctcctgcagcagcctcccaaagtgctgggattacaggcatgagccaccacgtctggtcagacaggcatagttttacaaatatgtgggtggataaatgctgtccagtcttacttcatcacttctatcaattgaatgcttttggttggaaataacagaaaatccaactaaaagtgacttaaacaaaggaaatgttattatctcatgtaccaggaattctggaggtagactggttcaagggtggattaattaattctagaaatact

SEQ ID NO: 14779 - DNA, 751 bp, Homo sapiens
  misc_feature 698: n = A,T,C or G
agtacttctagaattaattaacgcgggtccaggtctctgagtccattctttgggtttggacaggtaggtttgtttctcacaataccaggtataataccagtagaatgtttcatataatttaacaagtcattataaaatgtacttgaaattgcaaagagccacaaaaaaaacccagacaatattgatgaagaaaagacgaagtcagaggacctatactacaagatatcaatataaattataaaggtaccataattaaaactgtggaactggagtaaacatggacaagtagaccaatgtagttaaaaacaattctgaaaaagacccacgcatatatagatgcttgatttattaccatgttgctactataaacaagggaaaactgtttttttaaaataaattatgctgagtcaggccaggcacagtggctcgcgcctgcaatcccagcactttgggaagccaaggttggctgatcacttgaggccaggagttcaagaccagcctgacaaacatggcaaaacccctatctttactaaaattatgaacattagactggctcggtggcacacgcctgtaatcccacctatgttgggtggctgaggcatgagaattacttgaacccaggaggcagaggttgcaatgagccaagatagtgccaatgcacttcagcctgagtgaccgaatgagatttgtctccaagnaaaaaaatctattataaaaagccggccgccacgcggtgaactcaatttccctt

SEQ ID NO: 14780 - DNA, 609 bp, Homo sapiens
tatttttttttttttttttttttttttgaagaatcaacacactctatatttgatcacaaagcaaaagtttaagtgtattacttaaaattttaagacaaaatctggaataattataactaacacaaattttgaggtagagaagagaattctagagataggtgagataaaattttcatctttgataatgagtaaacaaaaacactacctttaacaagtgaagaatttaaaaaatttagagaagaggaaatcataagtggtttttaaaatttattatacatatcggggtaaagataatccaacataaaatgagatttgaacagacacttcacaggagatagacaaatgtttcaacctcattagtcaccagacaaatgcaaattaaactcaaaatgcaatacctgtacacacctcacagaatggataaaacttgaaagactgacaaaccaaaccaacacaaagctggtctgaatgtggagcaagggaatacgctcgtacttttctggtgagcaaggtggaaattggaaaagaactggtgtaaccactttggaaaacttgttagtattttttaaagggcaaccccgggttaattaatttttaaaagtccttcgt

SEQ ID NO: 14781 - DNA, 313 bp, Homo sapiens
tttttttttttttcttttttttttttttaaaagcaaaactcccgacagccgagccccgttcggtgccttttcttttttttttctttaatggagtgaaatctactttgctcaggaagcctgcaaatcacattttcaggccaaacgaggcagttttttagaaggggtcgctgaggcaggagtaggaaggctttccactccactcacgcattttcagtgtaggcgaatcgtaaaacggagggcagaacgaaaatgagcggatctgggagtgcaggctgcgcttcgtccccccgcgttaattaattctagaagtact

SEQ ID NO: 14782 - DNA, 660 bp, Homo sapiens
aactgccgcttttgatactctcgtttgcggatactggactgggtgccttggcccccgctctagagtactctctagaatgaattcacgcggagttttgaacgcggttattgcgagcagattacctggactggaatctaacactgtgagtactccccaggatccgtgttcctctctttagcccaggcatgcagttacattacattttccaaccttccttgcagttagctacgatcacgtgactgcattctggccagtggaatgtgtgtggaagtgatgtgggccaattccaggcctgggcctataaaatcccccactttttgatctctttctccatccaccatctgcatggagagctcccagcactacagggagaaaaagccaccaagggaaagagccttggtcctgagtactgtgagactactgccaacatacacctggatgtatgcaatacaataactctatgtgtagcattaatctggtgtcagtgtaccatctacacaaccgttaagttgaagtctactctgactatctatttaagaatgaaactctgaagacgctaatgagcctaattgagctagcctctgagtctctaaaaaaaaaaaaaaacgcgacgggatcatccttggggtaccccatgcgctaaagggatgaacggtcatt

SEQ ID NO: 14783 - DNA, 359 bp, Homo sapiens
agtacttctagaattaattaacgcgggttcgtcctaaggaccactgtctgtgctgtgtctttcaaaggtcagaagagattgaacctttgtgtttttattttccctgtgtttgctttttctcatggggaacctgtgttgctgctttgaaggtatattcatactggcctttcaaatgccagctcttcaaattactagttaaggctttcaaaatatgttatttaaaaaattatcctctgtattttccatatgcagttataagtaggtttcatggttatgttttattcctcagtttatacatttgattattgtaccaagcagagtacctttgaaattttttttcatttaaaaaatatggatcc

SEQ ID NO: 14784 - DNA, 950 bp, Homo sapiens
ttttgtttttttttttttttttttgctgagatcttcttattcaacccatatcaatttgactggacttgtagcattcaaatattaacacagatttcaaattttagaaagatatttgtactagaatacttgtcaggaactctgtggatttcattagtatggaaattgtttataaagacacactctgaatttttgtggtcaagtagggtttgtagaatctttgatagcccagcatgttaaaatgtaaatgttctagaaaaataatctttcactttccctgtgaaaagaccccgcaaaaagttttttgaggggtgtgttaaatatataaattttgaaagacgtaaacaaaatagttaactatctacttatgatatttaatagtttggccaggcatggcaactcatgcctgttgtaatcccagcgtattgggcggctgaggtaggaggattgtgtgagcccaggcgtttgagactgcagtgagctatggatcctgcctggatgacagggcaagaccccaagtcaaaaaaaaaaagtaatagtttaatgaacatttaaaaacacattgtttggaataatgtgtgttagaaaattgcttttttcttacttacattacataaaacagttttattcaaacaaactcttcagttatgtctttgacattcaaattttcatcctgagaaccactttttgagacatctatcacagtttccaaaacacagtattttctttttaattaaatcatttacgatattcctttttgaaactctctatatatctctccctggaaatcttacaccaaccgcgtaattaattctagagtactcttgagggggggccggtacccacttttgttcctttaagaaggtaaatgccgcttggcctaatatgggcaaagtgtttcctgtgaaatgttatcgttccattcacacaaattacaccggaacataaggtat

SEQ ID NO: 14785 - DNA, 938 bp, Homo sapiens
  misc_feature 752, 813: n = A,T,C or G
tttttttttttttttttttttttgggatgctcaacctataatacccaaaggctctatttcagtagaatttattggtttgctgattatagcagtgacatagttgcattctagagaccttagaaaatgcagaaaatttcaagaaaaacattaaattggtgctcatagtgaaactgagaggtgaccactcttaatattttgtggcataagcattccagtcttttatctttctcaaagtttcacataaactttctcaaaggccattaaatacttttccatagcctgattttttgtgaccacatagtatcctattatattgataataccataatttacctaacccatttttatatatttggattttttccaattcatcattattatgaataatggtgtatctcagtggttattactttgcactgcatttcttatgaaagtattgagtaaaaggaagtaaagccctctcagagtgttttgtaggctgtcacatttcactccataatgtcctagtgtttgttgccaccagtgatatatgaaggtacccactgaaatgtcacacctttttggtttcctttttaaaataaaaaataaaaaagacatttaaccaatataatatggtcttatatatgaattattataatgtagattcacatctttgagttcataaaaatattgaatttggattctctccaatttccctttagtagaaaggctaaagttcggtagaaaatctacttggattttatatgattganaaacatacttggatttttgaactcatgacaggatacaaataacattagccaattattaaanctagaagtctcttagggggggccggtacccaacttggtccctttgtgagggtaatgggccctggcgaacatgggcaaactggttccgtgggaatggtatcggtacaattacacacatacagccgt

SEQ ID NO: 14786 - DNA, 394 bp, Homo sapiens
agtacttctagaattaattaacgcgggactgctaacaattagtccatcactatcccctcaagtcaaaataatgcccatcagacctcaggggcggggtgactacccaagatagccatctgaacgtgacacacggacccaatttttcctgtaacctcaaggtggtgtaaaaggggcaaccatctggtcatttcttcgagttttttttatattttgtataactcctgtgcacataataaaatatgtaagcctatttttctgctaatgtgtgtactatcagtttgttttatggactcacccctaaggagaaaaatgtaaatttacctacatgtgaaatttagtttggagcttggctgccgtggacctagctaaaactgggtggcctgggctctccctt

SEQ ID NO: 14787 - DNA, 439 bp, Homo sapiens
  misc_feature 439: n = A,T,C or G
agtacttctagaattaattaaggcgggagaaggaaagagaaagtggaattaagggacaagaaagaggaagtggaattaagggacaaggggagaaaagcttaggcgaatcaacggattgcaatctatcatctgctaggaatgaacaagacaacatcaaatgaagagctgtcagctggaccatacaaaaagctaaatgtacacaaaaggttttttttttttccttttaaatctaccatactgcttcagttcatttccaatgcaacaatctactcaacaccaaaaatggtcatatctatcataaatacagaaagtcagtttttaaaacttattttttttaagctacaagtcctcaacactctttgtgtgtgtgggttattatttttttttttttgaaagtgggagtgcttaacttttccccttgaaattggcttcagcagan

SEQ ID NO: 14788 - DNA, 294 bp, Homo sapiens
agtacttctagaattaattaacgcgggggaaaactgtcttacttaaacaaaatgtattttaggaaggtgcctgtttcaagggtttattactgttttataactaacagacttgggactttagtatacgaaaaggtgtcatttcaaatgggggaaaatgaattatttcaccaaatgatcttgggacaactggatagccattcagaaaaaaagtgaagctggaacactataacatgctttaccccacaataaatcacagttaaatgtaatatagaaaaaaataacacacgctcaatg

SEQ ID NO: 14789 - DNA, 435 bp, Homo sapiens
agtacttctagaattaattaacgcgggcattgtgtgcagaagacctggactggaatctaacactgtgagtactccccaggatccgtgttcctctctttagcccaggcatgcagttacattacattttccaaccttccttgcagttagctacgatcacgtgactggatttctggccagtggaatgtgtgtggaagtgatgtgggccaattccaggcctggcctataaaaatcccccactttttgttctctttctccatccaccatctgcatggagagctcccagcactagagggagaaaaagccaccagagggaaggagcctgggtccctgaatcactgtgtagactacctgccaaacatacaccctgaattgttatggcaataacaaataaactcctaatgtgttaagccatttaaattctggggttgttacagg

SEQ ID NO: 14790 - DNA, 351 bp, Homo sapiens
tttttttttttttttttttttttttgaaatatgcccacccatttcaggttgagccacggataaggagggcttagctcatgtctcctgtgggaattgaggcatctcaggaaacagtatagagttggtacagttagaatgagaagaagcctggggaaagaaaccaagagtgagaaatgcgtggctattttgacttagctggagcaaccctctcataacaggctgggaagtggacccgcgttaattaacgcgggggaaattgatgaacaaacaaaggtcatagtaaaagacagacttttggggataaaaacagaaactccaagtactgtatcaacaaatgcaagtacaccacat

SEQ ID NO: 14791 - DNA, 367 bp, Homo sapiens
ttttttttttttttttttttttttttggggaggagtagagaaatgactaattttttcattggtgagtaatatgctacaaagactcgtagaatcatatacttttggacctggaaagtagcttaaggaccatctgattaaaattttaagttttattgatgaagaaattaagctcaagaaaggctggtacttgtccaagatcacagaagtattaactattgaagcttgagaaaacagccagttctttgctcaaatttcagctgaaactacattgtataataaaataactcaacatacctttaaaacaaataagttaaaactctttttaagtaagggcaactttagggtagggaaaatcccaagggttttt

SEQ ID NO: 14792 - DNA, 356 bp, Homo sapiens
tttttttttttttttttttttttgggatgctcaacctataatacccaaaggctctatttcagtagaatttattggtttgctgattatagcagtgacatagttgcattctagagaccttagaaaatgcagaaaatttcaagaaaaacatttaaattgtgctcatagtgaaactgagaggtgaccactcttaatattttgtggcataagcattccagtcttttatctttctcaaagtttcacataaactttctcaaaggccattaaatacttttccatagcctgattttttgtgaccacatagtatcctattatattgataataccataatttacctaacccatttttatatatttgg

SEQ ID NO: 14793 - DNA, 349 bp, Homo sapiens
tttttttttttttttttttttttgggatgctcaacctataatacccaaaggctctatttcagtagaatttattggtttgctgattatagcagtgacatagttgcattctagagaccttagaaaatgcagaaaatttcaagaaaaacatttaaattgtgctcatagtgaaactgagaggtgaccactcttaatattttgtggcataagcattccagtcttttatctttctcaaagtttcacataaactttctcaaaggccattaaatacttttccatagcctgattttttgtgaccacatagtatcctattatattgataataccataatttacctaacccatttttata

SEQ ID NO: 14794 - DNA, 357 bp, Homo sapiens
tttttttttttttttttttttttttgaaatatgcccacccatttcaggttgagccacggataaggagggcttagctcatgtctcctgtgggaattgaggcatctcaggaaacagtatagagttggtacagttagaatgagaagaagcctggggaaagaaaccaagagtgagaaatgcgtggctattttgacttagctggagcaaccctctcataacaggctgggaagtggacccgcgttaattaacgcgggggaaattgatgaacaaacaaaggtcatagtaaaagacagacttttggggataaaaacagaaactccaagtactgtatcaacaaatgcaagtacaccacaatcagtg

SEQ ID NO: 14795 - DNA, 363 bp, Homo sapiens
tttttttttttttttttttttttttttggaagaatcaacagactctatatttgatcacaaagcaaaagtttaagtgtattacttaaaattttaagacaaaatctggaataattataactaacacaaattttgaggtagaggaagagaattctagagataggtgagataaaattttcatctttgataatgagtagacaaaaacactacctttaacaagtgaagaatttaaaaaatttagagatagaggaaatcataagtggtttttaaaatttattatacatatcgaggtaaagataatccaacagaaaatgagatttgaacagacacttcacaggagatagacaaatgtctcaacctcattag

SEQ ID NO: 14796 - DNA, 361 bp, Homo sapiens
ttttttttttttttttttttttttttttgaagaatcaacagactctatatttgatcacaaagcaaaagtttaagtgtattacttaaaattttaagacaaaatctggaataattataactaacacaaattttgaggtagaggaagagaattctagagataggtgagataaaattttcatctttgataatgagtagacaaaaacactacctttaacaagtgaagaatttaaaaaatttagagaagaggaaatcataagtggtttttaaaatttattatgcatatacgaggtaaagataattccaacagaaaatgagatttgaacagtactcttaacaggatatagacaattgtttcagcctga

SEQ ID NO: 14797 - DNA, 742 bp, Homo sapiens
tctctatcttcttcctatatagtgtcaattcaatataatcattattactactaacatattgtgtaataatataaacacaaataactattctttatataacataattctattaatataataatcactatacattatatattataccataatattaatattactatatatttaaaatatatttaaattacggtatatttataatcataataattggggagggggaaaaaactagcccactttttttttttttttttttttggaggtttctatttttattcaactacaagcaaacagcacaattaatgcaacattcagcaactcaagaccagcttttcttacccccatgaagaacgatcaatttaaaaaacacagatctcagggttttctcccaaagctgtcaaacgaagcgcctggcttaccggtccttaaaattgccatgttcccaaacaaccagtcaaagtcacccccctttctttttccgccctttttatattaattcttctataataatacttttttcaataattaatgataactttaataattcttttatttattcatatttattattatataatttcatttattaaaataaattattctataaattaatatattcattattattaatattattaatttatacttatatataaaattactattactaatattataaattatatatttttatttataattatcatatcactatttaaatttaatacaataatattataaa

SEQ ID NO: 14798 - DNA, 404 bp, Homo sapiens
tttttttttttttttttttttttttgagagacaaacatgggccacatttttaagacaaacatggaccacaaccatgctgagagaacttagagtgaagtttacatggctatctttcttagtattagaaattttacctgataaacatcaaacatacgaccaacataggcatataaagcagctctacagatattttcctactgcccaaaatatcatataatgcacatgtaggtcacatgtgagtaggcaagagattctggaacacagaagcaagacaacaggatcacagcaattcagtatgctctgcttgttataggaaatccccaaaaccttctccagtggctgcccgaacccagccatttgaactcatatttgtcggcctggggggcactaaccgtaaatatggg

SEQ ID NO: 14799 - DNA, 298 bp, Homo sapiens
  misc_feature 22: n = A,T,C or G
tttttttttttttttttttttnttttttttcacattaaactctgatttattggggggtaaagcatgttatagtgttccagcttcactttttttctgaatggctatccagttgtcccaagatcatttgttgaataattcattttcccccatttgaaatgacacccttttcgtatactaaagtcccaagtcttttagttataaaacagtaataaacccttgaaacaggcattttcctaaaatacattttgtttaagtaagacagttttcccccgcgttaattaattctagaagtactctc

SEQ ID NO: 14800 - DNA, 321 bp, Homo sapiens
tttttttttttttttttttttttttgcaaataacgtgccttttattgggcactggctctctttgagcccggagtcccgcccccgccctctctcgaagaactggccagactttttgcaaacgccttgaagggtagaattagcagcgagctcttgaaactgcctctggagatggaactcagcggaattctcgaaaagaagagggacattaaaaagacgggtgcatgcactgatttccaagcgcagtttgtccatgttagtcttgtacatgcttgactccagtcagccaccgtaggccccgccttaattaattctagaagtact

SEQ ID NO: 14801 - DNA, 488 bp, Homo sapiens
ttttttttttttttttttttttttttttgaccagagaggccccaaactagcagcctgtcctcctcagtagccccagcatcccttcatcattttgttgcccttctatgggcctagtttaggtctgagaggcatagttttaaaatttttattgttatttatttattctagagataaggtcttgctatgtttcccaggctggtcttgaactcctggcctcaagcaatcctcctgcagcagcctcccaaagtgctgggattacaggcatgagccaccacgtctggtcagacaggcatagttttacaaatatgtgggtggataaatgctgtccagtcttacttcatcacttctatcaattgaatgcttttggttggaaataacagaaaatccaactaaaagtgacttaaacaaaggaaatgttattatctcatgtaccaggaattctggaggtagactggttcaagggtggattaattaattctagaagtact

SEQ ID NO: 14802 - DNA, 453 bp, Homo sapiens
tttttttttttttttttttttttttttttgaggagtttagaaattactaattttttcattggtgagtaatatgctacaaagactcgtagaatcatatacttttggacctggaaagtagcttaaggaccatctgattaaaattttaagttttattgatgaaaaaattaaatcttaaaaaaaggcttttttcttggccaaagatcacagaaagtattaatctattgaagcttgagaaaacagctcagttctctgcttcaaattatcagcctgaaactacatttgtataaataaaaataaactcaaccataactattacaatcaggaaatagttttaaacctcttttctaggtcagttggccaaacttaaggttaggtgaaggattccacaaggtgatatttttaaaacaatgttttgtttgaaaattatttttaaataaaaatttaacctttctt

SEQ ID NO: 14803 - DNA, 455 bp, Homo sapiens
tttttttttttttttttttttttgggatgctcaacctataatacccaaaggctctatttcagtagaatttattggtttgctgattatagcagtgacatagttgcattctagagaccttagaaaatgcagaaaatttcaagaaaaacatttaaattgtgctcatagtgaaactgagaggtgaccactcttaatattttgtggcataagcattccagtcttttatctttctcaaagtttcacataaactttctcaaaggccattaaatacttttccatagcctgattttttgtgaccacatagtatcctattatattgataataccataatttacctaacccatttttatatatttggattttttccaattcatcattattatgaataatggggtatctcagtgggtattactttgcactgcattttttatgaaagttttgagtaaaaggaagtaaa

SEQ ID NO: 14804 - DNA, 448 bp, Homo sapiens
tttttttttttttttttttttttgggatgctcaacctataatacccaaaggctctatttcagtagaatttattggtttgctgattatagcagtgacatagttgcattctagagaccttagaaaatgcagaaaatttcaagaaaaacatttaaattgtgctcatagtgaaactgagaggtgaccactcttaatattttgtggcataagcattccagtcttttatctttctcaaagtttcacataaactttctcaaaggccattaaatacttttccatagcctgattttttgtgaccacatagtatcctattatattgataataccataatttacctaacccatttttatatatttggattttttccaattcatcattattatgaataatggtgtatctcagtggttattactttgcactgcatttcttatgaaagtattgagtaaaagg

SEQ ID NO: 14805 - DNA, 449 bp, Homo sapiens
ttttttttttttttttttttttttttttgaccagagaggccccaaactagcagcctgtcctcctcagtagccccagcatcccttcatcattttgttgcccttctatgggcctagtttaggtctgagaggcatagttttaaaatttttattgttatttatttattctagagataaggtcttgctatgtttcccaggctggtcttgaactcctggcctcaagcaatcctcctgcagcagcctcccaaagtgctgggattacaggcatgagccaccacgtctggttagacaggcatagttttacaaatatgtgggtggataaatgctgtccagtcttacttcatcacttctatcaattgaatgcttttggttggaaataacagaaaatccaactaaaagtgacttaaacaaaggaaatgttattatcttatgtaccaggaattttggaggtt

SEQ ID NO: 14806 - DNA, 451 bp, Homo sapiens
tttttttttttttttttttttttgggatgctcaacctataatacccaaaggctctatttcagtagaatttattggtttgctgattatagcagtgacatagttgcattctagagaccttagaaaatgcagaaaatttcaagaaaaacatttaaattgtgctcatagtgaaactgagaggtgaccactcttaatattttgtggcataagcattccagtcttttatctttctcaaagtttcacataaactttctcaaaggccattaaatacttttccatagcctgattttttgtgaccacatagtatcctattatattgataataccataatttacctaacccatttttatatatttggattttttccaattcatcattattatgaataatggtgtatctcagtggttattactttgcactggattttttatgaaagtattgagtaaaaggaag

SEQ ID NO: 14807 - DNA, 446 bp, Homo sapiens
ttttttttttttttttttttttttttttggggattagtaaataaatctagaaatgagtactacgctacataaagagtaggtttagcaattttatttgtgttgccaaataatctccctttactttcacatatcctttcaaagtaaaataaaataatttatttataacaaaaaattattttttaatacaatagagaaaaaacttcaaatttccaacacgttttctaagggttcacaaacacttcaggcttgagtattcagatattaaaagagaaaatgccatcatcctttcttcgtattttctttatatgggccgcagatctgctttgccagaattgtcatactactgtccttacattcgtgtgtgaagccccttttcagataaataacagcttcttgtggagggttttaaattttgattaagattctagggctgccatcagatgatg

SEQ ID NO: 14808 - DNA, 458 bp, Homo sapiens
tttttttttttttttttttttttgggatgctcaacctataatacccaaaggctctatttcagtagaatttattggtttgctgattatagcagtgacatagttgcattctagagaccttagaaaatgcagaaaatttcaagaaaaacatttaaattgtgctcatagtgaaactgagaggtgaccactcttaatattttgtggcataagcattccagtcttttatctttctcaaagtttcacataaactttctcaaaggccattaaatacttttccatagcctgattttttgtgaccacatagtatcctattatattgataataccataatttacctaacccatttttatatatttggattttttccaattcatcattattatgaataatggtgtatcttagtggttattactttgcactgcatttcttatgaaagtattgagtaaaaggaagtaaagct

SEQ ID NO: 14809 - DNA, 416 bp, Homo sapiens
tttttttttttttttttttttttttggggaccagagaggccccttactagcagcctgtcctcctcaggagccccagcatcccttcatcatttggttgcccttctatgggcctagtttaggtctgagaggcatagttttaaaatttttattgggattcattgattctagagataaggtcttgctatgtttcccaggctggtcttgaactcctggcctcaagcaatcctcctgcagcagcctcccaaagtgctgggattacaggcatgagccaccacgtttggtcagacaggcttttttctacaaatatgtgggtggataaatgctgcccagccttacttcatcacttttatcaattgaatgcttttggttggaaataacaaaaaatccaactaaaagggacttaaacgaaggtattg

SEQ ID NO: 14810 - DNA, 455 bp, Homo sapiens
ttttttttttttttttttttttttacttgaattgttgttatagtgcttccgttatttatttttattttttttattatactttaagttttagggtacatgtgcacaacgtgcaggtttgctacatatgtatacatgtgccatgttggtgtgctgcactcattaactcgtcatttatattaggtatatatacgtgttcattgtacccttatcgactttgcagcatgcttatccatctaactattcatctttatttgccttcgttttttgagttcccttattcatcctaaaacaaaatataatgcctgactcataatcagacttcacagtatttttaaatgaattacattgcattggggaaatataaatagtaatgtccttttatagaggaagtctaaaagaaattcttgggtgaaattgataatcaaacatttttaagaaggtatatttgctagcat

SEQ ID NO: 14811 - DNA, 417 bp, Homo sapiens
tttttttttttttttttttttttgggatgctcaacctataatacccaaaggctctatttcagtagaatttattggtttgctgattatagcagtgacatagttgcattctagagaccttagaaaatgcagaaaatttcaagaaaaacatttaaattgtgctcatagtgaaactgagaggtgaccactcttaatattttgtggcataagcattccagtcttttatctttctcaaagtttcacataaactttctcaaaggccattaaatacttttccatagcctgattttttgtgaccacatagtatcctattatattgataataccataatttacctaacccatttttatatatttggattttttccaattcatcattattatgaataatggtgtatctcagtggttattactttgcac

SEQ ID NO: 14812 - DNA, 449 bp, Homo sapiens
tttttttttttttttttttttttttttttgaggagtagagaaatgactaattttttcattggtgagtaatatgctacaaagactcgtagaatcatatacttttggacctggaaagtagcttaaggaccatctgattaaaattttaagttttattgatgaagaaattaagctcaagaaaggctgttacttgtccaagatcacagaagttttaactattgaagcttgagaaaacagccagttctttgctcaaatttcagctgaaactacattgtataataaaataactcaacataacattacaacagaatagtttaaactctttctagtcagtggcaacttagggtagggaagatccaaagggatttttaaacaagtttgttgaaattatgtaagaaaattaacttcatcagtgaattgagatttagttagcgttcttgagcttctaaatg

SEQ ID NO: 14813 - DNA, 469 bp, Homo sapiens
ttttttttttttttttttttttggggatgctcaacctataatacccaaaggctctatttcagtagaatttattggtttgctgattatagcagtgacatagttgcattctagagaccttagaaaatgcagaaaatttcaagaaaaacatttaaattgtgctcatagtgaaactgagaggtgaccactcttaatattttgtggcataagcattccagtcttttatctttctcaaagtttcacataaactttctcaaaggccattaaatacttttccatagcctgattttttgtgaccacatagtatcctattatattgataataccataatttacctaacccatttttatatatttggattttttccaattcatcattattatgaataatggtgtatcttcagtggttattactttgcactgcatttcttatgaaagtattgagtaaaagggagttaaagcccttttagag

SEQ ID NO: 14814 - DNA, 361 bp, Homo sapiens
tttttttttttttttttttttttgggatgctcaacctataatacccaaaggctttatttcagtcgaatttattggtttgctgattatagcagtgacttagttgcattgtagagaccttaaaaaatgcacaaaatttcaagaaaaacatttaaattgtgctcatagtgaaactgaaaggtgaccactcttaatattttggggcataagcattccagtcttttatctttctcaaagtttcacataaactttctcaaaggccattaaatacttttccatagcctgattttttgtgaccacatagtatcctattatattgataataccataattcacctaacccatttttatatatttggatttt

SEQ ID NO: 14815 - DNA, 358 bp, Homo sapiens
tttttttttttttttttttttttgggatgctcaacctataatacccaaaggctctatttcagtagaatttattggtttgctgattatagcagggacatagttgcattctagagaccttagaaaatgcagaaaatttcaagaaaaacatttaaattgggctcatagtgaaactgagaggtgaccactcttaatattttgtggcataagcattccagtcttttatctttctcaaagtttcacataaactttctcaaaggccattaaatacttttccatagcctgattttttgtgaccacatagtatcctattatattgataataccataatttacctaacccatttttatatatttggat

SEQ ID NO: 14816 - DNA, 354 bp, Homo sapiens
ttttttttttttttttttttttttttttgaagaatcaacagactctatatttgatcacaaagcaaaagtttaagtgtattacttaaaattttaagacaaaatctggaataattataactaacacaaattttgaggtagaggaagagaattctagagataggtgagataaaattttcatctttgataatgagtagacaaaaacactacctttaacaagtgaagaatttaaaaaatttagagaagaggaaatcataagtggtttttaaaatttattatacatatcgaggtaaagataatccaacagaaaatgagatttgaacagacacttcacaggagatagacaaatgtctcaac

SEQ ID NO: 14817 - DNA, 625 bp, Homo sapiens
tttttttttttttttttttttttgggatgctcaacctataatacccaaaggctctatttcagtagaatttattggtttgctgattatagcagtgacatagttgcattctagagaccttagaaaatgcagaaaatttcaagaaaaacatttaaattgtgctcatagtgaaactgagaggtgaccactcttaatattttgtggcataagcattccagtcttttatctttctcaaagtttcacataaactttctcaaaggccattaaatacttttccatagcctgattttttgtgaccacatagtatcctattatattgataataccataatttacctaacccatttttatatatttggattttttccaattcatcattattatgaataatggtgtatctcagtggttattactttgcactgcatttcttatgaaagtattgagtaaaaggaagtaaagccctctcagagtgttttgtaggctgtcacatttcactccataatgtcctagtgtttgttgccaccagtgatatatgaaggtacccactgaaatgtcacacctttttggttttcctttttaaaataaaaaataaaaaagacatttaaccatataatattgttcttatatt

SEQ ID NO: 14818 - DNA, 478 bp, Homo sapiens
tttttttttttttttttttttttggtcttttctgtatttttttttttttaaatcaactaaaacaatttgatgcttaaaataaaagacaggaaatatttcctgatgagactttattcgagaatatagattttatttctgatcccgggggcgggttgattcaggggccgggtggagtgataattgatgttcccactcattggtttctgtgaggtttccgtttttctcagacttcaaggaggggaggccttggcttgttctggaaccccgtggcttaggggaccctcttatgcttgtggggctttcactagggctcttgactccaggggtctcaggtgtaatgaagtactggattgtagtgagggaagtaagaagtgctggggggcttggccgggcttggggggcttttgtaaattttaccattggagaaaacccgtggcttgggttcacttaatccgccttgtcttgttgttcttggccg

SEQ ID NO: 14819 - DNA, 381 bp, Homo sapiens
ttttttttttttttttttttttttttttggaggagtagagaaatgactaattttttcattggggagtaatatgctacaaagactcgtagaatcatatacttttggacctggaaagtagcttaaggaccatctgattaaaattttaagttttattgatgaagaaattaagctcaagaaaggctgttacttgtccaagatcacagaagtattaactattgaagcttgagaaaacagccagttctttgctcaaatttcagctgaaactacattgtataataaaataactcaacataacattacaacagaatagtttaaactctttttagtcagtggcaacttagggtagggaagatccaaagggatttttaaacaagtttgttg

SEQ ID NO: 14820 - DNA, 381 bp, Homo sapiens
  misc_feature 381: n = A,T,C or G
tttttttttttttttttttttttttgaaatatgcccacccatttcaggttgagccacggataaggagggcttagctcatgtctcctgtgggaattgaggcatctcaggaaacagtatagagttggtacagttagaatgagaagaagcctggggaaagaaaccaagagtgagaaatgcgtggctattttgacttagctggagcaaccctctcataacaggctgggaagtggacccgcgttaattaacgcgggggaaattgatgaacaaacaaaggtcatagtaaaagacagacttttggggataaaaacagaaactccaagtactgtatcaacaaatgcaagtacaccacaatcagtgagcagtgtggttcattatctggcn

SEQ ID NO: 14821 - DNA, 394 bp, Homo sapiens
tttttttttttttttttttttttgggatgctcaacctataatacccaaaggctctatttcagtagaatttattggtttgctgattatagcagtgacatagttgcattctagagaccttagaaaatgcagaaaatttcaagaaaaacatttaaattgtgctcatagtgaaactgagaggtgaccactcttaatattttggggcataagcattccagtcttttatctttctcaaaggttcacataaactttctcaaaggccattaaatacttttccatagcctgattttttgtgaccacatagtatcctattatattgataataccagtgatttacctaacccatttttatattatttggattttttgccaatttatcattatttatgaataatgg

SEQ ID NO: 14822 - DNA, 347 bp, Homo sapiens
tttttttttttttttttttttttttttggaccagagaggccccaaactagcagcctgtcctcctcagtagccccagcatcccttcatcattttgttgcccttctatgggcctagtttaggtctgagaggcatagttttaaaatttttattgttatttatttattctagagataaggtcttgctatgtttcccaggctggtcttgaactcctggcctcaagcaatcctcctgcagcagcctcccaaagtgctgggattacaggcatgagccaccacgtctggtcagacaggcatagttttacaaatatgtgggtggataaatgctgtccagtcttacttcatcacttc

SEQ ID NO: 14823 - DNA, 858 bp, Homo sapiens
  misc_feature 691: n = A,T,C or G
cgctatcactcatatcgagcgattgagctgacatcgagcggccgcgcggtggcggccgctttttttttttttttttttttttggggagagacaaacatgggccacatttttaagacaaacatggaccacaaccatgctgagagaacttagagtgaagtttacatggctatctttcttagtattagaaattttacctgataaacatcaaacatacgaccaacatagcatataaagcagctctacagatattttcctactgcccaaaatatcatataatgcacatgtaggtcacatgtgagtaggcaagagattctggaacacagaagcaagacaacaggatcacagcaatttcagtatgctctgcttgttataggaaatccccagaacattctccaattactgaacaaaaaaagcaataaaactcagatttgtctgcctggggagaaataaacagaattagagagtgaatagcaaaacaaagctatctggtgaaaagacattcttacttggaaggagttaagattttgccccttccatgggtgtacttagggaggcaaggcgtaagcggcctgacagcccggggcacactgtctacagctgatgtcaatggtacacatatagccagtggggagcaacctaaaataggcccctcttgagctttctaactttttagaaagggcagattacatancaattaaggtaaagaattttgaaggtaatttatgctaaaattggaatggggctttattaactcctctttaaaattgctaactcaacaaaatcttcggccttaattttctatgggaaaaagggaacattgaaactttttagtgggtggtatgaagttaagaggaaggt

SEQ ID NO: 14824 - DNA, 291 bp, Homo sapiens
  misc_feature 23, 24, 25: n = A,T,C or G
ttttttttttttttttttttttnnntttacatttaactctgatttattgtggggtaaagcatgttatagtgttccagcttcactttttttctgaatggctatccagttgtcccaagatcatttgttgaataattcattttcccccatttgaaatgacaccttttcgtatactaaagtcccaagtctcttagttataaaacagtaataaacccttgaaacaggcattttcctaaaatacattttgtttaagtaagacagttttcccccgcgttaattaattctagaagtact

SEQ ID NO: 14825 - DNA, 766 bp, Homo sapiens
  misc_feature 23: n = A,T,C or G
ttttttttttttttttttttttnggggggaagatgaagaaatttcactcaagtattttgttactttaagattcaatgctggacactagaccagctataacattttcagatagagtgacttcatgcgtgaaatgatcacatacaatgaagaggttttaaaaaatacagatgacataacttgttcagttgaagaaaattaaaatactgatataaactaaatcattctcctcttcattttagggggatttttctctgcaattgtactgatttatgactagaaagctgaagactgatttgagcctctttagcaatactctatttcaccatttatcttccaaagaattatggctattttatttcttccaatgaagctggaaaattataatatgccagcagatcagtagaaatgtaaaaatattagtagttacccttttagatccaacttacctgtagtgaaatagcagcaatgcattctctatttgaggacaaaacataaaaaccctggctttataaacatagaagtttaaaaaatctcagaagtttaatggggagacatttgctaaaatttctgaatggctcacactcaatctgattataaaaacagaaaaaaatttaaaaacaaatggaaagctttttaaacatatctcaaaatatatttacctggactcttaaaaaaattgaaaggacctaggccctaccatattaagggttacacgatccaaaggatttactaccctaattttgagtaacctttcctggaatgaaaa

SEQ ID NO: 14826 - DNA, 341 bp, Homo sapiens
tttttttttttttttttttttttttttttagagggagtcttactccgtcacccaggctggagtgggggggtgtgatctcagctcacagcaacctgacctcaggtgattcacccgcctctgtctcccaaagtgctgggattacaggcgtgagccactgcgcccggcgtctttgaattttttaaactgaagtttaattgcctttgagtttgatcattcactatttgccattggtatttcttttgttaattatctgctcatgctctaatttaataagggaaatttaatggattaacatatgacacccactatcacccgccttaattaattctagaagtactctt

SEQ ID NO: 14827 - DNA, 405 bp, Homo sapiens
ttttttttttttttttttttttttttttgggggattccatttttatgaaatgtccagaacagggaaaacctattttagacaacagagacacaaagtcgatcagcagttgccaggggaggaggaagacgggaggggaaatgattgcttcacggggtgatgacagaatgttccagaacgtgacagaggtggtgcctacacaactttctggatgtactaaatgccgctgattgttcactttcaagtgattgatttttaggttatttgaatttcatctcaattaaaaaacccaaacacgcaaactgctcccgccagcttagccccgagcagacggcgcagcccgtggaggatgctgagccacccaggcttttccccgccttaattaattctagaagtactttcgagggg

SEQ ID NO: 14828 - DNA, 443 bp, Homo sapiens
  misc_feature 52, 53, 54, 55, 56, 92: n = A,T,C or G
gcctgatcgagtgatctgagttggcgttgctgctgtagttcggccgccgctnnnnntttttttttggtttgaactcgccgttcataacaggnggagccacggataaggagggcttatctcatgtctcctgcgggaattgaggcatctcaggaaacagtatagagttggtacagttagaatgagaagaagcctggggaaagaaaccaagagtgagaaatgcgtggctattttgacttagctggagcaaccctctcataacaggctgggaaggggacccgcgttaattaacgcgggggaaattgatgaacaaacaaaggtcatagtaaaagacagacttttggggataaaaacagaaactccaagtactgtatcaacaaatgcaagtacaccacaatcagtgagcagtgtggttcattatctggcaatggcactctttcaaatac

SEQ ID NO: 14829 - DNA, 400 bp, Homo sapiens
tttttttttttttttttttttttttttttttttttttttttttttttttttttttttttttttttttttttttttttttttttgggccaaaaaaaaaatttaaaaggaaaaaaccttaccaaaattcgggaggggaaaaaccaaacaagggggctccccaaaaaaaatcttatttgggggaggtaaaaaccccctttggggctccccgggattatcttcaggggcccctcttaattttattcagggccccccggaaaaattaagttcctacagccccgggttaaaaaattctaaaagcccccccgggggggggcccggaccccaacttttgtccccttaaggggggggaaaatgcccccttggggaaaaaaggggcaaagctgtttcccgggggaaaaaa

SEQ ID NO: 14830 - DNA, 202 bp, Homo sapiens
  misc_feature 22: n = A,T,C or G
ggggaggattggaactgcctcntgtagattgggcgaatagtagctgccacgttctggcggccgctttttttttatgtttttttttgttatatcacaggggcataaagaacattattccttggaaggaaatatcattttatttaagcaacagtaacatttgaaatacccttttttccccatggagctacatctctgttccaga

SEQ ID NO: 14831 - DNA, 403 bp, Homo sapiens
ttttttttttttttttttttttttggagacggggttttgctgtgttggccgggctggtctccagctcctaaccgagagtgatccgccagcctcggccttccgaggtgccgggattgcataccgactctcgttcactcagtgctcaatggtgcccaggctggagtgcagtggcgtgatcttggctcgctacaaccttcaccttccatccgactgccttggccccccaaagtgccgagattgcagcctttgcccagccggcatccaatttgggaagggaggtatcatgtctgcctggccccccatcgactgggatctgacgagcctatttgtctaagtgctcattctggaaagcgaggaacctatctgtccggccctcatacgatgtaagaagcgaggagcgcct

SEQ ID NO: 14832 - DNA, 405 bp, Homo sapiens
agtacttctagaattaattaacgcgggttgtcatacaagaagtactccaatttttctctccatctctccacctgctttttgaatattggcgcatcttacaataagctcttcccttcatggtccaagataaacgtaaacaatttccaaggttccatgcatcctcatcttcaccccacactttaaaactatcatttctagtccacccctgagatttgatctgattggactagcgttgatcaagtgtccaccccttgaacccatctctgtggccaggaaaaaggaacgataggctaagtcatatactccacccttggagcaggggcatgagtcagcttctccagaaccagatggagccccgctcagaaatcaggggctattgggtcaagggaagaaaaaaataaatgc

SEQ ID NO: 14833 - DNA, 24 bp, Homo sapiens
tttttttttttttttttttttttt

SEQ ID NO: 14834 - DNA, 415 bp, Homo sapiens
tttttttttttttttttttttttttttttgaggaaggcacctacaaaacgaaagtgcctagggcttacaaaagtcatatgtagcctttacaaatattagctcagtcattttcagaaaggtttttccaattatcattttagagatgaggaaactgaagctcagggaggctaggaaacttatccaaagcctcttaagaggctatgttagtcagactgggctaacagctgtaacaaccccagaatttaaatggcttaacacattaggagtttatttgttattgccataacaattcagggtgtatgtttggcaggtagtctacacagtgattcagggacccaggctccttccctctggtggctttttctccctctagtgctgggagctctccatgcaaatggtggatggagaaagagaa

SEQ ID NO: 14835 - DNA, 413 bp, Homo sapiens
gctttttttttttttttttttttttttgggattctgttccccttctgataatacagtataagaatataacaaatagatatttaattccccttaaatatgtgtggatattttctgaatggcctaagcatctcttactgtgagtcatttctgcaaatgaacaaactcattcattatgaagtaattcttactagtgtctctctgaaaatgacttttttttttttaactttaatctcttacctccaaattccaaaggtacatattacagctcttatgaatgtcctgaagcatgctaggggagttattttgctgccttagcccttgggattagaattttgtatagtagatatttaatgaatgtttatagggcttatgatcaaacttggtacataagctataaaaatgaaagaaattct

SEQ ID NO: 14836 - DNA, 411 bp, Homo sapiens
agttcttctagaattaattaaggcgggggcacaggactgtacttttggtagcggtgcggggccgcccgcggactttagccctgcatagagatgggtagaccctaatttggaacagccattgactgggcacaggccagcactttgggaggccgagaggccgaggcaggaggatcgcttgaggccaggagtgccagactgcgagactagcctgggtaacatagtgagaccctctcttcaaaaaaaaaaaaaaaaaaaaaaaagcctgtcacggtggcctgcgcctgtaccccagctactcgagaggatcgcctgagcccagtgaagctgcagcgagctgtgaggatgccaccgcactccggcctgggctaaaaagctagatcgtgtctctgataaaagaataaaagctgttta

SEQ ID NO: 14837 - DNA, 454 bp, Homo sapiens
  misc_feature 23: n = A,T,C or G
gggatatatggagcaatatgaantcggcaatagtgctcgacagcgtcggcggccgcttttttttttttttttttttttttgttatgcccaacctataatacccaaaggctctatttcagtagaatttattggtttgctgattatagcagtgacatagttgcattctagagaccttagaaaatgcagaaaatttcaagaaaaacatttaaattgtgctcatagtgaaactgagaggtgaccactcttaatattttgtggcataagcattccagtcttttatctttctcaaagtttcacataaactttctcaaaggccattaaatacttttccatagcctgatttttttgtgaccacataggaatcctataatattgataatacccataatttacctaacccaattttaaaatatttgggatttttttccaattcaatcctttattatgaaataag

SEQ ID NO: 14838 - DNA, 183 bp, Homo sapiens
tttttttttttttttttttttttttttgagatggagtttcactcttgttgcccaggctagagtgcaatggcaggatctcatctcactgcaacctctgcctcccgggttcaagtgactctcctgctttatcctcccgaggagctgggattacaggcgcccgccttaattaattctaaaagtact

SEQ ID NO: 14839 - DNA, 385 bp, Homo sapiens
agtacttctagaattaattaacgcggggcacttgatgaataagacgcggccatcccggcacaccccgtaggaccaatgctcaggccaaaggtgtccaaactatacagacccacagaatctaacaacagatgtctcaatattcctcgtcctagaactctcagaggatccagaactacagccggtcctcgctgggctgttcctgtccatgtgcctggtcatggtgctggggaacctgctcatcatcctggccgtcagccctgactcccaccttcacacccccatgtacttcttcctctccaacctgtccttgcctgacatggtttcaccttcaccatggttccccaagaagattggtggacatccaatctcacagaaatcatttttc

SEQ ID NO: 14840 - DNA, 455 bp, Homo sapiens
  misc_feature 39: n = A,T,C or G
gggatgggtgcgacgcatatactgtatatcgggcgaatngtagctgcaaagcggcggcggccgcttttttttttttttttttttttttttttttgaggaaggtttcctacaaaacgaaagtgcctagggcttacaaaagtcatatgtagcctttacaaatattagctcagtcattttcagaaaggtttttccaattatcattttagagatgaggaaactgaagctcagggaggctaggaaacttatccaaagcctcttaagaggctatgttagtcagactgggctaacagctgtaacaaccccagaatttaaatggcttaacacattaggagtttatttgttattgccataacaattcagggtgtatgtttggcaggtagtctacacagggattcagggacccaggctccttccctctggtggctttttctccctctagtgctgggagctctcca

SEQ ID NO: 14841 - DNA, 383 bp, Homo sapiens
agtacttctagaattaattaacgcgggcattgtgtgcagaagacctggactggaatctaacactgtgagtactccccaggatccgtgttcctctctttagcccaggcatgcagttacattacattttccaaccttccttgcagttagctacgatcacgtgactgcattctggccagtggaatgtgtgtggaagtgatgtgggccaattccaggcctggcctataaaaatcccccactttttgttctctttctccatccaccatctgcatggagagctcccagcactagagggagaaaaagccaccagagggaaggagcctgggtccctgaatcactgtgtagactacctgccaaacatacaccctgaattgttatggcaataa

SEQ ID NO: 14842 - DNA, 402 bp, Homo sapiens
tttttttttttttttttttttttttttttaccgggtgtgtggctgggggtgcaaagaggctgtgatgttgctgggcagtgtgggtctgggctaggggtctcttgccagctctgacacatccacccctaggcggaggcccacagccggaaccatggggtcaggctccaccggggaggctgatggatgccctggctcttcctgggcccaactcgaccctgctgctcccaaggggcttctcacctctgtgctagggtccacaacactggctttcctgctcccgatactgcctggctgcttggatggtgttttctggaggaagtcagagatcctctgcaccaaaaaatcacggtctttcaggttggcaaacaggaatgtcattttgcttttggtgctgatggacag

SEQ ID NO: 14843 - DNA, 411 bp, Homo sapiens
tttttttttttttttttttttttttttttgagatggagtttcgctctgttgcccaggctggaatgcagtggagcgatctcggcttactgcaacctctgcctcccaggttcaagcaattctcctgcctcagcctcccaagtagctggggatacaggcgtgtaccaccacagctggttaattttttgtatttttagtagagactgggtttcaccatgttggccaggctggtctcgaactcctgacctcaagtgatttccccgccttggcctcccaaagtgctgggattacacgcatgagccaccacgccctgccagaggctctgagaattcttatagcaaagttaattttatgacataagcttataactaatgaggtcaaaactacaaaattaaaaatataaggtaatcctaa

SEQ ID NO: 14844 - DNA, 396 bp, Homo sapiens
ttttttttttttttgtgtttcaataaaactttatttacaatttacaggtagtgggctggattggccaacttctgatgaatagcatttctttataaattctgaacatgagtactttaaaaaaatgtagcaaatatcttctactattatgtggttcatcttttccacctagtgtatcatatttttgatgaacagaatttcctgttttgatttttttaaaatagtaaacaagatttgctgatccttaatacctgcctgggtttatttcccatcttgtcttcagtatgatctaggccttctggaagttgaatgggggagcgtctaacaaatagctacctaatacctagacagatgacatcatctccgtgtgcaggtaggacattagatggtttctctagg

SEQ ID NO: 14845 - DNA, 387 bp, Homo sapiens
agtacttctagaattaattaacgcgggtccaggtctctgagtccattctttgggtttggacaggtaggtttgtttctcacaataccaggtataataccagtagaatgtttcatataatttaacaagttcattataaaatgtacttgaaattgcaaagagccacaaaaaaaacccagacaatattgatgaagaaaagacgaagtcagaggacctatactacaagatatcaatataaattataaaggtaccataattaaaactgtggaactggagtaaacatggacaagtagaccaatgtagttaaaaacaattctgaaaaagacccacgcatatatagatgcttgatttattaccatgttgctactataaacaagggaaaactgtttt

SEQ ID NO: 14846 - DNA, 372 bp, Homo sapiens
agtacttctagaattaattaaggcgggcgcctgtaatctcagctactttggaggccgaggcaggagaattgctagaacccaggaggcagaggttgcagtgagctgagatcgcgccactgcactccagcctgggagacagaatgagactccatctccaaaaaaaaaagaaagaaagaaagaaagaaagaaagaaggctctattttgatactgggagcctaaactgaatgattctggagaaattcacagatggggctgaggctcaccttcatgacagctgtatcaaaggcctaaatttctaaggctcagaaatcactacaataagcctatcaacagcatgtgatactctccaagcattttgcaaccttaacatt

SEQ ID NO: 14847 - DNA, 402 bp, Homo sapiens
tttttttttttttttttttttttttttgggctgaatcaggaaacatttattcttccccataaatttaaatggaggtgaaactgcgaatatgaagcaaagaacatttatctcacaaggtaactctgaatttttttaattctgaaacccaagacattgtcaacacttacagcattcacacaacactattttcaaaataggtttttgacccctaaaaatgaaaattcttagcgacaagctttatatatgaaacttaccccactgggtattcactttgtcacaaaaagcaactaccgacaaatagtttttccctctccccgacacaaaaactgaaattacagacttttaaagcagaaaaaattttctccaaaatgcaaatgattaaggtccaaggaacaaatgaaa

SEQ ID NO: 14848 - DNA, 269 bp, Homo sapiens
tttttttttttttttttttttttttttttttcctttttttacaaaagtttattcttaaaggtacaacagctccaagacaacacttaattccagctatacgtggcaaaagatgttatggcagggaatagagaggtttaaatccacaatgaaataaggggtcaccaatttttttaggcacaaggaacagtttactttttgccagatttttttaattccacctgtggccaagggccccttcccccgccttaataaattctagaagtactttt

SEQ ID NO: 14849 - DNA, 366 bp, Homo sapiens
agtacttctagaattaattaacgcgggggagggaggtcacggcgtaaaggtgcagctgccgccaccgccgcttctgcaaggtctcaaggacgggctgcagccatgtcctattgccggcaggaagggaaggatcgaatcatatttgtaaccaaagaagatcatgaaactccaagcagtgcagaattggtggctgatgaccccaacgatccatacgaggagcatggattgatactgccaaatggaaacattaactggaactgcccatgccttgggggaatggccagcggtccctggggagaacagtttaagtcagccttttcctgctttcactatagcacggaggaaaacaagggggttaaactgtgt

SEQ ID NO: 14850 - DNA, 402 bp, Homo sapiens
ttttttttttttttttttttttttttggggcgacctcggagcattaacccaacctccgagcagtacatgctaagactttaccagacaaagcgaactactatactcaattgatccaataacttgaccaacggaacaagttaccctagggaatacaagcgcaatcctattctagagtccatatcaacaatagggtttacgacctctatgttggatcaggacatcccgatggtgcagccgctattaaaggttcgtttgttcaacgattaaagtcctacgtgatctgagttcagaccggagtaatccaggtaggtttctatctacttcaaattcgtgcgtgtacgaaaggacaagagaaatacggcctacttgagaaaatgccttcccccgttaattaattgtaaa

SEQ ID NO: 14851 - DNA, 399 bp, Homo sapiens
ttttttttttttttttttttttttttttttttttttttttttttttttgggttctcttttcccaaaaatacttccatttaatatagtcatatgaaagccaatcaccaagaagggagattgacagacatgcttaagaaaatagctacctacccttccccccacaccaaaggggtgattttaggttttggttattttattttaaacaaatggggaaaagacagacccccccggatgacttcccacagggaagggatttaagggctgcccccatgaatttttttaggccacgacagctacttcctccttttgtatctggatttaaatttaaagtttcctccccgtctttgggggggcaagcccaactgtttccttttttcaaaggaagggctaacttgaaac

SEQ ID NO: 14852 - DNA, 484 bp, Homo sapiens
agtacttctagaattaattaacgcgggggtcaaaaggctgggcagccatggcgtcctatttcgatgaacacgactgcgagccgtcggaccctgagcaggagacgcgaaccaacatgctgctgtgagcttccaagggtcaactttttcaataaggatgggacttttgaaatactttggggggttgggtatgtatgatatgggaaccacccactctggccttcaacacaatctgcgcaaaggacctgttggtttggagaaaactctttccccagggaacaggtcaattccagtagaggcttcttcaaagtctcgaagccttcaaagatgtcccccccgaggtggttcttttttggaaaatttttggagggaagggaagggaaaaacatggttcattttggaagaatgtgccctttgttcaattcaaacccttttttctcaatttcccaaaacttggcattttcttggccccttggggcttaaaaac

SEQ ID NO: 14853 - DNA, 404 bp, Homo sapiens
ttttttttttttttttttttttttttttttaggattgcaataaacagcttttattcttttatcagagacacgatctagctttttagcccaggccggagtgcgggggcatcctcacagctcgctgcagcttcactgggctcaggcgaaccctttgagtagctggggtacaggcgcaggccaccgtgacaggctttattttttgtttttttccttttgaagagagggtctcactatgttacccaggctagtctcgcagtctggcactcctggccttaagcgatcctcctgcctcggcctcttggcctcccaaagtgctggcctgtgcccaaccaatggctgttccaaattagggtctacccatttttatgcagggctaaagtccgggggcggccccgcaccgttac

SEQ ID NO: 14854 - DNA, 826 bp, Homo sapiens
  misc_feature 556: n = A,T,C or G
tttttttttttttttttttttttttttttgaggaaggcacctacaaaacgaaagtgcctagggcttacaaaagtcatatgtagcctttacaaatattagctcagtcattttcagaaaggtttttccaattatcatttagagatgaggaaactgaagctcagggaggctaggaaacttatccaaagcctcttaagaggctatgttagtcagactgggctaacagctgtaacaaccccagaatttaaatggcttaacacattaggagtttatttgttattgccataacaattcagggtgtatgtttggcaggtagtctacacagtgattcagggacccaggctccttccctctggtggctttttctccctctagtgctgggagctctccatgcagatggtggatggagaaagagaacaaaaagtgggggatttttataggccaggcctggaattggcccacatcacttccacacacattccactggccagaatgcagtcacgtgatcggagctaacttgcaggaaaggttggaaaatgtaatgtaactgcatgccttngctaaagagaggaacacggatcctggggagtactcacagtgttggaatcccgtccaggtctttttgtcacaatgcccgcgttaaattattctagaagtactctcgaggggggccccgggcccagcttttggtccccttaaggaggataatggccccctggccgtatatgggaatagttgtttccggggaaaagtgttaccccaccaattccaacacatacagaccgaagcttaaagtgaaaggccgggggccaaatgaggagcgactccg

SEQ ID NO: 14855 - DNA, 817 bp, Homo sapiens
tttttttttttttttttttttttgggatgctcaacctataatacccaaaggctctatttcagtagaatttattggtttgctgattatagcagcgacatagttgcattctagagaccttagaaaatgcagaaaatttcaagaaaaacatttaaattgtgctcatagtgaaactgagaggtgaccactcttaatattttgcggcataagcattccagtcttttatcattctcaaagtttcgcataaactttctcaaaggccattaaatactcttgcatagcctgattttttgtgaccacataggatcctattatattgataataccataatttacctaacccatttttatatatttggagtttctccaattcaaaattactatgacaaacggggtatcttagaggaaattcctaagcactgggtgtctgatgaaagcaatcggtaaaaagaggccaaggccctttataatgcataattgggcggtaaaattaactcgaaaatggcctagcgtttttaatcgccaatcacttaacaaggatccgacttagatccccacacatatgtccttgaccattttttactggccctagataaaagtgatgacaatacttggcgaatttttatcaaccgttagtttattgcgcatctttattatttggatcctcaaaacattccactgtgcgggatatgagaatccatctcgaaaataggcccaggtccccgggtactagaagtaatgacaaaaaaaactcatgtcagcacattcctttatttaaagaccctagaggttacggaaggggcatcactttttgggaacc

SEQ ID NO: 14856 - DNA, 418 bp, Homo sapiens
ttttttttttttttttttttttttttttttaggattgcaataaacagcttttattcttttatcagagacacgatctagctttttagcccaggccggagtgcggtggcatcctcacagctcgctgcagcttcactgggctcaggcgatcctctcgagtagctggggtacaggcgcaggccaccgggacaggctttttttttttttttttttttttagaaaaaagggtctcactatgttacccaggctagtctcgcagtctggcactcctggcctaaagcgaacctcctgcctcggcctttcggcctcccaaagtgctggcctgtgcccagtcaatggctggtccaaattagggtttacccatctttatgcagggctaaagaccgggggcggcccctcaccgtttccaaaagtacagtct

SEQ ID NO: 14857 - DNA, 834 bp, Homo sapiens
  misc_feature 522: n = A,T,C or G
tttttttttttttttttttttttttgggaagatggaatctcactctgtcacccaggctggagtgcagtggcatgatctcagctcactggaagctctgcctcccaggttcacaccattctcctgcctcagcctctcaagcagctgggactacaggcgccagccgccatgcctggctaattttttttggtattttttagtacagatggggtttcaccgtgttagccaggatggtctcgatctcctgacctcgtgatctgcccacttcagcctcccaaagtgctgggattacaggcatgagccaccatgcccggccgatttcacctttcaatggcaattactataagacaggaaagttatttatttttatatatttacctaattttaagttaccttatacaaccctcattaatagtctgttagaactagaatttaaactctatgtgaatatggaccttatttaaacaatgtatccctagcacctagacaatgcctaacctgtcacattaacttaatatatatttnaattatattttttggttatttattttttttgagacagactcttgctttggcacccaggctggagtgtaatggtgccaacctggctcactggaatccttgcctcccaagttcaaagcattctttggtctaaccttcccaagtgattgggaattacaaaccccccccaccccgcccaaagttaattttggatttttaagaaaaaaaggggttttgccatgttggccaggctggtctttaaactccggacttgagaaacctgccaccctgcctcctaaaggctcggatatcaggtttgacctcctgaccccacct

SEQ ID NO: 14858 - DNA, 294 bp, Homo sapiens
  misc_feature 29, 30, 36: n = A,T,C or G
ttttttttttttttttttttttttttttnnaacatnaaactctgatttattgtggggtaaagcatgttatagtgttccagcttcactttttttctgaatggctatccagttgtcccaagatcatttgttgaataattcattttcccccatttgaaatgacaccttttcgtatactaaagtcccaagtctcttagttataaaacagtaataaacccttgaaacaggcattttcctaaaatacattttgtttaagtaagacagttttcccccgcgttaattaattctagaagtact

SEQ ID NO: 14859 - DNA, 379 bp, Homo sapiens
agtacttctagaattaattaacgcgggtgatcaagtacatcaaagacaaataccctaatctccaagtcattggaggcaatgtggtcactgctgcccaggccaagaacctcattgatgcaggtgtggatgccctgcgggtgggcatggaaaggggctccatctgcattacgcaggaagtgctggcctgtgggcggccccaagcaacagcagtgtacaaggtgtcagagtatgcacggcgctttggtgttccggtcattgctgatggaggaatccaaaatgtgggtcatattgcgaaagccttggcccttggggcctccacagtcatgatgggctctctcctggctgccaccactgaggcccctggtgaatacttcttttt

SEQ ID NO: 14860 - DNA, 385 bp, Homo sapiens
ttttttttttttttttgagacagagtctcactctgtcgcccaggctggagagcagtggcgtgatctcagctcactgcatgctccgcctcctgggttcacgccattctcccacttcagtctcctgagtagctgggattacaggcgttcaccgccacacctggctaattttgtttttgaatttttagtagagacagggtttcaccgtgttagccaggatggtctcgatctcctgacttcgtgatccgcctgcatcagcctcccaaagtgctgcgattacaggcatgagccaccgtgctcggccagctctctcttaaatgtagcagctggaaacattctttttgtttgattttttgctggtcccgcgttaattaattctagaagtact

SEQ ID NO: 14861 - DNA, 271 bp, Homo sapiens
agtacttctagaattaattaaggcgggttaactgcttgagtccaggaattcgagaccagtctagtctaggcaacacagcaaaaccccatctctataaaaataagccaggtatggtggcacgtgcctgtaattcccactacttgggaggctgagctgagagggtcgcctgagcctgggaggtcaagaatgcgtaagccgtgattgtaccactgcacgccagcctgggtgagaccctgtctcaaaaaaaaaaaaaaacaaaaaaaaaaaaaat

SEQ ID NO: 14862 - DNA, 360 bp, Homo sapiens
ttttttttttttttttttttttttttttttttttttttttttttttttttttttttttttggaattacaaagctactttaaaaacttgggggggagccccacaggaaaaaaaaacactgggaaggggtaaccccccccccccccggggggggcccagggggagagaggctacctggggggaaggaaccccaaaagggacccgttgcaaactcagggcaaagggaatgccatcggggctgggacctgggacccctacaggaggaaaccccagcgtggggggactggctccaggcccacaggcaaagggcaagagggttggacccaaacccccaaagctactggggttcctcctttttttcc

SEQ ID NO: 14863 - DNA, 413 bp, Homo sapiens
  misc_feature 100: n = A,T,C or G
ccctcacccatctgcaattggcaaaaatgctgccagttttggcggccgctttttttttatatttttttttgtttataaacacaaatgtgttccacctttnaaagacaaacatggaccacaaccttgctgagagaacttacagtgaagtttacatggctatctttcttagtattagaaattttacctggaaaaccatcaaacatacgaccaacatagcatataaagcagctctacagatattttcctactgcccaaaatatcatataatgcacatgtgggtcacatgtgagtaggcaagagattctggaacacagaagcaagacaacaggatcacagcaatttcagtatgctctgcttgttataggaaatccccagaacattctccaattactgaacaaaaaaagcaataaaac

SEQ ID NO: 14864 - DNA, 386 bp, Homo sapiens
agtacttctagaattaattaacgcgggggaacaaaaaacagacatgaatgcgccttccaggccatctgtttctctgctactaccctttatggaaagacacatctccttcccctccctgtcctacttgcttctacattcccgtatggctgagtacctctaatatagcgtgccctgcctccgggcctttgtagcagggccaggtctgactatccagattagcttgctctcctaagctgcatcattgcatgactctaccctttcctaacctttctcactcttgcagctcccttctgctggtgaatgacatatataaacgccacacaatcacaggacggctgctccaccaccgggattacattttcttttcaggcccgaataaaaggaag

SEQ ID NO: 14865 - DNA, 366 bp, Homo sapiens
ttttttttttttttttttttttttttgaaggagagagactttttccgctctctcgctccctgttaaagccgggtctagcacagctgcagacgccaccagcgagaaagagggagaggaagacagatagggggcggggggaagaaaaaaaagaaaggtaaaaagtcttctaggagaacctttcacatttgcaacaaaagacctaggggctggagagagattcctgggacgcagggctggagtgtctatttcgagctcagcggcagggctcgggcgcgagtcgagaccctgctcgctcctctcgcttctgaaaccgacgttcaggagcggctttttaaaaacgcaaggcacaaggacggtcacccgcgc

SEQ ID NO: 14866 - DNA, 424 bp, Homo sapiens
ggaatgagctaatctgaatatctggcgaattgtagctccaccgcgccggcggccgcttttttttttttttttttttttttttttggaccaagatttgttttatttttcttgcagtagctttgttaattgcacaaaatcatgttttgtttttgccatttaaacattatcacacaatcctattttgaaagacaaatgtttcattaaaaaccaaagcgaaaataaaaattcacaaccttaattacctagatttgtcatttaaaggtttaaagaaaaaagggaggggctttcttacaagctttttcacaagtgtcacattttctccttaaaagggaaggatttcaaaagaaaggggaaataccttaaacagaaatattcataaaaaggaactttacagaattgtcaacaatattaagacaaaattgac

SEQ ID NO: 14867 - DNA, 208 bp, Homo sapiens
ttttttttttttttttttttttttttttttttcgggcgacagagtttcgctcttgtcgccaggctggggtgcaatggcgccatctcggctcactgcaatctctgtctcccaggctcaagcaattctcctgccttaacctccttgagtggcggggactgcaggcgcccgccactacgcccgacccgggttaattaattctagaagtact

SEQ ID NO: 14868 - DNA, 841 bp, Homo sapiens
tttttttttttttttttttttttttttttgagatagggtttcactcctgtcacccaggctggagtgcagtggcacgatcttggctcactgcagcctccgtctcccacacttaagcgattctcctgtctcaacctctggtagctgggactacaggcacatgccactacatctggctaatttttttttttttttttttttttagtagagacagggttttggcatgtagcctaggctagtctcaaactcctgagctcaagtgatctgcccaccttagcctcccaaagggctgggattacaggtttgagacaccacacctggcctcaagtgctttttgacaggactgaacttcacatctactcatctaaatttcattcatcctcctacctagttattcatcctccttacctaggtactcattccatctgccatcataactttggttttagggaaaggggatttcacagttcttttgttcctcaacaaacaatattaactcctgaatggctcaaatttttctcacctttttataagcaggaattcccccttaaattggtctaacccggttttaagtcctgctggcttaaaaatgggagaccgggtatctttatgttacctataagggccttggtcccttttcccaccttaagggagaaatctctaaaattttctcacttgagaagagaggggaattaattctttgaaaacaaagccaagcccctatggggaggctctaatcttaagaaagggttttttttcgttaaacagttaacaaaggtttcttgtgagacccaaattggagaaaggtggaaggccgaaatggaatgggaaacggggacaatat

SEQ ID NO: 14869 - DNA, 889 bp, Homo sapiens
  misc_feature 10, 30: n = A,T,C or G
tctgcgccanctgcacctatcgggcgaatnggagctgcacagcggtggcggccgcttttttttttttttttttttttgtttaaagaaggaattttactctgtcgctcacgctgcagtgcagcagcatgatgtcggcttactgcaacctccacctctcgggttcaagtgattctcctgcctagcctcctgagactggtattataggcgtgcgccaccacaccctgctaatttttgtatttttagtaaagatggggtttcaccatgttggtcagtctggtctcgaactcccgaccttgtgatctacctgccccatcctcccaaagtgctgggattataggcctgagccaccgcaccggtctctccttctcttttaagctctggtcccaaactgctacccgcttccccagccaggcctccccctgagcagacacactgaccaagagaagcctccacctactgcctggacatgcaaaccctgccgcagcccaaggccttggagagctagagttatgcttccggccaacgctgaacccttcttagcttagaccggggtaacttggggatcttttgaaaggaaaggattcttagatgctcaagaaaattccagtttgggaaacttgaaaaaggggacttcttaaaagaaaatacccttcaaatgcgaattaatattacagaagtgggattgacctttataaaagtgagatattcatctttaaaaatgttaacctgcatgaaaacactttttggaaaaagtttccagaccccactgacgcctggaaatccttcacctgtttgattcgcaatcaatctcctttcctggggcccaggttgttaactggacttacccaacctctaacaggtccggtcaaaataatcctcgagattaaaa

SEQ ID NO: 14870 - DNA, 429 bp, Homo sapiens
ttgagagtacttttgaattaattaacgccggggcagaaaagggggccgcggactccgcttgttgtgttgctgccttagtgcccgaaaccgtcctgctgcttccccagtcctgccaactttcccacgattttctccccccttatttagccctcttccgtcccttttcaaactcctcaaccaactttgaggaaaaatttgccgttctttttttttcccccccggccggtctttttttaaataattttcctgggttgggatcttccccattgaaacagccattttttggccaattgaattaattgggcaattggggaaaaatattgggggggcttggaaaccacgttactcattcctttcattcccttccattccacaaatttggattacctttggaagaaagaattttcttttttgggattgcccacaaat

SEQ ID NO: 14871 - DNA, 838 bp, Homo sapiens
  misc_feature 497, 589: n = A,T,C or G
ttttcttttctttctttctttttttttttttagacggagtctccctctgtcacccagactggagtgcaatggtgtgatcttggctcactgcaacctccgcctcccgagttcaagtgattctcctgtctcacctctagtagctgggattacaggcgcctgccatcatgtgccggctaattttggtatttttagtagagatgtggtttcaccatatcggccaggttggtctcaaactcctgacctcaggtgatcagcccgcctctgcatcccaaactgctgggattacaggcgtgaggccaccacacccagcccggattacccttaagtaggaggtacattctcttccattgaaaaagagagagagcagagaatagatgcacaggcaagcagatctgtatccattttgttgtgggaagttgcttcctctctgatgttctctctctctctctctctctggctctctctctctctggttttctctctcgtgcttcaagtanggaatgattagtgagtgatactggttgctaagtaggtaagaaaataaagaaggggaacacagaaagagtgtttcatagaaaaatgctggcantggcttaagacatattgctcactggtttaggctccaagttccctctctttttgctcctaccctagattccaagttaccagaccctcaatcctgaaaggctggggctatattttattatttaggaggagacctcacattaatattgccaaagaggtcatcaataaataccagcccttttccaaaataaatatcaaaaccctggttcttagcatttgttgaaattgggaaacaagtggtttacttttttat

SEQ ID NO: 14872 - DNA, 572 bp, Homo sapiens
tttttttttttttttttttttttttggagacagagttttgctcttgtcacccaggctggagtacaatggcacaatcgcggctcactgcaacctccacctcccgggttcaagtgattctcctgcctggcctctgagtagctgggattacaggcacctgccaccatgcctggctgtttttcatatttttagtagagacggggtttcaccatgttggccaggctggtcttgagctcgcgacctcaggtgattcgcccacctcagcctcccaaagtattgggattacagatgtgagccactgtgcccggcacttttctgcttttaaatacaatgattttagaaagtctgtatatgaactttgggcttgtacctagatatcccagtgtgtgtagggagccctgtatatctgcaaggggatccattagaccaaggatattagatccagcacttctcctttttaatgcatgtcataagcacatgattttatatcatgtcagaaaaaggctgttgatataaaggaagagaacaaagaatgagaagaactatatcccgcgttaattaattctagaaagtct

SEQ ID NO: 14873 - DNA, 472 bp, Homo sapiens
agtacttctagaattaattaacgcgggatggcacaggcagcgcaagtaggtcttccggaagctactttccctatcataaaagaacttatcaccttttcatgaatcacgccctaataaacatttttcctttaaatgggttcctaattcctggaatgcccccttttcctaaaaaatttaaaaacaaaaactaaactaattacttaaccattttcaaaacggctcaaggaaaatttgaaaaacccgtcttggaaactatttcctggtgccgccaattcattccctaagaacccttaaaagggcccctttcccattcccctttaccgcaatttcctttttaccattaaaccaaaaaccgaagggttccaaaccgaattccccttccccttttacccattttaaaaattaaaatttggggcccaacacaaaagggggtaccctgaaaacccttaccccaagttaccaaccccgaacg

SEQ ID NO: 14874 - DNA, 821 bp, Homo sapiens
  misc_feature 533: n = A,T,C or G
tttttttttttttttttttttttttgagacaagatcttgtcctgtcacccaggctggaatactgtggtgcaatcatagctcactgcagcctcaaacttctgggctcaagtgatcctcccacctcagcctcctgagtactgggaatgcaggcacataccaccatacctggctaattaaaaaaattttttttaatctcactgtattactgaagctggtctggaactcctggccttgaacgatcatctcagcctccccaaactctgggattacaggcatgaaccattacacctggcttgaagagaagaggttcttaatattgaagaagtccatttatctgtttttgttttttttcccctcatgtattgggtttttggtattgtatctaagagattgttgcttaactcaagaccacaaagatctttttctatttttttcttctaagttttttgtagttctaggttttacatttaagtctccaatacattttgagttaaattttgtgtatggggtgatgtatggatcaatgttcattntttttgcatatgaataaccattattttaacaccatttattgaaaagactatctttttgcccatgaaataaccttgcatgtctcttgaaaatcaactatctatatatatgtgggtctacctgttctggcatattaactaattggatagttgagaatatattacacttgctaaatttaaaagtttacaagtctaaaagtcaggcaaaacaatttcccacttggtatttttaaaaataccttggattttaaaatttaaaattcataataaattaaaataacatggaaattt

SEQ ID NO: 14875 - DNA, 359 bp, Homo sapiens
agtacttctagaattaattaaggcgggggataaagttaaggtgtagagtatttattaggttattaggcttgtttgtttgtttatgcaaatcatgttaggttgttatcagctcaaaataatgggttataagatagtatgttctggcctcatggtaacctcaaaccaaaatacatacaatggatacacgaaagataaaaagcacgaaactaaatcatgtcttcagagaaaatcatcttcactaaaaggaagacagaaaggaaagaaataaggaagagaagatcacaaaacaactggaaaagaaataacaaaacggcaggagtaaatccttatttatgaacaataatatggaatgtaaatca

SEQ ID NO: 14876 - DNA, 342 bp, Homo sapiens
tttttttttttttttttttttttttttggaccagagaggccccaaactagcagcctgtcctcctcagtagccccagcatcccttcatcattttgttgcccttctatgggcctagtttaggtctgagaggcatagtttaaaatttttattggtatttatttattctagagataaggtcttgctatgtttcccaggctggtcttgaactcctggcctcaagcaatcctcctgcagcagcctcccaaagtgctgggattacaggcatgagccaccacgtctggtcagacaggcatagttttacaaatatgtgggtggataaatgctgtccagtcttacttcatca

SEQ ID NO: 14877 - DNA, 420 bp, Homo sapiens
aatgaacccgcttccaccctcactacgtggattaaacgctgggtgccggcccccccctcgagagtacgtacagaattaattaatccacccttgtaccaggctacctccagaattcctggttcatgagataataacatttcctttgtttaagtcacttttagttggattttctgttatttccaaccaaaagcattcaatcgatagaagtgatgaagtaagactggacagcatttatccacccacatatttgtaaaactatgcctgtctgaccagacgtggtggctcatgcctgtaatcccagcactttgggaggctgctgcaggaggattgtttgaggccaggagttcaagaccagcctgggaaacatagcaagaccttatctctagaataaataaataacgataaaaattttataactat

SEQ ID NO: 14878 - DNA, 934 bp, Homo sapiens
  misc_feature 1, 2, 3: n = A,T,C or G
nnnttactggacaacagcgtggaattactctttactaagggaacatgagcagggtacccggccccccctcgagagtacttctttatttaattaacgcggggcaggtgatgtcacggtgtaataggtgcagctgccgccaccgccgcttctgcattgtctcagggacgggctgcagccatgtcctattgccggcaggaaggaaggatcgaatcatatttgtaaccaaagaagatcatgaaactccaagcagtgcagaattggtggctgatgaccccaacgatccatacgaggagcatggattgatactgccaaatggaaacattaactggaactgcccatgccttgggggaatggccagcggtccctgtggagaacagtttaagtcagccttttcctgcttccactatagcacggaggagatcaaggggtcagactgtgtagaccagttccgggccatgcaggaatgcatgcagaaatacccaaacctctatccccaagaggatgaggatgaggaagaggaaagagagaagaagccagcataacaagcagaagaaacaagctccattgaggccactgcaaccaaagaagaagagggatcaagttaatgaaggccacaaggcactgggcaccagtccttttggagtggaccttttgcaaaaggctttgtcatcaccttccaagaaagtttccttctgttgtcctggtgcatataatataccaaataactaattttgatgatcagaagtcttgaggtcttgacatcttggcatatacactgaaaaaaaggggggttggatgtatgtgtgtcctacccaaactgttggccgcacttttaaatctagaatgccctgaatttgccacttttaataatgggctgaatagctcagcatctaaaacccttcccaaaacgctttttgggaggagctgattattt

SEQ ID NO: 14879 - DNA, 849 bp, Homo sapiens
  misc_feature 27, 170: n = A,T,C or G
agtacttctagaattaattaacgcggngagttattatagataatgcacaccttacaatattactactgggttattaatcctgctgacagttgtggcattacacctaatggatgaggtgcccattccgaggtccaatcggtgcagtctggggctgaggtgaggaaacctgngtcctcagcgaaggtgatcccagatacacgttcaccttccactacatacactgggggcgacaggcccctggaaaagggcttgagtggatggaacgtgttgatcctgaatatggcgacacactatatgcacagaattccagggcagagtcaccactacctgagacacgtctgcagacacagcctacatggagctgagcagcctgagatctgaggacacagacgtatattaatgtgcatgacacgcagtgtgaaaacccacattctgagagtgtcagaaaccttgaagaatgatgcagctgtgctggtggcgataagatgacaggttgtatgaggcttaaacgcgtttagaaaatgggttacgtaattgaggaaaagaagcaatataaagatgtttacactctaattatttacgaaatagtcctttaagcttttaccctgtaagttacattcacagtgtgggaaagggatgaatcagataagcttgtgcaaacacttccattgaaaccttgtggggacattacatgtaagaccgattggtaaatatttggagcgggaatggttatgacgtgtaagacaaacatatttctagaattggccacatttttccaaatggttggcccttttttactaacttatttaaacactttagatcccccaattgtttgagaacctattcctg

SEQ ID NO: 14880 - DNA, 854 bp, Homo sapiens
agtacttctagaattaattaacgcggagtggggtggcatctgcgattcaagacagttttttacatctcttcagtgcctctttcagctatatgaattaaaaaccaggtactgtgggtgctcacctgaattctggttcttatgaaggtgcttttatggtgtaaatagtttttaaattggtgtccttgtagaggggacaatcggtagagccttctattctgccatcttgccccatctactcaccttgaaatttatattatatgttaactataaaagctttacttaaaaagaaaattctgaacatcggtcatacccatttatcaaaaatgactattattttttaaactggaagatcttactattgcaggtattttgataacaaaggttataatgggagtaccgttttattctaagtcataacatttatcattttaacagataggtaaaatatttaactctgcgtaattaccagtaagtcattttatatgctttctggacttttaagacagaattatttccactaccttaaacaatcttatagtatggtgggcataataattgcacccaccaatgatgcccacaacccctatcttctgaatttgtgaatatgttgcaattcagggcaaaagggactgggccatgtgttaaatctaacaatgttgggatgaggagactatcctggaatattcaaatggaccaaatatatcacatgaagccctaaagggattattattcctgattggggtcagagatgtgagaacagatggagaacggacggcctaaaaccttaatatgaccagtctcacggttttaacctttaaagggtgggagggggtggcccttgaaccaggacgtgg

SEQ ID NO: 14881 - DNA, 888 bp, Homo sapiens
  misc_feature 6, 9, 10: n = A,T,C or G
tttttnttnntttttttttttttttttttgaggaaggcacctacaaaacgaaagtgcctagggcttacaaaagtcatatgtagcctttacaaatattagctcagtcattttcagaaaggtttttccaattatcattttagagataggaaactgaagctcagggaggctaggaaacttatccaaagcctcttaagaggctatgttagtcagactgggctaacagctgtaacaaccccagaatttaaatggcttaacacattaggagtttatttgttattgccataacaattcagggtgtatgtttggcaggtagtctacacagtgattcagggacccaggctccttccctctggtggctttttctccctctagtgctgggagctctccatgcagatggtggatggagaaagagaacaaaaagtgggggatttttataggccaggcctggaattggcccacatcacttccacacacattccactggccagaatgcagtcacgtgatcgtagcttactgcaaggaaggttggaaaatgtaatgtaactgcatgcctgggctaaagagaggaacacggatcctggggagtactcacagtgttagattccagtccaggtcttttgcacacaatgcccgggttaaataaatttaaaaagtactcttgagggggggccccgggcccaaccttttgttcccttttgtggaggggtaatttgcgcccttggccgtaaccatagggaaaactggtttccgggggaaaatggtatcccgtcccaaattcccaccacattaccaaccggaagctaaaagtgtaaacccggggtggccctaggaggaactaactccctattattgcgtggcctaattggccgttttcagggggacaccgtt

SEQ ID NO: 14882 - DNA, 183 bp, Homo sapiens
  misc_feature 24, 25, 27: n = A,T,C or G
tttttttttttttttttttttttnntnaaaggccgttcttacgtatttttttttaaacttttatttcagtagtgtttggggaacaagtagtgtttggttgcatggaaaagttcttcagtggtgatttctgagattttggtgcacccatcacccaagggtagtcttttttatccatcaagtctg

SEQ ID NO: 14883 - DNA, 872 bp, Homo sapiens
tttttttttttttttttttttttttgctatggagtcttgccatattgcccaggctggtcttgaactcctgggctcaagcgatcctcctgcctcagtcccctaaagtgctgggattacaggcgtgagccaccacactcggcgaggttcatttttctcatgtgaaagacttgacattcatctctgcccacactttgatcatatcagaaaacaacctgtgcagccgctttctgattgctgaagccgcttcattcttcctcagcaggacccatgtctcggacataggaatccggccgctgcatcttcaccttttttcccgtactggtatctatccaggtgtcggacccgtagatcatagtgataggcacatcttttcgaatcaagtgaattcgctccagcatagggcgccgggcccagccaaaggactccatcatggctttgaatgctgtctcaccactgggattctgtgcgttgcagtggtaaatatactctgatatggtatcatcttcaaagaagtctgcaaacttgcgtttgaagtccggccggaatcgctgcaccagaccaggcccccagggcccagcttctcgaagaacaaccaatggattggaacgtcctatgacagatgccacggctttgacccaggctgggggtgcacggatctcactggggttagttggccgaggggaaaggcccattgggtccacagggtgaggggttaactttatcaagtacttgattgagttagaagggggcaggaattctcccaactgtgcccaggaggataatgcttgggtccccatggtcttccgctttattaattctataataccttcagaggggggccggtccccacctttggtccctttaggagggtt

SEQ ID NO: 14884 - DNA, 386 bp, Homo sapiens
  misc_feature 37, 49, 363, 364, 366, 367, 369: n = A,T,C or G
ttttattgcgcattaccctactaagggaacaaagctngtaccgggcccnccctcgagagtacttctagaattaattaacgcggggggcgcagtggctcacgcctgtaatcccagaactttgggaggccgaggcgggcggattacctgaggtgaggagttcgagatcagcctgggcaacacggtgaaaccccgctctactaaaaatacaaaattagccgggcgtggtcacacatgcctgtaatcccagctactcgggagcctgaggcaggagaatcgcttggacctgggaggcggaggatgcggtgagccaagatcgcgccattgcactccagcctgggcaacgagtaaatctccgtctcaccnnannanaaaaaaaaaaaaaaaaa

SEQ ID NO: 14885 - DNA, 294 bp, Homo sapiens
  misc_feature 25, 27, 28: n = A,T,C or G
ttttttttttttttttttttttttntnntttacatttaactctgatttattgtggggtaaagcatgttatagtgttccagcttcactttttttctgaatggctatccagttgtcccaagatcatttgttgaataattcattttcccccatttgaaatgacaccttttcgtatactaaagtcccaagtctcttagttataaaacagtaataaacccttgaaacaggcattttcctaaaatacattttgtttaagtaagacagttttcccccgcgttaattaattctagaagtact

SEQ ID NO: 14886 - DNA, 851 bp, Homo sapiens
ttctttctttctttttctttcttaattgacgaacaacggagtcctgtggtggtgcccatgctggaatggagagacacaatcccggcttactgcagcctccacctgcctggtgcaagtgatcaagtgatctcctgcctcagctactgagtagctgggattacaggcacctgccatcatgcccagctaacttatatattttttgacttagcagagacagggttccaccatgttggccaggctggtcttgaactactgacctcaagtgaatcacctgccccgcctcaaccttccaaagtgcttggattacaggcgtgagccactgcacccagccattcttctttttatgaaaaagaaaatgttatctttgtggtaataaacagcaaacatttggggctaattaaaacttggcagcatttaggtatgtgtgtgcatgtgtgtgtgcgcacccgtgtgttttagagcaggagtcttgctatgtggcccatggtggagtgcagaggcgtcccgcgttaattaattctaaaagacctgtgagggggggcccggtgcccaacctttggttcctttagggggggaaactgcgcccgtggcgtaattatggcaaagattgtacccgttggaaagggtattcgcccacaagtccaacaacatacaagccggaaccttaaagggaaaggctgggggccttatgagggacctaaccacatttatgggtagggctaaagcccggtttcctcggggaaaccttctgccatttatatattagatccgccacgcccgggagaggcggttgggtttggggcctttcaaatattgtaactacttagggatcgtttttagatggggcaccg

SEQ ID NO: 14887 - DNA, 864 bp, Homo sapiens
agtacttctagaattaattaaagtcagcatgatgtattaaaacaaagcataataataataaaattttaaaaaatgtaaacttttacaatcattgaaaggcaaaaataaaataaaacaaaataaaatacagtgatccttaatatctgtggtacatttattccaggacgcccctcttcaccctccagataccaaagtctatagatgctcaagtcactaatataaaatggtgtagtatttgcatataacctatgcacatcctctcatagactttatttctaattaattttattatttttaatttttgtgggtacatagtatgtatttatatgtgtatatatatacatatatatggggtacattacatgttttgatatagtgatagcttaacaggatgactatagtcaataataacttgattgtacattttaaataagagtgcaattggattgtttgtaactcctgtatactttaaatcatctccagtttactaatacctaatacaatgtaaatgcaaggtaaataattgttatactgtattgtttaaaggataatgacaagaaattaagtttgtacatgttcacttgagaagcaaccattcattcttctttttaaaaaaaaatttttggactagtggatacacaagctgacttgattctcaaaatatgcaataaaaattccttaaagacagaataaactgaatgggacaaattagcttcagaccccgagggacaccttaaagtaaccttgtttaaaatgtaagaattttggtataattcccttttattttgttttaattttaaaatcccaaaatttaaaaatttaaaaggtttccaataaaattttaacttaaaatttccccaattt

SEQ ID NO: 14888 - DNA, 669 bp, Homo sapiens
  misc_feature 3, 4: n = A,T,C or G
ttnntttttttttttttttttttttttttgaggaaggcacctacaaaacgaaagtgcctagggcttacaaaagtcatatgtagcctttacaaatattagctcagtcattttcagaaaggtttttccaattatcattttagagatgagggaaactgaagctcagggaggctaggaaacttatccaaagcctcttaagaggctatgttagtcagactgggctaacagctgtaacaaccccagaatttaaatggcttaacacattaggagtttatttgttattgccataacaattcagggtgtatgtttggcaggtagtctacacagtgattcagggacccaggctccttccctctggtggctttttctccctctagtgctgggagctctccatgcaaatggtggatggagaaagagaacaaaaagtgggggatttttataggccaggcctggaattggcccacatcacttccacacacattccactggccagaatgcaatcacgtgatcgtagcttactgcaagggagggttggaaaatgtaatgtaactgcatgcctgggctaaagagaagaaacacggatcccggggaggtactcacagtgtttagattccaagccaggttttctgcacacaatggcccgggttaattaaattctagaagtactctcga

SEQ ID NO: 14889 - DNA, 759 bp, Homo sapiens
tttttttttttttttttttttttgggttttgaggcagagttttgctctgtcgcccaggctggagtgcagcggtatgattatggctcactgcagcctcgacctcctggccccaggcgatcctcccacctcagtcccctaagtagctgggaccataggtatgtgccaccacacccggctaatttcattttttgtagagatgaggtcttactatgttgactaggctggtctcgaactcctgggctcaagcaggccttgtgcctcggcctccccaactgttgggattatgggcgtgagccactgtgcccggtctgctcgctgaatttctaatgagcttgaattacaggaagtaaaaataaattttccacttacagaccactaaccagtttagagcaaatctgtaaggagtgtatagattatgccacacgagcgcatgaagctaccacatgtttaaagacaagtataccttttgtgaacagcagtgttcagcttgggaggataaacctgaacttgaaaaaaccagacattagggggggctgggggccttttattttaaaaactaatttacaccttctctttccccccaaaacttatccaccaaggcaatggcttattgtacaacttccttacttcggactacccagggagaacttgtggacgggggttaataaggggggggaattacacttcttttctggccctttcttgggggcccaacagaagggaaagaccacaattgcaatggcactgttttttataaag

SEQ ID NO: 14890 - DNA, 337 bp, Homo sapiens
  misc_feature 2: n = A,T,C or G
tntttttttattttttttttttttttttaagaaggagtcttactccgtcacccaggctggagtgtggtggtgtgatctcagctcacagcaacctgacctcaggtgattcacccgcctctgtctcccaaagtgctgggatacaggcgtgagccactgcgcccggcgtctttgaattttttaaactgaagtttaattgcctttgagtttgatcattcactatttggcatttgtatttcttttgttaattatctgctcaagctctaatttcataatggaaatttaatggattaacatataacacccactatcacccgccttaattaattctagaagtact

SEQ ID NO: 14891 - DNA, 488 bp, Homo sapiens
ttttttttttttttttttttttttttttgaccagagaggccccaaactagcagcctgtcctcctcagtagccccagcatcccttcatcattgtgttgcccttctatgggcctagtttaggtctgagaggcatagttttaaaattttaattgccatttatttattctagacataaggtcttgctatgtttcccaggctggacttgaactcctggcctaaagcaatcctactgcaggagcctcccaaagtgctgggattacaggcatgagccaccacgtgtggtcagacaggcatagttttacaaatatgtgggtggataaatgctgtccagtcttacttcatcacttctatcaattgaatgctttcggctggaaataacaaaaattccagctaaaagtgacttacacaaaggaaatgttattatctcatgtaccatgaattctggaggtatactggttcaagggtggattaattaattctagaagtact

SEQ ID NO: 14892 - DNA, 755 bp, Homo sapiens
ttttttttttttttttttttttttttggcgatgcaggctcttttttggttccatatgaactttaaagtagttttttccaattctgtgaagaaagtcattggtagcttgatggggatggcattgaatctataaataccttgggcaatatggccattttcacgatattgattcttcctacccatgagcattgaatgttattccatttgttcgtatcctcttttatttcattgagcagtagtttgtagttctccttgaagaggtccttcacgtcccttgtaagttggattcctaggtattttattctctttgaagcaattgtgaatgggagttcactcatgatttggctctctggttggctgttattggtgaataaaaatgcttgtgatttttgaacattgattttgtatcctgagactttgctgaagttgcctatcaatttaagggagattttgggctgagatgatggggttttttagatataaaaatatgttatctgcaaacagaaacaatttggacttctggtttcctaattgaaagctctttaatttcttcttctgccccgatggcctggccaaaaactttaacactttgtttgaattggaatggttagagaaggccttcccggttttggccccttttaaaagggaaagccttccagttttggccattccacccaatattgctgtgggtttgccataaaaacctgtattattttggggaaacgtcttctcacctctaattttttggggttttag

SEQ ID NO: 14893 - DNA, 941 bp, Homo sapiens
  misc_feature 88: n = A,T,C or G
tggaacatgagccccggacccgccctcgagagtacttctagaattaattaacgcgggggcagaaaaggtgtcttctgactcggcttgntgtgttgctgcctgattgccagagacggtcctgctgctgccgcagtcctgccagctgtccgacgatgtctcccacctaagtcaagccgccggccgcccctgcacaacaacaacaacaactgcgaggaaaatgaccagtctttgcccccgccggcccgccttaacagttcctgggtggagctacccatgaacagcagcaatggcaatgataatggcaatggaaaaaatggggggctggaacacgtaccatcctcatcctccatccacaatggaaacattggagaagattctttttggatgcacaacaatgaattcacgactagaggagtttcccagaggcaggttcttacttgtgacaagccctttcgccaacaagaagaatgggcaagatcattgttctgatgttggaaaatgcacatccatgcaagggatccataaacttcttcatgtcaagaagtaagaatgtttgctagtaagtgagaagaaaggatagtctgcggcctctaaaaatataaacgtgcgtgacctgaggtattaagacctgggtcccagtagtacccccgataaccatgtccaacccaaggaagttttcacctttgagtccacctcttaaacctttcgtgggtgcttctaatacatgagggaaaaggtggtagcctatttactattgggggggtattttattctcccatcaaattctgtatggtggttaattaccactacttttcccattctaatgttttggccttgtgggctgcgcttctttattgggaagataatctggcacacccctttgcgagcactctcttgggggaaagaattaactcctggatatgctgaaccttgtaatgtct

SEQ ID NO: 14894 - DNA, 875 bp, Homo sapiens
  misc_feature 1, 2, 8, 31: n = A,T,C or G
nntttganccagtcgtcaccactctcactanaggaatgaaagctgggtccggggccgcccctcgagattatagtacttctagaattaatcaacgcggggggcttcgtgcgacctacctggagctggccagtgcggttatggaacaacattcgggcatcgagatcgagtcgcgcctcgggggcacaggtgaggtcgcataacacctgctgggtgcctttgagatagagataaatggacagctggtgttctccaagctggagaatgggggctttccctatgagaaagatctcattgaggccattcgaagagccagtaatggagaaaccctagaaaagatcaccaacagccgccctccctgcggtcatcctgtgactgcacaggactctgggttcctgctctgttctggggtccaaaccttggtctccctttggtcctgctgggagctccccctgcctctttcccctacttagcttcttagcaaagagaccctggcctccactttgccctttgggtacaaagaaagaatagaagattccgcggccttgggggcaggagagagacactctgcatgaacactttgtcagcatccttataccccattgccagggttagtgcccacgacagctcagtccactctttagctcggtaatacctgtctgatgccccaagatttatttaatttcccctaaccagggcatgtagctattgacagtaaggggcgcttcatctcccacaaaaaacacagttgtttacaaagaaagcggccgcaccgcggtggggcctccatacgcccatattgaatcttattacccgccctactggccgggttttacaccttggactgaaaaaacctggtttccccaataaatgcttgt

SEQ ID NO: 14895 - DNA, 837 bp, Homo sapiens
  misc_feature 169, 170, 189, 190, 223, 224, 480: n = A,T,C or G
agtacttctagaattaattaaggcgggcagtgttcatgtttcaaaagctaacactggcatgactgactcaatgttggacccagacaaattaaaaaatggtagataaaaatacatataatacgccgggcgccggtggctcaagtctgtaatcccagcacttttgagagtnnccgaggcaggtggatcacnnaagctcaggagttcaaagaaccagcctagccannataatggtaaaaccccgtctctgctaaaaatacaaaaatcagctgggcatgttggtaggcacctgtactcccagctactcgggaggctgaggcaggagaattgcttaaagctgggaggtagaggttgcagtgagccaagattgagccactgccctccagcctgggctacagagcaagactccgtctcaaaacaacaacaacaaaaaacataaaataactcaaacaattaaatataaccctaagggtgaatgaatanttgtcaacaataacaaagattatattacttagaacagagataggagttcaacaagaacccaagagtcttactttttaatcacaaaaatgaattctttccttttgcaaggaattcataagtagatagccttcttaaaaaaagattctggtggggcgaggtggttaacgcttgtaatctcagcactttggaagctaaagcgggaggaacaactgtggcaagaatttgagacccgcctggccacatggtgaaaccttactttacttaaaatccaaaaattaaccggcctggtggtgggtcctcgtaatacagattcctaggaggttggcctgggaaattctttaacccgtgaggcaattt

SEQ ID NO: 14896 - DNA, 390 bp, Homo sapiens
agtacttctagaattaattaacggcgggggataaagttaaggtgtagagtatttattaggttatttggcttgtttgtttgtttatgcaaatcatgttaggttgttatcagcttaaaataatgggttataagatagtatgttctggcctcatggtaacctcaaaccaaaatacatacaatggatacacgaaagataaaaagcaagaaactaaatcatgtcttcagagaaaatcatcttcactaaaaggaagacagaaaggaaagaaataaggaagagaagatcacaaaacaactggaaaagaaataacaaaacggcaggagtaaatccttatttatgaacaataatatggaatgtaaatcaactaaatctccaatcaaaacacagactggt

SEQ ID NO: 14897 - DNA, 435 bp, Homo sapiens
agtacttctagaattaattaacgcgggtatcaaagtactcaaactatatatcatatactgtacataaaatatcaaagtacccaaactgtgtattattatatactgtatataaaatatcaaagtacctgaaatatatattgtatactgtacataaaatatcaaagtaccccaaaatatatactatatactgtacataaaatatgaaggtacatcaaatatatattatatcctgtacataaaatatcaaagtacacctaatatatattgtgtactgtacataatatattaaatcgcccaaatatatattgtatactgtatataaaatatgaaggtacttcaaatatatattatatgctgcacataaaatatcaaagtaccaaaaatatgtattatatactgtacataaaatatgaaagtacccaaccatttataata

SEQ ID NO: 14898 - DNA, 199 bp, Homo sapiens
agtacttctagaattaattaacgcgggcgtggtggcgggcacctgtagtcccagcagctcgggagggtgacgcagaagaatggcttgaacccgggagactgagcttgcattgagccgagatcgtgccactgcacctcagcctgggtgacacagtaagactctgtctgcaagataaatttcaaaccatgtctgcgcacgt

SEQ ID NO: 14899 - DNA, 152 bp, Homo sapiens
agtacttctagaattaattaaggcgggggttggaggtggggactctggaaaagcagcccccatttcctcgggtaccaataaataaaacatgcaggctgaaaaaaaaaaaaaaaaaaaaaacaaaaaaaaaaaaaaaaaaaaaaaaaaaaagg

SEQ ID NO: 14900 - DNA, 411 bp, Homo sapiens
tttttttttttttttttttttttttttttgaggaaggcacctacaaaacgaaagtgcctagggcttacaaaagtcatatgtagcctttacaaatattagctcagtcattttcagaaaggtttttccaattatcattttagagatgaggaaactgaagctcagggaggctaggaaacttatccaaagcctcttaagaggctatgttagtcagactgggctaacagctgtaacaaccccagaatttaaatggcttaacacattaggagtttatttgttattgccataacaattcagggtgtatgtttggcaggtagtctacacagtgattcagggacccaggctccttccctttggtggctttttctccctctagtgctgggagctctccatgcaaatgggggatggagaaag

SEQ ID NO: 14901 - DNA, 293 bp, Homo sapiens
tttttttttttttttttttttttttgaggcacattaaactctgatttattgggggggaaagcatgttatagtgttccagcttcactttttttctgaatggctatccagctggcccaagatcatttgtagaataattcattttcccccatttgaaatggcaccttttcgtatactaaagtcccaagttttttagttataaaacagtattaaacccttgaaacaggccttttcctaaaatacattttgtttaagtaagacagttttcccccgggttaattaattctagaagtact

SEQ ID NO: 14902 - DNA, 339 bp, Homo sapiens
agtacttctagaattaattaaggcgggtgatagtgggtgtgatatgttaatccattaaatttccattatgaaatgagagcttgagcagataatgaacagaagaaatacaaatgacaaatagtgaatgatcaaactcaaaggcaatcaaacttcagtttaaaaaatttaaaaaacccggggcgcaatggctcacgcctgtactcccagctctttgggagacagaggcgggtgaatcacctgaggtcaggttgctgagagctgagatcacaccaccacactccagcctgggtgacggagtaagactccatctacggaaggagtaaatccttatttatgaac

SEQ ID NO: 14903 - DNA, 395 bp, Homo sapiens
tttttttttttttttttttttttttttttgaggaaggcacctacaaaacgaaagtgcctagggcttacaaaagtcatatgtagcctttacaaatattagctcagtcattttcagaaaggtttttccaattatcattttaaagatgaggaaacctgaacctcagggaggctaggaaacttatccaaagcctcttaagaggctatgttagtcagactgggctaacagctgtaacaaccccagaatttaaatggcttaacacattaggagtttatttgttattgccataacaattcagggtgtatgtttggcaggtagtctacacagtgattcagggacccaggctccttccctctggtggctttttctccctctagtgctgggagctctccatgcag

SEQ ID NO: 14904 - DNA, 395 bp, Homo sapiens
tttttttttttttttttttttttttttttattgggcatagtccttccttcatctcactccaactcttctgtcctggctccccgctcggctccaccgccgcgggcctcccttcacacatagcacaggtagaggtacgtcttctctatccttccaatcgggcgggaatctcctcgggcttgtggcccttcatgtgcttctgcatggaggaaaggctggggcaatactctgtgcaaatggtgcactggtagggcgaggcgccgttgtgcgttctcaggtgcttgatcatggccgagtagtcccgggagcgctggtggcagagcttacactcaaagggcttctcacctgtgtgcaccctatagtgcgtctccagctgatgcttgaggctgaacttcttg

SEQ ID NO: 14905 - DNA, 402 bp, Homo sapiens
tttttttttttttttttttttttttgctatggagtcttgccatattgcccaggctggtcttgaactcctgggctcaagcgatcctcctgcctcagtcccctaaagtgctgggattacaggcgtgagccaccacactcggccgaggttcattttttctcatgtgaaagacttgacattcatctctgcccacactttgatcatatcagaaaacaacctgtgcagccgctttctgattgctgaagccgcttcattcttcctcagcaggacccatgtctcggacataggaatccggccgctgcatcttcaccttttttcccgtactggtatctatccaggtgtcggacccgtaaatcatagtgataggcacattttttcgaataaagggaatttccttcaacatag

SEQ ID NO: 14906 - DNA, 386 bp, Homo sapiens
agtacttctagaattaattaaggcggggggatggtaaaatgtcacttgcgagtaacaggatccataggcagaacctgtggagcaagaaagtttgctaataaaattttgtttaccctaacataggttcttcatggagagcagtacttagagttatataaaccacttcccagagcaggaaaattaaaatgtgaagcagttgttgctgatgtcctagataaaggatccggtgtagtgattattatggatgtctattcttattctgagaaggaacttatatgccacaatcagttctctctctttcttgttggctctggaggctttggtggaaaacggacatcagacaaagtcaaggtaggctgtagccatacctaatagacctcctgatg

SEQ ID NO: 14907 - DNA, 392 bp, Homo sapiens
agtacttctagaattaattaaagagataaaaaccaacattaaccagagttgggaagacgttgattccaaccttcataggtgactctgaggggtgcaagacttcagaggaaacagtaactgtcgatgtgatggaaaaaagagaactagaattagaagcggagcctgaatatgtgacagaattgtgtcaatctcgtgaaaaaacttgaacagatgagaggctgctttgtctagataagccaagaacgtggtttcctgaaatgaaatctactcctgaagatgctgtgaacattggtgcaaagacaacagacttagaatattacatcaacttagttgatcaagcagatgctaagtttgagaggattaagtccaattcttagagaagtaccactatg

SEQ ID NO: 14908 - DNA, 342 bp, Homo sapiens
ttttttttttttttttttttttttttttggaggaaggcacctacaaaacgaaagtgcctagggcttacaaaagtcatatgtagcctttacaaatattagctcagtcattttcagaaaggtttttccaattatcattttagagatgaggaaactgaagctcagggaggctaggaaacttatccaaagcctcttaagaggctatgttagtcagactgggctaacagctgtaacaaccccagaatttaaatggcttaacacattaggagtttatttgttattgccataacaattcagggtgtatgtttggcaggtagtctacacagtgattcagggacccaggct

SEQ ID NO: 14909 - DNA, 391 bp, Homo sapiens
agtacttctagaattaattaaggcgggcaggggcttgggaagccggtagtgctcattggtcaggttggagatggaatcacagggggcggaagtgagtttttcttgctgtctgctgttcccgagtgcgatggcagaacttgtttgggccagattaccggtttgggtggtgtcagctgatccaccaggtgcagggtctgcaacatatctcaagcactgatgttaggttttacaatagtgatgtgatcccaggagcaatttggggaggttcagacttggaaccagaggctgcatgacccctaaaccataatgtctaatcttacagctaatttgttagtcctgcaaagacagactggtccccaggcaagaaggggggtctttttgggaaagggcc

SEQ ID NO: 14910 - DNA, 351 bp, Homo sapiens
tttttttttttttttttttttttttttggaccagagaggccccaaactagcagcctgtcctcctcagtagccccagcatcccttcatcattttgttgcccttctatgggcctagtttaggtctgagaggcatagttttaaaatttttattgttatttatttattctagagataaggtcttgctatgtttcccaggctggtcttgaactcctggcctcaagcaatcctcctgcagcagcctcccaaagtgctgggattacaggcatgagccaccacgtctggtcagacaggcatagttttacaaatatgtgggtggataaatgctgtccagtcttacttcatcacttctatc

SEQ ID NO: 14911 - DNA, 391 bp, Homo sapiens
agtacttctagaattaattaacgcgggacgcgggcaaagaaggtaggccgggctgtctggtggaagcggaggaagtcctgctgcttgaagtcattggaggagccagccttctgtccacctacctgcagagcatgcggggacctcctggaagatgaccgactggccctgggacttcttcatcaacctgagtgcggccgactaccccatcaggacaaatgaccagttggtggcgtttctttcccgataccgagatatgaatttcttggagttacacggccgggacaatgcaaggttcatttcgaagcaaggcctggatcggatctttctggaatgcaacccttaaatgtggtgcctgggagatcggcggatcccacagggcattgacgtggat

SEQ ID NO: 14912 - DNA, 465 bp, Homo sapiens
gcgcattaaccccttactaaagggatcaaaggaatcggataccgggctcccgggccccccctctagagtacttctagaattaattaaggcgggggttctttctagggtgatggaaattcgaaaatggaatctgaggatagctgcctatatccgtaaatatgtgaatatgctgaaaaaccattgactcgtgcactttaaatgactggatttgtatggtacataaaactgtatctcgataacaccttctcaaaaagaataaatgcagtggctcacacctgtaatcccagcactttgggaagcaaaggagggccaatcacctgagatcaggagttcgagaccagcctgaccaacatggtgaaaccccatctcgactaaaaatacaaaagtagccgggccgtgggtggcacatgccctgtaatcccagctagctggggaggccgaggcaaggaaattgcttgaactcgg

SEQ ID NO: 14913 - DNA, 261 bp, Homo sapiens
ttttttttttttttttttttttttttttttttaaaaatatggcttgtttattctttttctccccttttttctttatttcttaaatttttttctcattttcccttttaatttctttattgggggtttatttattttgaaacagagtcttactctgtttccccagcctggagtgcagtggcgtgatctcagctcattgcagccttgacctttccaggctcagttgatcctcccacccccgccttaattaattctagaagtact

SEQ ID NO: 14914 - DNA, 401 bp, Homo sapiens
ttttttttttttttttttttttttttccgggttcggacccgttccggatgctttaggctgccggatgtctgatctgcgaataactgaggcgtttctgtacatggattatctgtgttttaaagcactttgctgcaagggaccaccacctgcccgaacaaaaatatgccctggtttgcataggcctaacaggttctggcaaaaccagtctgttgtccaaactctgcagggaaagccccgataacgtcgtgtcgaccacaggttttagtattaaagcagtgccattccacaatgccctcttgaatgtaaaagaacttggaggggctgataacatccggaaatactggagccgctactaccaaggatcttaggggggaatatttgaattaaacagggcctcttca

SEQ ID NO: 14915 - DNA, 137 bp, Homo sapiens
ttttttttttttttttttttttttttttaaatctgtcttcttggcctgtttttaagaaaactccttttcccagccaaaaacccaaaggggatttgcttaaaagatttctcaaattttggctttccaaaattcccaat

SEQ ID NO: 14916 - DNA, 390 bp, Homo sapiens
agtacttctagaattaattaacgcgggacgcgggcaaagaaggtaggccgggctgtctgctggaagcggtggaagtcctgcggcttgaagtcattggaggagccagcctcctgtccacctacctgcagagcatgcgggacctcctggagatgaccgactggccctgggacttcttcatcaacctgagtgcggccgactaccccatcaggacaaatgaccagttggtggcgtttttctcccgataccgagatatgaatttcttgaagtcacacggtcgggacaatgcaaggttcattcggaagcagggcctggatcggctcttcctggagtgcgacgctcacatgtggcgcctgggagatctgaggatcccagaaggcatttgcctggatg

SEQ ID NO: 14917 - DNA, 931 bp, Homo sapiens
  misc_feature 517, 561, 737: n = A,T,C or G
tgttttttttttttttttttttttttgaagatggaatctcactctgtcacccaggctggagtgcagtggcatgatctcagctcactggaagctctgcctcccaggttcacaccattctcctgcctcagcctctaagcagctgggactacggcccagccgccatgcctggctaattttttttggtattttttagtaaagatggggtttcaccgtgttagccaggatggtctcgatctcctgacctcgtgatctgcccacttcagcctcccaaagtgctgggattacaggcatgagccaccatgcccggccgatttcacctttcaatggcaattactataagacaggaaagttatttatttttatatatttacctaattttaagttaccttatacaaccctcattaatagtctgttagaactagaatttaaactctatgtgaatatggaccttatttaaacaatgtatccctagcacctagacaatgcctaacctgtcacattaacttaatatatattntatttatattttttggttatttattttttttgagacagactctngctctgtcacccaggctggagtgtagtggtgcgatcctggctcacttgaatctctgcctcccaggttcaagcaattctctgtcttagcttccccaggtggtggggatacagacacccgccaccacgcccaactaaattttggattttagtagagatgggtttttgcatgtggcccngctgtcttgaacctctgacttgtatctggccgccttgcctctaaaggctgggaattcggtttgagccatgacccagccattaatttatttaatgaaggaatatggtaattagtggatcggtgcttttccggggacattttccaatttcacatttggatatgaacctgagatgtctaaaataggttgaagccctg

SEQ ID NO: 14918 - DNA, 290 bp, Homo sapiens
  misc_feature 26, 27, 157: n = A,T,C or G
gtttttgttttttttttttttttttnnaacatttaactctgatttattgtggggtaaagcatgttatagtgttccagcttcacttgttttctgaatggctatccagttgtcccaagatcatttgttgaataattcattttccccatttgaatgacanccttttcgtatactaaagtcccaagtctcttagttataaaacagtaataaacccttgaaacaggcattttcctaaaatacattttgtttaagtaagacagttttcccccgcgttaattaattctagaagtact

SEQ ID NO: 14919 - DNA, 655 bp, Homo sapiens
tttttttttttttttttttttttttttttgaggaaggcacctacaaaacgaaagtgcctagggcttacaaaagtcatatgtagcctttacaaatattagctcagtcattttcagaaaggtttttccaattatcattttagagataggaaactgaagctcagggaggctaggaaacttatccaaagcctcttaagaggctatgttagtcagactgggctaacagctgtaacaaccccagaatttaaatggcttaacacattaggagtttatttgttattgccataacaattcagggtgtatgtttggcaggtagtctacacagtgattcagggacccaggctccttccctctggtggctttttctccctctagtgctgggagctctccatgcagatggtggatggagaaagagaacaaaaagtgggggatttttataggccaggcctggaattggcccacatcacttccacacacattccactggccagaatgcagtcacgtgatcgtagctaactgcaaggaaggttggaaaatgtaatgtaactgcatgcctgggctaaagagaggaacacggatcctggggagtactcacagtgttagattccagtcaggtcttctgcacacaatgcccgcgttaattaatcctagaagtctt

SEQ ID NO: 14920 - DNA, 603 bp, Homo sapiens
cgcttttttttttttttttttttttttttttgaagaatcaacagactctatatttgatcacaaagcaaaagtttaagtgtattacttaaaattttaagacaaaatctggaataattataactaacacaaattttgaggtagaggaagagaatctaagataggtgagataaaattttcatctttgataatgagtagacaaaaacactacctttaacaagtgaagattttaaaaaatttagagaagaggaaatcataagtggtttttaaaatttattatacatatcgaggtaaagataatccaacagaaaatgagatttgaacagacacttcacaggagatagacaaatgtctcaacctcattagtcaccagacaaatgcaaattaaactcaaaatgcaatacctgtacacacctcacagaatggataaaacttgaaagactgacaaaccaaaccaacacaaagctggtctgaatgtggagcaaggaagacgctcgtactctcctggtgagcaaggtggagatggtaaaagagctggtgtaaccactttggaaaactgttagtatctattaaagtcaacccgcgttaattaattctagaagtact

SEQ ID NO: 14921 - DNA, 468 bp, Homo sapiens
  misc_feature 134, 253, 254, 255, 256, 257, 278, 279, 291, 292, 298, 299,307, 308, 311, 312, 315, 316, 318, 326, 329, 333, 334, 339,342, 348, 359, 360, 361, 364, 398, 401, 406, 414, 415, 419,437, 438, 441, 444, 446, 449, 453: n = A,T,C or G
acttataacacaaattccaaaaataatatacttattatatccccattaacccatcctctaaaagccataaagaactccccccctagagacgcccccttttttctcactatttacacttcttaatattaatctanccagtaacccctcactccacaattaaattcataatatccctcctatttcctctattctaattccctctcccaattacaaaaaaaaccacaacctttttttctcctttaattaaataatnnnnnccagaagaacgcccctcgttnnaataaaaaccgnnaacttnnccaactcnntannaanngnggcccggnaantatnnggggnaantcttcnccccaccccgnnncgnggttgggggccccggggccccccccgcccttttnttnttttntttttttnntttntttttttttttttttttnnttnttntnttntttnttttttttttggggg

SEQ ID NO: 14922 - DNA, 609 bp, Homo sapiens
  misc_feature 609: n = A,T,C or G
tttttttttttttttttttttttttttttgtagagggacatgatttaaactatggcaggtatcagcccacctcccaattcactgtggattcatgatccacagaaaaatagaaaacctggaccccgcagtccaagcaaagccacacagacagggcacataaaggtttggtgactcaaaaaaaagaagcaatgaagtgcattatccacagtcatttaagcagactccacttacaggcacacacacatacacacacacacaaaaccacacaatgtctcacacacacacacacagacatccaacatttacaacactcccacagaaacacacagcgtgggaactcctaaggctgcctggtactgcaggacatttgagtgtgggagagagcccctctccccgccccgccctggggaacacaggcgtgatgtacctataaatcacagtggggcaagtttcaaaatgactcacaactacaatgcctaggcaggcttgaagaatcctacagatttctttgcatcctttgggatttcagaatttatttctggaattgtgcttgatgtttctacagactctcacatctgccctctcttgggatcatgggactgtcctgtn

SEQ ID NO: 14923 - DNA, 603 bp, Homo sapiens
tttttttttttttttttgagatggagtcttggtctgtcgcccaggctggagtgcaatggtgcagtctcagctcactgaaacctctgcctcccgggttcaagtgattctcctgcctcagcctaccgagtagctgggattacaggggcctaccaccatgcctggctaatgtttgtatttttagtagagatggggcttcaccatgttggccatgctggtctcgaagtgctgacctcgtgatctgtccgcctcggcctcccaaagtgctgggattataggcgtgagccactgctcccggccacaatctacaactggatttgtgctttgcaatttacgctttcgaacatgcaggaatgtagtttgggcatttgtctggaacttcggattctcgggactccagggtggccaaggcgcggaggtgactcaatgacattgaccagcctggatgcacgtgggttgctgagccgatgctgggaaggtacggggtttgcccggtgcaggccgccggaactcacgcacgcccctgtctttttcactccctggggtcggctctggccggtggccttcagctcagctagcgaccggacacgcaacccgtcaactagc

SEQ ID NO: 14924 - DNA, 609 bp, Homo sapiens
tttttttttttttttttttttttttttttggagtctcgctcttttgcccaggctggagagtgcaatggtgccatctcagctcactacatccctgattcaagtgattctcctgcctaagcctcctgagtagctgggattacaggcacttgccatcatgcctggctaatttttgtatttttgtagagacggggtttcaccatgttggccagtctggtcttgaactcttgacctcaggcgatccatccacctcggcttcccaaagtgctggaattataggcgtgagccaccgcacccagccttctgtgtgtattttcttatgatgtagaatgagtgataaagcaccataggagtcacctagtgttgccttttccatttttgagttgataaatggaggtctcagtctctgttaattagtggtacatctgggaaaagtcaaatgtgttgagctcgaaggtgttggtttgtttgtttttcccaccaggtctcttaactgtgcttgctgctggtgacctaccagttgttgtgtgacctaatttgcagcatgcccatggtaccttacccattagactttttagggggtgataataattattattaatggtggtaagt

SEQ ID NO: 14925 - DNA, 600 bp, Homo sapiens
ttttcttttctttctttctttttttttttttagacggagtctccctctgtcacccagactggagtgcaatggtgtgatcttggctcactgcaacctccgcctcccgagttcaagtgattctcctgtctcagcctcctgagtagctgggattacaggcgcctgccatcatgtgccggctaattttggtatttttagtagagatgtggtttcaccatatcggccaggttggtctcaaactcctgacctcaggtgatcagcccgcctctgcatcccaaactgctgggattacaggcgtgaggccaccacacccagcccggattacccttaagtaggaggtacattctcttccattgaaaaagagagagagcagagaatagatgcacaggcaagcagatctgtatccattttgttgtgggaagttgcttcctctctgatgttctctctctctctctctctctggctctctctctctctggttttctctctcgtgcttcaagtagggaatgattagggagtgatactgtttgctaagtagtaagaaaataaagaaggggaacacagaaagagtggttcatagaaaaatgcttggcaatgtctaga

SEQ ID NO: 14926 - DNA, 355 bp, Homo sapiens
ttttttttttttttttttttttttacttgaattgttgttatagtgcttccgttatttatttttattttttttattatactttaagttttagggtacatgtgcacaacgtgcaggtttgctacatatgtatacatgtgccatgttggtgtgctgcactcattaactcgtcatttatattaggtatatatacgtgttcattgtacccttatcgactttgcagcatgcttatccatctaactattcatctttatttgccttcgttttttgagttcccttattcatcctaaaacaaaatataatgcctgactcatagtcagacttcacagtatttttaaatgaattacattgcattggg

SEQ ID NO: 14927 - DNA, 356 bp, Homo sapiens
tttttttttttttttttttttttgggaggctcaacctataatacccaaaggctctatttcagtagaatttattggtttgctgattatagcagtgacatagttgcattctagagaccttagaaaatgcagaaaatttcaagaaaaacatttaaattgggctcatagtgaaactgataggtgaccactcttaatattttgtggcataagcaatccagtcttatatctttctcaaagttacacataaactttctgaaaggccattaaatactttttcatatcctgatttattgtgaccacatattatcctattatatgggtaatgccagtatgttacccaacccatttttatatgtttg

SEQ ID NO: 14928 - DNA, 581 bp, Homo sapiens
  misc_feature 505, 510: n = A,T,C or G
ttttttttttttttttttttttttacttgaattgttgttatagtgcttccgttatttatttttattttttttattatactttaagttttagggtacatgtgcacaacgtgcaggtttgctacatatgtatacatgtgccatgttggtgtgctgcactcattaactcgtcatttatattaggtatatatacgtgttcattgtacccttatcgactttgcagcatgcttatccatctaactattcatctttatttgccttcgttttttgagttcccttattcatcctaaaacaaaatataatgcctgactcatagtcagacttcacagtatttttaaatgaattacattgcattggggaaatataaatagtaatgtccttttatagaggaagtctaaaagaaattcttgggtgaattgataatcaaacatttttaagaaggtatatttgctagcaaagaaagaaaaaatatgacagcttatttatatagaaaacctatgtattctgngattnttctttgtttcaagtctgtatatgaatatcatgctatcccttcccccgccttaattaattctagaagtact

SEQ ID NO: 14929 - DNA, 609 bp, Homo sapiens
tttttttttttttttttttttttttttttgaggaaggcacctacaaaacgaaagtgcctagggcttacaaaagtcatatgtagcctttacaaatattagctcagtcattttcagaaaggtttttccaattatcattttagagatgaggaaactgaagctcagggaggctaggaaacttatccaaagcctcttaagaggctatgttagtcagactgggctaacagctgtaacaaccccagaatttaaatggcttaacacattaggagtttatttgttattgccataacaattcagggtgtatgtttggcaggtagtctacacagtgattcagggacccaggctccttccctctggtggctttttctccctctagtgctgggagctctccatgcagatggtggatggagaaagagaacaaaaagtgggggatttttataggccaggcctggaattggcccacatcacttccacacacattccactggccagaatgcagtcacgtgatcgtagctaactgcaaggaaggttggaaaatgtaatgtaactgcatgcctgggctaaagagaggaacacggatcctggggagtactcacagtgttagattccagt

SEQ ID NO: 14930 - DNA, 294 bp, Homo sapiens
ttttttttttttttttttttttttttttttaacatttaactctgatttattggggggtaaagcatgttatagtgttccagcttcactttttttctgaatggctatccagttgtcccaagatcatttgttgaataattcattttcccccatttgaaatgacaccttttcgtatactaaagtcccaagtctcttagttataaaacagtaataaacccttgaaacaggcattttcctaaaatacattttgtttaagtaagacagttttcccccgcgttaattaattctagaagtact

SEQ ID NO: 14931 - DNA, 615 bp, Homo sapiens
ttttttttttttttttttttttttttttgagacagggtctcactctgtcacccaggctggagtgcagtggcgcaatctcagctcactgcagcctctgcctcccaggttcaagcggttctcctgcctcagtctcccgagtagctgggattacaccaccacacctggctaatttttgtatttttggtatagacgggttttcgccatgttggccaggctggtgtcaactcctgatctcaagtgatctgccagcctcggcctcccaaagtgctattacaggcgtgagccaccacgcctggcttaggctgcttaaatattctttcttaggtatccttggttttggaaaaaaaaagaataacagaaaactaaaaattcccagtggcagtctctgtatcactggaatttaactttttgtttgtttgttttttgagatggagtctcgctctgttgcctaggatggcgtgcagtggcgtgatctcggatcactgcaagctccgcctcccgggttcacgccattcttctgcctcagcctcccgagtaactgggactacaggcgcccgccaccacgcccggccaactttttgtatttttatagagacggggtttcaccatggaagc

SEQ ID NO: 14932 - DNA, 610 bp, Homo sapiens
tttttttttttttttttttttttgggatgctcaacctataatacccaaaggctctatttcagtagaatttattggtttgctgattatagcagtgacatagttgcattctagagaccttagaaaatgcagaaaatttcaagaaaaacatttaaattgtgctcatagtgaaactgagaggtgaccactcttaatattttgtggcataagcattccagtcttttatctttctcaaagtttcacataaactttctcaaaggccattaaatacttttccatagcctgattttttgtgaccacatagtatcctattatattgataataccataatttacctaacccatttttatatatttggattttttccaattcatcattattatgaataatggtgtatctcagtggttattactttgcactgcatttcttatgaaagtattgagtaaaaggaagtaaagccctctcagagtgttttgtaggctgtcacatttcactccataatgtcctagtgtttgttgccaccagtgatatatgaaggtacccactgaaatgtcaccacctttttggttttcctttttaaaataaaaaataaaaaagacattttaccatatg

SEQ ID NO: 14933 - DNA, 514 bp, Homo sapiens
  misc_feature 21: n = A,T,C or G
ttttttttttttttttttttntataggagaccggatttcactcttggtgggcccaggcctggaagtgcaaagggcaatgatcttcagcttcaccacaagccttcaccttcccaggtttcaagcggctttctcctgcgctctggccttcccgagatagctgggaattaccaggcaatgcacccaaccacggccgcggcttaaatttgtgtatttttttaggtagaagcaccgggggtttactcttaatgttgggtccagtgcctgtgtcttcgaaacctctccggaactctttaaggttgaattcacaacccccgctcttaagatttaaattttctaagaaaagttaccttcttccgaggggggtgggcctcggttaccccaagcttttttgtgtcccttttaggtgaaggggattaatttgccgcgcctttgggcgttaaatcattgggtcataagcctggttttccctggggtggaaaatttgtaattcccgcttcacatatttccaccacca

SEQ ID NO: 14934 - DNA, 420 bp, Homo sapiens
  misc_feature 255: n = A,T,C or G
ttttttttttttttgggtttcaataaaactttatttacaaaaacaaggtgtgggcctgattgggccaactttttgagaaataccatttttttataaattctgaacatgagtcctttaaaaaaatgtagcaaatatcttctactattatgtggtttcatccttttccacctagtgtatcatatttttgatgaacagaatttcctgttttgaatttttttaaaaatagttaaacaagattttgctgattccttaatnaacctgcctgggtttttattttcccattcttggtcttcagtatgaatctaggcccttctggaagttgaatggggtgagcgttctaacaaatagctacctaatacctagacagatgacatcatctccgtgtgccggtaggacattaaatggtttctttaggggaaa

SEQ ID NO: 14935 - DNA, 405 bp, Homo sapiens
  misc_feature 30, 32: n = A,T,C or G
tttttttttttttttttttttttttttttnantttttttttaaaaaaaacccccaacaggaccaacttttattttatttatccatttaagggccaatttttaaaaagtaaaggggaatgaacccttttgtatttaagatccttagacggaactttaatgtaaaaaaaaaaagaccttgctgggaaacagatgatgagaaacactgaaaaacttttcacagacccacaaaaggctcaaattgaaaacgggataaacctgttctggattaaccccgaaacataggggtttaattttgctaaccctgagatctcgctcaatttcaaactgcctgtgatccactcggtcgaggaaggctttccgttaaatgaccccctttttccctcaattatggagggccagttttta

SEQ ID NO: 14936 - DNA, 517 bp, Homo sapiens
  misc_feature 23: n = A,T,C or G
tttttttttttttttttttaaanagggggaagaagaagaaaatttcactcaaggattttggttaccttaagaattcaatggctggacacttagaccagcctattaacaatttttcagatagaagtgactttcatgccgtgaaaatgattcacatacaattgaagaagggtttttaaaaaaattacaggatgaacataaactttggttcaaggttgaaagaaaaatttaaaaataactggatattaaaacttaaattcaatttcctccttctttccattttataagggagggattattttttcttctggcaaatattgttaactggaattttaatggaacttaggaaaagcttgaaagtacctgatttttgaagtccctcttttaagcaaattacttctaattttaacgctattttatcctttccaaaagatatttatgggcctaattattaattattctttacaaatgtaagactttggtaaaaattagtaattatgcccaggttattaatcaataa

SEQ ID NO: 14937 - DNA, 341 bp, Homo sapiens
ttttttttttttttttttttttttttgatagagacagggtctcacccaggctggcgtgcagtggtacaatcacggcttacgcattcttgacctcccaggctcaggcgaccctcttagctcagcctcccaagttagtggggagattatcaaggccaccgttgcccaccattactcatgggctttatttttttataagaagaatgggggggttttgcctggtgtttttgccctaacaatttaggacctcagggccttggaaattacccctgagtacctttcgaacgctacgattaaagaactcctgctccagctctttaattttaatttctgagaaagtactt

SEQ ID NO: 14938 - DNA, 423 bp, Homo sapiens
tttttttttttttttttttttttttttttttttttttttttgagacggagtctcgctctgtcgcccaggctggagtgcaatggcgggatctcggctcactgcaagctccgcctcccgggttcacgccattctcctgcctaagcctcccaagaagctgggactacaggcgcccgtcactacccccgggtaattttttgaatttttagaagaaacggcgggttcaccgccattaaccggcgatggttcttgataacctgcccctccctaaaaccaatcacaccctggaccccgccttagactcccaaaatgcttggattacaggcgtgagccactgcacccagccatttttctttttattaaaaagaaaatcttatcgtgttggaaataaacaccaaacattggttaacacaaaaatcttatcaa

SEQ ID NO: 14939 - DNA, 416 bp, Homo sapiens
tttttttttttttttttttttttttttgggaagggagtggtttagggaagactcgaaagtgacaatggagctatcaagttcaagaaggagttagtaggggaggaggctgcaagaagaagtgcacgcctggaggcaggaacagcatgtgttccggaagttcaaggtggcaggcccatgctggtgagaaagggcaatggaaaaggaatgaacaggtttcccctgcctacacttgcaagtgccttaaaccccgatacacagctccctcttttgaggttttcaagcgtacggggattaccggggtgagccaccgtgcccggcctgaactttttgtaaaggcaagtgaaacattgggagtggagaaggaacaatgacatccccgccttaattaattttagaagtactctcgagggggggcc

SEQ ID NO: 14940 - DNA, 365 bp, Homo sapiens
ttttttttttttttttttttttttttccccaagagaagatgccattttcatcacaacatgtttacatactcaaggtaggaacttcaacactttgctccttctgaccatacccatttacataaacatatgcagggctcccctggcctgccggcagctatccacaccaaaaagaggaaaaggtagactggtaagactcaggctttcaagttatttcaaaaccaatagcaaagtaagacctgaggtacatatagtttgaatttagtcttttgaatgccttttaagaaagttttgaaatcaaattaatacaagcacgtgggcaaaacatgtatgtgtgctgtttttggccattgttgctgctttgtgaa

SEQ ID NO: 14941 - DNA, 357 bp, Homo sapiens
tttttttttttttttttttttttgggatgctcaacctataatacccaaaggctctatttcagaagaatttattggtttgctgattatagcagtgacatagttgcattctagagaccttacaaaatgcagaaaattttaagaaaaacgtttaaattgtgctcatagtgaaactgataggtgaccactcttaatattttagcggcataagcattccagtcttttatctttctcaaagtttcacataaactttctcaaaggccattaaatacttttgcatagcctgattgtgtgagaccacataggatcctattatattgataatgccataatttacctaacccatttttatatatgtgg

SEQ ID NO: 14942 - DNA, 562 bp, Homo sapiens
  misc_feature 38: n = A,T,C or G
gaacgcgcgtcatcgactactatgaggcggattggagncatcacgcggtggccgccgcttttttttttttttttttttttttaaaagagaaaattttttggggcccaaccccggagggggagaaaaaattgtttttttttgggaaaacccccccccaccccaaaaaaaaaatttttttccccccccccccaaaaaggggaaaaaaaaaaggggcccccccccccccccccttttttttttttttttaaaaaaggaggggggattttttggggggggggggggaaaaaaaaaacctggaaaaaaaaaggggtggccccccaaaatttaaaagtttttgttttaaaggggggggccccggcccccaccctaaaaaaaaaaaaaaaaaaatttaaagggggggggccccaaaaaaaaattttttccttttaccgggggaaaaagccccctttaaaaaaaaaaaaaaaaaaaaaaaaaacccccgggggggggggccgcccccaccctttttttttcttttaagaggggaaaaagcgccccctcggaaaaaaaaggaaaaaatttt

SEQ ID NO: 14943 - DNA, 472 bp, Homo sapiens
  misc_feature 52: n = A,T,C or G
agacgcgcgtatcgactcacttgagtggctgattggagctcaccgcggtggncggccgctttttttttttttttttttttttttttttttttttttttttttttttttttttttttttttttttttttttttttttttaaaaaaaaaaccccccttttgtttttgtgaaagtcaccccaaaacaaacaaaaaagaggaagggagggggcaagcacgaaaaaacaaaaatatacttttaattgtaacgcccccccccccccctccttgctttggaggaggggggcggataaccctaataaaaaacaaaggatgaacttgttttaaaaaaaaaaaaacccccccccccggggttttttccccccccccccccaaaaaaaaaaaaaaaaaaagggggggggggggccccccccccccttttttttttttttaaaaaaaaaaaaaccccccccccccaaaaaaaaaaaattttttt

SEQ ID NO: 14944 - DNA, 817 bp, Homo sapiens
  misc_feature 27, 47, 62, 63, 64, 93, 131, 132, 149, 150, 152, 153, 154,155, 156, 203, 238, 241, 268, 317, 330, 332, 346, 347, 379,383, 448, 496, 541, 589, 653, 655, 710, 714, 771, 777, 810: n = A,T,C or G
agatcccatatagacaaccagattgcncttgagaaaaaataaatttnagggggggggggggnnnaaagaaaaaaaaaaaccccttcttttttngaaaccccccaccccccccaaaaaaaaaaaccacccgnnccccccccgcgaggggnnannnnnccccccccgagagagagaggagggagggaagatattttatcatatanaaagagagagaggggagggaggaggggaggaaaanaanataaccacccccctctcacccaaaagnaagaaagagggacccaccgccttttattatttttttattatatttattnttttttttttttntntttttttatttttnnaaagaaaaaaaaaaaaaaagaaaagaataatntttnctttctcttattctctctttttttttttctttccctcccccacaacaaatataaaaaaatatatntttatatagagaaaaaaataaaaaataaagttattataatacccttcnttctctcccccgggtaagataaaagaagaaaatatatatcatatntataatctccaccaaaaaaaaataaaatagataaaaaaaagaaacagncccccccctctttataaaaatttatataaaaaaaatactccacaaagaagaaagagaggccgcncnaaaaacaaaacatacttttttttctttttaaataataaaaaagagaaaaataatnttgngcgccgcgcccaggaacaaaaataaaataatataaaaataaaaaatctctcttcttntagagnaaagaaaaagaaataatataaatatataagaanataacat

SEQ ID NO: 14945 - DNA, 386 bp, Homo sapiens
tgatatgcctgactcatctgtctgaggagcggtcagtgaccttatggagcgggcaagggatcgcttacacctgagacgaactacagaacagcacgtaccagaggtggaagtccaagtcaaacgcagaaggactgcctcacttgagcaaccaagagtgtcagttgtacccgacgcgtttttcagcatgatcaagtacctggggtggattttctggctgaactgaggcaggcattcttagctgaaacaccaagaggtggttaaagccatattggagtagcgaggaatctgattccaagcaaaaaccaggctccatctactttttgaagcttctgcccagcttggcttgtttcttaggagaacccgcgttattttaatttagaagtact

SEQ ID NO: 14946 - DNA, 660 bp, Homo sapiens
  misc_feature 38, 46, 49, 50, 55, 57: n = A,T,C or G
agatcggtgtcatcgtactacgttgtgttgctgattgnagctaacngcnngtgcngncgcttttttttttttttttttttttttttaggaaggcgggggataaagttaaggtgtagagtatttattaggttatttggcttgtttgtttgtttatgcaaatcatgttaggttgttatcagcttaaaataatgggttataagatagtatgttctggcctcatggtaacctcaaaccaaaatacatacaatggatacacgaaagataaaaagcaagaaactaaatcatgtcttcagagaaaatcatcttcactaaaaggaagacagaaaggaaagaaataaggaagagaagatcacaaaacaactggaaaagaaataacaaaacggcaggagtaaatccttatttatgaacaataatatggaatgtaaatcaactaaatctccaatcaaaacacagactggctgaatgaatttaaaaaaaaaaaacataatctgttgcctccaagaaacacacttaacctttaaagacacccccgactgaaaataagggatgaaaaaaaaaaattttccttgccaggggaaaccaaaaagagcgaagattgctttcttctacccgaaaaaaaaaattccagtggtcatggaagtggaaaattaaaccaccccc

SEQ ID NO: 14947 - DNA, 645 bp, Homo sapiens
tttttttttttttttttttttttttaggaaggcggggttttttttttttaaaattttttaaaaaatttttttttttaaaaaaaaaaagggcattttaaaaaagattatttttttaaaaaaaaaaggggggggggagggaaacacactttttaaaaacaaaaaaaaaagggggggaacacgccccaaaaaaaaaaaaaaaaaaaaagccgggacaaaaaaattgggagaaaaccccccaataggtttaaggcaaaccgggggttttttaaaaaaaaaagcaccttaaaaaatccccttttaaaaaaaaaaaaaatggagagggtaaaaaacttggaaaaattttgaaggcgttttttcaaagaatttaaaagggaaaatttgggaaaaaaaaagccccttaataaaagaggtttaaaacccccataaaaggggcgcccccagagtgttccatctccaagattgtctttttcaccttttaaaatttgaaaagaaaaaaaaaaaaacgggaggtggttaacaccaaaaaagaacaaaaaatttggaaatttaaaacatgggcggaagaaacaattaaattaaaaaccctctccatggaaacacgggacccccgaaaaaacttttcctgaaagaaaataatttaaaaaa

SEQ ID NO: 14948 - DNA, 816 bp, Homo sapiens
  misc_feature 172, 380: n = A,T,C or G
tttttttttttttttttttttttttgaaatatgcccacccatttcaggttgagccacggataaggagggcttagctcatgtctcctgtgggaattgaggcatctcaggaaacagtatagaagttggtacacgttagaatgaagaagaagctctggggtaaagaaaccaagangtgaagaaatgcgtggcttattttgactatagctggagcaaaccctctcataacaggtctgggaaggtggacaccgcgttatattaacgcggggtgaatattgatgaacaacacaataggtcatatgttaaaagacagaacttttgtgggataaaaaacagaaaactcccaagtactgtattcaacaaaatgcaatgtacacccacanatcaggtgagccagtgggggttcaattatctgggcaatgggcactcttttcaaaatttagcaaggcaattgagccggcgtttttttgaaaagcttcactttgatgccagtggacaagggggcggttctttaataaaaacatttcttggaaccgttgggagaaagagcctcttccttttctttttgctaggtctatacccaaggttttttttttacacctattcccccctttggaaccgaaaccggggaaattgggtcttaaaaacttaatacttgaaatggcgcccttgccaaagaatatgttccaaaagaaaaggcggattccttaaaaaaccgggttttttttggaagggccttaaataagggggcaattaatactacacggggtccgacccacaacttaaaaatttgtccttaagggaaactgtttttgttcc

SEQ ID NO: 14949 - DNA, 491 bp, Homo sapiens
ttttttttttttttttttttttttttgggaccagagaggcccaaaactagcatcctgtcctgcttagtagccccagcatcccttcatcattttgttgcccttctatgggcctagttaggtctgagaggcatagatttaaaatttttattgttatttatttattctagagataaggtcttgctatgtttcccaggctggtattgaacttctggcctgaagcaatcctcctgcagcagcctcccaaagtgctgggattacaggcatgagccaccacgtttggtcagacaggcatatttttacaaatatgtgggtggataaatgctgtccagtcttacttcatcacttttattaattgaatgcttttggttggaaataacagaaaatccaactaaaagtgacttaaacaaaggaaatgttattatctcatgtaccaggaattctcgaggtaaactggttaaaggggggattaattaattctagaagttctcttt

SEQ ID NO: 14950 - DNA, 447 bp, Homo sapiens
tttttttttttttttttttttttttttttttttatttttttctggctctaaagggggtagagggggtgctatagggtaaatacgggccctatttcaaagatttttaggggaattaattctaggacgatgggcattaaactgtggtttgctccacaaatttcagaatattgccctgtttatacccccggtcgtgtagcggtaaaagtggtttggtttaaaacctccgggaaattgcatctgtttttaagcctaatgtggggaccgtcttattagttgcaagacgtatttgggaagtaattttttattacgaatgggtggctttaaattcgggaagttctactttttttgtataatgttaaggattttctcagttttcctgtgtattaagaaataaatgggggaaagttttttaggagtttgttatatttattccctcccttattttgg

SEQ ID NO: 14951 - DNA, 467 bp, Homo sapiens
tttttttttttttttttttttttttttgggaattattatttaatgagaaaaaaatccacgtgtttacaacatttcaaaacagaagttaaatcattaaatagtactttttatttaaatgtttataaggcagatctatgagaatgattgaaaacatggtgtgtaatttggttccaatatttttggagattacagagtttttattatcttaccaatttacacctgtttaaaatgaagataatattattctcaagccaataccaaaaatattctaaatgaaatgatcactggtctgtgaaaaatgaattattaacttaatttgacaaatggaaaaaatcaaattttttaaattgtgagatttgcccattttattccttttaaaaagccttttcaaaaatgaaaagaaatttatttgcgagtcttatcttaatttcaaaacaagttgtttaaaatgggtattcacggattaa

SEQ ID NO: 14952 - DNA, 415 bp, Homo sapiens
ttttttttttttttttttttttttttttggaggaaggcacctacaaaacgaaagtgcctagggcttacaaaagtcatatgtagcctttacaaatattagctcagtcattttcagaaaggtttttccaattatcattttaaagatgaggaaactgaagctcagggagggctatgaaacttatccaaagcctcttaaaaggctatgttagtcagactgggctaacagctgtaacaaccccaaaatttaaatggcttaacacattaggagtttatttgttattgccataacaattcagggtgtatgtttggcaggttattctacacagtgatttaggggacccaaggctctttccctttgggggcgtttttctccctataatgctgggagctctccatgcaaatgggggtaggaaaaa

SEQ ID NO: 14953 - DNA, 294 bp, Homo sapiens
tttttttttttttttttttttttttttttttacatttaactctgatttattgtggggtaaagcatgttatagtgttccagcttcactttttttctgaatggctatccagttgtcccaagatcatttgttgaataattcattttcccccatttgaaatgacaccttttcgtttactaaagtcccaagtcttttagttataaaacagtaataaacccttgaaacaggcattttcctaaaatacattttgtttaagtaagacagttttcccccgcgttaattaattctagaagtact

SEQ ID NO: 14954 - DNA, 374 bp, Homo sapiens
ttttttttttttttttttttttttttttttttttttttttttttttttttttttttttttttttggggggaatccatttatatgaaatgtccaaaacagggaaaacctttttttgacaacaaaaacccaaagtccttcaccatttgccaggggaggaggaaaacgggaggggaaaatattgctttacagggggatgacaaaattgttccggaacctgacaaagggggtgcctacacaactttctggatgtactaaatgcccctgattgttccctttcaagggattgaattttagggtttttgaatttcatctcaattaaaaaacccaaacacccaaactggtccccccttaattaaatctaaaagtacttttta

SEQ ID NO: 14955 - DNA, 313 bp, Homo sapiens
tttttttttttttttttttttttttttttaaagcaaaactccctacagccgagccccgttcggtgccttttcttttttttttctttaatggagtgaaatctactttgctcatgaagcctgcaaatcacattttcaggccaaacgaggcatttttttagaaggggtctcttaggcaggagttggaaggctttccactccactcacgcattttcagtgtaggcgaatcgtaaaacggggggcagaacgaaaatgaccggatctgggagtgcaggctgcgcttcttccccccgggttaattaattctagaagtact

SEQ ID NO: 14956 - DNA, 400 bp, Homo sapiens
tttttttttttttttttttttttttttttttttttttttttttttttttttttttttttggaattacaaagctacttttaatacttgggggtgacccccacaggaataaaaaaccctgggaaggggtaaccccctcacccccgggagtggcccagggggaaagaggctacctggggggaaggaagcccaaaagggacccgttgcaaactcagggcaaagggaatgccatcggggctgggacctgggagccctacaggaggaaacccaaccgtggggggactggtttcaggcccacaggcaaagggcaagagggttggacccaaacccccaaagctccttgggttccctcctttttcttgtttgccctttttctgctttctggcggaaaattctccgagca

SEQ ID NO: 14957 - DNA, 296 bp, Homo sapiens
cgccgcggtggcggccgcttttttttttttttttttttttttgaggcgaatgaatttaatataatctctataaaaaccctaagggggcagttttttacagaaatataaattattttttttttttatcttttggagatggagtctcactctattgccaggctggagtgcagcggctgtagtggcctgatctcggctcactgcaacctctgcctcccggattcaagtgattctcctgcctcagcctcccgagcagctgggaatacaggcacccgccttaattaattctagaagtactt

SEQ ID NO: 14958 - DNA, 277 bp, Homo sapiens
tttttttttttttttttttttttgaggggaatgaatttaatataatctctataaaaaccctaatcagcacagttttttacagaaatatagtttattttttttttttattttttttagatggagtctcactctattgccaggctggagtgcagtggctgtagtggcctgatctcggctcactgcaacctctgcctcccggattcaagtgattctcctgcctcagcctcccgagcagctgggaatacaggcacccgccttaattaattctagaagtact

SEQ ID NO: 14959 - DNA, 381 bp, Homo sapiens
ttttttttttttttttttttttttttttttttttttttttttttttttttaatgggggcatcctattttaagggtgctttcattattttattttttatacagatacataccccttgctagaatcaaagcaaaaattttaatgggcgggtcctacaaaactaaagtgaaacaaaacaaaacaccgaacaactgaaaaacaatagctataaactttcaaggccaaaaaataaaatttaagggcaatcccttttgaaaaaggaaaaggagtttaaagttcctaaagagggttttataatgcaaatttaatgccagctttttagtaataaaaaagagaagggctttactatacactgactagcacataatacttaatttggaaaa

SEQ ID NO: 14960 - DNA, 530 bp, Homo sapiens
tttttttttttttttttttttttgggatgctcaacctataatacccaaaggctctatttcagtagaatttattggtttgctgattatagcagggacatagcttgcattctagaagaccttagaaaatgcatgaaaattttcaagaataaaccatttaaattttgtgcttcatagttgaaaacctgaacaaggtggaccacctctttaaaatatttttgtggggcaattaagacatttttccagctcttttttattcctttctttcacaaggttttccaccattaaaacctttttttttcaaagggccccaatttaaataattacctttgtttcccattaaggcacgtggattttttttttggtggaaccccaccatttaggtatttccctaattttattattttgaattaaattaccccactaaattttttaccctttaaacccccaattttttttattaataattttttgggaattttttttttccccaaatttccaattccattttatttttaatggaaaattaaatg

SEQ ID NO: 14961 - DNA, 403 bp, Homo sapiens
tttttttttttttttttttttttttttgggggagagaatcatttatgcaggctgcagagaaagcacttgctagagaaattttcataactataagggagcaaaaaactaatagccaagaccatgggataaagacctggaaagcatttatcctatttattcatttggtggctcatttattttttgttaattttattggaatataagctctataaaataaaatggacctgctgctcttgcgtatcactgtatgtcaagaagttatcatacagtatgaggcaaagtgggcactaaacaaatgtttattttgatgaggaaaagatggataaattgatgacaaaggtgtgacatatttcttgtcccaaaaaaaatgaacacctttggggcacttaaagtatagaaaaat

SEQ ID NO: 14962 - DNA, 415 bp, Homo sapiens
tttttttttttttttttttttttgggatgcacaacctataatacccaaaggctctatttaaggagaacatatcggttagctggttataccagagacgtacttgcattctacagaccttacaaaatgcagaaaattttaagaaaaacatttaaattgtgctcataatgaaaactgaaaggtaaccactcttaatattatggggcataaccattccagtcttttatctttctcaaagtttcacataaactttctcaaaggccattaaatacttttccatagcctgattttttgtgaccacatagtactcctattttattgataataccataatttacctaacccatttttatatatttggaaattttccaattgaggatccttatgaaaaatggggtatctccatggggatgatttt

SEQ ID NO: 14963 - DNA, 408 bp, Homo sapiens
tttttttttttttttttttttttttttttttttttttttttttaattaccctctcacaggaccaacttttatttaattaattcatttagggacaaatttttaaaagtaaagggaatgaacccatttgtaattaaaatccatagacagaacttcaatgtaaaaaaaaaaaaaacttgttgggaaacagatgatgaaaaaccctgtaaaacttttcacaaacccccaaaaagctcacattgtaaacaggattaacctgcttttgattaaccccgtaacatcaaggtttaattttgctcaccctgaaatctcgctcaatttcaaacggcctgtgatccactcggccgaggaaggctttccgttcaatgaccccctttttccctcaattagggatggccagttttttaccaa

SEQ ID NO: 14964 - DNA, 413 bp, Homo sapiens
ttttttttttttttttttttttttttttggaggaaggcacctacaaaacgaaagtgcctagggcttacaaaagtcatatgtagcctttacaaatattagctcagtcattttcagaaaggtttttccaattatcattttagagatgaggaaactgaagctcaggggggcttgggaaactttatccaaagccttttaagaggctttgttagtcagactgggctaacagctgtaacaaccccagaatttaaatggcttaacacattaggagtttatttgttattgccataacaattcagggtgtatgtttggcaggtagtctacacagtgattcagggacccaggctccttccctttgggggctttttctccctctagtgctgggagctctccatgcaaatggtggatggagaaag

SEQ ID NO: 14965 - DNA, 413 bp, Homo sapiens
tttttttttttttttttttttttttttttttaggacaaaaatctgggttttatttattcatttgtaaactcaagccaggtctctattccactttttccaattatttgcttttgagagtctcaggattatccttccttcctctccttccacattttctcccctggccctttttcctggccaggcttctttagtcccgacggtcttgtttaaatcacaatgcggtttggagattttccttcactctctctttcagaaaaaaatgccaaaatggggttttaagaagcttttattgagcccactgaacttcaacaaagcaaacgaaaacataaagttgggaaaggaacccttttcaacaaatggggttgggataattggcaagccacatgtaggagaatttaaactggatcctcatt

SEQ ID NO: 14966 - DNA, 471 bp, Homo sapiens
tttttttttttttttttttttttttttttatgtctgttcttacgtatttttttttaaacttttatttcagtagtgtttggggaacaagtagtgtttggttgcatggaaaagttcttcagtggtgatttctgagattttggtgcacccatcacccaagggtagtctttttttattccatcaagtctgtacccccatgtgtaggctttggtttctttcttttattttttttttgagacatgatttcattctatcacccatgcttggtagtggaagtggcattaatctttgaactcacttgaaacattttgcgctccccgggtttaatttaaatttttagaaaagtaccttctttaaggggggtggcccccggttaccccaattttttttgtttccccttttaatgtaggggttttaaatttgtcgcccctttgtgcgttaaatccatggtgtcattagacttttttttccctg

SEQ ID NO: 14967 - DNA, 793 bp, Homo sapiens
ttttttttttttttttgcagacggagatgggctctgtcacccaggctggagtgcaatggcatgatcttggctcactgcaacctccacgtcccgggtacaagcgattctcctgcctcagcctcccaagtagctgggactacaggtgtgtgcaaccacatccaggcaattttggatttttagtagagatgggatttcaccatgttggccaggctggtcttgaactcctgaccttgtgatctgcctgccttggcctacaaagtgctgggattataggcatgagccaccgcgcccagctagaaaatacatttttgaagcaataataaagatgtgaaccaaatttagtgttctcaacatgtcaagccttaccgacaatgcaaagcaatagaaactcaaagcaatagaaactgctggtgagatataacctggttcaacccggtggaaatactttggcattaaacatgccaaactaaagttaaatacgcacataatctacattctggcaatttcaccactaggcatttaccttagaaaaattctcaaacctatgcgcccaaagatatgtaaaagaatgcttaaggcagcactattcttcacaggaaaaatcaggaactaaatatcaatagaccgtgcattgaataaattaaatggggtttaaacatacactcgcattacaggcatgaaaataaaggaatttttgattaatttgtggccaggatggacccaaaccacataaggctttaaaacacagattttttaaagaaagagaccttccttcatattagggcaaaatcat

SEQ ID NO: 14968 - DNA, 597 bp, Homo sapiens
tttttttttttttttttttttttttttggggtcacatgcgcatttattattgtctggaacatcaaggcctttcctcccctggcagtggcacaagggagggccaactctcaggaggcggccacgctgccaccagcagcaggcccatggggtggcagggtcatgggcggcagaaacagcgccttcagcttgcctgacaagctggcgatctcaggatcctgggcttcgtaagacttgaccaagcgagcaaacttaaggacaccttccccgtcgcagctgaagccataggctttgataacctcctgctggatctgcgtggccacgggcagcacgaattgcagcatcttacccatgtcgttgcaggcgttatcccgagccttgtccatgcgcactgcattctccggggcggaaaacgcctggatcacctccgcgaggaccacctttgcttgctcaacgctcaaggcccgacgttgggtccaggcggacgccatagggccgtttgaagctcttagttcaacggaggtaaagggaaaactaccgaataaagagccacgtctaacaaccgtcccccccgcgttaataattctagaatacccttca

SEQ ID NO: 14969 - DNA, 822 bp, Homo sapiens
tttttttttttttttttttttttttttttgaggaagtcacctacataacgaaagtgcctagggcttacaaaagtcatatgtagcctttacaaatattagctcagtcattttcagaaaggtttttccaattatcattttagagatgaagaaactgaagctcagggaggctaggaaacttatccaaagcctcttaaaaagctatgttagtcagactgggctaacagctgtaacaaccccaaaatttaaatggcttaacacattaggagtttatttgttattgccataacaattcaaggtgtattgtttgcaggtagtctacacaatgatttaaggaacccaggcttcttccctctggtggctttttcttccctctaatgctgggaaactctccatgccaaatggtgggtgggaaaaagagaacaaaaaggtggggggattttttataggccaagccctggaattggcccccaatttattttcaacaaccatttcaatgggccaaaatgaaaccccttttatcctagcttacatggaaagaaaggtggaaaatttaattttactggctgccctgggctaaaaaaaagaaaacggttccctgggaagtcctacagagttttaattcccgtccaggtttttttggaacaaatgccccgcgtttaataatcttaaaagaccctctcggggggggcccccgaccccactctttttttcctttttaggagaggaaatttgccgcctgagcgaataagaaggacaaaagtgttttctgttggaaaattgtttccggcgacatgttcccaaagataagaccccgaacaatag

SEQ ID NO: 14970 - DNA, 464 bp, Homo sapiens
ttttttttttttttttttttttttggggaaggagtttcactcctgttgccaaggctggagtgcaatggcgcaattaggctcactgcaacctcctcttcccgggctcaagtgattctcctgcctcagcctcccgagtagctgggattacaggtacccaccaccatgcccagctaattttttgtatttttaatagagatggggtttcaccatgttggccaggctggtcttgaactcctgacctcaggtgatccacctgcctcggcctcccaaagtgctgggattacaggtgtgagccatggtacccaacctttctcaacatttttgtctgtccccacacacaggctcaacagccagagaaagccaagggcctataggcagggcaacaacatctgtgcaccttgcggctgcctgctagtttcctagaaacatattctcagacatgcctaagaagaaatgcacttgtg

SEQ ID NO: 14971 - DNA, 505 bp, Homo sapiens
ttttttttttttttttttttttttttgagacggattttcactcttgttgcccaggctggagtgcaatggcgtggtcttggctcaccgcaacctctgcctccctggttcaagcaattcttctcctcaacctcccgagtagctgggattacaggcacctgccaccacgccctagctaatttttgtatttttagtagagacagggtctcactgacttcaggtgacgcccgcctcggcctcccaaagtgctgggattacaggcgtgagccatcacgcccagctggaaccattataacttgtaacaaaatatagaatataaattattggtttattggggagttcaaatatgaattttaataaaaccaaatcttttacaagttgaatataacatttcttactgtgcccatttagacaggggtccatccaaagggcattttatctgattttctgaaagatacattaagtatctaattttagataacccgcgttaattaattctagaagtact

SEQ ID NO: 14972 - DNA, 339 bp, Homo sapiens
tttttttttttttttttttttttttttttagatggagtcttactccgtcacccaggctggagtgtggtggtgtgatctcagctcacagcaacctgacctcatgtgattcacccgcctctgtctcccaaagtgctgggattacaggcgtgagccactgcgcccggcgtctttgaattttttaaactgaagtttaattgcctttgagtttgatcattcactatttggcatttggatttcttttgttaatcatctgctcaagctctaatttcataatggaaatttaatggattaacatattacacccactatcacccgcctttaattaattctagaagaact

SEQ ID NO: 14973 - DNA, 783 bp, Homo sapiens
ttttttttttttttttttttttgagacagactgactttgtcgccaggctggagtgtggagtgcagtgacacaatcttggctcactgcaacctctgcctcctgggttcaagcgattctcctgcttcagcgctcctaagtagctgggattacaggcacaccccaccacacccggctaatttttatattttcagtagaaatggggccccaccatgttggccaggctggtctagaactgctgacctggtgatccacctgcctcgggttcccaaagtgtgagtgactgcacccagccttgctgaattttcttaaaactctttttttctgacatcttgagttaaaagtcttttgttattctttgagacaggatctggctatctcacccaacctgcagtgcgatggtgcaatcacaggtacatgtaccctctgccttctgggcttctgcccaagcctccacagtaacagacactgttggcaaatcacacccattaaactttttaattttttgtcagatggatggagtcttgctgtgttggcaacgccggtctgaaacttcgggctggaacagccacctgcctcaatctcccaaatgccagaatacaagcgtgaacccacgtgccccccttattcatttccgaatactgtccagggggggcccgttcccattttttgttcccttagtgaggggttattgccccctgggcttaatcaggggggagcagactccctgggggaaaaaggaatccgtcgaaatccccgaaagtacagtcggaagcttaaagggag

SEQ ID NO: 14974 - DNA, 783 bp, Homo sapiens
  misc_feature 26: n = A,T,C or G
tttttttttttttttttttttttttntgggtctgtatttcttattaaaatgattggtctaagaccaaagatcttgtccctgtagctctctattgtattccttgttcctaaaaggttcctgggacatacagttcaaaaatatatatctgatgtacgaatgactgaataagtgaatgtgaccataacgcagaaattccctaagaaatgctttgtcctgataggtctccagtctctgcagaggacaaagagaaatattctaaggtcccaaaaagtctttcctggtgtgccacataagacctcctattcagttcagtgtaatatttcccacataccagacaatctttctttaggattccacagaaatttgagcaggcaactagtcctatcctccgcttttcccaccctcatcaccaaatttactactcccacaatcatagttaccatttaccaattgcttcctgtaacccaagcactgtactatgccctgcatatatgttatctaactctgtggtacaacccttgataggtaccattatgatcccactttaccaacagggtaccttgaaaattgattgctcaaagccctcaaatcattagtgattgagctggttagcaaaccttaatgagtgccatactgagcaccaactggtgtgctgccctcccacaattccattctcttgactgacctttactaccaaatttaaatctccaatccatgttgggtttcctaacaaaccttccaccttggttattgtttcaagttggtagtgaccaaaaattaatt

SEQ ID NO: 14975 - DNA, 795 bp, Homo sapiens
  misc_feature 27, 729, 795: n = A,T,C or G
ttttttttttttttttttttttttttnggaggactatgataggtgaaatggtatgactataaaaaggatttgtttctttttgtctcctggaatgacatgatgcctttctagagaaagaaaaattgcaggctacaggaaaaatgataaaaactactggattcatttagactattcgatttaggaaggtacaaccacttctttaacatcaagctaaaagtgggggaaagtctcagtctcccaggtaggtctcctctcacactgtcctgggtggcaggcgctgtttatacatgcccgctatcgctctggctgcactgtagatcatctgccgacgggacatcccagtaaatgccatgtgccaatcagtccggctgacattcagtaaactcttttccaggacttcacccactgtcaccaaaaggcctgaccacctcaaattatagtcctggggaagtagactttgagcctgctgtacaaattccaaaggcactggtgtggcttgtggtaatgtttctaaaagaatgccatggacaggatctttaaccccccaacaacccatggtcaaccatttggcagggccgcaattttgcaatgaattttctactgacaccgcttgctgtttttcatggatcaccccagttcgacccaggctttttattcgttcccgtacccctttttattccgctgcataccccattggtgtggggcaattttgggactggcaattttccnttcaaccacaagttaaccaaagaccccctggagggcttttgggccgcagcaccttttacttttttn

SEQ ID NO: 14976 - DNA, 463 bp, Homo sapiens
ttttttttttttttttttttttttgggggaagatgaagaaatttcactcaagtattttgttactttaagattcaatgctggacactagaccagctataacattttcagatagagtgacttcatgcgtgaaatgatcacatacaatgaagaggttttaaaaaatacagatgacataacttgttcagttgaagaaaattaaaatactgatataaactaaatcattctcctcttcattttagggggatttttctctgcaattgtactgatttatgactagaaagctgaagactgatttgagcctctttagcaatactctatttcaccatttatcttccaaagaattatggctattttatttcttccaatgaagctggaaaattataatatgccagcagatcagttgaaatgtaaaaatattagtagttacccttttagatccaacttacctgtagtgaaatagcag

SEQ ID NO: 14977 - DNA, 349 bp, Homo sapiens
tttttttttttttttttttttttttttttaatgattgctttcttttaatcttaaagagataagtggactaacgtggataaagggctccatcttggacaacttgatcagtcttttcttctgtgctgaacagggcctgccaataacaagaaattcaacgccatttacaaagctttcttgtcttactctcagagaaagccattactgttcacatcattcaagaggctgtcaagctcacacctttcttaaataagtgttagctttttgggctgccttcccccagttgctctgtgctccaaacagatgcctgtgtttagtccccccccgttaattaattctagaagtactcttt

SEQ ID NO: 14978 - DNA, 450 bp, Homo sapiens
ttttttttttttttttttttttttacttgaattgttgttatagttcttccgttatttatttttattttttttattatactttaagttttagggtacatgtgcacaacgtgcaggtttgctacatatgtatacatgtgccatgttggtgtgctgcactcattaactcgtcatttatattaggtatatatacgtgttcattgtacccttatcgactttgcagcatgcttatccatctaactattcatctttatttgccttcgttttttgagttcccttattcatcctaaaacaaaatataatgcctgactcatagtcagactttacagtatttttaaatgaattacattgcattggggaaatataaatagtaatgtccttttatagaggaaggctaaaaaaaattcttgggtgaattgataatcaaacatttttaagaaggtttattttgtt

SEQ ID NO: 14979 - DNA, 459 bp, Homo sapiens
tttttttttttttttttttttttttttggaccagagaggccccaaactatcagcctgtcctcctcagtagccccagcatcccttcatcattttgttgcccttctatgggcctagtttaggtctgagaggcatagttttaaaatttttattgttatttatttattctagagataaggtcttgctatgtttcccaggctggtcttgaactcctggccttaagcaatcctcctgcagaagcctcccaaagtgctgggattacaggcatgagccaccacgtttggttagacaggcttagttttacaaatatgcgggtggataaatgctgtccagtctttacttcatcaattctatcaattgaatgcttttggttggaaataacagaaaattcaacttaaagtgacttaaacaaaggaaatgtttttattttatgtaccacgaattttggaggttaactggttt

SEQ ID NO: 14980 - DNA, 453 bp, Homo sapiens
ttttttttttttttttttttttttttggagaaggagtctcgctctgtggtccaggctggagtgcagtggtgcaatctcagctcaatgcaagctccgcctcctgggttcacaccattctcttgtctcagcctcccgagtagctgagattacaggcacctgccaccacgcccggctaattttttgtatttttagtagagatggggtttcaccgtgttagtcaagatgatctcgatcttctgacctcgtgatccacccgccttagcctcccaaagtgctgggattacaggcgtgagccaccgcacccggcctttcctgtcatttttaatggatatatggggaggttattaggttaccctgcctcttaaattctttccttcctgttctggtttaaaaccttttcatcctgttataaaacatatattctattttctgagctccaatgaatccccattt

SEQ ID NO: 14981 - DNA, 468 bp, Homo sapiens
ttttttttttttttttttttttttttttttgagacggagtctcgctctgtcacccggggctggagtgcagtggcgtgatctcagctcactgccagctccgccttccgggttcatgccattctcttgcctcagcctcccgagtagctggggctacaggcgcctgccaccacgcccggctaattttttgtatttttagtagagacgagatttcaccgtgttagcaggatggtctcaatctcctgacctcgtgatccacccgcctcggcctcccaaagtgctgggattacaggcgtgagccaccgcgtccggcctggaccctcttagttaataattttaaagcaaaactgtgggcgattttgctgtgccttaagagaattgctataaagatgatatctgggaccttagctggaaaaactttgattgttaaggcccttggtgcttaaaaaaaattatttatatgtggatcag

SEQ ID NO: 14982 - DNA, 609 bp, Homo sapiens
  misc_feature 547: n = A,T,C or G
ttttttttttttttttttttttttttggaagatggaatctcactctgtcacccaggctggagtgcagtggcatgatctcagctcactggaagctctgcctcccaggttcacaccattctcctgcctcagcctctcaagcagctgggactacaggcgccagccgccatgcctggctaattttttttggtattttttagtacagatggggtttcaccgtgttagccaggatggtctcgatctcctgacctcgtgatctgcccacttcagcctcccaaagtgctgggattacaggcatgagccaccatgcccggccgatttcacctttcaatggcaattactataagacaggaaagttatttatttttatatatttacctaattttaagttaccttatacaaccctcattaatagtctgttagaactagaatttaaactctatgtgaatatggaccttatttaaacaatgtatccctagcacctagacaatgcctaacctgtcacattaacttaatatatattttatttatattttttggttatttattntttttgagacagactcttgctctgtcacccaggctggagtgtagtggggcgatcctggctcc

SEQ ID NO: 14983 - DNA, 576 bp, Homo sapiens
ttttttttttttttttttttttttttttgagacagagttttgctcttgtcacccaggctggagtacaatggcacaatcgcggctcactgcaacctccacctcccgggttcaagtgattctcctgcctcggcctcctgagtagctgggattacaggcacctgccaccatgcctggctgtttttcatatttttagtagagacggggtttcaccatgttggccaggctggtcttgagctcgcgacctcaggtgattcgcccacctcagcctcccaaagtattgggattacagatgtgagccactgtgcccggcacttttctgcttttaaatacaatgattttagaaagtctgtatatgaactttgggcttgtacctagatatcccagtgtgtgtagggagccctgtatatctgcaaggggatccattagaccaaggatattagatccagcacttctcctttttaatgcatgtcataagcacatgattttatatcatgtcagaaaaaggctgttgatataaaggaagagaacaaagaatgagaagaactatatcccgcgttaattaattctagaagtact

SEQ ID NO: 14984 - DNA, 620 bp, Homo sapiens
ttttttttttttttttttttttttttggacggagtcttgctctgttgcccagactagagcacagtggtgcgatcttggctcactgcaacctccgcctcccaggttcaagcgattctcctgcctcagcctcatgagtagctgggatgacaggcgcccaccaccacgccgtctaatttttgtatttttagtagagactgggtttcaccatcttggccaggctggtctcgaactcctgacctcaggtgatccgcctgcctcggcctctcaaagtgctgggattacaggcgtgagccactgtgcatggccagcttgacaaactttctaattgactggctcctgtgcattgctcatccttctctctcatttgttagtggctaggaaaaagaaagaagtttgttatctgagaaatgtgagtccttttaaagtctcaggataacagaggcatttaaaatgcaacagcagtctcttctcactcttcctggcactaaataatgacctcttgaagccacttgctatatgggctttacactgactgaagccaagtaaccataaaatgccatatgctggacaccataacccataccctatagttcagcaatctatagccaaaccctatccaa

SEQ ID NO: 14985 - DNA, 581 bp, Homo sapiens
ttttttttttttttttttttttttacttgaattgttgttatagtgcttccgttatttatttttattttttttattatactttaagttttagggtacatgtgcacaacgtgcaggtttgctacatatgtatacatgtgccatgttggtgtgctgcactcattaactcgtcatttatattaggtatatatacgtgttcattgtacccttatcgactttgcagcatgcttatccatctaactattcatctttatttgccttcgttttttgagttcccttattcatcctaaaacaaaatataatgcctgactcatagtcagacttcacagtatttttaaatgaattacattgcattggggaaatataaatagtaatgtccttttatagaggaagtctaaaagaaattcttgggtgaattgataatcaaacatttttaagaaggtatatttgctagcaaagaaagaaaaaatatgacagcttatttatatagaaaacctatgtattctgggatttttctttgtttcaagtctgtatatgaatatcatgctatcccttcccccgccttaattaattctagaagtact

SEQ ID NO: 14986 - DNA, 581 bp, Homo sapiens
ttttttttttttttttttttttttacttgaattgttgttatagtgcttccgttatttatttttattttttttattatactttaagttttagggtacatgtgcacaacgtgcaggtttgctacatatgtatacatgtgccatgttggtgtgctgcactcattaactcgtcatttatattaggtatatatacgtgttcattgtacccttatcgactttgcagcatgcttatccatctaactattcatctttatttgccttcgttttttgagttcccttattcatcctaaaacaaaatataatgcctgactcatagtcagacttcacagtatttttaaatgaattacattgcattggggaaatataaatagtaatgtccttttatagaggaagtctaaaagaaattcttgggtgaattgataatcaaacatttttaagaaggtatatttgctagcaaagaaagaaaaaatatgacagcttatttatatagaaaacctatgtattctgggatttttctttgtttcaagtctgtatttgaatatcatgctatcctttcccccgccttaattaattctagaagtact

SEQ ID NO: 14987 - DNA, 211 bp, Homo sapiens
tttttttttttttttttttttttttttttttttttttttttttttttttttttttaaaaaaagaacacagctttttttttttttttaaccatgggaggacaaaaaatttaattccttcactatcttttcgtgggaaaaactgaaaatttttgccattttatgggatgccctccctcagcaggaacccgggttaattaattttaaaagtcct

SEQ ID NO: 14988 - DNA, 623 bp, Homo sapiens
  misc_feature 623: n = A,T,C or G
tttttttttttttttttttttttttttttccacccaggctggagtgcaggggcacgatttcggctcactgcaacctttgcctcccaggttcaagcaattctctgcctcagctgcccgagtagctagatttacaggtgcctgccaccacacccagctaatttttgtatttttagtaaagacggggtttcaccatcttggccaggctggtcttgaactcctgaccttttcatccatccacctaaacctctaaaagtgctgggattacaggcgtgaaccaccgtgtgtggctggaactcttctttttaaaactatcagattttatgaggcttattcactatcacgagaacagcatgataaagaagtgcccccatgattcaattacctcccactgggtccctcctacaacatgtgggaattcaagatgagatttgggtggggacacagccaagccacatcattccacccccggcccctcccaaatctcatgtcctcacatttcaaaaccaatcatgccttgccaacagtctcccaaagtcttaactcatttcagcattaactcaaaagtccacagtccaacacctcatctgagacaaggcaagtcccttccacctatgagcctgtan

SEQ ID NO: 14989 - DNA, 613 bp, Homo sapiens
tttttttttttttttttttttttttttggagctgaatttattataatcctttttttttttttttttaaagatggaatctcactctattgcccaggttggagtacagtggcgcaatctcggctcaccgcaacctccgctttccacctcctgggttcaagtgattctcctgcctcagcctccctagtagctgggattacaggcacatgccaccatgcccagctaattttgtatttttactagagataaggtttcaccatgttggccaggctggtcttgaactcctgacctcaagtgatccacccacctcagcctcccaaagtgctgggattagaggcgtgagtcactgcacccagcataatcctctttcttaaacataattatttttattttatttggatttttctattttacttactttactctttatgatctttaatattggagttacattcaacatgactttatgcattaaaattatttttcattgtcaatcaaatattaaataaccatgtaagcagagtttcgtcttaggtttttgaccacttattatagtcttgaattttatgaggttcaactggctgagaggcaccctggagtggagattaacactttg

SEQ ID NO: 14990 - DNA, 722 bp, Homo sapiens
ttttttttttttttttttttttggggatgctcaacctataatacccaaaggctctatttcagtagaatttattggtttgctgattatagcagtgacatagttgcattctagagaccttagaaaatgcagaaaatttcaagaaaaacatttaaattgtgctcatagtgaaactgagaggtgaccactcttaatattttgtggcataagcattccagtcttttatctttctcaaagtttcacataaactttctcaaaggccattaaatacttttccatagcctgattttttgtgaccacatagtatcctattatattgataataccataatttacctaacccatttttatatatttggattttttccaattcatcattattatgaataatggtgtatctcagtggttattactttgcactgcatttcttatgaaagtattgagtaaaaggaagtaaagccctctcagagtgttttgtaggctgtcacatttcactccataatgtcctagtgtttgttgccaccagtgatatatgaaggtacccactgaaatgtcacacctttttggttttcctttttaaaataaaaaataaaaaagacatttaaccatataaaattggtcttatatatgatttattataaagtagaatcacatctttgagttcataaaaatattgaatttgggattctcttcaatttccctttagtagaaaggcttaggttcgg

SEQ ID NO: 14991 - DNA, 726 bp, Homo sapiens
tttttttttttttttttttttttttggctgagatcttcttattcaacccatatcaatttgactggacttgtagcattcaaatattaacacagatttcaaattttagaaagatatttgtactagaatacttgtcaggtaactctgtggtatttctattagtatggaaattgtttataaagacacactctgaatttttgtggtcaagtagggtttgtagaatctttgatagcccagcatgttaaaatgtaaatgttctagaaaaataatctttcactttccctgtgaaaagaccccgcaaaaagttttttgaggggtgtgttaaatatataaattttgaaagacgtagacaaaatagttaactatctacttatgatatttaatagtttggccaggcatggcaactcatgcctgttgtaatcccagcgtattgggcggctgaagtaggaggattgtgtgagcccaggcgtttgagactgcagtgagctatggatcctgcctggatgaccgggcaagaccccaagtcaaaaaaaaaaagtaatagtttaatgaacatttaaaaacacattgtttggaataatgtgtgttagaaaaatggtttttttttacttacattacctaaaacaagtttattcaaacaaacttttcaattatgtctttgacattcaaaatttcattctgagaacccctttttgagacatctagcacagttttcagaacccaattttt

SEQ ID NO: 14992 - DNA, 755 bp, Homo sapiens
  misc_feature 24, 37, 61, 63, 64, 65, 66, 70, 71, 72, 73, 75: n = A,T,C or G
tttttttttttttttttttttttngggggtttaattnaatttttttttttttttttttttntnnnnaaannnnangggggggtttaccagttttatttttaaactttaatgttgggcttttggcctttgggggaaaaaatgccggtaacattttggtgttggaaaaccccccgttgcaaccaaaaatgaaaaaaccaagccgcccgctgccaaaaactttaaatttgcgcgtaacaggaaaaactccgttgggccccgggaatttgcaaccaacctttggcttttcatacaaaaaaaatcaaggatttgtgcctttgcccaattacaaacaaaaaaagcttccttaaaggcccccgcgttaaataattctagaaatactctttaaggggggggcccggaacccaaattttttgttccttttaagtggggggtaaattgcgccccttgggcgtaaataaaggggaaaaagttgttttctgtggtgaaaaatgttattccggttaaaaaaattcaaaaaacataataagccggaaagcataaaattgtaaaacctgggggtgccttaaatgaatggacttacctaaaaattaattggggtttggcctaatttgccgctttttcaagatgggaaaaactttttgtggccaacttgaattaaataaaatcggccaaacacccggggaaaaagccgttttgctatattgggggctttttcctttttttggttaaattgaattgctttcgcttggggcgag

SEQ ID NO: 14993 - DNA, 334 bp, Homo sapiens
  misc_feature 27: n = A,T,C or G
ttttttttttttttttttttttttttngggaattattatttaatgagaaaaaaatccacgtgtatacaacatttcaaaacagaagttaaatcattaaatagtactttttatttaaatgtttataggcagatctatgagaatgatagaaaacatggtgtgtaatttgatagcaatattttggagattacaagagtttagtaattaccaattacacagtttaaaagaagataatatattccaagcagatacaaaatatctaatgaaagatcaaggcaggaaaatgagtataactaattgacaatggaaaatcaaatttaatgtgaattgcacatta

SEQ ID NO: 14994 - DNA, 721 bp, Homo sapiens
ttttttttttttttttttttttggggatgctcaacctataatacccaaaggctctatttcagtagaatttattggtttgctgattatagcagtgacatagttgcattctagagaccttagaaaatgcagaaaatttcaagaaaaacatttaaattgtgctcatagtgaaactgagaggtgaccactcttaatattttgtggcataagcattccagtcttttatctttctcaaagtttcacataaactttctcaaaggccattaaatacttttccatagcctgattttttgtgaccacatagtatcctattatattgataataccataatttacctaacccatttttatatatttggattttttccaattcatcattattatgaataatggtgtatctcagtggttattactttgcactgcatttcttatgaaagtattgagtaaaaggaagtaaagccctctcagagtgttttgtaggctgtcacatttcactccataatgtcctagtgtttgttgcccccagtgatatatgaaggtacccactgaaatgtcacacctttttggttttcctttttaaaattaaaaataaaaaagacattttaccatataaaattgctcttatatatgaattattataatgtagattcacaatttttgagttcataaaatattgaatttggattcttttcaatttcccttttagttagaaaggctaaggttt

SEQ ID NO: 14995 - DNA, 797 bp, Homo sapiens
  misc_feature 24, 136: n = A,T,C or G
tttttttttttttttttattaatngggttttggcggctgtaatgtgcaatgatgtgttttattttccttgatgcttaacattactaacaattgcaaaaataatactgaggaacactactttgcatttgtttgaagntgggagtttgggatactgatcataaatcatgaatctggcgtattaatgcttaaacttcagcgccttttgggttgggtgtatgtgtattttttcttcccccacccccgccctttttttttaaaaaataaggacaagtgctttacaatctgcttaagcaaattgtttttcagatattggaaattcagcaaaagagggaccctcttttggccatttttaaaccttaaatggtggtgtcctaaaatcttggtggaagggaaaaagcatgccgcttgttgaaaccaagctggtttaattggacaccattatttgtggtcccccaggaaaattaattggctcaggcacttgtttttttaattttgggttggttgggccaatttaattggtgggtattacctggctattgggcgaataaccatgaaaatggggaaaccaagctttttggccccattaatttaagggtgaaaataaaaccagggaggaaattttttattccattgctttcctggaaatgccccaatttcaggtattttttttttttctttttaaaaaggaaaggtttcagtttttccattatcaaagggtttttaaaggggaatttataacacaattcttttacatggaacggaatcctcaagcacccttaaaaaattcagggctcacg

SEQ ID NO: 14996 - DNA, 447 bp, Homo sapiens
tttttttttttttttttttttttttttttgaggaaggcacctacaaaacgaaagtgcctagggcttacaaaagtcatatgtagcctttacaaatattagctcagtcattttcagaaaggtttttccaattatcattttagagatgaggaaactgaagctcagggaggctaggaaacttatccaaagcctcttaagaggctatgttagtcagactgggctaacagctgtaacaaccccagaatttaaatggcttaacacattaggagtttatttgttattgccataacaattcagggtgtatgtttggcaggtagtctacacagtgattcagggacccaggctccttccctctggtggctttttctccctctagtgctgggagctctccatgcagatggtggatggagaaagagaacaaaatgtgggggatttttataggccaggccc

SEQ ID NO: 14997 - DNA, 406 bp, Homo sapiens
tttttttttttttttttttttttttaacttttgacagagactagatcttgctatgttgctgaggttgctcttgaactcctgggctcaaagaatcctctcatttcagcctcttcaactgctggtattacaagcatgagccaccatatgggctggaagctgatttttaaaatactgagaccatatagatgacagcacccagagaaacagaaatattaactgaagttgttgctggcagaccattctttctttccacctttctttcttcctccctccccctcctccatctttttacttttcgtcctcttcctttctcttctttctctccttcattatccctttcactgtttctctttctccctttcttttttcttttctttcccccgcgttaattaattctagaagtact

SEQ ID NO: 14998 - DNA, 452 bp, Homo sapiens
ttttttttttttttttttttttttacttgaattgttgttatagtgcttccgttatttatttttattttttttattatactttaagttttagggtacatgtgcacaacgtgcaggtttgctacatatgtatacatgtgccatgttggtgtgctgcactcattaactcgtcatttatattaggtatatatacgtgttcattgtacccttatcgactttgcagcatgcttatccatctaactatttatctttatttgccttcgttttttgagttcccttattcatcctaaaacaaaatataatgcctgactcatagtcagaacttacagtatttttaaaatgaattacattgcattggggaaatataaatagtaatgtccttttatagaggaagtctaaaaaaaaattttgggggaattggatattaaacatttttaaaaaaggatattgctagc

SEQ ID NO: 14999 - DNA, 286 bp, Homo sapiens
tttttttttttttttttttttttttttttgagagggaaaattttgctgttttgcccaggctggagtgaagtggtattatcttggctcactgcaacctccgcccacccaggttcaagctattctcctgcctcaaccttctgagtagctgggattataggcacccactgccacacctggctaatttttgtatttttagtaaagacggggtttaaccacgttggccaggctggtctcgaacttctgacctcaggtgattcacccgccttaattaattctaaaagtactt

SEQ ID NO: 15000 - DNA, 841 bp, Homo sapiens
  misc_feature 460: n = A,T,C or G
agtatgaggtgcgaatctgccagcctgccacacggcaggttgcggcgtgcacgacatattatattattttattatattattattattatttattatgtggtgagcggacactttgtgtagcattaactccataccttctcgagtcatgtagctattgtttaagaactttctactcagttacacaagtctgagacttatcttattaacttacatattatgtagttcgcacataatatcttttgaactcatacagtgtatactaaagatctatctctctaatgtggtaataaaactaaatctgtctatatatcctctaatttttttatagaggttccctactaattctataactctattttatgtgtggtttattatctcaataccttcttgtacttgtttttgtgatattactaagtgtaaacaaaatactctatagtattttgggctagctcaaaggctnctcgctttattatataataggtgtgttttccgttctatgatgatcaaaaccggaattataaaatgatccacttttcgttcgtattccttgtaatgtattttaataaacactggtaaaatttataaatacacaactagttatctgtgttatagtttttattcttatcattttccaaaattttctcttctccattttttcctttaagtgtgtatctaattattaaatttttttgtggttctttcttttttatctaaaagtgtgtgtcttttcactgttacttttaaaaatttatttttttttgaacactttacctttttctagaggtggaaagagctcccccttcctatcacaaccattatttttatgtttccatatatgttt

SEQ ID NO: 15001 - DNA, 230 bp, Homo sapiens
tttttttttttttttttttttttttgaaaaagaatcacagccaaaataagacattaactgcaaaatccaaaatggctgcgcttaccctatgtataaaaatgcgtccagtccggtcggggcacggcctatgctttcccggggatcttggcccgcttgcgtgcaatagccttcctccacggccttcagctgtttcaacagctcctcccgccttaattaattctagaagtact

SEQ ID NO: 15002 - DNA, 440 bp, Homo sapiens
ttttttttttttttttttttttttttttggaggaaggcacctacaaaacgaaagtgcctagggcttacaaaagtcatatgtagcctttacaaatattagctcagtcattttcagaaaggtttttccaattatcattttagagatgaggaaactgaagctcagggaggcttggaaacttatccaaagcctcttaagaggctatgttagtcagactgggctaacagctgtaacaaccccagaatttaaatggcttaacacattaggagtttatttgttattgccataacaattcagggtgtatgtttggcaggtagtctacacagtgattcagggacccaggctccttccctctggtggctttttctccctctagtgctgggagctctccatgcagatgggggatggagaaagagaacaaaaagtgggggatttttataggg

SEQ ID NO: 15003 - DNA, 313 bp, Homo sapiens
tttttttttttttttttttttttttttttaaagcaaaactcccgacagccgagccccgttcggggccttttcttttttttttctttaatggagtgaaatctactttgctcaggaagcctgcaaatcacattttcaggccaaacgaggcagtattttagaaggggtcgctgaggcaggagtaggaaggctttccactccactcacgcattttcagtgtaggcgaatcgtaaaacggagggcagaacgaaaatgagcggatctgggagtgcaggctgcgcttcgtccccccgcgttaattaattctagaagtact

SEQ ID NO: 15004 - DNA, 495 bp, Homo sapiens
tttttttttttttttttttttttttttggagacagagttttgctcttgtcacccaggctggagtacaatggcacaatcgcggttcactgcaacctccacctcccgggttcaagtgattctcctgcctcggcctcctgagtagctgggattacaggcacctgccaccatgcctggctgtttttcatatttttagtaaagacggggtttcaccatgttggccaggctggtcttgagctcgcgacctcaggggattcgcccaccttagcctcccaaagtattgggattacagatgtgagccactgtgcccggcacttttctgcttttaaatacaatgattttagaaagtctggatatgaactttggggcttgtccctagatatccccatggtgtttagggagccccctgtttttttgcaagggggatccatttttaccaaggattatttgaatccagcactttttccttttttaatgcatgtcattaagcccatgatt

SEQ ID NO: 15005 - DNA, 480 bp, Homo sapiens
tttttttttttttttttttttttttttggagacagggttttgacatgttggtcaggctggtcatgaactcctggcctcaagtgatccacctacctcggcctcccaaagtgctgggattacaggtgtgagccaccgcgcccaaccctgtgtttattcttaggtctgtactacgctttatgcctcagtttccacagttaaaacacgttattttattcctcacgttataggagcaatttgtattcataaacttggccttcaccttcaacttcttgaaaatttaattccgcgcaaatgatttggggtctgggaatttcagtttatttatttggctccttcctttaaagggtcaagcttatgccagaaaaatccaattatttgatcttttggatttcaaataacttgaaaaagaaatgggggttaatttaagggtttaaggcttaaagccgggttttttccctaggcccggggggataatggtgg

SEQ ID NO: 15006 - DNA, 485 bp, Homo sapiens
ttttttttttttttttttttttttttttttttggattcatataaagacttttatctattgtgcaaagagagggtcatctggctccccagaaggttctcaaccccatcaagactgtccattttacatctttagctccagttcttcttaaagagtaaaagtgctccaaaggcctgtgatcatgggtactgattaagggctgcaaacttttcagatccagttaaatccctggtgtttgagctgtgtgggagctgtggttgcttgcttcctggctttgcctgaggtcctgccgcaaaccctgcagcagctggtttaggagtgtaagggggctgtcttttctaggcaaaggcaggggtgggaggcatatccctttatactcgaacactggcattttggcccgaaccaaacttctaattgggaattgcaagcatttttttgtggcccccccatttgaacttttgtactcccggggctcagaggttaaaaac

SEQ ID NO: 15007 - DNA, 513 bp, Homo sapiens
tttttttttttttttttttttattataggtagtgggtgttgagcttgaacgctttcttaattggtggctgcttttaggcctactatgggtgttaaattttttactctctctacaagggtttttcctagtgtccaaaaagctgttcctctttggactaacagttaaatttacaagggcgattaaagggttctgtgggcaaaatttaaaggtgaactaagattttattttggacaacccgctattaccaggctctggagggttgtcgcctctacctataaaacttcccactaattttgctacataagacgggtgggctctttttaacctgttcttaagtaagctccgttcgggtttcggggggtcttaaactttgggctcttactttgccaaaggtttttccttagttaatttcattttgccagaaagggtaatatggggggtaagtctcttgcctatattattgcgttggggaaataaaatttttcaatcttttccccttgccggaacctattt

SEQ ID NO: 15008 - DNA, 481 bp, Homo sapiens
tttttttttttttttttttttttttttggggggaaggcacctacaaaacgaaagtgcctagggcttacaaaagtcatatgtagcctttacaaatattagctcagtcattttcagaaaggtttttccaattatcattttagagatgaggaaactgaagctcagggaggctaggaaacttatccaaagcctcttaagaggctatgttagtcagactgggctaacagctggaacaaccccagaatttaaatggcttaacacattaggagtttatttgttattgccataacaattcagggggtttgtttggccggttttctacacagtgatttagggacccaggctccttccctttggagggttttattccctttagggcggggaagctttccatgcaaaaggggggtggggaaaaaagaccccaaaggggggggagttttatatggcccaggccctggaaattgggcccccataaatttttaaa

SEQ ID NO: 15009 - DNA, 484 bp, Homo sapiens
tttttttttttttttttttttttttttggagacagggtctcactctgtcacccaggctggagtgcagtggcgcaatctcagctcactgcagcctctgcctcccaggttcaagcggttctcctgcctcagtctcccgagtagctgggattacaccaccacacctggctaatttttgtatttttggtatagacgggttttcgccatgttggccaggctggtgtcaactcctgatctcaagtgatctgccagcctcggcctcccaaagtgctattacaggcgtgagccaccacgcctggcttaggctgcttaaatattctttcttaggtatccttggttttggaaaaaaaaagaataaccgaaaactaaaaattcccagtggcagtctctgtttcactggaatttaactttttgtttgttggttttttgagatggagtctcgctctgttgcctaggatggcgtgcaatggcctgatctcggatcacg

SEQ ID NO: 15010 - DNA, 276 bp, Homo sapiens
ttttttttttttttttttttttggaggggaatgaatttaatataatctctataaaaaccctaatcacacagttttttacagaaatatagtttattttttttttttattttttttagatggagtctcactctattgccaggctggagtgcagtggctgtagtggcctgatctcggctcactgcaacctctgcctcccggattcaagtgattctcctgcctcagcctcccgagcagctgggaatacaggcacccgccttaattaattctagaagtact

SEQ ID NO: 15011 - DNA, 185 bp, Homo sapiens
ttttttttttttttttttttttttaagacggagtcttgcactgtcgcctaggctggagtgcaatagtgcgatcttggctcactgtaagctccacctccggcgttcacgccattctcctgtctcagcctcccgagtagctggaattacaggctcccgccaccacgcccggcctttttttgtatttt

SEQ ID NO: 15012 - DNA, 462 bp, Homo sapiens
ttttttttttttttttttttttttttgaagcacaaatgcttttatattcagcccctgtaaagccatcaaatgtttgaaagttgttaaacaccaaccaaagggtttaattttaagaacttagctaggaatgggtgaaatcctacccaattaataggagttctgcaaattattaacaaagtgtaaaatgaaaggaagggtcccttggagatgtgaaattcttttattgagagtcctgtcttctttattcaagaagtttgtagccatgtttagaactcactcaagaaccaacttcttaatttagatttcagccaacaagtcatggccaaaaattcccaaagagaaacaccaccccattgaaaaggattaaaagccagaggtccaaccagtaggagtgtttgggaagcccatttgccccacactgaggccttacattgtattttttgccttccttcttggcttaag

SEQ ID NO: 15013 - DNA, 460 bp, Homo sapiens
tttttttttttttttttttttttttttggaaggagattgtttctgctaggcaatataatctgctaatgggacagtttccctgtaacaatgtgtagcaaaactctgcacgattaatgagaagaatgtattgcctttgaagcagcaccacttgagtaaaaattcctcaaatgggctctatgttatgctagtggaagaatagcaccggaggatatttgttgggcctactttgcaagcctttgacaggtgctgtgcagctcccaccatgaactgatctgctaattgaagagggtcccaggaaggggaagggccctatggcctccattctacccagggagattgggtgaatatctggcatgtaattaagtgctagctcagggggggctgtttctggcatatagggtacccaacggacaggggatcctggactgggggtaaaaaggactggtgagggcccccgtgt

SEQ ID NO: 15014 - DNA, 457 bp, Homo sapiens
tttttttttttttttttttttttttttttgaggaaggcacctacaaaacgaaagtgcctagggcttacaaaagtcatatgtagcctttacaaatattagctcagtcattttcagaaaggtttttccaattatcattttagagatgaggaaactgaagctcagggaggctaggaaacttatccaaagcctcttaagaggctatgttagtcagactgggctaacagctgtaacaaccccagaatttaaatggcttaacacattaggagtttatttgttattgccataacaattcagggtgtatgtttggcaggtagtctacacagtgattcagggacccaggctccttccctctgggggctttttctccctctagggctgggagctctccatgcaaatggtggatggagaaagagaacaaaaagtgggggatttttataggccaggcctggaattggcc

SEQ ID NO: 15015 - DNA, 284 bp, Homo sapiens
ttttttttttttttttttttttttttctctctttagacagagtcttactctgtcacccaggctggagtgcagtagtgcaatcttggctcactgcaacctccacgtctcatgttcaagtgattctgctgcctcagcctcctgagtatctgggattataggcacacaccaccatgcccggctaatttttgtatttttagtagagactgggtttcaccatgttggccaggctggtctggaactcctgacctcatgatctgcccgccttaattaattctagaagtact

SEQ ID NO: 15016 - DNA, 183 bp, Homo sapiens
acttaattaagtgaaggtaacctcccagagttagccagcctttcagagttgaagtcacagcttagggattcaaaatgagcttctaaaaacactaatttagttattagagaactccgggttccactttcaggatccaccttggttggccagtggaaaaacacaagtattcttcattcaacaagt

SEQ ID NO: 15017 - DNA, 344 bp, Homo sapiens
ggtacccagttaagttttgatggtttaaattccactaaagaacatattcttctaataactagcatttattacatgaaatttaagagtttaagttccatcaaactagcccttgtgtaagattattatttcttctctataacttcaaaatagatatttcattcaaactgttcaggtgagaaaacataatggatttttttttttttcctctggagctgcctgttcagtgagatggaggaggtgggcacatttaaggtcagttcactaacctatggttcagagttctgatcatatggaagtttggaaaagagagcttataacaggtttgtatgctggcgaatggatag

SEQ ID NO: 15018 - DNA, 268 bp, Homo sapiens
accattcttatctcagaatgctgtaaaccatcagtagaagcagtttagatttggactgcatggtaaaatgaaaagtaataaccctccaaccacaacctagtcagggtattaataattatatgtagcaagaaaacaaagaagaaaataatattgaaaaaatggagattccccaaccagtttcatatttgaaggatctgagttgtatttttattaaggaaattttttttctgaatactgtcttccaaaatgttaacattaaaatctgaat

SEQ ID NO: 15019 - DNA, 336 bp, Homo sapiens
ggtactctacggtgtcaataattatttcagtctctgctgcaattagtgctaattacaatacctgagctatgaaaataaaagatttcattatagcaaagttcacaaatatcgttttagttcagttatccacattgttcgtctaaaataatacattttctttacatataactgtcttagacttgtaattgaggatatttgatgaaacagatctgtatctgaaacagcactatgatgctaaacatttgcataaggaatgaaaaaagttagcaacctagttttttcaatattcagatatttgagattacacagaaaactacatccagatgaatgactgaa

SEQ ID NO: 15020 - DNA, 350 bp, Homo sapiens
ggtacacatataccgtatttagctcagtttggtattttatagaggtatatttggtattagagtttaaattgtctcaaggagcttttagaccttgatttttttcatgtcataaaatgagctacgagaccctttaactgagtagtaatgaaggtagccagttttatataaatagcatttattattttatgatcattttatttagtttgttatgtgcagatgttttccccactagaatttaagtggtatgaatggagggatcttgtttgtcttgcacagcattgaattcccactaactcttaattaatacttactggttcaatgaatgaatggacagaataagcaagtgtgct

SEQ ID NO: 15021 - DNA, 344 bp, Homo sapiens
cccttagcgtggtcccggccgacgtacgcggggagagagaaggttaagagcaacaagatgggaggcagctgcatggaacctgtcccactgaggaagtaaaacaggaatccaaaataatacgtttgctgggaattataaagaatttcattgagaaagtgaaaaagaaaaatctatgcaaaggaagtgattctgttgtttaatgccattacctgtcattctgtctcttaccatggctggcttggctagtggcaccacgaacagatccctacataccccaacacaagaaaaagttttactctttgttgcccagtctggagcgcaatggtgctatctcagcttaccgc

SEQ ID NO: 15022 - DNA, 738 bp, Homo sapiens
  misc_feature 576, 577, 592, 661: n = A,T,C or G
ggtacaggttatctaaaatttacaacagtcctcttttcttaaaaaaaatgcagatatgattaggattgtatttaacacaaaagctttgtaattcctgctttaaatctacttggctataaaaattttaagggaattttatcgtgaaagcagcccaaatctattcaaaggagcaagcctttcaagccagtgacccccaatgcctttttttctttgccattcaatagtgcaaatcacccatctgttacaaacaggaacctgaaaaagcaacaacatcctggcagtgactagccttaaaaaccattcccaactctacctccagacctgacactgtattcaagtgaatgtgcctgaggtgtgatcaccacaaggaaacagaactgtgtcctgtctatgcctatacttggccatgcttgttagagcaaacatcctgaagtgaccactgtgctgtccgcaccccagccaggcaagactggtttagatgggaaagtgtcaggccttcaggcatatgctaggggaaactgccttttgagaagcttttgtttccctgacacctttgtcgggacatgaaaaatgganngggatgagcagcagntggctgcttctgcattgaagcctggcttctgatcttaccataatgaagaggctttgatggtgtctatanagaggatggtctagaattactgaagaagaacgatctagatagctttaaactacgtgcaaagaacatttgattttagt

SEQ ID NO: 15023 - DNA, 340 bp, Homo sapiens
accattcttatctcagaatgctgtaaaccatcagtagaagcagtttagatttggactgcatggtaaaatgaaaagttataaccccttcacccacaacctagtcagggtattaataattatatgtagcaagaaaacaaagaagaaaataatattgaaaaaatggagattcccccaaccagtttcaatatttaaaggatctgagttggatttttattaaggaaattttttttctgaatactgtcttccaaaatgttaacattaaaacctgaatcagaggactctgaatggaaaagaagtttgatcactgacacctagggctctgaagcgtgtgtggccacat

SEQ ID NO: 15024 - DNA, 291 bp, Homo sapiens
acttcattcccaagggctatgcagttatactgaagagcaatgctgatcatcacttctccactttacaggatattctcttgaccccaaagtgaatctgcttaacttggcacaagggagcggacatggtcattgtgggctgccccaggagagacatattagtggccacaagattcaatgcctctatgaaatggaaggctaatacaaaaaaaggtgggatccttgggagcaaagacactggccaagaaatacaccaaatttgaccaaaacccgaatggagtgctgaggctctgg

SEQ ID NO: 15025 - DNA, 336 bp, Homo sapiens
actcttaaaaatctgttaagagagtggatctcattttaagggttcttaccacaataaaattaaatttttgaaataaatcagtcatatttgagtgaaatgaaacctttccgagtagtttcagacaattgataatacctagtttacagttcctgtagtcattttggagggtgaggacttgatgtgtttagtaaagttgagaaataaatacatgaaagaatgtgtggggaagagaaagtgtggggaagagaaattgtcttagaggaccattcttagtggcactggggaaatcttggcacccagaagaatttaactgcgctcactgcaaaaattcaatgg

SEQ ID NO: 15026 - DNA, 546 bp, Homo sapiens
cccttaggtggtgcggccgaggtaccattcttatctcagaatgctgtaaaccatcagtagaagcagtttagatttggactgcatggtaaaatgaaaagtaataaccctccagccacaacctagtcagggtattaataattatatgtagcaagaaaacaaagaagaaaataatatcgaaaaaatggagattccccaaccagtttcatatttgaaggatctgagttgtatttttattaaggaaattttttttctgaatactgtcttccaaaatgttaacattaaaatctgaatcagaggactctgaatggaaaagaagtttgatcactgacacctagggctctgaagcgtgtgtggccacatggaaaagtcgaaggatgcgctgtcgaatctcctttgtcttcactccatagacaattgggttgagcacaggaggaaccagcagatagatattggccaagatgacgggcagcggagagtcacgccgcttgctaaagcgatgcaccatggacaaatcaatgaaaagtaccttgcccggcgggcgctcga

SEQ ID NO: 15027 - DNA, 336 bp, Homo sapiens
  misc_feature 184, 185: n = A,T,C or G
ggtacgatcttggctcactgcaacctctccctcccgggttcaagtgattctcgtgcctcagcctcttgagtagctgggattacaggcgcgtgccactgcgtccggctaatttttgtatttttagtagagatggggtttcaccatgttggccaggctgatctcaaactcctgacctcatgtggtnnacccaccttggcctcccaaagtgctgggattacaggcgtgagccaccacgctcagcctacaagcaattttttaaaaactgacacctattactgataaaattctctgtttaaaatcctatttactattttaaagataaagtattagtttttt

SEQ ID NO: 15028 - DNA, 462 bp, Homo sapiens
gggaagggtatttggagaaattcgcccttaccgtggtcgcggccgaggtacccaggtcaagtgattttgaagactcagcacatctcatgcaaccagtccacaataagcctgttaaacaaggacctaggtataaactacatcagatccagggtcacctcagcctccttcgacatttaccacaacccaggaccccaaaatgtttgcaaaccaatcagttcagaaaaaattttttcagaggaattccacaattgttttaccaagagtacaaccattcttccccttccttccatgggtaccccctctgtgagtagggaactattttcaaccaacagggaagggtattttccttgggaaatgttggaagtctcccaaatgacctagttcgggggcaagtcccccaggaattaggaaagtaaaggttggggttattccctttattaaatttactttccaatgactttt

SEQ ID NO: 15029 - DNA, 322 bp, Homo sapiens
actcctcgcagtgctccttgtcttcagcccaggcatacccttctcttaaggaccagtccacccccatcttcaaggccttctccaagtatttggcattcattgggatgacaccttttgaccccaccccaacaggaatgtggtcaaacatagcttgggcaagttgctccttcacaggctggacatcactttcatctaaattggttcttagcaagcggacaccacagttgatgtcaaacccgacaccacctggggatactactgctttaggggcattcatatcaaaggctgccatgttcccaatagcaaacccatatcctgaatg

SEQ ID NO: 15030 - DNA, 334 bp, Homo sapiens
acccttgattatttccttgtgttgactctgagatgctgaccccaagctggctgccataggagttgattcccatcatgccactgtgcgctggggagctagagagggctggaagctggctgggattcctggggacgctgtagagagcttcagcaatgtctgcggctcgcttcaaaatgatgtcctggttattgtgtggtgtgccataaagagcttccactagatctgcagctcttttcaacagcatctccttagctagtctctcaggatctccaggatgcctagggatgaccttctgcagtctctggaagccatagtctatgggtggggttcattt

SEQ ID NO: 15031 - DNA, 281 bp, Homo sapiens
ggtaccattcttatctcagaatgctgtaaaccatcagtagaagcagtttagatttggactgcatggtaaaatgaaaagtaataaccctccaaccacaacctagtcagggtattaataattatatgtagcaagaaaacaaagaagaaaataatattgaaaaaatggagattccccaaccagtttcatatttgaaggatctgagttgtatttttattaaggaaatcttttttctgaatactgtcttccaaaatgttaacattaaaatctgaatcagaggactc

SEQ ID NO: 15032 - DNA, 418 bp, Homo sapiens
ccctttggccgcccgggcaggtacgatcttggctcactgcaacctctccctcccgggttcaagtgattctcgtgcctcagccacttgagtagctgggattacaggcgcgtgccactgcgtccggctaatttttgtatttttagtaagagatggggttttcaccatgattggccaggcctgaatctcaaactccctgacctcaatgtggttccactcccaccttgggccctccaaaaagtgcctggggaatttaccaggttgttgaaggccacccgccgcttcaggccttacaaagacaaattttttttaaaaaaaccgaacaaccttatatacctgaataaaaaattcctgctggtttaaaaaattccctaattttactattttttaaaaggaataaggtatttaagttatttttttt

SEQ ID NO: 15033 - DNA, 363 bp, Homo sapiens
acctcttattccagagaagtggggagcagagaggaagatggagtggaaaggggcgaggcaaggccctcctgaaatacctcaacccaaatcttcaagaaatccccaagtcctcacagtgctttttgtggatttttgtggaaaccggtaaaaggggctgatttgctgaccccagtgggtagaaaacagagactgtcaagagaacagaatagaaggcagaaaggggatggggaagttgggattccttcactttacatttccttctggttctccaaagttctcttctccttacccaacttcttctttctacttcttcgcttattttatttttatttttcaatttctcttctttcttttcttcccctc

SEQ ID NO: 15034 - DNA, 310 bp, Homo sapiens
ggtacacttatggtcctagttactcaggagacttaggcaggaggattgcttgatcctaggaattcgaggctgcagtgagctatgattgcacctctgcacccaagcctgggcgacacagcgagaccctctctcttaaaaaaaaaaatagcagagctcaccaaagtgatgttcacctttttatgacattcctttttcttagcttaagaaaagaaagctgctagatgagagtcttagttttcctgcataagacctcctttatgaatagaataaaagactgtcaaagtaggctgggcttgggcccaggctaata

SEQ ID NO: 15035 - DNA, 754 bp, Homo sapiens
ggtacagagaggggctcgctgcgctgggtagaggaagcaggaagtttgctgaactcagacggaagaaaaaggattccttggagaatcccagcaggtttctgattggacatgggtccatgtccttgcgaagtctcctcctcctgaacctgccctgctctgagactggcttttgaccaccagcatgctgcagacgtgatgccgtgtgacttctgagcgggtcataagaagccttgcagtgtggcctgtgtcttcacgaatgcttgcatgaggaaaaccactgtcatgtaagaagtatggctaccctgagactgtcatggtgtgaggactcctaaatgagtcacatgtggatggccacctattcaggcctcaattcttccacccattgcgactgtggcccacgcatgtgggggaagaggccattcttcacgcccatcccaagcgagtcttttgatgatccctttctgggcctacagctgacatgtaccagacatcaggcaggaaccacctatgaactggacccagtctatcaacaggcctgggaggatgatagtccctcgctgattgaggcactgcatttgggatggtctggtggttactacctaatgagaacaagactcattcctttttccgaaaaaaataaaaaagaaaaagtccttgcccggccggctgttaaaaaggccaattcaacccattttgcggcgttacttgtgggatccggctccgaaccaaccttaggcgaattattggcatagtt

SEQ ID NO: 15036 - DNA, 315 bp, Homo sapiens
acagaggaggagggcgccaaagctgagagaggcaacccctcaaatattaaaaaggaagaaatggcgtgataggctagcacattttatggaaagccatgttttaattaaatgttttccctacaaatgttctctgtatcaaggaacctggcacatagggaatgcatgaaacctgatttataatcagattcagtctacttaagtaataacctatatctagatgatagattgtcaactgtgctactttagccatcatcacatacccagcgtttctatccttagtgacacagctgggccagaggcaaggcctgcattcat

SEQ ID NO: 15037 - DNA, 408 bp, Homo sapiens
  misc_feature 1, 190: n = A,T,C or G
ngattatgtaaataccgaactccacttatgagggggcggaatttgggggccccttcttagataggctatggcttccgaagccggggcccgcccagttggttgatagggatattttctggcgaggaattttccccccctttaacccgtgggtcccccgggccccgaaggaacccttttttttttttttttntttttttttgttttttcttttttaaaatttcttgctttttttttttgctcttttctcttctgtttcttatttttttttttgttttattttaattatttttgtttctttttattatggagggataaaaaagagggttttttgctccccctttttattatatataaatattggtgtttacaacaataaatattataacgaacggggagggggtgctccta

SEQ ID NO: 15038 - DNA, 774 bp, Homo sapiens
cccttgcggccgcccgggcagctacagaatttccttttatattattcctctaccctccacctgtaaatgaatgttagtgcagtaattgtttgaaataatgcctcatccagtgttaggtcagtagctccacagtctacacagtccagaattctttctctaattgtcccaaagggggacattgtggaggcagggttagggggaaccacttcaagtggttagggacagataaataataggcagtatagcacatgaaagaaaacacacacttggaagccaggagacttgtgtcctagtcaaaactctggcattatgtgaccttggacaggtcatctaactactctgaaatttatcatcagtcaaataagattttattctgttttgttttgtttgagatggggatttgctcttgttgtccaggccgaactgcaatgttgtggtctcggctgactgcaacctccacctcccagattcaagcgattctcctgtctcagccttcacagaagctgggatttttttttattttttttggatttttagtagagatggggttttaccatgttgcccaagccggtcttgaattcctgtcctcaggtggatcatttgccttcgccttccaaagtgctatgattacagcgtgagccactgaacccaacccaaatgagattgttctaaaacttaaagttcttttgcttttgcaattctgggaaactaattgaaatttttcaaggaaaggattttttatttgttaagagatgttttattttattaatccca

SEQ ID NO: 15039 - DNA, 345 bp, Homo sapiens
ccctttccagcggccgcccgggcaggcactaaatgttaggcttcttgaacccagcatgtttttttctctcttcttatcagcagaacacacgttgctctctttacttggaacgccgcctctgacagatggtcacctcaccatcactcattcatccttcaagtcttcgatacaattgcttccaagaaaacttacctgattatttgagcttgagatagcactctctggaaagccctagaatttttatagcttgcggtaattgcttactgaaatctccagtgggctggaaaattagggaaggtattttcatgtgtctattgtttaattttttcattaccacagctagca

SEQ ID NO: 15040 - DNA, 227 bp, Homo sapiens
acagaggcttaggggaagtgagacataagcttgtaggaataataaacgttctacaataaacgttttggctatcttaagccattgtatgggggggattaggaagtaggagggattgtcctacaacaggcccttatacttcaacagcccaaatattttggtttattcctttttatccataaagtctttattcttcaagtttgggtattatagattaccattgttagcct

SEQ ID NO: 15041 - DNA, 459 bp, Homo sapiens
  misc_feature 165: n = A,T,C or G
cccttagcggggcgcgggccaagtacaaggctaagcattttaactttatactggaaaaaaaatcataacataaggtggaggggatataaggtactataagtcagttctttggcaactgtgtaaaaaacaaaaatatagtggtaaatctataaacttcccaatagncatgcaatcgtacacaatttagaatatctttccctaggcttaaaaaaaaataaagttgtaatacctgtgaataatttaatggaaatgaacaatttctgacggtgcttagaggaaatggtgcactaaatagtagtggaaaatgaaattttcaagtaatgggggcaaaagaaccacttggagggaacgaagtgtttggaattaggataaatttcactttccgtgaaatgaattcatggcctgtagtggctaggtaaagggtattaaaccccatgggaaaagaattccttggaggag

SEQ ID NO: 15042 - DNA, 340 bp, Homo sapiens
ggtacaatataaaccataattgtgatttaccttaagtaggtataactcttatgggatatacagtatagtttttgtgaatctttacatgatagcattatctttttataattttttttcctaagataaacaaatgcatagttttcttctatgggtgatagaaacagctttttgaagtaatgaaaacctcaaaagatcatgttgattcttaatttttgccttttgcataagcctctttataacatgtatctttaaaacaattaagtccttaggaatgtgtaaccagaactatgttagtattgcttataaaactttagttaggttcaatatatacatatataca

SEQ ID NO: 15043 - DNA, 276 bp, Homo sapiens
ggtacctgtatgaggcccctggcaacttcacacgacctaactgaactctctcaagccatcctttcaaaaggaatgaaaattgaggtctcttgttttatgctgaagactctacgatgcctgcagagtcaggaactctggaatcttaggtgtcctccttacatatccatctccatcacccttggctgaacatgctgagaaagaatgacccggcatgcatgcagagaagagtcactactttctgtgttcaaacatgttcgggccctgtgtacctgcccg

SEQ ID NO: 15044 - DNA, 345 bp, Homo sapiens
ggtacttttttttttttttttttttttttttttttaataatcacagtaagttcattcgtatttgtcaaaactaggaacgctcaagaagttctgtaggtgagtagattaaacagccggcagtaaattcatagaataatattcagtaattataaacaagagctatcaaaccataaaaatacataaatgaattttaaatgcatattgttaagtgaaagaaacaagtctgaaaaagctacataatatgttatttatttgatattctggagaagtccaaacacacaaagtgattctgtattcgcgagaaatttaaggagatgatgaaaatgggtaaaaaatagatttaag

SEQ ID NO: 15045 - DNA, 319 bp, Homo sapiens
ggtactctacggtgtcaataattatttcagtctctgctgcaattagtgctaattacaatacctgagctataaaaataaaagatttcattatagcaaagtcacaatatcgttttagttcagttatccacattgttcatctaaaataatacattttctttacatataactgtcttagacttgtaattgaggatatttgatgaaacagatctgtatctgaaacagcactatgatgctaaacgtttgcataaggaatgaaaaaagttagcaacctagttttttcaatattcagatatttgagattacacagaaaactacatcc

SEQ ID NO: 15046 - DNA, 292 bp, Homo sapiens
ggtaccattcttatctcagaatgctgtaaaccatcagtagaagcagtttagatttggactgcatggtaaaatgaaaagtaataaccctccaaccacaacctagtcagggtattaataattatatatagcaagaaaacaaagaagaaaataatattgaaaaaatggagattccccaaccagtttcatatttgaaggatctgagttgtatttttattaaggaaattttttttctgaatactgtcttccaaaatgttaacattaaaatctgaatcagaggactctgaatggaaaa

SEQ ID NO: 15047 - DNA, 330 bp, Homo sapiens
ggtacagaagacgctgcatccctcggaggaggaggtgaaccagctgcaccagcgttatatcaaagagctgtgcaacctcttcgaggcccacaaacttaagttcaacatccctgctgaccagcacttggagttctgctgagtccaaagggcagggccaacattagggagcccagcaggaggtgctgtgctgagaagacttcctggaggtgtttgttgaacatatctgcagagccttcccagactcctgcaaatccaacccatatcaggctgtaagtcagagcaggcaatgcagaagaggagaccagaccaaggggtcagctggggctagga

SEQ ID NO: 15048 - DNA, 275 bp, Homo sapiens
acggggggagagtgttttgagaaagaagtggtgggacgtcactgtctgtggaaaatttcaaggaaaactgaaggatcattgagatgaacagtgtggcagaattgagaactcttgatgtttcagtgagctttaatggaggaaaatctgtcatttcaggatcattaattgtcacagccacagaatgttctaacgggatcgcagccatcattgttattttggtgttactgctactcctgaggatcggtttgatgtggcggttttggcccctttgctgc

SEQ ID NO: 15049 - DNA, 340 bp, Homo sapiens
ggtactccagcctgggcgacagaccttgccttttcaaaaaaaaaagaaagaaagaaagaaaagaaaagtatttggacacatttctcccaatatgtccaaattttccaaagcaattatatcaagggtattggctccttggttaagaactgggctttattttcacacactccctgaaatgacacagccagagatcaggtaggacccagagagaacaaagttacaaaccctgtgtccaaacagcatcctaaaatgaaatactcctggatggaacccttggaaaactcagtgttgaccatattcccagttacccataaaaacttatcaagttgtggtttagaaa

SEQ ID NO: 15050 - DNA, 268 bp, Homo sapiens
acaaccagaaccaacaattgtatttctctatagttattttaaaatagtaatcaatgctatgtatttgatgtatatgtttctaaattagaaatttcttttggctttgtgtttttttaatgtgcgttaaatatgtaaactgaacctgttcctaaaatgcattaaacttgaatgctgcgtctatccaatgccaaaatgctcagaagaaaagtgaataattcagtcattcatctggatgtagttttctgtgtaatctcaaatatctgaatat

SEQ ID NO: 15051 - DNA, 305 bp, Homo sapiens
ggtactttctattttttttttttttttttgagatggagtcttgctcagtcgcccaggctggagtgctaacctctcctttcatgtggagatggacagggatggcaggagcactgagtgctcttgacaacaccattgaagatgatgctgacgatcagctaccctgtggagaaggcaggccaggctgggtgagaggggagctccttggaagtcagggggtctgtaaggacagcaaggatctctttgtcccaacctccagcagcctttatgggtgcttctgtgttggccttgtttctgggatggccatt

SEQ ID NO: 15052 - DNA, 348 bp, Homo sapiens
  misc_feature 311, 312: n = A,T,C or G
ccctttgagcggccgcccgggcaggtactcttaaaaatctgttaagagagtggatctcattttaagggttcttaccacaataaaattaaatttttgaaataaatcagtcatatttgagtgaaatgaaacctttccgagtagtttcagacaattgataatacctagtttacagttcctgtagtcattttggagggtgaggacttgatgtgtttagtaaagttgagaaataaatacatgaaagaatgtgtggggaagagaaagtgtgggggaagagaaattgtctcagaggaccattcttagtggcactgggnngaaatcttggcacccagaagaattcaactgcgctca

SEQ ID NO: 15053 - DNA, 271 bp, Homo sapiens
cccttagcgtgggtcgcggccgaggtacaaagtccaggccccggcacggtggctcacacctataaatcccaacaccctgggaggcccaaggcgggtgggatcaaccccggaagggtccaagtgtccagggggaaaagtttggaaaccagcctggccaaaatgggaaaaacccctgtcttcccttaaaaaataaaaaaaaaatatagccgggtttggggggcaaggtgcccttttaatcccaagcttctttagagagggcttagggagaaaa

SEQ ID NO: 15054 - DNA, 327 bp, Homo sapiens
ggtacacctttcaaaggactttgtgcccgtggtatatcatgatcttacctgttgtttgactatgaaaaagaaatttgatgctgatccagttgaattatttgaaattccagtaaaagaattaacatttgaccaactccagttgttaaagctcactcatgtgactgcactgaaatctaaggatcggaaagaatctgtggttcaggaggaaaattccttttcagaaaatcagccatttccttctcttaagatggttttagagtctttgccagaagatgtagggtttaacattgaaataaaatggatctgccagcaaagggatggaatgtg

SEQ ID NO: 15055 - DNA, 284 bp, Homo sapiens
accccctaaaatttacaaaaatttaaaaaatttcatttgtgcttactgtctttactgaaatgttaaatatttactcatgagttgattactctgtgcacgtgagattgtcttttgtagttataaagaagggatgcttagaagtagtatcagtgttctttcttattcctatccctcccaaatctcacaccagaaaatgctggaattttttggaaggaaatagagaagagtggaattaggtttagggatggtagtcctaggaggaggggagtaatggaagttataga

SEQ ID NO: 15056 - DNA, 228 bp, Homo sapiens
ccctttcgagcggcccgcccggggcaagggttaccacaacatagtggctgtcattcctcaaatggcaaaacagcccctgttgaagaataactttattggcatgaaatagaattaaatctttgattttaatttcaaaagccgatctggggctgaaattttttggaaccctatttttttaaaaaaaagtttttcccttaagggttttggatcccaaaaaaaatggtttga

SEQ ID NO: 15057 - DNA, 325 bp, Homo sapiens
ggtacccgaaaagaaaggaagctttagtaatgaaaggattgctgccaaaatcctgtttcccccttgcagatcttacagaaaacagccacagaatcccaaggcatcagcaccaagagagcctgtagaaactatctggtctaagctcctgaagcccagagataagaatgacttaacccaagctgcacagcctcttaacagtccactgttaaccccagaaacagatgcatttgaatctgaaaggagacaggaatcctaatcctactgctcagggacttgctgatttactttgctgtccattagcctttctgtgacatgattttctacc

SEQ ID NO: 15058 - DNA, 349 bp, Homo sapiens
  misc_feature 334: n = A,T,C or G
actaagttaaaataaggtcttgggcaaattaaactctgggttttagtttccttatcaggtaaaatgatgctagtaggagctaaagattactttgaaggttctgtgggaattaaggtaacatgcttaatataataagggttcagtaaatgttacctattgtttgctgttaatcagataagcagaatacattctatgtgacctacctttctttataggtgaaatgtgggaacgttaggaatttctttaccacaaagtccctcttcatatgccagtcactaagttgtaggaatttaaaggtgtttttgggataattgtctatactgagaaggttcangattctaaaaagtaa

SEQ ID NO: 15059 - DNA, 293 bp, Homo sapiens
ggtactttcatcagacccctgttttgtgatatatattacctgctttcatatttgtattttagaactcactcttcattccctattccactacccaacttcataccaaaaatcctgccaagtatttcagaaaacttggttattaacttggattaattacagtagacatacataggagatgtgtctatagaatgccaaaatatttaattgtgtcagaaatttagtcattcatccaaatattttgtccatatgatgccaaacatacttaatgaattatgttagctgacaaaattctt

SEQ ID NO: 15060 - DNA, 721 bp, Homo sapiens
ggtacccgaaaagaaaggaagtctttagtaatgaaaggattgctgccaaaatcctgtttcccccttgcagatcttacagaaaacagccacagaatcccaaggcatcagcaccaagagagcctgtagaaactatctggtctaagctcctgaagcccagagataagaatgacttaacccaagctgcacagcctcttaacagtccactgttaaccccagaaacagatgcatttgaatctgaaaggagacaggaatcctaatcctactgctcagggacttgctgatttactttgctgtctattagcctttctgtgacatgattttctaccaagcaaagtcttttattcaagtctcccagagatttcctatttaagcgtttgctatttggccacttaaaaaagacagaagagaagtaaacagaagcatataccacacaactcagtccagtcagtagttgactctcaagatggcggatgtcactgggatggctgagaaataggaacggatgtggagaaaggaatggcaatggagttagctgttttgtctacctgctggatacctgggaagccagactctgcgtggacagtgaaccctaatcataggaaactttgcctgtgcttgcatcaatggtcatggaaaactgtttcttaccttgaaaaatccctcttcttcgttccttaagtacctggcccggccggccgttaaagggcaaattccagccact

SEQ ID NO: 15061 - DNA, 321 bp, Homo sapiens
acttacatgattgaggttgactatatgaggtattgttagtctgttagtctttcaaattgacttttaaaaatacatatctttatgattttcatcataaagactggcaatattataactaaaaatcttactataatgaaagaaatcatacataaaaatgtagcctgccttacatataagctaatgtagaaaagtttagacttataaaaaggcagatagtatatatatatttatatacatgtatgtatatggtatattatacatttggtggcagaaaaagaagatactgcattttcacattgaaaagaatactttgatttttgc

SEQ ID NO: 15062 - DNA, 256 bp, Homo sapiens
  misc_feature 256: n = A,T,C or G
acaaagaaaaatttgaacgttgcggcttaaaattcagttaagagaattaaaaagcaagtcataaatgccacatttttcctcaataaaaagttttgactactgtgtttatctgttgtcttgagtaacttattcatgaagctctcctattcttccccaagaccatttcgaagaaagaaaatacaggttggtcttgctttgtaagcaagaaaaaaaaaaatattgtatattttttttggccctaggaagctgcttagtn

SEQ ID NO: 15063 - DNA, 322 bp, Homo sapiens
actaggagggtattgatgtttgaggtccaaactgaaaacccatcacctccttcccactgctatagcagcgttagccctggggttcattatctagccagttcacaccttctaaagtggggctctgaaaatgtcttacttccctcacagacaaagcaattctcaagcctcctgagatcacccaccaaccagagcaactgctgtcacttggaggtgcagctgaattcttctaattgtgacacaaactcttgaaactgtaaatgctgaaagattaaatgaggttataacactcagaaggttttataagtaaaagtaggtcaaatca

SEQ ID NO: 15064 - DNA, 324 bp, Homo sapiens
acaaatatgcttcataacaaattacaaacacttgaaatatactgggattgtgtttattctctgtttagttagatagctgtattgaagtctctgtaaatgaaaaatttacccctatccctcaacatgtaggttgagaacagaaatattaatgggtgtgatttattaattcctgagggctattagcccatcaatagactacttcaaataaccattagtctcaatagtattgattaattccccaaatacatttaaagcaatagtatatgaagtgcccttaagtgagcctcacgtttactcattctacagataagaaaccaaggtacc

SEQ ID NO: 15065 - DNA, 296 bp, Homo sapiens
ccctttgagcggccgcccgggcaggtacaacaaaccaataatgataaaaaatacttctctttttctccctgtttccctttttcccttggccacagccaaatgctaattgctgctttaattacagagatgtgtaaatgtattcagattacaaactctacaggaatacatcaacattttaactcttttgcgtttttactgtttaactgttttaaatgcaagttattttagggtgacactccttccagttctggccagatcatgagtttcaagatcaagagtaaaaagttattagaatt

SEQ ID NO: 15066 - DNA, 613 bp, Homo sapiens
acagtatacaagtttttccaagaaatcctaaccctgggggctcaggcgaatgaggagggtcaaatgctgagggtgggagaaagcagatctagacagcattctggaattgttgctttgccattatttgcccagaaaacatttatggcaaggaagcctgaaaacatggcaatggttgtaagatgggttgcgatacaactggtgatgtgagaagtgaaaatgaaactgactcctttagggaggacattggtttatagtaaacaggtttgcctcatcagaaatgaatatggatattgctacacaataaaaagaggaaaaacaccaacaacagtaacaatggtaatcacaataatgataatgactctgtaggtatagaacctccagttttttgtgttctgaaggttatttcagagtttcttgcaagagagaaaacaaatcagaaaaaaaggggaagagagaagatgggaaaataatttatgtatgggtatacaaaagtagatataggcagtcagagaaaaacagatacagaccgaaaaggaaaagaaacttagaggagatattaaaatgctactgggaaattgctctgtggccttagtacctcggccgcgaccacgct

SEQ ID NO: 15067 - DNA, 330 bp, Homo sapiens
ggtacttgaaacttgaaagcgtctcttaataacacagcacagcaattaacagctcgcaaacttttgttttatacacaccgtgtcacgacttccagaaaccttccggattggagtccagtccttgcgtttgtttggtcgttcgtcctctttccaggcaggagagtgtcacctccgcgttttctcccttgtgtagtcggaatccatctattgcagggtgccggtggagtctgcagtgtgttctttcctgagcagattactttctccctttagactgctgcggcttgcagactaaaacaacccgttgatttgcttgacttccaggtctaaaat

SEQ ID NO: 15068 - DNA, 700 bp, Homo sapiens
acaagatgagacagaattagaggatgaaaatcaagaaggcatgactgtgcacagttctgttcacagcaataacctcaactctatgccaactgctgaaaagggtaaagacacattaaaatcagcttatgatgatacagaaaatgacctaaaaggagcagctattcatatctcaaaagggatgctccacgaagaaaagcctggagagcagattttggaaggtggctcagagagtgaatctgcacagaaagctgcagggaatcaaatgaatgacagaaagattcaacaggaatccctgggtagtgtaccactcatgggagatgaccaccctaacgcatccagagacagtgtggagggagacgctttggtaaatggggccaaactgcacacgctttcagtggagcatcaacgtgaggaattgaaagaggaataagttcttaaaactcaaaaccaacctagattctcctctccagatgagatggattgccccagaaactggaagacgaggtcccattctgggaagaaatctttcctgcaacaagaaaagatgtggttgcccaaccagtaagcaaatgagttggaagataaggttcttgagggagaagccaaaaggacttcctggatgaagagtttttcataccaagcaatgcagggcacaagggttggcggacagacccaactgccgtaccagaggaccgctttt

SEQ ID NO: 15069 - DNA, 494 bp, Homo sapiens
atctttgccgtggtcgcggtcgacgtactcaaaaactcacccagcctcaacttgaaaatgattcatatgccaaggaaaaaccattcaaatccattccgaaatttcctgtcaactttttaagttcaagaacagactctattaaaaatacttccctaattgaatcagctgctgcattctcttcccaaccatcacgaaaatgcttgctggagaaaattgatgttataacaggggaggaaacagaacataatgtgttaaagataaactgcaagcttttcatattcaacaaaacaacacaatcctggattgaaaggggcagaggaacgttgagactgaatgacacagcaagcactgactgtggaacattacagtcaagactaattatgcgcaatcaaagcagtctaaggctgatccttaacagcaaactcttggcccaaatgaagaattcaaaggagcaaccacaaaaatgtacctgccccgggcgggccctcgaaagg

SEQ ID NO: 15070 - DNA, 336 bp, Homo sapiens
actcatttaattagggttgcagaggagatggaaaaacaagctgtttgattatgaaggcaacacttctgtcagtagaattgctttggattgtaaatatgtttacttcagaggaaatcagtcagagtggatggctcagcaaaacccatcacaactgcggaaaaaggaagtgactggctagaggtaaggaaatagattttctctaagttaactggcctacgtgtgaatcgaaccctgcaccctggcctcattagcaccaacactgtgaagaacagctgtggcagagaaagtgccacggccccaccccatcaccagattcagtagaaaggcccttggaat

SEQ ID NO: 15071 - DNA, 344 bp, Homo sapiens
ggtactaaaattccttggttcactgattcgaagaagaacatcagcaagaacatcagctcggatgggcccttagagagcaacaatagatttgaaataagggacaagccaggaggttgccggggggcgggtagggggatagttgcaaaaatgttctgaactttaaaataacggtcccttgcaaacagaagttttttctccaaagtgtctctcctccagatctcccatctaccatttccaccctgcatgtgaatctcactttttaagggagttggcttgggttcaggtttacgacacctttaaaaagcttttggttaataaaggcctttcaaaaaaaccttttctgc

SEQ ID NO: 15072 - DNA, 330 bp, Homo sapiens
ggtactcaatggtggcatatttatagtattatcccccaaatttttcctatctacaaaagtttttaaaatctttgaagccacattatttgaagacttaacaggaacaagagatggcgtaaaaggctgtagattatcttggaaaatccatttcactggagcagcttgagaatgctgaccacctttcaattgtgtctctgtagcaacattctttggaatttgtgtggtatttaagtattactggctttgctatttctgtaacaggtttttgggtaaaatgtttttgaaaagttcttggtaactacatttttcacttggatttacaggagaaac

SEQ ID NO: 15073 - DNA, 259 bp, Homo sapiens
actggaacatttgtagctgaaggaaaatctccaaaaaagatttcaaagagactaaagtaggaatgggtgctggagaatgagcaagaagggtgagagtcccacgggtgaagggagaaagcagcagagaatgaatataagcccggagaatgaacataaatgtgaggggaagaggccagaggccaacactggaaggacagtgagggccaagaaaggaactactaatgtttctgagacctgcagggaaccatggtattaagct

SEQ ID NO: 15074 - DNA, 728 bp, Homo sapiens
ggtacagtgaaaagagccaaggctgtgtgaccccctcatcacttagccaggcgtatggtcctggtttctgaggctgcagaaagcatcttagcaatttgtgtttggatggtccatgcctgactattctaggctggaggttcctaaagagtaacaagaggaagagaaacaagaatctctgacacttgttgagaatagagcacagtcccatttgtttgaaaagagacaccaggtagccatgtttatgtgccagaaatgcattccacctcaaggaggacttaatttatggacccgtgtgtgccaggctgagctgggcaagatctttctcaggacaaactctgccatgcagctaaaagcctggaaactaaaggatttcatgtagtaaactatcttccaacccctgtaggcatcagaccacaggatgaggtttcagaaggtcataaggcagaatagttaagcctacagggcttacagtctgacagacctgggttcagttcttgggtcttcatcactagttttgtgacttcgggaagatgactccccgagccttagtgagcctcagttacttcatatgtaaatgaagtaatactacctacttcacgaggctgttgaaaggattaaatggagaatgggtgtaaaacccttagtgccatgccgggcacaccaccaagatgcccaaacgttgatgttggcactacacaatgtgttattccaatacagcagagctaggt

SEQ ID NO: 15075 - DNA, 401 bp, Homo sapiens
acaagaagagaggatggagacgagggtaggcttcttttcagattatacattctggatcagaaagtctatatcagtgggattttctgaatgacccaggttttttttgtttgtttttgtttgtttgtttgtttgatttagaatttcctgggtctagttatttttaatgtatttattttatgagattctagtttgacatttgatctattacttacatttattttttagttgttcatttgtatctcaattattctctctttataatagtgtacgtttctatatatcttactttgtatataattattatattctattttatagtttgtgtatattattcaccgtttttgatactttacatcgtctaatcacacattattactctttttttatattcctctcctttc

SEQ ID NO: 15076 - DNA, 298 bp, Homo sapiens
acacagtgaaaaggtatttggctgtgtttctatttacattcactgtccttgataaatactaattggccagtgattgtaagtctcaagaatttttgctgcagagcgtgtggtaaaactcattttaagtggtgtaggagtcatgcagtgtttatcacttaagtgggtaatctgacagctgtattttactgcctgactgcagctttattcttgatcattctcttccttgagtagtgtgttatggtcatgttgtcttagctgcaattaattcccaacctttttttgttttccagtctttgtc

SEQ ID NO: 15077 - DNA, 318 bp, Homo sapiens
ggtaccattcctatgatggtagccattcttctctttataaaatatttcctctttgaaaagcgtcctaaaacattaatttcaaatcccctcttggatgcaaagtgtccctaagaccgtccattcaacagtatttatgtgagccaacttactagagccgctacaactaatcatgatagacagtccagaatctccctggactttatactgggccagcctcattgtccctaagatttctctttttatgtctcacggattacttctctttttaattgccccaggcacattccaaatgagaacctggtaaaagtcacattggac

SEQ ID NO: 15078 - DNA, 248 bp, Homo sapiens
  misc_feature 9, 58, 85, 86, 87, 88, 97, 98, 113, 238, 244, 245: n = A,T,C or G
ggtttattnccttggcagattcgcccttttgaagccggcgcccgggcaggtaactttntttttttttttttttttttttttgggnnnnggggggggnnaaaaaaaaaaaaaanctttaaggtttttttttttaaaatttgggttttttttttaaatttaattttttttcttttggggggttttttttataattttccctaaaaaaggggttttttttgggaaaaaaaaattttttttntttttnnaat

SEQ ID NO: 15079 - DNA, 344 bp, Homo sapiens
  misc_feature 161: n = A,T,C or G
acctgcaatatatttggagtattatgtctttattgttgttaaaaagtttttattgaatgtatgaaaattatcaaattgtattcatcaattattaacatgtcctggggaaggaagggaaactttctaggacagaagtcactttcagatgtcatgtatgtatntgggtgttcaatcatatctaacactgttttgatttttgtgggaaaatattccaggaaacgctaattctctttagactccttgttcttttatgactacaatgaacatatgtctatgtgatagctaaagatatttttgaattgtattgtgtgcttaattatcgggtaagtataaatatttgagaa

SEQ ID NO: 15080 - DNA, 318 bp, Homo sapiens
acttctatgatatagttgtcaaaatcaactggaggataataaaatattgtgggttctcagcattcttagaatccaaattacaaccatatcagtacgggtttggtccacatgagccaactgaagtcattttcctcaaggttggaatttgtgccaacctaaatacgttgtttctttgatggtgtttattgctattggtattattttgaactaataacaattattttgtctaaataatgctaagacaattctgttaagaattttgtcagctaacataattcattaagtatgtttggcatcatatggacaaaatatttggat

SEQ ID NO: 15081 - DNA, 307 bp, Homo sapiens
  misc_feature 253: n = A,T,C or G
actaggttgagaagtttctaatgtgaaaaatcttgttcatctgttcatgcaacagacatttattaggcatctgtagaccatataattgagacagagaaacattttggagaattagaagctcacactatttatggcataggttatataattatgataatttatgatttactttcttgacaaaaacagctacaaccatgtatacctactatttctcctacaaagtaggtgagattttttgattttacattagttnggagggtttttgattttggttttgctttaagataggcattgactatagcttctg

SEQ ID NO: 15082 - DNA, 369 bp, Homo sapiens
acacagtcattgtgatcttagttatcatttctaagtaattaaatttgtatttttacttgcttatattagaaatgcttattaccaatgagaaacagaaaatgccacataagtgaacatttaaatgttacaaaaatttataatatatgtaacgctactaaaatatataatgaacttttcaaacatgtaaatataaatcaggaaaacctgatatgtaataattgggccaaaaatgaaaatcacaaaacacagtaggggggtaaaagaattaaatttgaattttaattattaagtcccttttttaaccaaattttattttgaaaaaaaaatttttttggactttaaaaaaaaaaatttttttacccgaaaaaa

SEQ ID NO: 15083 - DNA, 480 bp, Homo sapiens
ggtaccaaatatgttactacaaagcaactgttcaagtgtgctaaaaacaggtgtcttctcccttttcagagctcccctagtcatttgcaatatattttgcctacttctctaaaaatcaaaataggtcctaataagtaagatacaggtcttcaatcccaacagcaactaagggattttcctgaataaaaaaaaacaaaaacaaaaacaaaaaaaactctgctgccagtttgcagacagagtgccgtgtttcaccccaacctatggaggctaaatcacagtcaaaaacaaactgcgtgactgggaattatagtaagaggagttaaaaacaagggcaggtgcagtggctcacgctcgtaatcccagcactttgggaggccgaggcaggtagatcacctgagttagggtgttggagacagcctggccaacacggaaaaaccccgtctttactaaaaaatcaaaattaatggggtgtggtggtgt

SEQ ID NO: 15084 - DNA, 334 bp, Homo sapiens
acactcttcttcttttatttatttatttatttatttttaggccattcttctggtttgccaaattctattaagacagtgatacatttgcttccttatttatgcatgcttagatcatgaacatgatgcccttcttttttttttttctttggtcaagtagggattaatgccataggtttagagagaaggattgttttcagtttttaagagaattttttaaaaatacattttatggttctcttaaggaattaatattcacttctgaaggacttacttgtaatatataatttatcattttagccagcagggaaataaatcatttttaatccccagaaga

SEQ ID NO: 15085 - DNA, 342 bp, Homo sapiens
acataggaatgcatctttgtttgcacgtgtgtgtgttgaggaaacaggaggaatattcatctttttgttgtttggattttggcccagtcccttatgttaaggactgactgattcctctgacagaattcagaccaagtcattaaactttgttgcttatggaaagtaatcttagtatctgttggcctttatttaaaaaaataattttttaaaataagcatgaacaatattcattatcccattataaccttattattaggtgagtcagatcagtctctaagtagtgagtatgaagcaccttaaattcttcctaaaaacaagattaaatttaaatatacaaacaat

SEQ ID NO: 15086 - DNA, 591 bp, Homo sapiens
acccgaaaagaaaggaagctttagtaatgaaaggattgctgccaaaatcctgtttcccccttgcagatcttacagaaaacagccacagaatcccaaggcatcagcaccgagagagcctgtagaaactatctggtctaagctcctgaagcccagagataagaatgacttaacccaagctgcacagcctcttaacagtccactgttaaccccagaaacagatgcatttgaatctgaaaggagacaggaatcctaatcctactgctcagggacttgctgatttactttgctgtctattagcctttctgtgacatgattttctaccaagcaaagtcttttattcaagtctcccagagatttcctatttaagcgtttgctatttggccacttaaaaaagacagaagagaagtaaacagaagcatataccacacaactcagtccagtcagtagttgactctcaagatggcggatgtcactgagatggctgagaaataggaacggatgtggaagaaggagtggcagtggaattagctgttttgtctacctgctggatacctgggaagccagactctgtgtggacagtgatccctagtc

SEQ ID NO: 15087 - DNA, 759 bp, Homo sapiens
  misc_feature 562, 568: n = A,T,C or G
actctagaaccaaagttaaagtgagtctcaatttctcacctgaataaaacttcatttttccacttttcttatcagtccttaaaaaacgatgagcagtctgccaaaactgatgttcagaaacttctggaattaggacagaaacaaagagaagaaatgaagtctcttcaggaggccctgcaaaatcagcttaaggagacatcagagaaagcagaaaaacaccaggctactattaattttttaaagactgaagttgaaagaaagagcaaaatgatccgagacctccagaatgagaataaaaacttgaaaaacaaactcttgtcaggaaacaagctctgtggcattcacgcagaagagtcaaaaaaaatccaagcccagctgaaggagcttcgttatgggaagaaggatttattatttaaggcgcagcagcttactgatctggaacaaaaattagctgtagccaaaaatgaactggagaaagcagctcttgacagggagtcacagatgaaagcaatgaaagagactgtgcagctctgcttgacaatctgttttcgtgatcaggctnctcccncttgagtttaatcacatcaaaatcaactcggatgttactcccacccaggaatattggctcttagcttccaaatgcaacgggccaaaacaagcctcaacaaaatgcttctgggaacaatgagagctttcaagttgagtccccaaaggaaggaaatccagtccttgggccgaccacgcttaagggcaattcaa

SEQ ID NO: 15088 - DNA, 335 bp, Homo sapiens
ggtacaaccagaaccaacaattgtatttttctatagttattataaaatagtaatcaatgctatgtatttgatgtatatgtgtctaaatgagaaataacttttggctttgagtctttttaatgtgcgttaaatatgtaaactgaacctgttcctaaaatgcattaaacttgaatgctgtgtctatccaatgccaaaatgctcagaagaaaagtgaataattcagtcattcatctggatgtagttttctgagtaatctcaaatatctgaatattgaaaaaactaggttgctaacttttttcattccttatgcaaatgtttagcatcataggggctga

SEQ ID NO: 15089 - DNA, 318 bp, Homo sapiens
acgcatcttcccattcgaccttgtcctccaggttcactcacgccaaggaggaggatgactcagatcaggttgaagtccctcgagaccaagagaatgatgtcggggataagcagtcggctgtgaagatgaagatgtttgggaagctcacccgagacacgtttgagtggcaccctgacaagcttctatgtaagagatttaatgtccctgacccttatccagattcaactttagttggcttaccaagagtgaagcgtgacaagtaccgtgcctgaattaattattaatatttaaaatacttcattccttaactctccctca

SEQ ID NO: 15090 - DNA, 333 bp, Homo sapiens
accattcttatctcagaatgctgtaaaccatcagtagaagcagtttagatttggactgcatggtaaaatgaaaagtaataaccctccaaccacaacctagtcagggtattaataattatatgtagcaagaaaacaaagaagaaaataatattgaaaaaatggagattccccaaccagtttcatatttgaaggatctgagttgtatttttattaaggaaattttttttctgaatactgtcttccaaaatgttaacattaaaatctgaatcagaggactctgaatggaaaagaagtttgatcactgacacctagggctctgaagcgtgtgtggcc

SEQ ID NO: 15091 - DNA, 335 bp, Homo sapiens
ccctttcgagggccgcccgggcaggtacaaccagaaccaacaattgtatttctctatagttattttaaaatagtaatcaatgctatgtatttgatgtatatgtttctaaattagaaatttcttttggctttgtgtttttttaatgtgcgttaaatatgtaaactgaacctgttcctaaaatgcattaaacttgaatgctgtgtctatccaatgccaaaatgctcagaagaaaagtgaataattcagtcattcatctggatgtagttttctgtgtaatctcaaatatctgaatattgaaaaaactaggttgctaacttttttcattccttatgcaa

SEQ ID NO: 15092 - DNA, 324 bp, Homo sapiens
acagtgaaaagagccaaggctgtgtgaccccctcatcacttagccaggcgtatggtcctggtttctgaggctgccagaaagcatcttagcaatttgtgtttggatggtccatgcctgactattctaggctggaggttcctaaagagtaacaagaggaagagaaacaagaatctctgacacttgttgagaatagagcacagtcccatttgtttgaaaagagacaccaggcagccatgtttatgtgccagaaatgcattccacctcaaggaggacttaatttatggacccgtgtgtgccaggctgagctgggcaagatctttctca

SEQ ID NO: 15093 - DNA, 770 bp, Homo sapiens
acagtgaaaagagccaaggctgtgtgaccccctcatcacttagccaggcgtatggtcctggtttctgaggctgccagaaagcatcttagcaatttgtgtttggatggtccatgcttgactattctaggctggaggttcctaaagagtaacaagaggaagagaaacaagaatctctgacacttgttgagaatagagcacagtcccatttgtttgaaaagagacaccaggcagccatgtttatgtgccagaaatgcattccacctcaaggaggacttaatttatggacccgtgtgtgccaggctgagctgggcaagatctttctcaggacaaactctgccatgcagctaaaagcctggaaactaaaggatttcatgtagtaaactatcttccaacccctgtagacatcagaccacaggatgaggtttcagaaggtcataaggcagaatagttaagcctacagggcttacagtctgacagacctgggttcagttcttgggtcttcatcactagttttgggacttcgggaagatgactcccggagccctaatgagcctcagttacttcatattgtaatgaaggtaatactatctactttaccaggcttgtggaaaggattaaaagggaaaatgggtgtaaaaacctttatggcatgcccggcacccaccttaaattccgaacgtttaagttgggacttcacaatgggtaattccattaagccgagctaggcggcaaatttaatcaagaattttttaggggactgaaaccaaaaa

SEQ ID NO: 15094 - DNA, 355 bp, Homo sapiens
acctatatcttcagtgtggaggtgaaggcagtattaacaatatcctatagttgactgaagagttggttacagcaaagctctccattgcccttaaattttctctctccttaatacagtaggatcaattttaagtgcattttatgtgtgcattttaaaactcttttttaaaaacagaatagaaatggttttcagagtgatgctgatattggttgatgatgccaaggcaccaatggagagcatattttttaaattgaatatgtttttattttcttgtttgttgatttttaaagtgaatccaaatgtgaagaggaaaaaaatcaaattctgccaatttgaaaagaacaaaaccagctat

SEQ ID NO: 15095 - DNA, 354 bp, Homo sapiens
cccttaacgtggtcgcggccgaggtaccattcttatctcagaatgctgtaaaccatcagtagaagcagtttagatttggactgcatggtaaaatgaaaagtaataaccctccaaccacaacctagtcagggtattaataattatatgtagcaagaaaacaaagaagaaaataatattgaaaaaatggagatttcccaaccatgttcatatttgaaggatctgagttgtatttctattaaggaaattttttttctgaatactgtctgccaaaaggtctacattaaaatcttgtttcatatgactcttaatttgaaaaataatttttatcacttgacacttagggtttttaagcgt

SEQ ID NO: 15096 - DNA, 801 bp, Homo sapiens
cccttagcgtggtcgctttcgaggtacctctttcagtttcccaattagttatttgttttagattaaacaatagtgtaatgcatcaattccttgggtaatttaccgattggaattcctagtgtcatccttgagacacaagcaaaaaactcaacaatattatccacgtgaaatgggacctctaaactgtcctgttttgttacagcctctaatgagctaaaatagtataagaatcttgaagattaagaatttctgtagtgctctacttgcctgaaatttggggtgctaagcattaaaaaaatgcaattttagtgtgttatacttgcggacattaaacactatgtgtaaaggttgagaatttctaccataaaatacatagatcctctggatgtaaatcttgtatatgacacaaactagatgttagacccttaaaaaagatgttcagaatctccatgtgtcaatctcttcattttagaagaatctataatccgaagaataaaacaatgtagggaaagtctttagaataatgaaatttactcgataagcattcaataaattttgctataataccgatggttataatgtcaacttgattggatgaaggaacaaaatatgaatctgaggggtctgtgagatgttctaaaggagaataacatttgataatgagctgggaaggcaacccacccttaattgggggcctatctaaataacggcaccttggtacattataaccgccaaaaaatttaaaagaaaacttgcctattttccagcgaaattttttcggtgccggaccttccggcctgg

SEQ ID NO: 15097 - DNA, 350 bp, Homo sapiens
cccttagcgtggtcccggcccaggtacaagagggtgcactaacaaaggtctgatttaagtgcttttattcaacccagtgaagggaaaatgacagtaatacatctaagccatgcataaaggattcaggcttccttgaaaaggattcacgtggcataaaatggtttgtttcttcacagcaatttacatttattaaaatagataataggcataatcattgtcaaaatagagcttctaccctgtataatatcttagtacattccccgcgtacataaaatatatttaactattgataatgtggggtgggtaatactggctgggaaataatgttagaagcttttcacttaaaaaaa

SEQ ID NO: 15098 - DNA, 319 bp, Homo sapiens
acagaaagttcagccagtcttcagagaagtaaaagtgatgtctattgtgcattgaagtaaatattacaaacattccagtttcgcaatacaatacttgagctttcgaacacctcagacactagaatgtgtaatgcgagtcaaaaaagctgacatacaaaacaattcccatttggctcagggttcctaaatgtcacaatatcttgggtaaaatatactttttgatttcctgatgatgtccttctaatcccttctgactttgattcctaacagccaggcactgttgacatgaatcattaacttccaaacccctttaaaatca

SEQ ID NO: 15099 - DNA, 359 bp, Homo sapiens
cccttttagcggccgcccgggcaggtacgttcttggagacacagcaatgcagaagatggccaagtcccatgttttcttaagtgggatgggtggtcttggtttggaaattgcaaagaatcttgttcttgcagggattaaggcagttacaattcatgatacagaaaaatgccaagcatgggatctaggaaccaacttcttttctcagtgaagatgatgttgttaataaagagaaacagggctggaagctgtacctcggctcgcgacccactctaaggggcgaatttcaagtacacttggcgggccgttaacttattggatttcgaagctcttgtactcaagctttgtgctttaatcatggg

SEQ ID NO: 15100 - DNA, 313 bp, Homo sapiens
acctggcactacagacatgcacaagcatgcatggctaattttaaaaaaatttttgtagaaatggagtcatgaactcctgggctcaagtgatcctcccacctcaacttcccagagtgttgagtgagattacagttatgagccaccatccctggccaataaaggtgtttttaatacctataagaatattgcctgcaaggatgtttgataggtttcttgatatttcattctctcttgaaatgtttgcttcgtcaattttttatttttcataaaagctttactcaagaattaggatgaccactatgttatctagtag

SEQ ID NO: 15101 - DNA, 716 bp, Homo sapiens
  misc_feature 652: n = A,T,C or G
actgccctccttatttcagcgctgtcattctgatcactctaggaccggttgagactttttcgtgatacagtttcctacctttttaggcaaccatctgtaagacaaggtagaatgctaccataaccatgattaacatttgcaaacactctgccacagtgcagccactttctttgcctccagctgaagaaattgaggtgcacagaggttaaatttgatgctcaaagcaatacaactagaaaatataggaggctgggctgcctgattgattcccagcttagagattgaaagtcacatgcgaagcgctttagcagatagagaagggggagtcatactccagcgtgcattttagtttgtgcttttctgtccttgaattaagaagtgtgacgtgtgcctccaacagcatagcatgctacagaaatggatttcttttcctggggttgataatctgctggccaaatctttatctctgtagtatcccgtgttttctggtgcattttagcatttggttaaattgtagggaaaagggtttgtgttctttatatctggattgtctattagatcacgtttttttggggttgtatttgcggctttttttttcttggaagaagtgattggctgtaacagtttcttttccactccgtcttttttccantggggcagtccccttggtgtgactgtcctggctgtggtccatctgagctagttttttataaatc

SEQ ID NO: 15102 - DNA, 303 bp, Homo sapiens
ggtactagatatccaaatgaacctgggagaattacatgttagatagcatttgagttaaaccagaccaatttatatgggacaatttactagttgacaacaaaatatttctgactgtgggtattcaattcaatgaggttattgcttaaggatcataattggtctggaatctttgagaatgtgtaggctactttataaagttacataaaattgtgaaaaagttgcatgctttagaaacagtatttccatcaagcttgtggtttaaaaagactatgaagacaatagcaaatggatgtttttaacacc

SEQ ID NO: 15103 - DNA, 349 bp, Homo sapiens
ggtacgcgggggagccgaggaaaactgagcgtgggcctcagaaagaagttaaggcacccgcgagccgggcaactgccctccttccgcgccggcggagcgattaaagtgaagaaacaatggccagcaatcacaaatcttcagcagctcgccctgtttcaagaggtggagttgggttaacaggaaggcctccttctgggatacgacccctatcaggaaatattcgagtggcaactgcaatgccacctgggacagcaagaccaggttctcggggttgtcccatagggactggtggagttctgtctttttcaaatcaaagtagcccatcgccctgttacacaacaaggtttga

SEQ ID NO: 15104 - DNA, 782 bp, Homo sapiens
actcagctggtggaagtcaaccctttaagcccactcccatgcataagagtaactttcactcttttccctattttaagactatttcaatagtaaatgctatttgtcacaaggaagttagatggaaaggaatgaatcaccattcaggacaaatgtataaccactgtgatgtgactgacaccaaagcagattatggctgtgtgttctgagttgtcttcctgtaaaaaagcaatgcactgcaatttgactggagttctacatattagttcctcggccagtaccatacatgggggaatttcaaaacactttcctgtcgttacttgatgataacagtttagattcatgattagtgaagactattactatagactatatcatatgtgtaaatgagtgtactgtattaatcgaccttagaatattatactatatgacatttctggagtagattagtagtattatagtaatacactataatatattactatattagtagccaagtgtattattagaatggtctagattaagatgttctataagcttatgagcagtaagtgtctgaagacttagtatagtttattacgatataaagtacaagtacatgatgtagtaattagtacttttagaactagaatatgtagtaatcatttaatattatgagcatgcacatcgatctccacgatgtatgtactacttctatatactttctattaacagctattatgttgaatatgtaactaggtattcgtatatctagttgtaagattagggttgtctaggaggtcctt

SEQ ID NO: 15105 - DNA, 353 bp, Homo sapiens
  misc_feature 353: n = A,T,C or G
cccttagcgtggcgcggccgaggtacactatcctgtggtttctaaattctgcttctttattaagaagcgattaactgtaaggtagaggaactaccatgttatacttctctgcaaatctcagaaacaagcacccaaatgtagatcaccctgctgaagctcaaatcacaggactccttgagtatagatgccttagaatgctacagggctgctaccgtcttcttcgactacgtaattcaaaagacagcttgtggcttggtctcattcctacagaaggggctgaagcatgaaactcaaaccctagttgctgttttgggagataactgcaggaagtgatgaatggaggcacttaaacn

SEQ ID NO: 15106 - DNA, 311 bp, Homo sapiens
acccgaaaagaaaggaagctttagtaatgaaaggattgctgccaaaatcctgtttcccccttgcagatcttacagaaaacagccacagaatcccaaggcatcagcaccaagagagcctgtagaaactatctggtctaagctcctgaagcccagagataagaatgacttaacccaagctgcacagcctcttaacagtccactgttaaccccagaaacagatgcatttgaatctgaaaggagacaggaatcctaatcctactgctcagggacttgctgatttactttgctgtctattagcctttctgtgacat

SEQ ID NO: 15107 - DNA, 337 bp, Homo sapiens
ggtaccttacaatgttagtaactgtcttttattaagtaagaaaaagttaaaatggcatgtaacttaagaaggtgggaaaataataaaggaaaaaattaagaacaaaacgaaaagaatcatgaaatagtaaaacagtaaaattaagatataaatctcagagttggttatttgaaaagatcaatgaaacagagtaattctggaaaaaccaatgagaacaaaaagggaaagcacacgcaacatgggaatgaggaagcagaatactacaactccaggccaacaaatctgaaaatagaacagaatcactatttaggaaaattcacttaattaaaaaaaattt

SEQ ID NO: 15108 - DNA, 322 bp, Homo sapiens
acgcgggacacattactcagttgtgagggggaaggtagactctttccagacctttgataaaggggctgctcaaaaaagccacgaccttgggcctctgctaaaaccatggctttaagtaaggagggagcagatatataaaaaaccttatccctctttctaatctcttatgtcctgtgagtgtcacccattgagtaaacccaagtggaagtcagtaggaaagtagctgggatgatgccagtctttacagggtcttctctgtcacccaggctggaagtgaaatggtgttgatctcggctcactgcaacctctgcctcctgggttt

SEQ ID NO: 15109 - DNA, 337 bp, Homo sapiens
acttgaacatacctagctattatctctctttcatagattaaaaaaaacaaggttcagagaatccaagtgaatggctcaagatcatccaattagtaagtagtagctgaaagaatgacaaataagtcttaaccataaaccagtgagaaagaactttaggagcaatatgatcaaatagtatggaagaatacgcagagagagttatttgcttttcttcagaaaagggtggggaagagagtcagggaagtctttgtgaaggagaggaaatgtaatctactaggtggccagtcaatccataaacaattggagttgactaatgtggaaaaatatttttcttttt

SEQ ID NO: 15110 - DNA, 499 bp, Homo sapiens
acgagaactggagcaagaggtgcaaagacttaaaaaggaacaggccaaaaataaggaggactcaaacatagagaaaattcagcaggagctggaaaaactaagcgtgcatttgatttcagtgctcatggccgaagacacgtagccctaagaatagcctatatgggctggggataccagggctttgctagtcaggaaaacacaaataataccattgaagagaaactgtttgaagctctaaccaagactcgactagtagaaagcagacagacatccaactatcaccgatgtgggagaacagataaaggagttagtgcctttggacaggtgatctcacttgaccttcgctctcagtttccaaggggcaaggattccgaggactttaatgtaaaagaggaggctaatgctgctgctgaagagatccgttatacccacattctcaatcggtatggctgtagaatttcctctaatcttatatgactgtaagtttgaaaatgtcaag

SEQ ID NO: 15111 - DNA, 818 bp, Homo sapiens
  misc_feature 350: n = A,T,C or G
actgccttatcattttattggtgttgtgttactagagatttgacttgaagtccttaaggcagcatactttgcagataaataatctgagagaatctggtaggtcaacagatctgctgtctgtgagctaacactaaagaaatagaagaagaggaaatctttgaaaaatcgagaaaagatacctttgatcccaaaagtcttggtttgaaggaactttttatccattagatcatctaattctggaagaataaccaaagtgcagcatccttgtattcttcctctaagaggctcatcctcataggggatgtaaattgagccaagttttctaagtgtctaaatgttaagtgctccanggctcagtccttggactctctagtctcttctttggtgaagtgtccatttgtggggcttcaaacaccttttgcgctctctttcaaatttacacttttcttgtcggaccattttactgaactacagtcatgtatatgcaactagaccattgtgcacctcaaatttaagattaactgaacagaactctgcccaggtttcatttttggggctttcccatataagtaatgggcccttgatttacttctttggtcaacactggttcctgtggccctttttgattttttatttaatgccttaccttgaccatttcccgatatttgggcgtataacgacgagacctatgttcggtaccccctaatgtgaaattcttgtcacttgtcgcgggtgcttattgaactcacctcgatccaaacttgtgggcatcatgggttaagatgttcccggtgaaacagtatctacttaatttctat

SEQ ID NO: 15112 - DNA, 350 bp, Homo sapiens
accagaagagcccagtgcccagaaaccaatatcagttctatacagatacaaggtgatgctgattatttcatcaaccatcttggagttcccatcgtgcagtttgcttacgaggacatcaaaacattagagggtccaagttttctctccgaggcccgtttttctacacgagcaacaaaaattgaagaaatggatccctctttcaaccttcatgaaaccattactaagctctcaggagaagcgattttgcgaattgccaacgaacctgttctgccctttaatgcacttgatatagctttagaagttcaaaacaaccttaaaggtgatcaacccaacactcatcaactgttagc

SEQ ID NO: 15113 - DNA, 328 bp, Homo sapiens
acatgtgtaattcatgggtagtatgatgtatgtgttataacagcatactggagaatgagaagctcacaatagtggtttcttttggggaatgggcttagggagatgggcatgtaagggaacttcatctggagataatgatttattttcttaagaaaaagtagatagaagaagaatgttagaatatcttaaaaaaataggaatcccattctgtattattggataacattagcacacccaatgaaatcaattccttagttttatccaatgcccagtttatcctcatctttctccagttatccataaaatatcctttaaagctgtttttccc

SEQ ID NO: 15114 - DNA, 306 bp, Homo sapiens
acttggatcagtagaataaatatttattgaatcaatcagtcagccaattaatatgatgttagtgatagacctgcctccttttatggaagaggtaacagatccagagaattcaagtaatttatttgtagactgaaaaatatattaaagtctttgctgcaatcatatgtaacaaaaagaaccaaaacaaacactttttagtggcacctgtggatttacaaagggttgactctatgtcattccacaactttataatgttgtaacatgttaaacctataatgatgacaaattatgacaagtattgagagg

SEQ ID NO: 15115 - DNA, 810 bp, Homo sapiens
  misc_feature 260: n = A,T,C or G
ggtacttttgataataactcactctgtgcgatattcctgaataagtccatctcaaaagtttgggattttcctcctcttaactttcttaatatttggacatgcagttgtcgccaaacttgggtattcatggaatttctagtaaatgaaatacctatactttgatactgaagactgccaaatacataggaattttctttcttaaaaaacagtaatgaagactatatctcctttcccagcactgaatgttttactagcactgngtgctcaccatgcaactgaagaaaatgtggaaactcaaaaggtcaggacagacttccaagcacttgcaactgatgttactgtcttcaattttaataattacacatatttgtatatttcagagaagtttttaatatttctctgtccactttttataagctttaaaatgattttctctggcttgagaattgcatcaagaaaaagcaccttttttcacctgaaagcttttgagactagagacccgctttacacgttttaacaagtatattgagtccacgtttggtagcatcagtttgtggagttaaaaagaaaattaatgcatttgatctggatggattttaaaagaatataatgttcaatattaaagggtaattcacaattgccacccatatgttctttttatgtaaaaaggaaaacttggagaacttaacatgaaaaagtctttatcattagcttatgtttttgaggaagagcgctgtctttttatatgtttttgacaaacaaattgattcttttgacctgcccggcggccgttcaaagggcaaatcacct

SEQ ID NO: 15116 - DNA, 366 bp, Homo sapiens
acattatgtagctatgcacccatctaaagaagttaggaaaatgacatcaagtagagcatcaaaagaaagaaggaaaggataacttaaaacagaaatgaatgaaataaaaccagaatagaagagacgatctacaaatccaaaagttggtttgttgaaaatactagtagagctgacatacttgtggtgagactgatggaaatagtgcagttacaactaaccaatatcataattggaaaggaaatcactataggtgctgtaaaaattaaaaagataatagaatattatgaacaattttctgccaatattattgaaagtttagataaaatggaaaattcatttaaaaatataatttgacagtattatgtt

SEQ ID NO: 15117 - DNA, 339 bp, Homo sapiens
  misc_feature 259, 336, 339: n = A,T,C or G
actagacttattcaaatcccttagtcccaagcctgaattgattccaagggcaaggatgtctccatttgtgagaaaaaaaagagcaagagaaacgaaaccaagaagtgcttgacatcctgagcaattcccggatgctgctttgccagagagtaggatgccaaatatttcgagaaagcctttctggacttgaaaaggaaaaatgagagccagtcttgtcgtgtcatttgacttttaaatcatctcctggaggaaggttatnatgggagaatcttcagcatgagatgattctttataagggctaaattaaagcaaggggattttccctagcccaataanccn

SEQ ID NO: 15118 - DNA, 583 bp, Homo sapiens
  misc_feature 506: n = A,T,C or G
ggtactgaaaatttaacaggtgcttttatgtggcaatattacctcacccactttcaaaagatgtcagcaagctaggtcaaggatcaggtgccacgttatagacttgaagaacttggctgattttttcccaggatttatccatcagcagtcctattagcagcagaaaattagaaatcctgaattttaacaaagtccctaaagagtcaaagaacactgggtgatcacaatcaaccaaagctaccacttgtccagagcatttttctaaagagaaacagctaacacaaaaaacttaactcctccttcaggaaagatttcctcttcgccggtagtctctcctgttcgtcctcctgcatcgaggcggccagcgggagcccgtccgccactcgggcgatcattgttagcaacaccatcttcacaaactacagggatccaacacttggcccgaaggcccttggcgccgtccttactttcttcggcgcgacaacagttataccctatggtttaantcccgagaaccagctgcttggcgtttcgcttccgctgaaggccccgcgtaccttgcccgggcgggcggttgaaaggg

SEQ ID NO: 15119 - DNA, 819 bp, Homo sapiens
ggtacaaactgatggtaaaacagatagcaccccaaaatatttccacatgcacaaacaaccttgaaacgtgtgttcgcatatttacaagcaggtatttttccaatgccactcacagccaattagtgggtcattaaattaactcagtgactcccaaccaacatatatttcccataaatagaatgaaattgaaaaggtggactagaatagaaaatatcagagtgcctgacatatgtaggtatatcttgtttcatgaaaagtttgttttagaaatataaatgttgttatagatacatgtgaacatgtaaaatggatttcttattgtaggttaaagtccaaaaagtttaaaagcttcttgtagaaaagatcaggaagacaacatcagtagttaagagcaaaggccgggcatggtggctcatgcctataatcccagtacgcgggaggcgacccaaacagttataccctagccaaaccccgaaacaccctttcccacatcaagcccgaatgatattttcctattcgcctacacaaattttccgaatcgtccctaaacaactaaggaggcggtcctggccctatactattcaatcctaagctagcaataaatcccatccttcattatattccaacacaaagcataatattttgcccacttagccaatccttttattgactcttagccgaaaactccttattttaaacttgattcgaggaccagccagaagcttcctttttaccatattggcaggtgctatcggactttcccggggcctttcaaaggggaattccagacaagggcggcgtactaatgatccggcttgg

SEQ ID NO: 15120 - DNA, 370 bp, Homo sapiens
acattttaatttacatgttgtgtagaacatagatgagaactccgggaaaacttgggaatggcaaccaaccaaaatcatttttaatcatttattagaaatttctcaatattgtgtctttttcttttgaaactctaaacacttcagaaaaaaacactatcagtgtagttcatgttagtataattatagatttacatatatttgaatagttaatttgctttgttttacacgtagcccactgcctcattataggtaaaaggcatttataactgctcaggggattacgagaactcaactgaaactgaatttttgtaacaagaatgttaatagtggcaaagtcctctgtcagtaaactctttaagcttggtgccgc

SEQ ID NO: 15121 - DNA, 375 bp, Homo sapiens
ggtactttttttttttttttttttttttgttttttttttttttttttttttttttttttttttttttttatttattttttagtatttggatttttaattgtgaatatatatattagtttgaaaaaaaatgtttattattgtgaggcaaatatttttttagaaagaaacatttgttttaaaaaaaaataacaaaaaaaaacacatattttttcaaaaataacaataggggggattacttataaagagggaatttctttacaccatattttaaaacatcttataggagttttgggtttttcggtttagaaaggacctttatttagtactataacgttaaatacaactagatactatgataagatatttttatttttt

SEQ ID NO: 15122 - DNA, 312 bp, Homo sapiens
  misc_feature 312: n = A,T,C or G
acagtgaaaagagccaaggctgtgtgaccccctcatcacttagccaggcgtatggtcctggtttctgaggctgccagaaagcatcttagcaatttgtgtttggatggtccatgcctgactattctaggctggaggttcctaaagagtaacaagaggaagagaaacaagaatctctgacacttgttgagaatagagcacagtcccatttgtttgaaaagagacaccaggcagccatgtttatgtgccagaaatgcattccacctcaaggaggacttaatttatggacccgtgtgtgccaggctgagctgggcn

SEQ ID NO: 15123 - DNA, 717 bp, Homo sapiens
acccgaaaagaaagggagctttagtaatgaaaggattgctgccaaaatcctgtttcccccttgcagatcttacagaaaacagccacagaatcccaaggcatcagcaccaagagagcctgtagaaactatctggtctaagctcctgaagcccagagataggaatgacttaacccaagctgcacagcctcttaacagtccactgttaaccccagaaacagatgcatttgaatctgaaaggagacaggaatcctaatcctactgctcagggacttgctgatttactttgctgtctattagcctttctgtgacatgattttctaccaagcaaagtcttttattcaagtcttccaaaaaattcctatttaagcggttgctattttggcccctttaaaaagaccgaagaagagttaacagaaaccttttccccacaacttaatcccagcagtagtttgactcttcaaaatggggatgttactgtaaatggttgaaaaataggaacggatttttaaaaaagaatggccattggaattaactgttttgtttacctgctggaaccctgggaagccaaacttttgtggacagggatcccttagattggaaaatttgcctggccttgattaggggccaagggaaactggtttttacctgtggaaaaccttttttttgttctttagggcccctggccggacacccttaaggggaattccacacctgggt

SEQ ID NO: 15124 - DNA, 230 bp, Homo sapiens
actcacgttgcctcgtgtcaccaaaattggtgtggctgctgtggtgcggggggctgcactgatggcaccccttcctgtcttcatcaagcagctgcccttctgccgctccaatatcctttcccattcctactgcctacaccaagatgtcatgaagctggcctgtgatgatatccgggtcaatgtcgtctatggccttatcgtcatcatctccgccattggcctggactcac

SEQ ID NO: 15125 - DNA, 347 bp, Homo sapiens
ggtactttttctcctgagcccagacttgataatcactttctcaatctctgcttgttaaatggcttctaaaaattcttgggtaaatatgggtatggttgcataaagaaaaatcccttaaaggataagccaaaatttttcagtgatagtgcataaaagccttgttatctttaaggcttgtcttttggtgcatagagccaaataaattgccaaggcaaaaacaaaaagaaagaaaatctagtctctgatttagtgcccaaaagtttttaatgctttgggtcctccagttgctctaagaattttttgtggctttgaagctttttatcaggttttaattttatccttatatt

SEQ ID NO: 15126 - DNA, 338 bp, Homo sapiens
  misc_feature 314: n = A,T,C or G
acagtgaaaagagccaaggctgtgtgaccccctcatcacttagccaggcgtatggtcctggtttctgaggctgccagaaagcatcttagcaatttgtgtttggatggtccatgcctgactattctaggctggaggttcctaaagagtaacaagaggaagagaaacaagaatctctgacacttgttgagaatagagcacagtcccatttgtttgaaaagagacaccaggtagccatgtttatgtgccagaaatgcattccacctcaaggaggacttaatttatggacccgtgtgtgccaggctgagctgggcaangatctttctcaggacaaactctgc

SEQ ID NO: 15127 - DNA, 380 bp, Homo sapiens
ggtacactcacacacacacacacacacagggctcttaacaactggtcctgagtagctctttgtaaattctttattgccggagtgaaccctaagtggctcacaagagtgccctatttctttcaattaactacaaggacaaacacatctcaaagttgagataagtgaccagtatgattttgcccaaatttctaaagcgcacttaccatgaaaatgtgataaagggttaccctttgggggattttgcaccttgtatgaaaattctggggaaaaaggctttggttgggattatttggaggaattagaggaataggaagaaaatggaaggtcattatttattattaaaggaatacctattgaaggggttccccttggcctttttg

SEQ ID NO: 15128 - DNA, 729 bp, Homo sapiens
  misc_feature 512: n = A,T,C or G
acctcttattccagagaagtggggagcagagaggaagatggagtggaaaggggcgaggcaaggccctcctgaaatacctcaacccaaatcttcaagaaatccccaagtcctcacagtgctttttgtggatttttgtggaaaccggtaaaaggggctgatttgctgaccccagtgggtagaaaacagagactgtcaagagaacagaagaggaggcagaaaggggatggggaagtggggttcgccatgttcacgagctcctggagccacagggccccccaggaacaacagagctgagactgggtggccttgtttctggcccaattccctgggaccaccaccctggaaggacaacttgagccctactcaaggacccaccacaacatctcagcattgtcggtccttaaatgccaaggtctgtgctcaccatttccatccttaagattctcacagggaagaacccacacaacagctttgtccctgcgactctgggtgagtttctgacactggcctgngctcccgttttgcccgtcaccaacttctcacaagttaactatccaagaaaagtagcatttgatgtcaaggaatcaaaagggctaaggctcgggaaggccaggcaggtgaatcacttgtaatcaggagttcgagaccccctgaccaacataaggaaacccatctttctaccattccaaaaataacccggtgtggtggcagtgcctgtattccaccttc

SEQ ID NO: 15129 - DNA, 336 bp, Homo sapiens
ggtacctgaaggaacgaagaagaggaatttctcaaggtgagaagcagttctccatggacactgatgacagcacaggcaaagtttcctatgactagggatcactgtccacacagagtctggcttcccaggtatccagcaggtagacaaaacagctaactccactgccactcctttctccacatccgttcctatttctcagccatctcagtgacatccgccatcttgagagtcaactactgactggactgagttgtgtggtatatgcttctgtttacttctcttctgtcttttttaagtggccaaatagcaaacgcttaaataggaaatctctgggag

SEQ ID NO: 15130 - DNA, 362 bp, Homo sapiens
acccgaaaagaaaggaagctttagtaatgaaaggattgctgccaaaatcctgtttcccccttgcagatcttacagaaaacagccacagaatcccaaggcatcagcaccaagagagcctgtagaaactatctggtctaagctcctgaagcccagagataagaatgacttaacccaagctgcacagcctcttaacagtccactgttaaccccagaaacagatgcatttgaatctgaaaggagacaggaatcctaatcctactgctcagggacttgctgatttactttgctgtctattagcctttctgtgacatgattttctaccaagcaaagtcttttattcaagtctcccagagatttcctat

SEQ ID NO: 15131 - DNA, 558 bp, Homo sapiens
accactttaaattccccagttaagctttttggaccacacaggtagcctaagcttggactgaaagcccatagaaggccatttgtggttataaatcatcagggaaaatattctatagtttccatgtgccactaaggttgagacaaatgagttccttgctgcgcccttctatggagtgtttatttcttgttcacctttacactgagggtgtccagctttatgagggaacctactagatttctcatttcctgttgcccatactttgtgtaatcactaaaatagaaggttatggtctgctgaatttggcaaaaattctggggaaaagctggctttggcagttacttcctaggattccagcttttgcttcattttgaagagccgtaggttccttactttcgtgcctgctcagcaatatgtttaaaagtattttttataaatatatttacccagtatcttggttgcttctgctgaaaggacttttcagaattatctaatccagcatactgccaaaaacagagccctgaattagtttcaaatacgcacaccaacgcactccccctg

SEQ ID NO: 15132 - DNA, 420 bp, Homo sapiens
ggtacttttttttttttttttttttttgagctgcggggcatgatggggattgctgcatattatcagttggatgttcttgcccttgacagtagcttattgctctgggggccggaatggattcattacacttcttaaaaaagaggagagagaaataactttttttgtggggatggggttaaacacctcttttggggttgccttttaaaaatgctttattgcgaaaaccatacaacttttttaaccagcaataaccgtttaatgccttggtcttatattatcctggcaaaaaatgtacttagggggcgtaacatgcctaacccagtggcgattattatcccctctctcgggtcatatttggggggagaaacatttaaatttaaaaattttcgggccgttatatttgaaagatagagggcgacc

SEQ ID NO: 15133 - DNA, 302 bp, Homo sapiens
accaatcagaaggacgtgttgcttcagaaattcaatgaaaaagatttggaagtaatacagcagaactgctatttaatggctgcagaggatcttgagctcaggagtgaaggcttaataacagaatagtgctcttttcaacagacaccattgctataaatccattttctctaaggaaaagaatcattttattatactattaagagctgatttaggttttatagaaagagcattgactttatacaaatttatttatatttttttatgtttttttacagtatctattatatttaatctgttataat

SEQ ID NO: 15134 - DNA, 632 bp, Homo sapiens
actttttttttttttttttttttttttcttttttttttttttttttttggggcacaaatatcgttttagttcagttatccacattgttcatctaaaataatacattttctttacatataactgtcttagacttgtaattgaggatatttgatgaaacagatctgtatctgaaacagcactatgatgctaaacatttgcataaggaatgaaaaaagttagcaccctagttttttcaatattcagatttttgagattacacagaaagctacatccagatgaatgactgactttttccttttttttcgagacattttggctttggatagacacagcattcaagtttaatgcattttaggaacaggttcagtttacatatttaacgcccatttaaaaaacccaaggccaaaggaatattttaattttaaaacctttacttcaggtccttagccttggatactttttttaaaataccttatgggaaattccattggtgggttcttggtggaccttgggccgggacccctcttaggggcgaatttcagcccactggcgggcggtactagtggattcgagcttggtcccaattttgggggaatcatgggaatagtggtttccgggggaaaatggtattc

SEQ ID NO: 15135 - DNA, 240 bp, Homo sapiens
  misc_feature 154, 240: n = A,T,C or G
ggtacccattgcccgaatagtgaacactctacccagtcgtttttcatccctcactttcctaccaccctccaacatttttggagcctccagtgtctcttattccactctgtatacccatcgtttagctcccatttccaaatgagaacatgcaggnttctgactttctgtctctgagtcatttcacttacgataagggcttctaggttccatccattattggctgcaaaagatgtgaattcn

SEQ ID NO: 15136 - DNA, 378 bp, Homo sapiens
acaaccagaaccaacaattgtatttctctatagttattttaaaatagtaatcaatgctatgtgtttgatgtatatgtttctaaattagaaatttcttttggctttgtgtttttttaatgtgcgttaaatatgtaaactgaacctgttcctaaaatgcattaaacttgaatgctgtgtctatccaatgccaaaatgctcagaagaaaagtgaataattcagtcattcatctgggagtaaaacaactgagctattctcaaatattcataatttttgaaaaaaacccaagttgtctaatcttttttttattacctttatgcaaaatggccttattcatttttagtgggctgttttttggattactataatcttttctttag

SEQ ID NO: 15137 - DNA, 303 bp, Homo sapiens
  misc_feature 262: n = A,T,C or G
ggtaccatcgctttttaggaaacagagagccctcctctggtcaggaaactgagatccaacaggtgaacagtaattgcttaaccctgcaggagatggaagatttgtgtaaactgcattgtctcactgtggtttttctactccatctgcctctttctcaaagagcttgtgctagagtcatcacttcccattgggctgaggacatgaagcctttattacaaatgaaaaagtggtgtgaatatttcatcttaagaaatatacatancttttgaattttggaatctgaatttaattcaccttttctga

SEQ ID NO: 15138 - DNA, 565 bp, Homo sapiens
  misc_feature 565: n = A,T,C or G
acttgtatgtatctggaaatgggaaaagaattgtgctcataacaccttctggatgcatatttctttgggaatatttggaattaaagaatatcttatcttctaaaagcctttcattggcgggtcggtggggggaggtcatacctgaagaagcagttctcttgccttccaccgaagataaagaagctgtagtgaatgctgtttttataaaaaatgagttatttggagactgctgcctgtgttcatttactttttattctggggaatgcctgaagttaacatttctagcaattcggtggcatgagaatgtatttacatctgtaagatcattgccataccatgttcattgggctcaacaagactgtcatctctgtagtttaattcctaaatgtgaatcagtaaaggcaagaggagctctaatttctgccttttcaagagatggccttaccctggcagtacctcttaatcagaaagaccccaaagcaactcaggggttatttataaacacactgaattttggtactctctggggtagcctaaaggatgtagtaacaagagtcccggggtn

SEQ ID NO: 15139 - DNA, 326 bp, Homo sapiens
ggtacaaccagaaccaacaattgtatttctctatagttattttaaaatagtaatcaatgccatgtatttgatgtatatgtttctaaattagaaatttcttttggctttgtgtttttttaatgtgcgttaaatatgtaaactgaacctgttcctaaaatgcattaaacttgaatgctgtgtctatccaatgccaaaatgctcagaagaaaagtgaataattcagtcattcatctggatgtagtttttctgtgtaatctcaaatatctgaatattgaaaaaactaggttgctaacttttttcattccttatgcaaaatgtttagcata

SEQ ID NO: 15140 - DNA, 326 bp, Homo sapiens
ggtactttttttttttttttttttttttccgtccccccaaacaaagatttgtctggactgactaaaaaaaaaagggggcggactcttaatggattggataacatacatgcttaaaacaaactacccacatttatttccttccttaaaacatacctttaattcccaactcctatttaaagaccgacctgcttgataaggaaggtaacgcctgcattggaccgactggtgggtgggctggcacgtacgaaggaagactatccttgctaatcaatccttgcatacgaaggaagaggtatggaatgtatacccacggaggaacaaacccc

SEQ ID NO: 15141 - DNA, 115 bp, Homo sapiens
ggtactcttttcaaggctttacttccaatcttccccttaagtgctagtgtccagaggaaaaattatttcttctctgtagaagtcattttgaagacagtatttttctgagatccaa

SEQ ID NO: 15142 - DNA, 333 bp, Homo sapiens
acaaccagaaccaacaattgtatttctctatagttattttaaaatagtaatcaatgctatgtatttgatgtatatgtttctaaattagaaatttcctttgggctttgtgtttttttttatgtgcgttaaatatgtaaactgaacctgttcctaaaatgcattaaacttgaatgctgtgtctatccaatgccaaaatgctcagaagaaaagtgaataattcagtcattcatctggatgtagttttctgtgtaatctcaaatatctgaatattgaaaaaactaggttgctaacttttttcattccttatgcaaatgtttagcatcatagtgctgg

SEQ ID NO: 15143 - DNA, 310 bp, Homo sapiens
acttactaccaaataaagattttacctatagattgaaactaaattgtaaatgtcccaaatacttttcccgatgaaattcaaacaaaattagacttttatacacacaaagcaaaacaaaacacaacctatatataatttcaagattaagaaaaacaaaacaaataaaagcattctctcaagaccttgcttcagttgtgtaaaataattaaatgtgctattccaagttgattttagtttttaaatacagaatttgataaaagataagtaaaagaaggccttgggttcagggtggcagatatttagtgcaccc

SEQ ID NO: 15144 - DNA, 263 bp, Homo sapiens
ggtacagaaaatgcggtgataacataggcaaaccatctacttcccagtcttctttctagatttattcctttccagagcatggatgccatattgaaatacaaatgccaatcatcagcatggtgaaggggagagagcgggtaaacgctgccaatctttttgctggtaacacttctccacactaaggcaggagctatacagtggcttctgagggttcaagaagaaccagatgttgagggccaaagttgctagggtgacaggtggaa

SEQ ID NO: 15145 - DNA, 456 bp, Homo sapiens
acctagtaacattcatcctcttgattcctggtgaacacggttaaattcatgcacatttgttcttgtagtttcttaaaaattagaatccaaatttattttgtttagccaagcaaaattggaaaatttccattttattatgacttaatgtaaatttttttgctcttgcttattaagtaataccgaacctggtaaattctgtaaatttttaaaaattttagtattcttttacaattcaaattaattttgttaatgcattattttttcattttaaatattaggagttattaccaaattcgaattgaaagccctttttcaccaagtttagttggcgtctggagacttatttcttttatttgaagtagtagttgaaatttaagcttttctgaagaaaggtcaaaatcctatttgatgaaaaaagttttcaagaatgtaggaattattttttcttttttagtg

SEQ ID NO: 15146 - DNA, 334 bp, Homo sapiens
ggtactggggatgaagcagcaaattctgccctgctgtgggatgctgccagtggctcgttgctccaggacctacagaccgatcagcctgtgttggacatctgcccatttgaggtgaaccgtaacagctacttggctaccttaacagagaagatggtccacatctataagtgggagtgactgtggtctcgaaaccttgaaggcatgctgctggtaagatgttgtttgctagcgcctagcagccccaagcaagatccctgtttattgtctgcagtctagaacattgggaatcatggttttgtttgcattaggtatgattctagggacccttagtcaa

SEQ ID NO: 15147 - DNA, 370 bp, Homo sapiens
acccgaaaaggaaggaagctttagtaatgaaaggattgctgccgaaatcctgtttcccccttgcagatcttacagaaaacagccacagaatcccaaggcatcagcaccaagggagcctgtagaaactatctggtctaagctcctgaagcccagagataagaatgacttaacccaagctgcacagcctcttaacagtccactgttaaccccagaaacagatgcatttgaatctgaaaggagacaggaatcctaatcctactgctcagggacttgctgatttactttgctgtctattagcctttctgtgacatgattttctaccaagcaaagtcttttattcaagtctcccagagatttcctatttaagcgg

SEQ ID NO: 15148 - DNA, 311 bp, Homo sapiens
accctaccactgttggaccagtggagagcagtggattgagatctcgctaccgttcttcacctaccgtctacaactcacctactgacaaagaagactacatgaccgacctacgaactttggatacttttctcggaagtgaagaggagaaacagcatagggttaagctggggagcccagattctacctctccttccagcagtcctactttctggaactatagtcgttctatgggggattatgcacaaactttaaagaagtttcagtatcagcttgcctgaaagactaaggccccatgtgctaacaaagatgac

SEQ ID NO: 15149 - DNA, 308 bp, Homo sapiens
  misc_feature 248, 263, 291: n = A,T,C or G
accggaaggaacgaagaagagggatttctcaaggtgagaagcagttctccatggacactgatggcagcacaggcaaagtttcctatgactagggatcactgtccacacagagtctggcttcccaggtatccagcaggtagacaaaacagctaactccactgccactcctttctccacatccgttcctatttctcagccatctcagtgacatccgccatcttgagagtcaactactgactggactgagnttgtgtggtatatgncttctgtttacttctcttctgtcttttnttaagtggccaaatagc

SEQ ID NO: 15150 - DNA, 339 bp, Homo sapiens
ggtacccacaatggaaagatggtcttcctgcattgtgaaggttgttctcatcaaccaagcctgcaatgactagacattctaaagagaagagtgatggcaatggaaagaggacacatccacttgccaggtcacttctatcagttgatgacatgccatatgttatggctaggtcagctttccacaagtatgcacatgcaaaatagaacttgggaaaaaaatctttgatttggccctctaccaagtggatcagtgtgtcagagttcagttgagcaaaggtcagagtttaagttgaatctccagtcactcttttgaagatatttggtgatgccaaatttaatt

SEQ ID NO: 15151 - DNA, 459 bp, Homo sapiens
  misc_feature 94, 99, 111, 112, 113, 114, 121, 201: n = A,T,C or G
atcatcaaaatgtcgatgattacataatggtatatagatcttaacaaatttatttaagattgataataatgagtatatctttaatgttgaaaanaagantaaactggtggnnnntataggngaatgtggctgttatgctgcccatatcattatattgcgagaggtgcccccccccgcttccttcttttcattttaattttnatatttagtgagggataggtgggatgtttgtgtctaatataaatgaatgattaaataataatttgccatgtcttctaataagagtgaaaaagtgaaaatgaatctgtatgcaacattatttttatttcttaatatattttgggaaacttaattgcaactgtgtggttcagggatttagtgcaagaagaagaacagttgatggaaaaaaaaccttataacaaaaaaaggaggttcctgcccggcggccgctcgaaaggg

SEQ ID NO: 15152 - DNA, 339 bp, Homo sapiens
cccttagcgtggtcgcgggcgaggtacctaaatttcctctaaccactctcagaaactgaaacaatgtctttgctcttaaaagagaagagacttcagatgtaatcaagaaaacattgtgtaacttgcctctaagctcttcagagccaattttactatggcaggatattccttcctgataaggtgattaatgaagtttttggtgctcacttttctctcatagtctataagctcagtataccaaaaaaaaaaaaaaattagataaaataaaacaaaacccccaataggtcttgaaaataatataaatattttgtggagtcccagtcacataatactccactc

SEQ ID NO: 15153 - DNA, 349 bp, Homo sapiens
  misc_feature 82: n = A,T,C or G
ggtacggtttgactgctggggtgtaggggaatgccgagttttgggtggtggagttgcaggaggtgatggcctgtgcctttgncttggaggacttgctgaaggagataacctacgagttttccgaggggggctggatgtcctcttgggaggcttctttggtggtgaccgtgaacgagatgaagaggatgatgagctactcccagacaaggatgctgacgaacgtcttcttcgtcttactggagatctactccttctatgccttggtggaaagagggcattctttttgccggaatttctttctttcgagggagtatgggccgcactttttttgggctttgggcccgccctt

SEQ ID NO: 15154 - DNA, 362 bp, Homo sapiens
cccttagcgtggtcgtggccgaggtacctacttgaaggacttcataagcaaattacgatttaatttacaagaacactatgtcacacgtatacacacaggttttttatatttgttgtcttttccgtgattatctcttacagtgttgtatatttaatatattcattttattttaattttatgtaggttcctcattccttcatatgtgtattacatttccctggaactatcacgtattttatatacttagcaatggaaagctcctggtttcagttgtctgtgcagcaggcagggggaggagaagaaaatgggtcacactcctgaccctgcctgcatagccacaggttcccaaaagcagaggtccc

SEQ ID NO: 15155 - DNA, 337 bp, Homo sapiens
acttttcgctcagctgttttcatcactgtgttcagaggtttgtctttttttttcccctaaaaggtgctgagatgttatgagtgctttatgtgggggtactgggataagttttgaaatgtcactgtgttataaactgcatgattatcgattttggaaattttgttttttttaaatgattaatttaaataaaatggagaattttgatccataagaaaagcaggactgaaatctccagggatgggagcctttgggttcactttgttcagtgttgtttctttgtagacttcctactttcttgtaaaatgttttggactaaatatttcacaagaattgaatt

SEQ ID NO: 15156 - DNA, 356 bp, Homo sapiens
ggtaccattcttatctcagaatgctgtaaaccatcagtagaagcagtttagatttggactgcatggtaaaatgaaaagtaataaccctccaaccacaacctagtcagggtattaataattatatgtagcaagaaaacaaagaagaaaataatattgaaaaaatggagattccccaaccagtttcatatttgaaggatctgagttgtatttttattaaggaaattttttttctgaatactgctcttccaaaatgtttaacattaaaaatctgaattcagaggacttctgaattggaaaaagaagttttgatcacttgaccaccttaggtgctctgaaagcgttgttgtgggccacat

SEQ ID NO: 15157 - DNA, 312 bp, Homo sapiens
accaggagggtattgatgtttgaggtccaaactgaaaacccatcacctccttcccactgctatagcagcgttagcccctgggttcattatctagccaggtcacaccctttaaaaggggggctctgaaaatgtcttacctccctcacaggcaaagcaattttaaagcctcctgagatcacccaccaaccaaagcaactgctgtcacttggaggtgcagctgaattcttctaattgtgacacaaactcttgaaactgtaaatgctgaaagattaaatgaggttataacactcagaaggttttacaagtaaaagt

SEQ ID NO: 15158 - DNA, 318 bp, Homo sapiens
ggtacagtgaaaagagccaaggctgtgtgaccccctcatcacttagccaggcgtatggtcctggtttctgaggctgccagaaagcatcttaacaatttgtgtttggatggtccatgcctgactattctaggctggaggttcctaaagagtaacaagaggaagagaaacaagaatctctgacacttgttgagaatagagcgcagtcccatttgtttgaaaagagacaccaggcagccatgtttatgtgccagaaatgcattccacctcaaggaggacttaatttatggacccgtgtgtgccaggctgagctgggcaaga

SEQ ID NO: 15159 - DNA, 190 bp, Homo sapiens
ggtaccaacaatgatttggcttttatattactgtaagatgttataatgttaatgtggatgtagtgcttttactttacagattgattggaataagattattgcatatgaatttacccacaggactctgaatcatgttacccactcccctcacaatgttgtccactttagtgagttgcattgatctatccgt

SEQ ID NO: 15160 - DNA, 419 bp, Homo sapiens
actcgggacatcaatgcagagtccctctgtgaatttacaacacccaacacccatgagttcagtccttaagaaggaaaattgagcaagtatttaattggatggacattgcataaaagaggtccaatatccaggctaactctagaaattttattcttcaaacttagtatgggcctctttttcttactgtcagaggaaccaattcttttagtggcacctgggagaaattcttgggcaccctagaaagaatttcaaactgccgcatcacttgcaaaaaattacaaatgggccctacatttgggattttggtagaaggaagaaaaggaagcccctgtttttgtggaagctggtgctaatgcagaaaatttcttttggcccccttgaaatggtgggtccgaatggcccaaagggaaagaatcctg

SEQ ID NO: 15161 - DNA, 315 bp, Homo sapiens
acactctagcattgtaactttttccccctgagaagtgattttaagatctatcagtctcaatttaaatgatctgttaatcagccagagttttagtttcataatatcgttccattgcctgacaaagatatacacactgaagtgcctttagcagacctgggaccgtcaagaatcttgttaccctgattattgcaagatgacatatttcttaagccatttataatcccatattcgggttgaatctgaatttacaaataaaagggttaaattgaggcagtttcaagcagcatttaggaaaatgaagtggcttcaaatttt

SEQ ID NO: 15162 - DNA, 339 bp, Homo sapiens
acctctctttcttgttggaaatgttgaagtattgaaatacttcttttctgtagaaggtggttctcccttctacccaggaataattttgtggcaagtcattgagtcagcagttattttgaccctaactgaaagagataaagttcctaagaatttattatatatgtttcttgccactgagtgagcaagaaaaatacacacccatcagtgctgactggttggtaatttctgaaacacaatgccacatctcttcatgaataacacagtaacagaattacagagattttggaagagatcaatctctagatggatgagttagtctataaacaaatagcttctcaa

SEQ ID NO: 15163 - DNA, 327 bp, Homo sapiens
acataaccgtgtaatctgtaagatagtatgacatttctgcctttctgcaaaattactgaatcaaagtttgaagtagtgcgttctttaatggattttatttataaaatcatctttactgtaatcccagcactttgggaggccagggtgggtggatcacctgaggtcaggagttcaggaccagcctggccaacatggtgaagcctgtctctactaaaaatataaaaattagccagatgtggtgggtgggtgccctgtaatcccaacccacccgtggaggctgagtgtttgtataaatggttctgaaccccatatagactggaagtttgg

SEQ ID NO: 15164 - DNA, 591 bp, Homo sapiens
acaaggacactaagacagtgtagcctgctgacttgagaatgttctgtaaggactggaaacactagaatcttgaaaaacgcctggctagaggtgagggtaagctgttaattacactgattacagtttgtgcctctcagactgagaactcttttcttcttgctgggggcattgctatctctaggatgtttgccctgaagtcctgatagtctctttggggttttaataaatggctgaaaaaattgttgtggggtttcaacaggcgttcataggcacccttgcttggcaatataacatggcttttgatgtttgggtgttggaagggatctttgaagtgctgagagggactcagtctttttccaaaatctctgcttgtgtctgtccaagccttggctccactgcttggctgagatcctggcccatagtaaaatctgtgtagaggaaacgagagctcactatttgtgaggcaacctgttccactattggactgctttaaatggagtgatcagtgaatattctataaatccatcatgtattaattgggcaccaactatgccctaggcattgtataaagtacctcgggcgcgaacacgc

SEQ ID NO: 15165 - DNA, 815 bp, Homo sapiens
  misc_feature 249, 487: n = A,T,C or G
gctgttaaccttccgggaaatgcaggtcttcagtggattcctgttagagacataaaaatgtagagagaagactttcagttaaaagcctcctcccttcagcaaagtatattctgattccattatcgtgttaggctcctatatagttataagtaatcccatgcggttttagaattcttaaatattcacacacatagtcatctgaaaatgaataaatccatgaatgactaaacaaaatttattcctatatcnatttcaatatccttaaattatgcttacatccttaaatcggttgcctcattctgaaagcacatagtctgtaactcgtaaaaaacacctgtcggccgggcacggtggctcacgcctgtaatcccagcactttgggaggccgaggtgggcgtatcacctaaggtcgggagtttgagaccagcctgaccaccatggagaaaccccgtctctaataaaaacagaaaaaatagccgggcgcggnggtgcatgcctgtaatcccaactacttgggaggcctgagtaggaaaatcacttgaaacttggaggcggaggttgccgtgagccaaaatcgtgccaacctgggcaacaaatacaaaacttcgtttcacaaaaaaaaaaaccagaaaaacccaaaaaaagggtccttggccgggaccacgctaagggccgaatccaaaaaattgtcgccgttactatgggatccaacttggaaccaacttggggaattaagggcaaagtgtttcctggggaaaaggtttccggtaccatttccaacaactacgagccgaaaccaaaagggaaacctgggg

SEQ ID NO: 15166 - DNA, 317 bp, Homo sapiens
  misc_feature 80, 208: n = A,T,C or G
ggtactttttttttttttttttttttttttttttttttttttttttttttttttttttttttaaaaaattatccttattnttgtttgaaaaaaaatggtaaatggggcttttggggattgtaaagagaccaaatcccatattctagggcgaattctccgacttttccttgggttaaacctttaccggggttgtatcaccagcaggaanccttggggggggcacagccccaggggcagaaatctacaaagggcaaatggatcagccaaaaaagcctttaactttttaacaaggggaaaagggttaaaccgttttacaa

SEQ ID NO: 15167 - DNA, 341 bp, Homo sapiens
acttctatgatatagttgtcaaaatcaactggaggataataaaatattgtgggttctcagcattcttagaatccaaattacaaccatatcagtaggggtttgatccacatgagccaactgaagtcattttcctcaaggttggaatttgtgccaacctaaatacgttgtttctttgatggtgtttattgctattggtattattttgaactaataacaattattttgtctaaataatgctaagacaattctgttaagaattttgtcagctaacataattcattaagtatgtttggcatcatatggacaaaatatttggatgaatgactaaatttctgacacaa

SEQ ID NO: 15168 - DNA, 342 bp, Homo sapiens
acgatcttggctcactgcaacctctccctcccgggttcaagtgattctcgtgcctcagcctcttgggtagctgggattacaggcgcgtgccactgcgttccggctaattttggtatttttagtagagatggggtttcaccatgttggccaggctgatctcaaactcctgacctcatgtggtccacccaccttggcctcccaaagtgctgggattacaggcgtgagccaccgcgctcagcctacaagcaattttttaaaaactgacacctattactgataaaattctctgtttaaaatcctatttactattttaaagataagtattagttttttttttaaata

SEQ ID NO: 15169 - DNA, 359 bp, Homo sapiens
ggtacgcggggattctcaatcctacccatgatgcagacagattgcctcatttcagctcaataaaacatcaccaaattcccttaggcagaaaaagggtggggagtgccctttcttgaaggaatcccttaagtgcacgtctcccgttttcttttcacatcaatgcagagtccctctgtgaatttacaacacccaacacccatgagttcagtccttaagaaggaaaattgagccaagtattttaattgggttgggacattttgcataaaaagaggttccattatccagggctaacttctaggaaaatttttatttctcaaaactttaggttgggccttcttttttctttctggtcaggaggg

SEQ ID NO: 15170 - DNA, 278 bp, Homo sapiens
ggtacaagaactatgcagagtcatgtttgatgctttggaacagaaatggaagcaaacagaacaggctgatcttataaatgagctatatcaaggcaagctgaaggactacgtgagatgtctggaatgtggttatgagggctggcgaatcgacacatatcttgatattccattggtcatccgaccttatgggtccagccaagcatttgctagtgtggaagaagcattgcatgcatttattcagccagagattctggatggcccaaatcagtatttttgtg

SEQ ID NO: 15171 - DNA, 362 bp, Homo sapiens
ggtacaaaaattagctgggcatagtggcacatgcctgtagtcccagctactcgggaggctgatgaacaagaatcacttgaacctgggaggaggagggtgcagttaagttgaaatcgtgcaactgcactccagcctgagcgacagagcaagactgtttcaaaaaaatataaaagatacaaataattcaaaaggaaaacaaaagcccttttataaaaaacaaaggccttttgaaaaaaggattgttaaaatttgaatattattaggataccaatttattttttaaaaaaagtttttattaagaaaaaatattacctgggaattgtttgaatgattggtttttaattatattttttaaatcaatt

SEQ ID NO: 15172 - DNA, 190 bp, Homo sapiens; identical to SEQ ID NO: 15159

SEQ ID NO: 15173 - DNA, 356 bp, Homo sapiens
accattcttatctcagaatgctgtaaaccatcagtagaagcagtttagatttggactgcatggtaaatgaaaagtaataaccctccaaccacaacctagtcagggtattaataattatatgtagcaagaaaacaaagaagaaaataatattgaaaaaatggagattccccaaccagtttcatatttgaaggatctgagttgtatttttattaaggaaattttttttctgaatactgtcttccaaaatgttaacattaaaatctgaatcagaggactctgaatggaaaagaagtttgatcactgacacctagggctctgaagcgtgtgtggccacatggaaaagtcgaaggatgccc

SEQ ID NO: 15174 - DNA, 320 bp, Homo sapiens
acccagcagggaaatcactttgggaagtagattggctgtttgagccacacaaccttagatcacattcactgtcagagagactgtctacaaacctggaggaaaacattaagatagttcctcttctcctagcagcatgtgaaataaataaataaataaataaaaggttagaaatattttctttgaatcacaattaaacatatgacttattctagtttggagaaacattgaaaattacttggaaagtctaacttttttagaatgcaatttcttttccctaggccttttggtttgaacttttttcctaaaaggccgggaaaaaa

SEQ ID NO: 15175 - DNA, 342 bp, Homo sapiens
ggtactttgatcttggacttgcagcctccagaactgtgaggcttgtccattttaatgagaagcttatgcggcatggaactgagttcacccccaaccaacagctggtgaggaatggagctcttcgttcaatgactcataatgagctttgagacaaccaaagccccctagctaacctgtgcctggattcctggcccacaaagacagtgagagagggacccaactcagcccatgaagccactgaaatacaggaaagagcatcttcattgaagccactggagcatgggaaagagcaccaccagctccctgctcgctagctgtgaacctcaggatggaatagaagat

SEQ ID NO: 15176 - DNA, 322 bp, Homo sapiens
ggtactctacggtgtcaataattatttcagtctctgctgcaattagtgctaattacaatacctgagctataaaaataaaagatttcattatagcaaagttcacaaatatcgttttagttcagttatccacattgttcatctaaaataatacattttctttacatataactgtcttagacttgtaattgaggatatttgatgaaacagatctgtatctgaaacagcactatgatgctaaacatctgcataaggaatgaaaaaagttagcaacctagttttttcaatattcagatatttgagattacacagaaaactacatcca

SEQ ID NO: 15177 - DNA, 720 bp, Homo sapiens
ggtacctaagatagagctgttagaatttagatagacattagatagacagtgaaaatattttagtctacagttgaaactgtaacaatattggtattgttctcaactacccctggtctagttaagggctttcaagtatgtgtttggaccaagtattttcatgtccaccatctagatagtccttggtctatttcccaccccatgtgctttctggtgggatgatcacatctgcacctctagtccccaagctgtccctgagctctgtgtcctcactgtctccacatggagtgtccccttccacctcaaacttgacaagggttgtgtctccacaccaccctgctcctcctggattccagcccagtctgtccttccttttctgttggttgccctggttcagagccctgggacctctcatgttcctctcccagagtctcttccagccttactctacccgccagaccacttcttggtcagcatacattgtgcatttccccaggtttgtgcctttcctatattggctcctccacctaaaaggcccaatctgttaagtttctgctcaatcccatctccttcacaaacctgctgaattttttcattggaattcatctttctcttctgttctccacactgactgcactttggatgctattagcatctacaggttactttttctcaagaatttatgttaaaatttttcaaatttcagaaaaattgattgaacag

SEQ ID NO: 15178 - DNA, 813 bp, Homo sapiens
  misc_feature 290, 431, 543, 705: n = A,T,C or G
ccctttgcggccgcccgggcaggtacccgaaaagaaaggaagctttagtaatgaaaggattgctgccaaaatcctgtttcccccttgcagatcttacagaaaacagccacagaatcccaaggcatcagcaccaagagagcctgtagaaactatctggtctaagctcctgaagcccagagataagaatgacttaacccaagctgcacagcctcttaacagtccactgttaaccccagaaacagatgcatctgaatctgaaaggagacaggaatcctaatcctactgctcanggacttgctgatttactttgctgtctattagcctttctgtgacatgattttctaccaagcaaagtcttttattcaagtctcccagagatttcctatttaagcgtttgctatttggccacttaaaaaagacagaagagaagntaacagaagcatataccacacaactcagtccagtcagtagttgactctcaagatggcggatgtcactgagatggctgagaaataagaacggatgtggaaaaaagaatggccntggagttagcttgtttgtctacctgctggatacctgggaagccagactctgtgtggacaaggaatcctagtcataaggaaccttgtgctggcctgcaatcagtggtcatggagaactgttcttaccttggaaaaaacctttttttggttccttaggtacctnggcgggaaccccctagggcaaattccaccaacggcgggcgtacttatggatccacttcgtaccaacttggcgaaacatgggcaaacctgtcctggggaaatggttcct

SEQ ID NO: 15179 - DNA, 243 bp, Homo sapiens
ggtacccgaaaagaaaggaagctttagtaatgaaaggattgctgccaaaatcctgtttccccctcgcagatcttacagaaaacagccacagaatcccaaggcatcagcaccaagagagcctgtagaaactatctggtctaagctcctgaagcccagagataagaatgacttaacccaagctgcacagcctcttaacagtccactgttaaccccagaaacagatgcatttgaatctgaagggag

SEQ ID NO: 15180 - DNA, 393 bp, Homo sapiens
acctgaaggaacgaagaaaagggattgcttaaggggagaagcaattttgcatggacactgatgacagcacaagcaaaagtttaccatttactggggagcactgtccacacaaagactggcttgccagggatccaactggtagacaaaacaacttaactaccacttgacacatccttttatccacatatcgcttcatatatattcagcccaatctcaagtgaacatcccggacaatcttgaagaagacaaacttacttgactggtacctgagattggaggggggaaatattgcttcctcgcttaaccttatgttttcaggaggtgtttttttaaaaaaggaccaaaaattggcaaaaaggctttaaaaataggggaaaaatcttttgggaagaa

SEQ ID NO: 15181 - DNA, 350 bp, Homo sapiens
ggtacgcggggattctcaatcctacccatgatgcagacagattgcctcatttcagctcaataaaacatcaccaaattcccttaggcagaaaaagggtggggagtgccctttcttgaaggaatcccttaagtgcacgtctcccgttttcttttcacatcaatgcagagtccctctgtgaatttacaacacccaacacccatgagttcagtccttaagaaggagaattgagcaagtatttaattggttggacattgcataaaagaggttccatattccaaggctaacttctagaaaatttttatttctcaaaacttagtttgggccttcttttttctttctggtcagaaggg

SEQ ID NO: 15182 - DNA, 246 bp, Homo sapiens
  misc_feature 48, 123, 125, 127, 140: n = A,T,C or G
agtacctgttgtatccttttaagtgtttgttgtggtaatccttcaaanagaccggggactgatggaaactcccttgctattaaactttttttcttggaggttaaaaaaaaaaaaaaaaaaaanananaaaaagggccctntttttttttttttttttttttttttaacataaaattgggggaagaaattcccgaaatcaaattcaaattttttaaccaggggttttatgggagagggtgttccttt

SEQ ID NO: 15183 - DNA, 484 bp, Homo sapiens
ggtacttgtagatgtttatgtgctttttgtatcctaacttttagaatctaaataaaatcagaggtaatgtattttggcagcttgtttaagtgagaatcttaatgatcataaaggaaataaatctagatgtagaaagtaccttgcccgggcggaccgctaaaggggcgaaatttccagccacaactgggcgggcccgttaccttaagtggaaatccccaagccttcggttacccaaagtctttgggtccgttaaattcaattgcgattccattatgacctggttttttcaccttgttagctttgacaaaattttgttttttatttccccgtctcttccatctaaatattttttcccaccaaccaaaacccaattaacctgtcaagtcccccgggtaacagccccattagaaaaaggttggttatatataagaccaccttgattatggtctgccccctttaaaattttaagtttttttaagcccct

SEQ ID NO: 15184 - DNA, 324 bp, Homo sapiens
ggtacagtgaaaagagccaaggctgtgtgaccccctcatcgcttagccaggcgtatggtcctggtttctgaggctgccagaaagcatcttagcaatttgtgtttggatggtccatgcctgactattctaggctggaggttcctaaagagtaacaagaggaagagaaacgagaatctctgacacttgttgagaatagagcacagtcccattttgtttgaaaagagacaccaggcagccatgtttatgtgccagaaatgcattccacctcaaggaggacttaatttatggacccgagtgtgccaggctgagctgggcaagatcttt

SEQ ID NO: 15185 - DNA, 254 bp, Homo sapiens
acagtgaaaagagccaaggctgtgtgaccccctcatcacttagccaggcgtatggtcctggtttctgaggctgccagaaagcatcttagcaatttgtgtttggatggtccatgcctgactattctaggctggaggttcctaaagagtaacaagaggaagagaaacaagaatctctgacacttgttgagaatagagcgcagtcccatttgtttgaaaagagacaccaggcagccatgtttatgtgccagaaatgc

SEQ ID NO: 15186 - DNA, 640 bp, Homo sapiens
  misc_feature 86, 403: n = A,T,C or G
caccttctttatgggcggattgtgccctttttttatacatacttctagcggccccccaacgtgattgggttatcttttaaaattantccctttttttagcggccgcccggggcagagaacgctttttatttttttgattcattgagagccttataatgtagaactatttaactctcttttgtctcatctttaatacctcttttcattgagaaactttagacaactccgggttgaaactgagtaaaaatcaactaaatttaaaaataaaagtttaatttcagagtggcaagtgtctcatttttaagaaatgaatacttgtaagtgaacttcaggaaacatatatttttataaaaaaacacctgaatgaaattatctactattaaaaacattatcgatgcaattntattgtagtatagatttttaactttacaagaaagtcctttgacatattattatattttcataataccggtaggaattttttctgataacagtttttgtgaaccattattgaaacagagcctttttttcttgttaaccgatttatgaacctttattgaagccggagcctttttttttggttaccggtttttgacccttgacaggatgaagaggaatttcattgtctgcccatggggag

SEQ ID NO: 15187 - DNA, 339 bp, Homo sapiens
  misc_feature 158: n = A,T,C or G
accaccttgatgacttctgtattcaccactaaaaactgaaatagaacatactatatacagcttcaagtttgtcactttttaataaaacttttcccacaaatgattataattacttgccctttgaagctattggatagatctgaaagtgaggtagggtnggggatggtcattagatcagttatagttatttgttcaggcttcgataaaaagtataaaactcgggccaggcgtgggtggcttcaacgcctggaaattcccaacacttttgggaaggccaaagctaggtggaactatcctgaggttaaggtagtccaagaaccatttctgggccaactatgg

SEQ ID NO: 15188 - DNA, 527 bp, Homo sapiens
  misc_feature 480: n = A,T,C or G
actccagcctgggcaacacagcgagactctgtctaaaaaaaaaaaaagtgcttcaaaagcaaccgtataacagagacatactgaacataggatttctgccattcttgtctgcctataaggatagacaaactatctcagataagtaactgagatatttattcaacggtattctcatccagcataaaatacttttttcaatgtagtaacaaacttaccatcttttactttaagtgttctgttatttttgatttgcaatcagagcaatagtaaattgagtgagaaagttctgagttttacagaaactagaaggtgtaggaattttcttaagaaatcctgttctcatagcaaaccatcccgtttcttgatgaaggagttcagataagtatatgaagtttggagtgtttattacgactctcagaccttttgaaatttacccatcacaaataccttctgtttttatgtgtgcagttaatatagatntaaatatatacttgccttctgaattttattatagatatacagatata

SEQ ID NO: 15189 - DNA, 271 bp, Homo sapiens
gcgcggggttgaagagtgtgtataggaaaggtctagaaataaataggcttgtgcatacctaggcattcatgctctttcttcctcttcagagatcatcagaaaagaggtgggaatacacaagcaggtgcatgtaagcccaaaagctagaaagccttatatttaaccaaaggttgatgtgttcattccagttattcacttacagatgaaactaaaacaaataaaggcaagctattatcagtttggtagttcattattttagaacaaatttctc

SEQ ID NO: 15190 - DNA, 482 bp, Homo sapiens
tacccttggtggccaattgatttgatggtaagggaggaatcgttgacctcgtctgttatgtaaaggatgcttagggatgggaaggcgattaaggactaggatgaatggcggccaaggataatttcaaaccggttttttatttccttaaccttttgaaaaatgtaattaataaagttaattttttggttggagatgtgtttagaaaaaggggcattatcccggtctttttggaaaaccctaatataggggaaaatttattttattaaggggcctttgattcattgaaaagggtggaataaaaccttctttttatttaaataggggggaagtaagccgttctttggtaaaaaccctatactttgccgccttaatttgtttcccattttctcggtattaaccctttccccctgggtaacttgtccttttttaaaaaaagggcactttttttttacttatacaatttgtgtgcgccccttttattg

SEQ ID NO: 15191 - DNA, 252 bp, Homo sapiens
ggtactctacggtgtcaataattatttcagtctctgctgcaattagtgctaattacaatacctgagctataaaaataaaagatttcattatagcaaagttcacaaatatcgttttagttcagttatccacattgttcatctaaaataatacattttctttgcatataactgtcttagacttgtaattgaggatatttgatgaaacagatctgtatctgaaacagcactatgatgctaaacatttgcataagg

SEQ ID NO: 15192 - DNA, 392 bp, Homo sapiens
actctaaaatcctttccagctgctattgaacataccatacagtgggcaagagataagtttgaaagtcccttttcccacaaaccttcattgtttaacaaattttggcaaacctattcatctgcagaaggagtcttacagaagatacagagtggacacagtttagaaggctgttttcaagttataaagttacttagcagaagacctagaaattggtcccagtgtgtagaatttagcaagattaaagtttgaaaaaatattttaaaccataagggctcttaagctttctttactggtttcccttctgggacataccgaataaaaagatgggcagttttattttgggcagtccacccgaaaagggccacccctttccaaataaaatttggatttag

SEQ ID NO: 15193 - DNA, 365 bp, Homo sapiens
ggtacctaatctttctggcctgaagtttatgtagaggttgttccgctatcgtctagtatttaatgtggcagagattggacactacaggaaaaaaattctggatatttacatgctttgtattgagacagaaaactaatcacggtgaattgaggattgagtttccatttcttactgaaatggggtaaacattgccagtttgcatccttgcttttatctctcaatttctgcaaagtttaaactataatgtaaaattacagcattttaagagccttgataagcattagaaggtgcaatatgcaacacaggttgttgtaagacccagacctggcctaaaattcaaaatttttttacaaaggcttgaggca

SEQ ID NO: 15194 - DNA, 286 bp, Homo sapiens
acttctatgatatagttgtcaaaatcaactggaggataataaaatattgtgggttctcagcattcttagaatccaaattacaaccatatcagtaagggtttggtccacatgagccaactgaagtcattttcctcaaggttggaatttgtgccaacctaaatatgttgtttctttgatggtgtttattgctattggtattattttggactaataacaattattttgtctaaataatgctaagacaattctgttaagaattttgtcagctaacataattcattaagta

SEQ ID NO: 15195 - DNA, 358 bp, Homo sapiens
cccttagctggtcgcggccgaggtacttttttttttttttttttttggctctagagggggtagagggggtgctatagggtaaatacttggccctatttcaaagatttttaggggaattaattttaggacaatgggcatgaaactgtggtttgtttcacagatttcatagcatttaccgtagtatacccccggtcgtgtatcggaaaaagtgatttggtttaaacgttaggaaattgtatatggttttaaacctaatgtggggacagatcattaatgcaagacgttttgttgatattattattaatacaaatgggggcttaaatacttgagatctttatcccggcagaaaacttttaat

SEQ ID NO: 15196 - DNA, 322 bp, Homo sapiens
acagatctactggcaactttgggtgccttttgctcccttttatataaaagtagaaaatcccaatgatctgatgtagtatagctgagcatgcccattctcattcccaatatccacactgtgtttctaacatatgtgtgtgccccacccacctctgggacctttttgctcgactttttctcttggcttccacttcagtcagggagaatagggataggaaaagaaagaaataaggtcctggaaaagccagttccttgggactccctaattccttgaaattctacttgtctccatctttccaaataggaagggtccctgagccctt

SEQ ID NO: 15197 - DNA, 303 bp, Homo sapiens
ccctttcgagcggccgcccggcaggtactacaagatggaagtataaaattattggacaagtgaaatcgtatcagtagttcctgactgacagcttctggagccacactagagcagtgattctcagtctaacattaggttatcatgatgacgtatgagtaaattcttaatggttaaatgtgagacagttcacatttattcccatagaaatgtcattctcatttgaattcagagatacttctttgctggaagtatgaattatagctttacaccaaggagtgacacgtagactaatctggcaagcca

SEQ ID NO: 15198 - DNA, 362 bp, Homo sapiens
ggtacaatcacttttccatggtcaccctcttttctgctttatactaattgccctgttgaggtgtttccatgtcaaatgcagctcttgtcggaactgaaaatggcagtgccaagggagctgtgcaagtataatcaaagccggaagatttcctccatccacccgcaaccccaaggcttaagcactcccttaggaaccaaagctgactctttgggaaagttttcacagcgcttattaggtttacaaccctgcaaggatgtttttgtttgttcttgagccttaaaaatatttgtgaaacctgtgtttgttgaaactgtgttgtcgttgtgcaccaacacatggtgcaaaagggagtttgctttgcc

SEQ ID NO: 15199 - DNA, 364 bp, Homo sapiens
cccttagtgtggtcgcggccgaggtacattatacaataaggcaagaaactaaaaacccatacaaatattggcaaagaagcagcaaattactttgtttatagattacagtattacacatttagaaaatataagagacttcggcagaaaacaatgtagtttacctcaggaaaacactaatattttaccagatggcatagaacagaaactgaaaaaagtgagagaaagaccatatttcttgataaaaatatttagtatcacaaaaatattaatgcttccacaattgtctaaaaaactcctccaatacaaatcacaattgcaatacttagttgggggaattggggaactgaaaaattagtttttgttc

SEQ ID NO: 15200 - DNA, 766 bp, Homo sapiens
ggtactttaagaaaattttaatgtcataaataggcaacaaatattaaagcagagaaataagattaaaattagtgaaaggttaggtaaagagaacctaacagcagcagcagaaacagaaaacactacagatacgctacatccagatgtggcaagaaattgaacatatgaaacaaagactgtctctgacactaaaagcacaatggtgtcataaacaggaggggaaaaagactagagattgtggtgagttcaagagatttgatataaattgttacatatgttacccaattatctttatgaaatattgttttacatgaatattctgtatttttctccaagatgttataaatcactaaataagcaattcgagatataattacaagtagaatacaatatgaaataatactcctactctgcatttagacaagcaatatagattaaaggaatctttgttttggaaataaatgccagcaaatgaaaaccttcacattgaagataatcagccaaaaagtatccgtcagaaccctactacatatgaagaaatatagtgtagtcacagtatttatcgcatactttgatggccttagagttatttaatcctggtttcaagtaaaagaaggataatcgcatctatctcatgtagctgctcacaagattgaatgaagtaatacatgcaatgttatgggatagtaacttgcatggaatagcaccccaaatttgacttattctgtgcaaagcacctggaaaaaaaagacctgcaaataagtaa

SEQ ID NO: 15201 - DNA, 176 bp, Homo sapiens
  misc_feature 34, 54: n = A,T,C or G
tcgcccttagcgtgatcgcggccgaggtactttntttttttttttttttttggnggtactctaaataatgaccttccttgagctgcaaaaaaaaatttttccttctgaaatttttttaccattttttattaaaaatttttaaaagtttttaaaattaccaaggcttaaaccttttt

SEQ ID NO: 15202 - DNA, 302 bp, Homo sapiens
acaaggacactaagacagtgtagcctgctgacttgagaatgttctgtaaggactggaaacactagaatcttgaagaaacgcctggctagaggtgagggtaagctgttaattacactgattacagtttgtgcctctcagactgagaactcttttcttcttgctgggggcattgctatctctaggatgtttgccctgaagtcctgatagtctctttggggttttaataaatggctgaaaaaattgttgtggggtttcaacaggcgttcataggcacccttgcttggcaatataacatggctttt

SEQ ID NO: 15203 - DNA, 373 bp, Homo sapiens
acctatctcacttagatttgtggactaggaaagcaagattcagagatcatgtgacttgcatgtggcctagagataaaattcaaatctggttccgtagactccagggacatattcaccatgccatgggtggtggctattaaaccttgataaatttgtgtttatggttaacaaatgtgaaagctattaaacattgctggtttgaattttttacagtgcagaaatgtaaaatgaaaaaggatatttttctttgacagggttaccgagaagtcatgataattttcgtttgttcttacagatttaggccttttcttatttaatcaataatgtcttaacagcttacgcctgtggttgctgagacctgctctatttaaag

SEQ ID NO: 15204 - DNA, 525 bp, Homo sapiens
  misc_feature 21, 23, 28, 31, 32, 33, 39, 40, 46, 47, 64, 67, 68, 75, 77,80, 83, 86, 87, 93, 94, 98, 100, 103, 105, 136, 137, 157,172, 173, 178, 179, 180, 193, 206, 216, 229, 258, 259, 271,277, 280, 281, 282, 296, 298, 299: n = A,T,C or G
gaattggttattacgaacttncnacttnttnnnaggggnnccgggnnaatttgggggcccttcnagnnatgcatngnctncgnagnncgggcnncgcncnagntngggttggtatggggattattcttggccaagnnaaaatatttttttcccgggnccccccttttttttnnccccnnnaaagcccggggcnccgccccccgggncccaagggtnaccctttgggggntatctttactcaaggtgccacaaactccnngttctcttctcnctcttnctnnnaataataattttcncnnttttatttttaaaacaaacccccttcaatttttaatattgggaatttggggggaagaccctttaacccgccagagggtgtttttttccaaacaaccctcagtatttttcttcccaaaaagaaaatggggccccttttttatataaagggcgggggggcggggtgttttttttagaaaaaccccccccccaaaaaatctttgttgttgggggtttcttttcgcccaa

SEQ ID NO: 15205 - DNA, 448 bp, Homo sapiens
acatgaaaagatcctcaacatcattagtcaccaaaaaaatgcagatcaaataccacaatgacatatcacttcacacccactagaatagctataataaaaaaataagtaacaagtatggaagaggatgtggaaaaactggaaccctcatgcactactggtaaggaatggtaaaaattctgcaagccatttttcaaaaaaacaagtttggatagtttccctcaaaaaggtttaaaaccatagaagtttaccaataccgggcccctgcttatttccaactttctaggatattataaccccaagaaggaacctgtttaaccattaaaaaaaaggaaaaaaccccttggcaccatgaaaatggtttccaataaggcaagtggtttaatttccaatagaccagggcccaaaaaaagttgggaaaacccaaaccccaaaatggttccatttaaac

SEQ ID NO: 15206 - DNA, 346 bp, Homo sapiens
acgcggggagaaaaagggtggggagtgccctttcttgaaggaatcccttaagtgcacgtctcccgttttcttttcacatcaatgcagagtccctctgtgaatttacaacacccaacacccatgagttcagtccttaagaaggaaaattgagcaagtatttaattggttggacattgcataaaagaggtccatatccaggctaactctagaaattttattctcaaacttagtttggcctctttttcttctgtcagaaggaccatttcttagttggcactgggggaaattctttggcaccccaagaaggaatttaaacttgcgcctcacttgcaaaaaaatacaaatg

SEQ ID NO: 15207 - DNA, 262 bp, Homo sapiens
acatacgctctcagttgggatagcagttcatttccattaggcagacgtataaactaaggaatgttagtctgcagtattcattttaaaaatattgacatgcctttcccctcccctccatgaagtcagtgccagagtgagccagattgggaggttggggttttgtttggttggcttggttttcattaagggaaaaaacttgcattggacaatcaaattcccctgagtttcataatctcatcaatattttaagataggcgagcac

SEQ ID NO: 15208 - DNA, 338 bp, Homo sapiens
acctctctttcttgttggaaatgttgaagtattgaaatacttcttttctgtagaaggtggttctcccttctacccaggaataattttgtggcaagtcattgagtcagcagttattttgaccctaactgaaagagataaagttcctaagaatttattatatatgtttcttgccactgagtgagcaagaaaaatacatacccatcagtgctgactggttggtaatttctgaaacacaatgccacagctcttcatgaataacacagtaacagaattacagagaatttggaagagatcaatctctagatggatgagttagtctataaacaaatagctactca

SEQ ID NO: 15209 - DNA, 338 bp, Homo sapiens
acactctagcattgtaactttttccccctgagaagtaattttaagatctatcagtctcaatttaaatgatctgttaatcagccagagttttagtttcataatatcgttccattgcctgacagagatatacacactgaagtgcctttagcagacctgggaccgtcaagaatcttgttaccctgattattgcaagatgacatatttcttaagccatttataatctcatattcgggttgaatctgaatttacaaataaaagggttaaattgaggcagtttcaagcagcatttaggaaaatgaagtggcttcaaattttagtgtttctggttacattatttg

SEQ ID NO: 15210 - DNA, 341 bp, Homo sapiens
acccggggcccttaggcagaaaaagggtggggagtgccctttcttgaaggaatcccttaagtgcacgtctcccgttttcttttcacatcaatgcagagtccctctgtgaatttacaacacccaacacccatgagttcagtccttaagaaggaaaattgggcaagtatttaattggttggacattgcataaaagaggtccatatccaggctaactctagaaattttattctcaaacttagttggcctctttttcttctgtcagaggaccattcttagtggcactggggaaatcttggcacccagaagaattcaactgcgctcactgcaaaaatacattggca

SEQ ID NO: 15211 - DNA, 285 bp, Homo sapiens
ggtactctacggtgtcaataattatttcagtctctgctgcaattagtgctaattacaatacctgagctataaaaataaaagatttcattatagcaaagttcacaaatatcgttttagttcagttatccacattgttcatctaaaataatacattttctttacatataactgtcttagacttgtaattgaggatatttgatgaaacagatctgtatctgaaacagcactatgatgctaaacatttgcataaggaatgaaaaaagttagcaacctagttttttcaat

SEQ ID NO: 15212 - DNA, 287 bp, Homo sapiens
ggtaccaggactctcacacataagaatgttcagggaatattatttgtaaaaactccaaataaatataaccctaatatccaattagtagaattaatagcagtatattcaaagaatggactgtcatatagccatcaaatggacaaaatatagtaaaatgcaacaatgtgcacaaaaatacacagatatatatgcataaagtttgacagcatacaaaactaatttacattatttagtgatgcatgcataagtggcagttatttttaaaagcaaggaagtaattacaaaac

SEQ ID NO: 15213 - DNA, 370 bp, Homo sapiens
accctcattgtagccatgggaaaattgatgttcagtggggatcagtgaattaaatggggtcatacaagtataaaaattaaaaaaaaagacttcatgcccaatctcatatgatgtggaagaactgttagagagaccaacagggtagtgggttagagatttccagagtcttacattttctagaggaggtatttaatttcttctcactcatccagtgttgtatttaggaatttcctggcaacagaactcatggctttaatcccactagctattgcttattgtcctggtccaattgccaattacctgtgtcttggaagaagtgatttctaggttcaccattatggaagattcttattcagaaagtctgcatagg

SEQ ID NO: 15214 - DNA, 362 bp, Homo sapiens
ggtactttttttttttcttttttcttttttttttttttttgagatgagtctcgctctgttgcccaaattggagtgcagtgcacaatctcggctcactgcaacatccgcctcccgagttcaagcaattctcctgcctcagcctcctaagtagctaggattacaggtgcccgccactatgcctagctagtatttctagttttagtagagatgggggtttcaccatgttgtgccaggcctgtaatctcgaactccttaaccttcaaagtgattcccacccaccttcagccctcccaaaagtgcctgggtatttaaaaagttattgaggccacttgtgttcccagccagccagttttttttttttt

SEQ ID NO: 15215 - DNA, 276 bp, Homo sapiens
  misc_feature 21, 23, 33, 38, 39, 45, 54, 60, 61, 80, 110, 117, 143: n = A,T,C or G
cgaacttcacctattaagggncngaaatttggngcccnntttagnatgctttcntcctanncgggccgcactggtgatgnatattctttcagaattctccccttttaccntggggcncgggcggagggtctacaaaccaaatncaacacaaacttttcattatcaactgaaacaaatttgtgttaaagttcttaccacatatatctggctgatgtttaggctgttcatctctaattttattttcactgagaagcttttgatacttttcttcttcgg

SEQ ID NO: 15216 - DNA, 433 bp, Homo sapiens
  misc_feature 1, 19, 24, 26, 27, 32, 36, 46, 49, 56, 57, 86, 87, 107, 113,120, 223, 263, 266, 432: n = A,T,C or G
ngatatgtaatacgaactncactntnnagggnccgnaattgggggnccnccccttnnctttagaatgcaatggctcgaggcgggcnncgcccagtggtggaatgggnataatncttggcnagaaattttcggccccttttagccggtgggttcggcgggccggagggtaacattagaacatgagggaaagggggggggggcctttccccaaaagaagaggggncccccccccccccaaaaaagagagggggggggggaagggntcnaagaagagaggggggaaacgcaagaatggcctaaaaaaaaacaggggggggggttttttttataacccagagttttggggggggggagaaaaagttttttaaaaatttgggcaaaaaagaacaaaagggggggggtatatttcggggaattaataggagggggaana

SEQ ID NO: 15217 - DNA, 385 bp, Homo sapiens
ggtactccagcctgggcaacaagggtgaaactctgtctcaaaaaaaaaaaaaacagtgtaaataaaggcacctatccttacggggcttgtgggagggttgagggaaggactacagtctccttttatcttgtgtttatctttagttttagcaaacattctataaggtatgatttgtatcatattcagccgcatgaaaaacacaaatttgcatttcgattttgttcacaaaatttgggacacaagtcgtttatcacttttaacatcctgaagttgaactggtgcagcagtagtatccgttatgcttgtcagcccttataatccttcctaagcaataaaatacccatggtggtccaaatcccaagacacgtttgaatgaacaggcttc

SEQ ID NO: 15218 - DNA, 710 bp, Homo sapiens
ggtacacacagtcctttatttataaattccttaacagagaaaaacacctttgtaaggctcaacttacctattccagcaagcacactttttctgtcattttttctttcttttcaaatttgatattgtcattattttaaaatagtaagttttctttaatagtcttttgggacctaacataccctttctcatacaattcctaatgctctgtttatggcagataatctgtaatgttatgaagacctatcaaaaagttttaaaagtatttctgtcttcaaaggtagtaagacaggattaaatttttattagaatagacaaatcagtgaatggtatgcatgtatctagtggttactagaactcaggatcacacaatataatagcatcacgatctgtgtatatttttgatcaagatgataataatggccttacttgggtttttatccgttatcaaatcttacatacaaaagagtggaaagaattcctttacaaaatttttaaggaaaatatgtttttccaatctatcacattcatggaatggatatatggttctgaaaagttttttgaaacaatgcaaaacggtataaaactaaaattgagctggtatttaatattcccgttgagaaataaaaaaagatgtgtataaagaaaagggaggatgcgtttattacccggcccgggcggacgtttcaaaagggcgaatacaaaaaaaatgg

SEQ ID NO: 15219 - DNA, 773 bp, Homo sapiens
  misc_feature 539, 641, 680: n = A,T,C or G
acttactttgttatagttggtgctattactgaatcaatcaagtagatgaaaaattagaagcatacggtgttcagggagggataattctttttttttgagtaggaattttgctcttgttgcccaggctggagtgcaatggcgctatctcagcttactgcaacctctgcctcctgggttcaagcgattcacctgcctcagcctcccgagtagctgggattacaggcatgtgccactacgcctggctaattttgtatttttagtaaagacaaggtttctccatgttggtcaggccggtcttgaactcccaacctcaggtgattcacctgcctcggcctcccaaaatgctgggattacaggcgtgagccactgcgcctggcctgaatttttattctataattctgttatagaataaaaaaggggggaggtatagtgtgttgcaaagttttatgacaatttttgtagctagaagtattcgaaattaaaggaaaaagaaaaacacagaagtaaatacctaccaacatatgtccagtaatactatntccatctatgggtatccagacataaaagtctatattgaaagataagaagtagtgggtccaaatacatcacttgagttgggtcaatttattctggatttaatnttttctatttaaataaacaaaggcaactgcataaccatnttgtcttaataagaagatactgggatgactgatgacactggtacttaaacctaatttttcagagtcctgactactttaagtacttagtagctt

SEQ ID NO: 15220 - DNA, 381 bp, Homo sapiens
  misc_feature 257: n = A,T,C or G
ccctttcgagcggccgcccgggcgggtacatgggactacaggcacgccccaccatgcccagctcatttttgtatttttagtagagacagggtttcaccatgttggccaggatgatcttgatctcttgacctcatgatccgcccctcttggcctcccaaagtgctgggatcacaggcgtgagccaccacacctggccctgtatttattctctttaaagagagagaaaactatgagaggccaaaattatttaattaaantctttacgcttagcacaaggggaaaacaatgggaattttgccctaatcatggggttgatgaaggcattacaccaatgtaacaggaaaacaagtcacattttttaagtaaaaagggccaaaaaag

SEQ ID NO: 15221 - DNA, 758 bp, Homo sapiens
  misc_feature 6, 85: n = A,T,C or G
actttnttttttttattttttttttttttattttctttttttttatttttatatttattttttttttattttttatattaaaatntttttttttttattttaataaaaaaaaaaaagggggggggtatttaccctttaaaaaaaaaaggggggggttaaaggggaagaaaaaggtgggggggcttaaaggcaaaagaaaaaaaagggggggaaaaggggggggtttttttttcggggggaaagggagggggggtttacatgggggaaaaggggggaaaaaaagggggaaattcacgggaaaaaacccctaaaaaggggttaaaaaaaaaaatttattttttatatagggggggctttctgggcttttataaaaaaacggccggggggggtcaaaaaacaggtggaagaggggaaaatttaaaagggggagagacaaaaagagggcgcatttggggggatatagggaaaaatggtgggaagggggaaaaagaaaaagggacgggggggagaaaccgggggataaaagggggaaaaaagtgcaaaaaacaaaaagggggttttggggggggacacaggtggggggggaaaataaacaaaggggggggggaaaggggggagcgagacggggacaaaagagggggaaaagagggaaaaaggtgttcgggggggaaagagttaccggtaaaaaattcaaaaaaaaaaggcggggagaaaaaggaggaaagggggggggctaagggggggtaaaaaaaataagg

SEQ ID NO: 15222 - DNA, 295 bp, Homo sapiens
ggtactatgatctgttgctaagaaatcttataaataaaagttatttaatgtttgatcattatctctggtgtgactaaaacaagtatgataaatcaggaacaagaatccccaaaggtcaagctaaataaacattaaaatattctatagttatttgcaaatgatggcattatattatatttgatttttgatatggaagtatcctctgaccaggtgtggcagttcacgccgcctgtaatcccagcactttgggaggccgaagcgggaggattgctcaagcccagggggtcaaggctgc

SEQ ID NO: 15223 - DNA, 289 bp, Homo sapiens
ggtacaagatttcttagggcgaatccaattccatcaatacctggggaaacacaaaaacctggtgcagctggaaggctgctgcactgaaaagctgccactctatatggtgttggaggatgtggcccagggggacctgctcggctttctctggacctgtcggcgggatgtgatgactatggatggtcttctctataatctcacagaaaaacaagtatatcacatcggaaagcaggtccttttggcgctggaattcctgcaggagaagcatttgttccatggggatgtggca

SEQ ID NO: 15224 - DNA, 276 bp, Homo sapiens
acagaggccctgaggcagatttgagaaagggcaaagaagtcactgtagctgtggttgaggtggaaagaaggagagtggtagaaaatggagttagagaggtaatgggggtgggaagaatgtgaggggcctcacaggccttatggactttggatatttctctgagagaaatggggaacctctgaagtgttttgatcgcaggagatgtattagtcatctgttacagggtaataaatacagccaaccaaaatgtagtgggttaaaagaacactaagtacc

SEQ ID NO: 15225 - DNA, 366 bp, Homo sapiens
acaaccagaaccaacaattgtatttctctatagttattttaaaatagtaatcaatgctatgtatttgatgtatatgtttctaaattagaaatttcttttggctttgtgttttttttatgtgcgttaaatatgtaaactgaacctgttcctaaaatgcattaaacttgaatgctgtgtctatccaatgccagaatgctcagaagaaaagtgaataattcagtcattcatctggatgtagttttctgtgtaatctcaaatatctgaatattgaaaaaactaggttgctaacttttttcattccttatgcaaatgtttagcatcatagtgctgtttcagatactggatctgtttcattcaaaatatcat

SEQ ID NO: 15226 - DNA, 378 bp, Homo sapiens
cccttagttaggtcgcggccgaggtacaacattggggagcattttcaagctacagcttcgtggccaacaaagattatctatctgtatatctctcttttggctgccagacccaaatactattttgcatggacgctagctgatgccattaataatgctgcaggctttggtttcagagggtatgacgaaaatggagcagctcgctgggacttaatttccaatttgagaattcaacaaatagagatgtcaacaagtttcaagatgtttcttgataattggaatattcagacagctctttggctcaaaagggtgtgttatgaacgaacctcctttagtccaactttccagacgttcattctctctgccatttggcacggggtg

SEQ ID NO: 15227 - DNA, 390 bp, Homo sapiens
ggtacaaataatagttgaattatgttaacgggttagaagtagatggatttcttgcctgtaatttccaaggagttacttttttataatgtaggcattccatttagttttgttaaataaaaaataatgagactaacaaagttaatgagaatatttagaagggaaaaaaaaggtactatgtattaagacacccatgaatactgttttatatttacattctaagccttcgataggcctgaagttaaattaagattccccaaatctgcctatcagcaattcattttctgtgtatgttgactcctcacctaaatttcacctgctcactaactgctatcaagccttttctttcatagaagtggctgatatcacatattttaccttacaattaaacat

SEQ ID NO: 15228 - DNA, 346 bp, Homo sapiens
actttgtgtttgaaagtgatgcataaatggcctcttttcctattttagcgatcaagtgctagacagagatcaaagaagccatccaattgtctgtgccccagtgtgaagtagatgatgcagtgattcaaggaggtgatgggtggagcttttgaggagcccctactgtgtccaccaggattgaagccaagagagaaagtgaactgggcccaggctgcagtagaagctttttatccatcttctattccatcctgaggtccacagctagcgagcagggagctggtggtgctctttcccatgctccagtggcttcaatgaagatgctctttcctgtatttcagtggcttcc

SEQ ID NO: 15229 - DNA, 356 bp, Homo sapiens
ggtacgcggggaaaaaagaagggcacatgagcaaacatgatggcccctttatgagaggtaatttactgaaatgcacagcgattacctgctcacccagccctgatgtaattaaaaatggcaggctaggggctctgtttcccccggctctggcagagaaacctgggtttcgacttgtgaagcttgaggttggatgtgggaattggcttggagtcataggcgatgagagggacattaggatattatgaagcccgtgaactcaactcctgagaaggacacagcagagcgagagaaaagatggaataaaaaggcctacctcattgggctcgtgtgggtgaggagaactgaagagtctgaga

SEQ ID NO: 15230 - DNA, 380 bp, Homo sapiens
ggtacccgagagacccggcggtggggaagtcacttcctcccgaagacgctgtttcctagcaaccgccctccgcctctgttattagcccctcctcctcgctcggtccaggaccggctctgcgggcgccgccaggcccagaccaagctactatcagaagttgaattctaataattagctattttataaaggtaacgagaaaaaatacactatgtctgatgaagtttttagcaccactttggcatatacaaagagtccaaaagttaccaaaagaactactttccaagatgagctaataagagcaattacagctcgctcagccagacaaaggagttctgaatactcagatgactttgacagtgatgagattgtttctttaggtg

SEQ ID NO: 15231 - DNA, 441 bp, Homo sapiens
ccctttcgagcggccgccccggccaggacagtaatggatggccccaacttgggggggtgtcctggtgcacccccagtgggtgctcacagctgcccattgcctaaagaagaatacccaggtctggctggttcggcacaacctgtttgagcctgaagacacaatgccagagggttccctgtcagcccacaatttttccacaccccgctctacaaatatgaagccttctgaaacaatcaaaagccttagtaccagaatgaaagaactccaagcccatgaaccttcatgcctggctcccgcctggtaagaaacccttgccaaggaatcacaagaatgtttgttgaaaggatcctggggcccttgccccaccccaaggaaccccgccacttgggggaccaaccttgctaacgccctaaagcctgggggcaagcattcgtaacccag

SEQ ID NO: 15232 - DNA, 375 bp, Homo sapiens
ggtacatgtggccctggacaacctgcaagcagctcaggtggccctgggcgacccatcagtggttcagttagttctgcaagacccttgggcagctctcgtggccctggccggcctgtgagcagtccacatgaacttcgacgaccagtgagtggcttgggccccccggggcggtctgtcagtggccctgggagatccataagtggctcaattccagccggacgggctttcattaattcagtcccaggaagaccagtgagcaacttgggacctgggcaaacagttagtagctcagggccccactattaagttctacggcccctgttgaatttcaaacaatttctttccagaaattatatttacccgaatccaactatg

SEQ ID NO: 15233 - DNA, 265 bp, Homo sapiens
  misc_feature 265: n = A,T,C or G
ggtacgcgggggaaaaagggtggggagtgccctttcttgaaggaatcccttaagtgcacgtctcccgttttcttttcacatcaatgcagagtccctctgtgaatttacaacacccaacacccatgagttcagtccttaagaaggaaaattgagcaagtatttaattggttggacattgcataaaagaggtccatatccaggctaactctagaaattttattctcaaacttagttagcctccttttcttctgtcagaggaccattn

SEQ ID NO: 15234 - DNA, 370 bp, Homo sapiens
ggtacttttaaaatattaagtttacaaagaatcattctaatgagtcatgtattagcacaaatatacaggttgagtgagtatcccctactcaaaatgcttacgaccagaaatgttttggattgctggggtttggggggatattttagaacatgtgcattatatttacttggtgaagatcgctaacctaacaatggaaaaatgctctgggagttattttctttgagcattaatgtctgagcctcaaaaaatttcagattttgaaagcttttcacaatttgaaattttttaataagggttcctaaccctcccccattccttgaaaatttttataatttccaaactatctttgacttccaggatttaaaaaggg

SEQ ID NO: 15235 - DNA, 354 bp, Homo sapiens
ggtacttatatatgtaaatgctatctctgagttgttataagataaattttaattttaaaaaacttgattattctatttcattattagaacaattcttgatttgttaagttatccagatgtgttacttactcttgatataagaatatttaaaaggctcatttaaaacaattttttaaataacctgagttttctctacagttttcatcaagcacatgagtgcagagtttgcagactgagcaagtttgtaggaatgaagattgtagtttctcacctgttaatttcattctgtagtatgcaccacaagcaggaacaagttaaagcagaattcctatgaattcaaaattaggatacatt

SEQ ID NO: 15236 - DNA, 513 bp, Homo sapiens
ccctttttagcggccgcccgggccaggaccatgccttgcaaaattgctggagcccaaaaggatgactggattacgccctaaggggtgggaggggaccactcctggggcctttcgtgaattgtaagagcaaagacctgagaagcttccctgcctttcaatggggctgttgaattcttcccctttctaaatgaaaaatcccatagaaattttgcttaccatttggaagaaattttcaaatttagggaaacttcacaatggtttgaaatcctgccccctattcaaaattttttttaaaactttggctgaaaaaattaaaagttttttttcaaaaaatcctggttcctttggaaaaaattaaactttttttcttaaccagaggtgcctttggggaattaacttaattattcaaaccttatggaattaccttttgctttacaaaaacttttttctttaacctccttttttaattcaacccaaaaaggtgggccttttttaatttcgatcttctaatta

SEQ ID NO: 15237 - DNA, 335 bp, Homo sapiens
ggtacgcggggagacagagatggagacggaaagacaaggacaagaagatggaatctgagctaatggcggagacatggaaccagtagagaagagacccactgtcttcagagagtgctgaccaggaagaggagaagccttggggactggatcaggtgtctgtccctaggtccccattcctgactcttctcctgccaccctgatctgggtgtagcatcatattacatgctgtgattgccattccagccccatactgtgggaggctggggagtgtgagaagctttcccaaccctggcaggtacatacacaatcactcaactggaaacatcaaaaccatg

SEQ ID NO: 15238 - DNA, 366 bp, Homo sapiens
ccctttcgagcgccgcccgggcaggtactcctcatgatcgtctacacaacattctgtgacacgttctctaacccaaatattgacctggataaattcagccttgttctcatactgttcataatattttctatccagctgagttttatgcttttaactttcatcttttcaacaaggaataattcgggtttcacaccagcagacacagtggctatcattttctgttctacacacaaatcccttacattgggaattccgatgctgaagatcgtgtttgcaggccatgagcatctctctttaatatctgtacgcgggctgattaatatatttaatatattgaatgaaaaatagacatgtagttggaaaaaa

SEQ ID NO: 15239 - DNA, 352 bp, Homo sapiens
acctttccaactcaacagacatcatcgagagctggatgacggtgcaaaacctgtggatttatttagaagctgtctttgtgggaggagacattgccaagcagcttgcccaagggaagccaagcggtttttctaacatagataaatcttgggtgaagatcatgactcgggcacatgaagtgcccagtgtagtccagtgctgtgttggagatgagaccctggggcagctgttaccacacttgctggaccagttggaaatatgccagaaatcccttactggtttagttcactggctctttgatagctctcggtatccttgagacaaaaggatacaggggagactagatagcattag

SEQ ID NO: 15240 - DNA, 340 bp, Homo sapiens
actgaagagtaaatggtgcaatttggatgtgcaagtcagtaaattgataattggcactcttgaatgcaaaatagaaactagattctcaactatactgaagcttccattatccagaatgtcactgcatatacttggtgaattataaagtcaaacaagaaattcttctaactttgtcctttcttgtcaaaaatcctctcattaatatgctttcaatgtgcaaagtaaacaaacgttgcattgattgcgtttttcaagggtctaaatattcagtattaacttagtcctgaatattttagagatttaattggaatgtatataagaaataactgaaggttctttt

SEQ ID NO: 15241 - DNA, 255 bp, Homo sapiens
actcttagttaagtaacctttaaactacagttatttatcacaaccatggtgacatcaccaagggacattctaatggaactttaaaaaatccatctcaaaatattacagggattgtgaaatttgatgaactagtgaaatgagatccgaggctaaaaacaactttgaatcaggtagctcacattcctgataaccttcctcttctgttataagcaagcgtctggccaggtttggacatatcatgccaaatagaatctt

SEQ ID NO: 15242 - DNA, 484 bp, Homo sapiens
acaccaaggtggtgcattaccggaagtggatcaaggacaccttcgtggcccacccctgagcacccctatcaactccctattggaggtaaacttgggaaacccttggaaaatgacccaggcccaagaacttcaagccctcccccaattttctacttgacgcttttgtcccttaaggtggtggagggtcccaaggggttgcctagggaaaacagaaaaatcaagcagaacacaaggttgtttagacccagaagttggttttctttaaaatggggtgtgaaatttgcggtccctcttctggtggttccctgggggaaattacttgggcccattgcccttgggagaacaatattcaacttcaaatttttcttctgagggaacacaagaatagggaatgggggtggtcctggggttaattttgtgggggggtaccctacgggcccggcgaaccacctctttagggggcggaatttcccagcaacacctg

SEQ ID NO: 15243 - DNA, 267 bp, Homo sapiens
accttacaatgttagtaactgtcttttattaaggaagaaaaagttaaaatggcatgtaacttaagaaggtgggagaataataaaggaaaaaattaagaacaaaacgaaaagaatcatgaaatagtaaaacagtaaaattaagatataaatctcagagttggttatttgaaaagatcaatgaaacagagtaattctggaaaaaccaatgagaacaaaaagggaaagcacacgcaacatgggaatgaggaagcagaatactacaactcc

SEQ ID NO: 15244 - DNA, 442 bp, Homo sapiens
ccctttcgagcgggcgcccgggcagggactttcttcattaagaacaaccctggtatttaagggggcaggcccttcacactctttacctgggggattttggaggccttctaaatccaaagtgctctctgactcattattacgtgtgctgccacagacaacatgctctacacgttttctgatcaacagtcaacagatgcttggcccttccttccaacttttctcttttctcgtttttcctttcccgttttctgggatggtaataactttaatcaccccttgtaaatcattcagagtttaaccatcttgctttggattaccagttctgaagtttttcaaggggtgggaccacttgaatgttgtttcaattttcccccattttctttctttttgggtggggctttccaaaaacttttcaagcaggtcctcttttaaggaggtaagg

SEQ ID NO: 15245 - DNA, 380 bp, Homo sapiens
ggtacctggggtctcagggttgctctgggcctgatcatccactcagatctgtaaggaggatttgcaggatccatttaaaaagatcctcccttacttccacaagcatggcctttggctcttaaatacctgtgctggggttttgtaattatagaaacaacaggagccaaaactcattaatgttgagctacaaaccagacggaagcttatttctcaaaacagggctcacgcctagaaaaatctagttttctgaaatcgctagccagcaacagcactgagatggccatcccagaaacaaggccaacacagaagcacccataaaggctgctggaggttgggacaaagagatccttgctgaccttacagaccccctgacttccaag

SEQ ID NO: 15246 - DNA, 330 bp, Homo sapiens
actttttagtgatgtggcagaaatccctgttgattctaagttttagagtgtcttttcccctatttctgacctacaactataaactactctctattaggagaactagaccactttcttcattcttttctaaactgctgcagattgccgtgaactctatcaatagtctcttttccgcaggcaaagtggcattttctaaacatgtttgcttactgccaggctggtttgaaatctatgatttactgcagtaggtatggtgcttaaaacaactgtccgagggtcttttaagcgggaaaagttcaaagggaagtggtcctgataatggtaccttgg

SEQ ID NO: 15247 - DNA, 343 bp, Homo sapiens
ggtacctatcgtgggaagttgacagctgatatcaactgggcagtgaatggaatctcaaaaggaatcattaagcagtttcttggctatgttcccatcgtggtgaaatccaagctttgcaacttacgtaaccttcccccacaagccctcattgagcaccatgaggaggcagaggaaatggggggctagtttataatcaatggcattgaaaaagtcatccgaatgttgattatgcctcggagaaattttcccattgcaatgataagaccaaaatggaaaaccagagggcctggttatactcagtacggagtttcaatgcactgtgtgagggaagaacattccgctg

SEQ ID NO: 15248 - DNA, 332 bp, Homo sapiens
  misc_feature 332: n = A,T,C or G
acagtgaaaagagccaaggctgtgtgaccccctcatcacttagccaggcgtatggtcctggtttctgaggctgccagaaagcatcttagcaatttgtgtttggatggtccatgcctgactattctaggctggaggttcctaaagagtaacaagaggaagagaaacaagaatctctgacacttgttgagaatagagcacagtcccatttgtttgaaaagagacaccaggcagccatgtttatgtgccagaaatgcattccacctcaaggaggacttaatttatggacccgtgtgtgccaggctgagctgggcaagatctttctcaggacaaan

SEQ ID NO: 15249 - DNA, 384 bp, Homo sapiens
ggtacttttaagttatataaagatttttagcttcataacaccttttgtgggacaatttaatgtgggacagcttttgtgggacaattaatttaataaaatttaattccttatccaacttttaaatgtatgacatttcaaatttcaaatttagtaaggcctacgacatgccacacttgcttttccttcaggttatttacttggcattatttcccttgcaacttggctatacgagcaaatccatactaaagttgctaatatgctttcttaaaagcttagtcaactctaaaacatgcattggcgacacacataattcccttgatgagttatagactacaaacactgagtgcacttctgtgcacaacactgtaggttaaaggaaaaaag

SEQ ID NO: 15250 - DNA, 490 bp, Homo sapiens
tccccgctctctgcttcaagtaattttcaattgatctcaagggggttcctggtccataggattcaacaaagtttgaacctgccgggggagccaagggggctttcacttagggatcatgggtttccccggtaaatccaatggtcttggcccaatgtaaccgggtaatggtggtgtttcaagcccttccccaacgactcaccccaagtttttcgcttgcccgggattaaactttgaaaccccactttttggccccttgctttttcccgggcaattccttgtgcctttcttaagggattcttcccacccgttgttccccccaccaagaaacaagtattaccccagttccttttcaatcaaagaagaatgggggtttttccaaccaaacccaacttgggtgcggccccggcctctgaattccccatgggggggggggttttcttttcccttcttttggttcttggccaaccaagaaagcccttggggggggggg

SEQ ID NO: 15251 - DNA, 372 bp, Homo sapiens
acaaatatttttgtttattaaaaaattagattgttttgttttattattgaatagtaagaattgtttatatattctggatacactctttttcagatatgtgtgttgtgactattcttagtctttagcttgccttttcattttcttaattatgtctttcaaagaacaagtttttcattttgacgaagcctagtttatcaattttttttatggttggtgctttttgtgtgttccaagaaatctttgcctactcatttaattacctgtgtgcccttgtcaaaatcatttaattttgactactcacttaattaccttgcctactcatttaattacctgtgtgcccttgtcaaaatttactgtttatctgtgaatctg

SEQ ID NO: 15252 - DNA, 349 bp, Homo sapiens
acatttgttgggggcgtgacattaacatataaccacttagagtggacatgcagttagagaaaagtcaatgagctggaaccaagctgggaattccaacatgcagaagttaaacacaagaggaggggccagcaaaggaaacagaaacagagcttccagcaggtggggggcatttggaagaaaacgatgccatagaagccaagatgaaatagacatcaaggagaaggaagtagtcaattgttttgaatgctatgaagaaagataagaataggtaaatagtccttatatttgataacagaggtcactagtgatcttgatgaggggtttcaatagaatggtgggattatatacc

SEQ ID NO: 15253 - DNA, 343 bp, Homo sapiens
ggtacgcggggagacagagatggagacggaaagacaaggacaagaagatggaatctgagctaatggcggagacatggaaccagtagagaagagacccactgtcttcagagagtgctgaccaggaagaggagaagccttggggactggatcaggtgtctgtccctaggtccccattcctgactcttctcctgccaccctgatctgggtgtagcatcatattagatgctgtgattgccatccagtcccagactgtgggaggcttgggagtgtgaggaagcttttcccaaccctggcaggtacatacacaatcacttaactggaacaatcaaaaccatctatgagt

SEQ ID NO: 15254 - DNA, 368 bp, Homo sapiens
ggtacaaccagaaccaacaattgtatttctctatagttattttaaaatagtaatcaatgctatgtatttgatgtatatgtttctaaattagaaatttcttttgggctttgggttttttttatgtgcgttaaatatgtaaactgaacctgttcctaaaacgcattaaacttgaatgctgtgtctatccaatgccaaaatgctcagaagaaaagtgaataattcagtcattcatctggatgtagttttctgtgtaatctcaaaatatctgaatattgaaaaaactaggttgctaacttttttcattccttatgcaaatgtttagcatcatagtggctgtttcaaatacaagatctgttttcttaaaaatg

SEQ ID NO: 15255 - DNA, 384 bp, Homo sapiens
acctgaaataaacttgaaactaaaacgatcatttgtggaggaaaatacaggattttccaaaacagtttcagagctacctttgcagatgggtaggcttttcacccacccacagaaagaagagtcaacggggctgagacaggacagggatgggtttcaggagcacaattaaaagtttttcgtatcttaaagaaaatatctatgttcagagagaaaattgagaagataagttactgcccagttcctctggtctttgacacttagaccacataagaatgttccatggtagaagggttgggacagagaatcttaggaatcctaagagagaatcaatactgctcccctaccccaggtttttcttgttttctttacaatagtatccttatt

SEQ ID NO: 15256 - DNA, 419 bp, Homo sapiens
cccttagcgtgggcgcggccgacgtactaaacatatccattcacccctagtttatgtgccaaccttattttatattacattcccaaattatatatagctctgtttctaagctctattctgctctattggactattgtctggtcttatgctaatcctaccttattttaatgtctgtgactttagtcataggacataccttgaagaataggaactcccttactgtttaaacagttcatttggctatatgtggaattttattctttctatataaactttaaggtttgtttatagagttccttaaaaatttgattggaattgtatgaattaatagggagaaagttgatatctttatgatatttgttccatccaagagcatggaatgtctgtattttaaattatcatctatattgtttattagg

SEQ ID NO: 15257 - DNA, 376 bp, Homo sapiens
acgttgttctttaaccagaaaggttcactgctgactcccccacctctcaaaaaacaaacaaacaaacaaacaccaccaaagctttccgccattcatgcacatgcttattctgaccccaaccccatccctacaaaggggcagcagacagcacaatagtcaaggacaaggtttttatttatttatttatttattatttatttatttattttttaaggagacaggcctcgctatgttgcccaggctggcctccaactttgggctcaagtgatccttctgcctcagccccccgagtcgctgtgcctaggagcacgcaccaccacacctggcttaagtagaaggttctgaaatctgccagaggctgagcaacagaaagctt

SEQ ID NO: 15258 - DNA, 363 bp, Homo sapiens
ggtacagtgaaaagagccaaggctgtgtgaccccctcatcacttagccaggcgtatggtcctggtttctgaggctgccagaaagcatcttagcaatttgtgtttgggtggtccatgcctgactattctaggctggaggttcctaaagagtaacaagaggaagagaaacaagaatctctgacacttgttgagaatagagcacagtcccatttgtttgaaaagagacaccaggcagccatgtttatgtgccagaaatgcattccacctcaaggaggacttaatttatggacccgtgtgtgccaggctgagctgggcaagatctttctcaggacaaactctgccatgcagctaaaagcctgaaaac

SEQ ID NO: 15259 - DNA, 358 bp, Homo sapiens
acaacaaaccaataatgataaaaaatacttctctttttctccctgtttccctttttcccttggccacagccaaatgctaattgctgctttaattacagagatgtgtaaatgtattcagattacaaactctacaggaatacatcaacattttaactcttttgcgtttttactgtttaactgttttaaatgcaagttattttagggtgacactccttccagttctggccagatcatgagtttcaagatcaagagtaaaaagttattagaaataaacagttttataaagggaggcagcccttttccctcaagaacaactttgttgagagttactacttgacagcaagcacagaaatgacat

SEQ ID NO: 15260 - DNA, 402 bp, Homo sapiens
ccctttctatcggccgcccgggcaggtaccattcttatctcagaatgctgtaaaccatcagtagaagcagtttagatttggactgcatggtaaaatgaaaagtaataaccctccaaccacaacctagtcagggtattaataattatatgtagcaagaaaacaaagaagaaaataatattgaaaaaatggagattccccaaccagtttcatatttgaaggatctgagttgtatttttattaaggaaattttttttctgaatactgtcttccaaaatgttaacattaaaatctgaatcagaggactctgaatggaaaagaagtttgatcactgacacctagggctctgaagcgtgtgtggccacatggaaaaagtcaaaggatgcgcttgcaaaatttccttgg

SEQ ID NO: 15261 - DNA, 376 bp, Homo sapiens
ggtaccaacaacgcacttacccactgttttaatctaggttattcttgaaagcagagcctgagacaaaggtagacacattctatttatgagtctaacacccaggagcaggaatgagagataggggagtgaactggggaaaggggaaactaagtccgagcaaaaccagatactgctcttatcaagtggtccacccctattaatggctacataatgcagaactttctcaggattcttcttaaactttatcccagaactgtctgcctcagggagaaaggagaagtatttctccatcagcagccacctcctgcgtgtgagggctgctcctttggggcattagcccactgcctacaccaccccaaccctttgggctgcaaag

SEQ ID NO: 15262 - DNA, 250 bp, Homo sapiens
ggtactataggatacaaccagcgaaacagaattgatactctcatgtatctactagcatatccacaaaaacccatggttaagacaaaaaccattgaattgatagaatttgagaaacttgccagctgaacagaatgcaacagttgctgtgatgagctatagtggctatgatattgaagatgctcttgttttaaacaaggcctctttagacagaggctttgggcgttgccttgtatataaaaatgctaaatgt

SEQ ID NO: 15263 - DNA, 399 bp, Homo sapiens
accaggagggtattgatgtttgaggtccaaactgaaaacccatcacctccttcccactgctatagcagcgttagccctggggttcattatctagccagttcacaccttctaaagtggggctctgaaaatgtcctacttccctcacagacaaagcaattctcaagcctcctgagatcacccaccaaccagagcaactgctgtcacttggaggtgcagctgaattcttctaattgtgacacaaactcttgaaactgtaaatgctgaaagattaaatgaggttataacacttagaaggatttacaagttaaagtaagtcaaatcaataggtctttatttcatatcctgaatggtttaactctgcgggaaagtgttagcaactatatgaaataggaagaaatc

SEQ ID NO: 15264 - DNA, 441 bp, Homo sapiens
ggtactctacggtgtcaataattatttcagtctctgctgcaattagtgctaattacaatacctgggctataaaaataaaagatttcattatagcaaagttcacatatatcgttttagttcactttatccacatttgttcatttaaaattatacaattgtctttacatataactgttcttagacttgaaatttgaggatattatgatgaaacaaaatctgtattctgaaacaagctctatgtatgctaaaacatattgcattaatgaaatgataaaaagtttagcaactctatgtttttttcaatatttcaaaatattttgagaattacatcagtaaaacttacatttcaaaatgaaatgacttgaatttatgtcaacttttactttctgaaacattttttggctatttgtgattagtacacagtcatttcaagattttaat

SEQ ID NO: 15265 - DNA, 382 bp, Homo sapiens
actctacggtgtcaataattatttcagtctctgctgcaattagtgctaattacaatacctgagctataaaaataaaagatttcattatagcaaagttcacaaatatcgttttagttcagttatccacattgttcatctaaaataatacattttctttacatataactgtcttagacttgtaattgaggatatttgatgaaacagatctgtatctgaaacagcactatgatgctaaacatttgcataaggaatgaaaaaagttagcaacctagttttttcaatattcagatatttgagattacacagaaaactacatccagatgaatgactgaattattcacttttcttctgagcattttggcattggatagacacagcattg

SEQ ID NO: 15266 - DNA, 394 bp, Homo sapiens
ggtactgggaattccctttggggggtattttgctaagggaaactggttaaatttttggtaaactaaatttttttcttaaaataaagactttttcacattgactggcacagattacttagcaaaagatagcaaaaccggtggttgaagaataattcattttaaatcgaatgtattttagtgtgaatttaaaaatttcaatacatcaaatctataaatctcccttatattccttatgatgaggctaaaataaaaagtcttaataaaaatggttaaaataataaaataaatttactgtttctttgtctggggtgttccttttaaaataggtcaaatttctaatatcaattcgccgacttattctaaatatgattctgttttttgctaccggaaggtt

SEQ ID NO: 15267 - DNA, 384 bp, Homo sapiens
ggtacttgataccatgcctagtgcatagttggtgcccaattaatacatgattggattatagcataatcactgatcactacatttaaagcagtccaatagtggaacaggctgcctcacaaatagtgagctcttgtttcctctacacagattctactatgggccaggatctcagccaagcagtggagccataggctggacagacacaagccgagattttggaaaaagactgagtccctctcagcacttgaaagatccctttcaacacccaaacatcaaaagccatggtatattgccaagcaagggtgcctatgaacgcctgttgaaaccccacaacaattttttcagccatttattaaaaccccaaagagactatcaggactttag

SEQ ID NO: 15268 - DNA, 389 bp, Homo sapiens
ccctttcttgcggcctgtccgggcaggtacttcatatcaggacgaacccaacaatttgtctgcccaaacatggtctcaggtctgagagtagcagccaccaagaaaatatttttacctttcaggccacttaatttagatgggtatggctcaagcaccttcaatttgagtaaagtatattcctgaggtccaacaccctctccagtttgtctatcatgatccatgcaaggctgtccatctttcggagagtaaattgtgtaccgcttcccaaatttaattttgtttctttctcttaatgttaaaaattgccatctgacaaatgaatcatagtaaggattaacatcagtggtgatgaaggaacgacgccagtctaccttcaaacccattctttt

SEQ ID NO: 15269 - DNA, 384 bp, Homo sapiens
ggtacctggggtctcagggttgctctgggcctgatcatccactcagatctgtaaggaggatttgcaggatccatttagaaagatcctcccttacttccacaagcatggcctttggctcttaaatacctgtgctggggttttgtaattatagaaacaacaggaaccaaaactcattaatgttgagctacaaaccagagggaaggcttctttctcaaaacaggggctcagggcctagaaaaaaatctaggttttcctgaaaatcgcttagcccagcatacaagcacttgaaaattggccattccccagaaaactaaggcccaaccaccagaaagcacccccataaaagggcttgctgggagggtttgggtacaaaagtagaatcct

SEQ ID NO: 15270 - DNA, 355 bp, Homo sapiens
ggtaccaggagggtattgatgtttgaggtccaaactgaaaacccatcacctccttcccactgctatagcagcgttagccctggggttcattatctagccagttcacaccttctaaagtggggctctgaaaatgtcttacttccctcacagacaaagcaattctcaagcctcctgagatcacccaccaaccagagcaactgctgccacttggaggtgcagctgaattcttctaattgtgacacaaactcttgaaactgtaaatgctgaaagattaaatgaggttataacactcagaaggttttacaagtaaaagtaagtcaaatcaataagtctttatttaatatcgaaatggtta

SEQ ID NO: 15271 - DNA, 384 bp, Homo sapiens
ggtaccttggcccagatcaaaaattggcagtgatcaggacttgggtatagaattgctgaatgttctacatcgagtaattttaaccagagaatcaccttccattcagttggcttcacttgaaagtggtaaggcagattatctgtgctgctcaagaacatgtgaaggaaaaaagacgaagtgcagaagttgatgatggggctgctgaaaaggaaactctgccagagtttggagagggaaaggacaccggaggacttgtgcctggaaagtctttggtctttgcaacactggaattgtgtgtatgcattctagttagacaactcccagaattaaaccctaaattgacaggtagcccaggagtaaaagctacgaagccacagatactat

SEQ ID NO: 15272 - DNA, 386 bp, Homo sapiens
ccctttcgagcggttcgcccgggcaggtacactgagtctgcagaccatccagaaggatcctgctgcccccatgtgcctttgttcttggtatgtcagtgccattatactccaaattctccatttgatggagagaatctgtcccttggaatacgagatttatatgcacagtttgcaaataaagcatcatagcctttattttctgtatcaaaatcaccctgatccataatatgagtctttgctttgggatacatgttgtcattttgatgaacattcctgtccccttcatggtatttgataaattccttatcttcattgacaccattcgaatctgaaaagctcacaggctgaccatcaggataacttccaagaacatgatataaattgct

SEQ ID NO: 15273 - DNA, 547 bp, Homo sapiens
aggtacgcggggaaagagggtccatctctttgccagcgatgttcattttgcagcatagtttgagagcaatctttttcaagtaaattgaatatgaatgcctggccccatcatacattaatgaattaggggttgttttaccatccccaccttttactcttttacttattgttttaaaattatcttttccataatttagctttataatttctgcatagtgatgctatttggttatcaaaacattttatgtttagcattaaactttaacttgaataagtatattttcgaatagtggaaatattgttattctaccattaataatatttatttcttattatttaatataatagaagaatgattatagcgtagtagattgttaggttgatatactccttagtcttatatttactttaatgagactattgccttttttcttttccaatggaatttcttatccttacctagttattgtcaacccttgctttctctctttatctaactccctttttttggccaagggctttggttgtctcatggtaatggtgtttta

SEQ ID NO: 15274 - DNA, 358 bp, Homo sapiens
acagtgccaggttcttttctgatgtaaaacaaaataggagaaaataaaaacccagcctggcaaaatagcttatctccaccaatcagcagaaaatggtaaaatagagacgcacgtggcactaactagacaggaaatcagaggtgggaagcaaaatgccagcctttattctgctctctaagatggctctggaaggtcatgttcattgtcactgaaaatgcctgcagggagcgatatgaaaagtcattgtctcttcttttttttcctcctgctatttttagctcttgctaggaagatcaattttagttaactgcagagaagggtttttaaaatggtgcttgagtttcaagttgcatgtgtc

SEQ ID NO: 15275 - DNA, 477 bp, Homo sapiens
  misc_feature 37, 38, 39, 40, 44, 45, 46, 47, 49, 51, 52, 57: n = A,T,C or G
cccttttcaaggccgcccgcccggccaaggtactttnnnntttnnnntntnnttttnggttaatgtggtgggcgaatgagccccattgtgttgtggtaaatttttagagggagtttagggctgtgactagtatgttgaattctgtaagtaggaaagtgatatttaatcagggagaacctgggttactttcacaagaaaggttctttccagtaggtttaaatattgggggggtaaaggtcgaggtttagccaaggctttgtctttgaaatttatttaaaaaaagctttttattttgggagttaagagtttttgaaagtttcctttgtaaaaaaaggattttatttattccgaactttttaaattgtcgttttcgttagtttttgaagtttttgctttgggccaagaaattatttaattttaggggatttttaagttccctgttgtggccgattttttttaataaaattaactttgtgt

SEQ ID NO: 15276 - DNA, 373 bp, Homo sapiens
accatcaaatcaagtttctctaaaaattatgaaattggcatattttatattttgctagagaatggtgtgaacaaggctgataatcaattagttctttttcctttttgattagtatatatttttcacatgatattaaagctaccattagctgattttattctcaatgtgcctcaattctaagaaccactgcattatttatgaacaagaatgtgcaataccaagaaccagccaataatttgaatcttatataaactaaagattcagaaattccaagagattatttaacaaatatcatttgaacatatgagctaattaacagagaaaattctttaaaatgtgaatttatcacattcataatttaactttcaagatt

SEQ ID NO: 15277 - DNA, 777 bp, Homo sapiens
  misc_feature 495, 559, 644: n = A,T,C or G
ggtacccgaaaagaaaggaagctttagtaatgaaaggattgctgccaaaatcctgtttcccccttgcagatcttacagaaaacagccacagaatcccaaggcatcagcaccaagagagcctgtagaaactatctggtctaagctcctgaagcccagagataagaatgacttaacccaagctgcacagcctcttaacagtccactgttaaccccagaaacagatgcatttgaatctgaaaggagacaggaatcctaatcctactgctcagggacttgctgatttactttgctgtctattagcctttctgtgacatgattttctaccaagcaaagtcttttattcaagtctcccagagatttcctatttaagcgtttgctatttggccacttaaaaaagacagaagagaagtaaacagaagcatataccacacaactcagtccagtcagtagttgactctcaaaatggcggatgtcactgagatggctgagaaatangaacggatgtggaaaaaggagtggcagtggaagtagctgttttgtctacctgctggatacctgngaagccagactctgtgtggacagtggtccctagtcataggaaactttggctgtgctgtcatcagtgttcatggagaactgcttcntaccttgagaaaaccctttcttcggtcctcaagtacttgcccgggcgccggtcgaaggggcaaatcacacacttggcgccgctactaatgaatccagctcgtaccaaacttggcgaatcatggcatagctgtt

SEQ ID NO: 15278 - DNA, 350 bp, Homo sapiens
  misc_feature 350: n = A,T,C or G
actctccagataacatatgcagggttttatatatgtttattagattaatcttactgactgtattacacaaatttatatacttataacattttgtctgcttaatctaccaaatactgagaaatgtaaactaaatttcctactttggcagtggatctgttaagtttgtattttttgtttgtttgttttggggctttttttatagttctgtcaattttactttataaattcatagtttaggtaactagaagcaaataagtttcgaattgttatctcttctcactgagctaagcttttatcagcatgtaatgatgatctctttttttaacgaatagtgtctatgttaaggtatn

SEQ ID NO: 15279 - DNA, 282 bp, Homo sapiens
actcctcatgatcatctacacaacattctgtgacacgttctctaacccaaatattgacctggataaattcagccttgttctcatactgttcataatattttctatccagctgagttttatgcttttaactttcatcttttcaacaaggaataattcgggtttcacaccagcagacacagtggctatcattttctgttctacacacaaatcccttacattgggaattccgatgctgaggatcgtgtttgcaggccatgagcatctctctttaatatctgtacc

SEQ ID NO: 15280 - DNA, 461 bp, Homo sapiens
acttttttttttttttttttttttttttttttattttttttttttttttttttttttttttttttttttttttttttttttttttttttttttaaagggtaacccccaagccctttttaaaccccgggcgggcccccccgaaggggggccctttggggaggggaataccggggaacccccccacacttttccaaagggggggggcgaaaaaaagagttccccctagggggcgcgccccccccaaataaaacaccgtggggccccgcttttttaacgggcgggcccccccataagaaaacacccccctcttgttttcccacaaaagggccccccgtgtgccccgtggggcccccgacccccccccctgagggggcgaatatcccccgccccccccgggggcggccgcggtccttgggggggcccccgcggccccggggccccacacgcgggggcgaaaaaac

SEQ ID NO: 15281 - DNA, 381 bp, Homo sapiens
ggtaccagaatctctaacagtgtggtcctgtgtagccacattgctacacttacagagatgctttggggcctttttggattaagacagttctaaaagaccaggcctcacctatgatctgtgtataaagaattagcatcgcactgtagatctgcaagagaaggccgcctcctgcagtgctctctcttggtgaatgctaactctgctcgagggccttttggggaaaggacagtgtaaaacccttagagaggtaagtttcccacccttccaacctctctccacctgcagcttgcttggtgctgtcaggatctggatttggggggagtctctctgtagtggaactagtgacagaagctgttctttagaattttcaggatggctgta

SEQ ID NO: 15282 - DNA, 387 bp, Homo sapiens
tgccctcagcgtggtttgcggaccaggtacagtgaaaagagccaaggctgtgtgaccccctcatcacttagccaggcgtatggtcctggtttctgaggctgccagaaagcatcttagcaatttgtgtttggatgggccatgcctgactattctaggctggaggttcctaaagagtaacaagaggaagagaaacaagaatctctgacacttgttgagaatagagcacagtcccatttgtttgaaaagagacaccaggcagccatgtttatgtgccagaaatgcattccacctcaaggaggacttaatttatggacccgtgtgtgccaggctgagctgggcaagatctttctcaggacaaactctgccatgcagctaaaagcctggaaa

SEQ ID NO: 15283 - DNA, 359 bp, Homo sapiens
  misc_feature 359: n = A,T,C or G
acaaccagaaccaacaattgtatttctctatagttattttaaaatagtaatcaatgctatgtatttgatgtatatgtttctaaattagaaatttcttttggctttgtgtttttttaatgtgcgttaaatatgtaaactgaacctgttcctaaaatgcattaaacttgaatgctgtgtctatccaatgccaaaatgctcagaagaaaagtgaataattcagtcattcatctggatgtagttttctgtgtaatctcaaatatctgaatattgaaaaaactaggttgctaacttttttcattccttatgcaaatgtttagcatcatagtgctgtttcagatacagatctgtttcatcaaatn

SEQ ID NO: 15284 - DNA, 159 bp, Homo sapiens
  misc_feature 138: n = A,T,C or G
tattatttttatatataatatttaattattatttaattatatctttatctatttaatttcttaataacttacttttataatataattaaacatctacgatactattaatatattattaaatagtaattcttatattantagaactagtcatctatatca

SEQ ID NO: 15285 - DNA, 461 bp, Homo sapiens
cccttaaccgtggtccgcggccgaggtccaaaaagtacctgccccttcttagggcagatgatgctttgagaacatactttggccattacccccaactttgaggaaaaagggctttggaatgattattttatgttttaagggaccccccaacctcaaggcaatttccctaaccctttaaccttgacccttgccccccacttggccataaaaacttaagcttaagtttttggttttgttttttcaaccggttaatgtaaaagggggcaggcaatggcccaaaattattaatcaggagattaaaggccttagggtcaaaaggtttcataagaagtttccccatggaaactatattgactgggcccaacacaaggaatcttttttgtaattttaaagggaatttctgagaatttttggctttgaaggcagtgatttaggattaagggctggtttcttttaaaatg

SEQ ID NO: 15286 - DNA, 382 bp, Homo sapiens
ggtactgggattataggcatgagccaccatgcccggcctttgctcttaactactgatgttgtcttcctgatcttttctacaagaagcttttaaactttttggactttaacctacaataagaaatccattttacatgttcacatgtatctataacaacatttatatttctaaaacaaacttttcatgaaacaagatatacctacatatgtcaggcactctgatattttctattctagtccaccttttccatttcattctatttatgggaaatatatgttggttgggagtcactgagttaatttaatgacccactaataggctgtgagtggcattggaaaaatacctgcttgtaagaattgcgaacacacgttttaaggttggt

SEQ ID NO: 15287 - DNA, 767 bp, Homo sapiens
  misc_feature 474: n = A,T,C or G
ggtactcgtgataaagaatcaatagcaattcaaaggttccttttgttaggctgtatcccaaagagtagggaaagatctttacttcatgtcagtgggtgataccactattaaaggtaacttgtgtttttaaaacaaaatacttttatcacccagaattacaatttcttaaaaatattgttatgctgaatccctcaaacaaaaatggtttatcaatttctttggacataggtagcagggaagaaaaaccactttaggtaaaaaaatttaaatatacttatggagataaataacccaagatgaggatttcttgaaatataggaaatttattaattgaattaatcttgaaagttaaattatgaatgtgataaattcacattttaaagaattttctctgttaattagctcatatgttcaaatgatatttgttaaataatctcttggaatttctgaatctttagtttatataagattcanattattggctggttcttggtattgcacattctttgttcataaataatgcaggggttcttagaattgaagcacattgagaaataaatcagcttatggtagctttaatatcatgtgaaaaattatactaatcaaaaaggaaaaagactaatggttatcaccttgttccaccattctttacaaaaataaaataccccatttttaattttaaaagaactgaatgatggaccttgccgggcggcgttcaaaggcgaatccacacacttgcggccgtcctaatgatacaactggtccca

SEQ ID NO: 15288 - DNA, 353 bp, Homo sapiens
actgtaacacgggagagctgtcaaggaagttccatttcagggcaagcacaggaaaacactcctctccgtggatcaaagaagtcagcccaaggaacaaatctctccacactttggctgggtgggctgatttacctgcgaaagtaatttctgtgtgtccctgcttagaatccagggttttgtgaatgagaactatcattcaatctcaccaggcagaaactattcctcaagggctgtatgacgtctgtaagaaggcagttcaaaacaccgcaaggcagtgagaaagggaaaattataaaaaacaggaaaggttccttggccgcgaccacgcttagggcgaattccagcacactggg

SEQ ID NO: 15289 - DNA, 375 bp, Homo sapiens
ggtacccgaaaagaaaggaagctttagtaatgaaaggattgctgccaaaatcctgtttcccccttgcagatcttacagaaaacagccacagaatcccaaggcatcagcaccaagagagcctgtagaaactatctggtctaagctcctgaagcccagagataagaatgacttaacccaagctgcacagcctcttaacagtccactgttaaccccagaaacagatgcatttgaatctgaaaggagacaggaatcctaatcctactgctcagggacttgctgatttactttgctgtctattagcctttctgtgacatgattttctaccaagcaaagtcttttattcaagtctcccagagatttcctatttaagcgttt

SEQ ID NO: 15290 - DNA, 430 bp, Homo sapiens
aggtacctcagttggaaatgcagaaatcacccgttttctgtgttgctcacgctgggagctgtagactggagctgttcctattcggccatcttggaaccggcacacaccaattttttagaacagaaacaggatcacaatctacatattgtcttaacacatattttaatcatagataacagtatatctattcaacacaaaaagttaattctgaaaatctgcatcttcatcttacataaaacatttaaacttcccagaacaattgggaatattaatgtttcatttattcatttattattaatattaatcagggtcctattaggagacagaaaccagataatttgaaagtttaatatgaacaaattattaactataacaagagataggctagaaagaaagagaattttaaggaatgtaggaaaagcagatattc

SEQ ID NO: 15291 - DNA, 349 bp, Homo sapiens
acatcttgaggcctctcagcaggagacaaaggattccaaaaagagatgtggaggtgctgagggcacctctatctctttgttgtttagtctgtcattgaatcaatctacttatcatcttgggtctttgagtattgtatgaaagatccttcgtgcacaccacacacagtcatgattttgttaaagtagccttcttcaaatgcttttctaagggctagtcaccaactttatttctgtgtttctgtacaagaaacattttcagttcttcattgagtttgattatggaaatccattaaaagactctatgaaaattttactcatgtcttttggaaatgcaacattttcctatcat

SEQ ID NO: 15292 - DNA, 193 bp, Homo sapiens
ccgggcaggtacaagccaatgccagcgtcagagctgcttttgtgcatgcccttggagatctatttcagagtatcagtgtgctaattagtgcacttattatctactttaagccagagtataaaatagccgacccaatctgcacattcatcttttccatcctggtcttggccagcaccatcactatcttaaagga

SEQ ID NO: 15293 - DNA, 469 bp, Homo sapiens
cccttagcgtggtccgcgcccgaggactttttcacaaaccggtgaccaggtaacttggaagttggattggattaaaccaaaagctttttgaccaaacccatcccctgaataaaacttggttctaaatccatcctcgtgggaccaatttaaatggtcaaatttgggatggggggattggtcaagcttgccacttataatcatggttttgggcttgaacataatttccttggcttgagtttaatggtgggctttttgtgtgggaccaggcttgaaagtttaatggggggggaagggccaagaagaattgaatttttgtggggcccaagagaaggggttttgctttggggtgggcttggatttcttgaatttagggaccaccccttgattggaatgaaaaaattcaagtgggctgggcacaggtagcttttattagaactgggttaacctttgccccggggccggtccctct

SEQ ID NO: 15294 - DNA, 779 bp, Homo sapiens
  misc_feature 92, 292: n = A,T,C or G
tgtacttcatttaagagtcctggcttccagaaatcctttttttcatgtcttatcttctaattatgctttgtagtccagctaaattacatctncttgacattttggaatgttcccatctttacacctgtcttcaaattgtttattccacatggaatattcttttccccttatctccaattagagtatatggagtttggggaagaatcatgtcgttcactgtggcacgagggacagagtgagaaggtggacaggagccagataattggagagactttttacataatgctaattntaggagtttgcaattaacactgtggatttgatgaaaacagtggaggttttaatcagggggatgaatgataggattagaattctattttatataatataatccagatacatcatgataaattaaaagatcaaagctgaaagcagagtgttcagtcaggagtttattataatgatttagacataaatgtttgtaatagaatcaatggatccccccatgccttacattcctggccttaatgggcaccatttccaaattaaaccctcccccactgggaatgggggccatattctcatccctgcattgaaaggcttttttctcctttccccaaaaaaaccctttcccaattaatcccaaaaccttttaaagcccctttttggaaccctatttatcctgaggcctcttttatatccttaagccccgggtactttgccggggggcctttaagggcaaattaacacattgggggcgttatataggatccccctcg

SEQ ID NO: 15295 - DNA, 350 bp, Homo sapiens
ggtactcttaaaaatctgttaagagagtggatctcattttaagggttcttaccacaataaaattaaatttttgaaataaatcagtcatatttgagtgaaatgaaacctttccgagtagtttcagacaattgataatacctagtttacagttcctgtagtcattttggagggtgaggacttgatgtgtttagtaaagttgagaaataaatacatgaaagaatgtgtggggaagagaaagtgtggggaagagaaattgtctcagaggaccattcttagtggcactggggaaatcttggcacccagaagaattcaactgcgctcactgcaaaaatacaatggcctacattgga

SEQ ID NO: 15296 - DNA, 348 bp, Homo sapiens
ggtacttttcgctcagctgttttcatcactgtgttcagaggtttgtcttttttttttcccctaaaaggtgctgagatgttatgagtgctttatgtgtggttactggataaagttttgaaatgtcactgtgttataaactgcatgatttatcgattttggaaattttgttttttttaaatgattaatttaaataaaatggagaattttgatccataagaaaagcaggactgaaatctccagggatgggagcctttgggttcaccttgttcagtgatgtttttttgtagacttcctactttcttgtaaaaatgtttttggactaaatatttcacaagaattgaatttttt

SEQ ID NO: 15297 - DNA, 486 bp, Homo sapiens
ccgggcaggtacttaactagggttagccgaggtcaggagggtggatgccttattatgggattagtgcccttctaagagggacagtagagggcttgttcatgctctctctctccatgcacaagaaagagcacacagtgagaaggaaagaggccctcacccagaacctgaccatgctggcaccgttgattgcagacttccagtcctccagtgattgtgagtaagataaatactctgtggtttaagtcaccaagttctgtggtgtgttttatggcatgcacaagggtaactccaggatgatgcttttttcaccaactgggttggttccaggccttttcatgggaaagctgttcagccttcctcaagcctttgcaaaaaaatgctttggctgggtcacttctctttttggtccttttcagtatgccttttcttaaatgtgtggccttttaccagggccctttgacttcattcctttttctgttcagaggg

SEQ ID NO: 15298 - DNA, 432 bp, Homo sapiens
  misc_feature 131: n = A,T,C or G
tgccctttcgagcgggcggcccggccaggtccacagttttttggggaaatatgatgctgtttgtggtcgagattttttttcacctctattgtgaattcttttttactgcaagaattacaggatttgtagcncttgtgcttcttgctaagagaaggaaaaacaaaattagagggcattaaatgttttgtatggtgacaatgatttagaaaaaggtgaatgcattcctcctcacataaagcatttcatatgggcttttgtcaagggaggttgaaacattgttggctgagtttaaatttccaggggtcttaggatgggttagggaaaaaattgggatgggatgcccgggaaaggtttaaaccctggatcctttatgaatccaattgaagtggaagaattggggaactttccaaaaaccccaagggttggcttatt

SEQ ID NO: 15299 - DNA, 566 bp, Homo sapiens
ccctttcgagctttcgcccgggcaggtactttgcattctgattctttgatatttgaacttggccatctgtgggtgctactctcgtaagactaaaaggcacctactaaatacgaacaaggataaccagttctaccaaaaacattaccaaccaaacctcccctgttcttttttcagactttccttttgctttcaacctcttaaactgtaaaggagagatttaatgtttccctattattctgctttgactcacatactaaaatgaccacatggcactccattgaatcttttcagttgttcacgaattaaaataatgcccatgttttacagtttttcgagtagtctcagcaatggatctgtagtttcaggacctgtttttaaaagatcaagatacttttatgtgtttcagaagtagctgttttttcattttttgtgggtttgtttttttgtgtttgtttggttggttggtttttgggttttttgctttttaaaggtcacaatgttgtgagcctggtgtaaatgccaggaatattatatggacttagtatctgcatctcgttaattgaacc

SEQ ID NO: 15300 - DNA, 370 bp, Homo sapiens
ccctttcgagcgccgcccgggcaggtactgcggtctttagagatcatttagagcttgcacacatctgtgtcttcttgtgggaaacctctaggtattctgtctgatcagcactgtgaggaagttggtgggaaaagggcccctgttaagaacaaacaatgggcagaaggaagcacattgcaataaatttccccagagagagttcctttacattccattcaccaaaaacctctctggaactgtcaggttcagaatatcaaccaagaccatatcatttagaattcattggcatgtagaggtgactcgattcctaaaagaagcctctctcccatgaaccacgatgtacagggaggaatttgaagtagatagaaac

SEQ ID NO: 15301 - DNA, 447 bp, Homo sapiens
aggtgcgcggggagaatcaagtgagaagtgcttttagaaacatccatgcaggtatgaaggagctctaacatgccaggcgagtggacaaggcttggggaaggttgacgatacctagagacatgtcatcctttgggtcagagcctgcctaatctcatggggaactgatgggtggaataggcactctaggctccccctggcatgggcagggtcgcagagaattcacaaatttgtgtgtgttcacggaggggaggccaagcttctgactgctgaagttagggtcagaatggagaggcaagcatgtgtgtgagggactctgagatgggaggctgacaattaggacaatgggctttgcccatggagccagaatgttcccctggagggggtaaattgcacttggcccactttttttaattggtaaaatctcagatctaagaaaccctctttttt

SEQ ID NO: 15302 - DNA, 461 bp, Homo sapiens
tgccctttcagccggccccccggccaggtccaaaacccggccttgttgagctgttcactgagggttacagcagcgatgaagacttggcagaacagctgctggtctaattctgtgaagcttggggtgggaagcaactgtctgggaacctgcggtgggatgccccagaccagcattttaattgccccaacctgggggttccagaatttttcttttctaagcaatgggtatgggaggagaatttcccgaagacaccccaagtaactgggaaagatttattcctgtggtctggttttattattacccccttgggtggggcttggtggccttttgtattcattttaaggagggaaaaccttgttcggaccaagccaccaaagaaaggcttgctttcggggtaccccttgggccggtggacccacggcttataggggccgaaatttccagccacactttggcgggct

SEQ ID NO: 15303 - DNA, 535 bp, Homo sapiens
  misc_feature 446: n = A,T,C or G
taccaaggattttctattgcagcagaaccatgctacgagtgaaaggatcctaaaaaagtcactgggattttttatactaaaagttctttggaatgacggcttaatcccaaaaatgtgatttttccccattaatgaaagtttttcacttctactttcttgggcttattgaggataaaaaaatgacattccctaaaagaaaaaagatggaaaaaaaatagcccctgggccgcttcttccaaaaaaaagcctaccactttgaagctggacaacaacaaatttgggggccacttgaaagattgattgaggaacccaagaagtttacccaccaaatggccaaatttcaagacccccttcgaagggttttcgggtccaataatttgggaaatttgccccggtttccctgaatggtaataacaaatggcttttgtaaaaaaaggttttgaaanaaaacctgggggaagttcaaaaattttttttgaaagaaaaaccctgggatgaaatgggtaaaaaaattaaaaagaggccttgggcattt

SEQ ID NO: 15304 - DNA, 267 bp, Homo sapiens
cccttagcgtggtcgcggcccgggtactcgggaatctttcgttgacttgtcctcaatgaccacactcgagagtcccttcaccctagagaaaagcatccacgttgggcaccagatggagtggcctgcgccttcacagctgtgggcatttctcctcaggtggaacgagagacttgagaaaagaaagacaacagagacaaagtatagagaaagaaaagtgggcccaggggaccggcgctcagcatatggaggacccgcgccgccccgcgt

SEQ ID NO: 15305 - DNA, 509 bp, Homo sapiens
cctttcaaagcggccggcccgggcaggtacccgaaacttctccccaaagggaactcattttacctatagaaagaatccattttattttcacaatatcacatgctttgtgcaggcatcaatggctaggaaacccttaagaaaacaaacgcaattccacagaatgaaaaggtctcttcttgcaccaattaataatctttcataggattaaaatattccttaattttctaaatatggaattgggaaatggtggaatggccagaaaattaaaaaatggcaagttttttgccttcttttaaagaaatttttaatccaattgttaaaggaccaattgtgtatttaaaaattttggtatttaaaaaattaacacccaccaattccccccttttttaccttaaaagtttttcaattggaatccaccaggtggcccccagaagagtggaaaaaaaaaaaacttcttgggctttggaagttttggaaggggaccccaaggtttaaggtttaaggggaat

SEQ ID NO: 15306 - DNA, 385 bp, Homo sapiens
  misc_feature 385: n = A,T,C or G
cccttagcgtggttgcggccgaggtacactctagcattgtaactttttccccctgagaagtaattttaagatctatcagtctcaatttaaatgatctgttaatcagccagagttttagtttcataatatcgttccattgcctgacaaagatatacacactgaagtgcctttagcagacctgggaccgtcaagaatcttgttaccctgattattgcaagatgacatatttcttaagccatttataatctcatattcgggttgaatctgaatttacaaataaaagggttaaattgaggcagtttcaagcagcatttaggaaaatgaagtggcttcaaattttagtgtttctggttacattattttgtttgaattatacaattacatn

SEQ ID NO: 15307 - DNA, 377 bp, Homo sapiens
ggtacctgaaggaacgaagaagagggatttctcaaggtgagaagcagttctccatggacactgatgacagcacaggcaaagtttcctatgactagggatcactgtccacacagagtctggcttcccaggtatccagcaggtagacaaaacagctaactccactgccactcctttctccacatccgttcctatttctcagccatctcagtgacatccgccatcttgagagtcaactactgactggactgagttgtgtggtatatgcttctgtttacttctcttctgtcttttttaagtggccaaatagcaaacgcttaaataggaaatctctgggagacttgaataaaagactttgcttggtagaaaatcatgtcaca

SEQ ID NO: 15308 - DNA, 489 bp, Homo sapiens
acaatatttacagcctggaggattcttgaagtaatgacagactcgtctgctgcaagtgactggttggcttcagtagagtcattgcttcctattactgctgtgatccctgcgcctgcctttcttctgctggctcacctccttgttgaagacaaaggacaaaatcttcaccaaatactcaaggtcactacagaattagcccaagcagattcctcccaggtgccaaatctgattccagttttgatgttcaaattgggaagaccactggaacctatattatataatgatatattgtatactttacctaagcttggtgttcacaaggtgtgtataggacaaattctacgaataatacaactacttggaaccacaccacgactaagagctgtcactttgcgcttgctgacatctttgtgggaaaagcaagaccgagtctatcctgaactgcagcgtttcatggctgtgtctgatgtacctcggccgcgaccaccc

SEQ ID NO: 15309 - DNA, 394 bp, Homo sapiens
acagatgcattcagttgtcattcattcgtgttaagccaagatcctggatcttctatcattaatgttaagaggaaacatgaattacaactatattgtatgactgccatattttattgaaactaaggtcaatgttgaaccatatcttgatttcagaatttaaaatgtgttaccttagaaataatgaaatatagtgtaacagttggtttctaaatgtggttttatttcaggggccattatttaacctgtgtgtatgctatgatggagttcttttgtgatttctttacttctaaatttaaatagtaattatgtttaaaaacaaatgtttttgtctttagttgcaaagcagcatatatctcatttccttcaaccttgcctcctcatacacaaatatatt

SEQ ID NO: 15310 - DNA, 818 bp, Homo sapiens
acagtgaaaagagccaaggctgtgtgaccccctcatcacttagccaggcgtatggtcctggtttctgaggctgccagaaagcatttagcaatttgtgtttggatggtccatgcctgactattttaggctggaggttcctaaagagtaacaagaggaagagaaacaagaatctctgacacttgttgagaatagagcacagtcccatttgtttgaaaagagacaccaggcagccatgtttatgtgccagaaatgcattccacctcaaggagggcttaatttatggacccgtgtgtgccaggctgagctgggcaagatctttctcaggacaaactctgccatgcagctaaaagcctggaaactaaaggatttcatgtagtaaactatcttccaacccctgtaggcatcagaccacaggatgaggtttcagaaggtcataaggcagaatagttaagcctacagggcttacagtctgacagacctgggttcagttcttgggtcttcatcactagttttgtgactttcggaagatgactcccggagcctcagtgagcctcaggtacttcatatgtaaatgaaggaatactatctacttcacaaggctgtgaaaggattaaatggagaattggtgtaaaacccttagtgcagtgccctgcacaacaccgatattgcccaacctttgatgttggccctacaccatgtgtaaatccaagccggcagagctaggcaggccaatctaatcaggatctttgtaagggactggaacccaaaactggataaagccagttaaaaccattgccaaggaacagagagaggccttg

SEQ ID NO: 15311 - DNA, 462 bp, Homo sapiens
ggtacgaaaaaatcaggccactaagcccactgttaatatagacgcagaccaattgttaggaacaggtccaaattggagcaccattaaccaacaatcaagtgatgcataaatgaggtctattgaaacaatgtaagggcttattttgccttcaggggcctgtgggaaaaaaattcagggaccccaggaaacaagctttttcccttatataaatttcaatttaggacaaagggcttcttaaagaagaccaatattcccttgaacttttggttggtcaaggatttacaaagaaatgcctgccttcaaaaaggttcttatttacaagtattgttctaattggccccggaaaaaaggttaatttgtaagaaatttaaaatgggcccttattgaaaaaaatggccaaaattcccaggaattggtttagtacccggctccattaaaaggctcatttaaaaaagggaaaaa

SEQ ID NO: 15312 - DNA, 387 bp, Homo sapiens
ccctttgcggccgcccgggcaggtacgcggggccttacctcctgttcatgcaactttgcttgttttgcttctactaaaatggttctaggtgctgtgtggacaggtgatacaaaagcctgactcacacgggtgacattaattcattccattttcatttctctttgagtgatcctgacaagcagagggtctcaggtggatattactgtgtctttgagacctctctaatccttatctatctctcattttaatacagagagtttcatacgcagaccttaagtagacatagtatccagctaaaagggtctcactctgtcacccaggctggagtgcagtggcgcagtcatggctccctgtaacctcaacctctcagactccagcaatcctcct

SEQ ID NO: 15313 - DNA, 413 bp, Homo sapiens
ccctttcgagcggccgccccggcagggacgtggccctaatggggaaatcccaaaaacttgaccaggtgaaaggtggccccccgaggcccagcccgtctttatgttgttcactttctttgtgagctgttgagaagaaaaaaagtcttcaccttttcatccagtttccaactctagcaagcacagctcttgggcagaaaatattggcaaagaatatccacatgggcaaaccaaggcaaaacggacagaagccagtctttgcaggcttcccactactctgtaacaatttccttccggccatggcccattggccattgcccctacacccaccattctcatatctgaactgaatgcttctggcccaggttgtggcccatcaggccttctagagagatagtttagacagacagtattct

SEQ ID NO: 15314 - DNA, 357 bp, Homo sapiens
acagtgaaaagagccaaggctgtgtgaccccctcatcacttagccaggcgtatggtcctggtttctgaggctgccagaaagcatcttagcaatttgtgtttggatggtccatgcctgactattctaggctggaggttcctaaagagtaacaagaggaagagaaacaagaatctctgacacttgttgagaatagagcacagtcccatttgtttgaaaagagacaccaggcagccatgttttatgtgccccaaaagcccttcccctccaggggggggtttatttttttggccccttgttccaccccttatcttgggcgaaaattttttttttggaaaaaaatttttcttgcccttaaaa

SEQ ID NO: 15315 - DNA, 439 bp, Homo sapiens
ggtaccccactgcagccaggaccagaatgctatcactctcatgaatgaaatcattcagagcatagctgcatcgggggcatgaccagcacttatccctctccctgaccgcattccctggacctgtcctgctcaacccacttgatcgaggttaatgcaaggccatcttttctcctgaagacagtcactctcctttgggcacatttaaaattaaagcacctatcacgaatgcaagttccagaggccccttggcccattccgtcacagttgtaatagtaacgggtcttcttttcttacagagtacttgagtgaccccttatcctggttgccttttaaaatcttaaataacttatttcagtatccttttgggtggtgcaattctttcctgggaagcacctgtgacaactttccctcttcatggggtggaaccatttgggcttat

SEQ ID NO: 15316 - DNA, 357 bp, Homo sapiens
ggtacatgggactacaggcacgccccaccatgcccagctcatttttgtatttttagtagagacagggtttcaccatgttggccaggatgatcttgatctcttgacctcatgatccgcccctcttggcctcccaaagtgctgggatcacaagcgtgagccaccacacctggccctctatttattctctttaaagagagagaaaactatgaaagggccaaattatttaattaaatctttaccttaacacaagggaaaaaatggaatttgcctaatataggttgatgaagcatacacaattgaacagaaaacaattcacatttttataaaaggcaaaaatttggggatttataagctttt

SEQ ID NO: 15317 - DNA, 581 bp, Homo sapiens
  misc_feature 259, 262, 558: n = A,T,C or G
ggtactctactgtgtcaataattatttcagtctctgctgcaattagtgcttaattacaatacctgagctataaaaataaaagatttcattatagcaaagtcacaaatatcgttttagttcagttatccacattgttcatctaaaataatacattttctttacatataactgtcttagacttgtaattgaggatatttgatgaaacagatctgtatctgaaacagcactatgatgctaaacatttgcataaggaatgaanaangttagcaacctagttttttcaatattcagatatttgagaatacacagaaaaactacatccagatgaatgactgaattattcacttttcttctgagcattttggcatgggatagacacagcattcaagtttaatgcattttaggaacaggttcagtctacatatttaacgcacattaaaaaaccacaaagcccaaagaaatttctaatttggaaacatattcatcaaatacatagcattgattactattttaaaataactttggagacatacaattggtggttctggtttgacctgnccgggcggaccgtcgaaagggcc

SEQ ID NO: 15318 - DNA, 345 bp, Homo sapiens
  misc_feature 345: n = A,T,C or G
ggtaccccactgcagccaggaccagaatgctatcactctcaggaatgaaatcattcagagcatagctgcatcgggggcatgaccagcactatcctctccctgaccgcattccctgacctggctgcacaacccacttgatcgaggttaatgcaagccatctttctcctgaagacagtcactccctttgggcacatttaaattaaagcacctatcagaatacaagtccagaggccctggcccatccgtcacagtgtatagaacggtctctttctacagagtaagagtgaccctatcctggtgcctttaaatctaaaaactattcagttcctttggtgggcaatcttn

SEQ ID NO: 15319 - DNA, 360 bp, Homo sapiens
acaaagccagtgagggaaaaactctatgagcaactcttaaagtgaaaaatctcatcaatacacaactgagtatactgccattgatcaactgctcttaaaatacttagataaaaatcaccgctgtaggaaaaagcaaaacaaaataatgattgaagcgtgttttgctctgggatgcttacatttgacgattcctgtcatacgctgtgtaagttcatacctagtgctcaatcgtatttcattaccagactgctgtataattagagggaaaaagaaaattcatttgaacaaaccactttcacagataaaccacaggattccacacttggctctgtttaactcacacttcactgaacactcata

SEQ ID NO: 15320 - DNA, 348 bp, Homo sapiens
acagtgaaaagagccaaggctgtgtgaccccctcatcacttagccaggcgtatggtcctggtttctgaggctgccagaaagcatcttaccaatttgtgtttggatggtccatgcctgactattctaggctggaggttcctaaagagtaacaagaggaagagaaacaagaatctctgacacttgttgagaatagagcacagtcccatttgtttgaaaagagacaccaggcagccatgtttatgtgccagaaatgcattccacctcaaggaggacttaatttatggacccgtgtgtgctaggctgagctgggcaagatctttctcaggacaaactctgccatgcagctaa

SEQ ID NO: 15321 - DNA, 398 bp, Homo sapiens
  misc_feature 398: n = A,T,C or G
cccttagcggggtcgcggccgaggtaccccagtggactctatcaacaggcattgagcaataggcacacggtaaacggcagctgttgttattggtttgcaaggccttttattaattttaccataaaccacaagatggaaaagacaactaatacagacacagttaagttccagaagacttctggacttcaaatgatggactaaaaccagcataaatttacataaaaagaaacgaaatacctacatattttcataactcaatgagcctaatgcatgatagaagggacttgtttttatggcaattaatatgaggaagagcagggagttttttgctgagaacaagatcagtgtgagtcagtgggatggccttgttacttaaagaaaacataggctgcattatn

SEQ ID NO: 15322 - DNA, 356 bp, Homo sapiens
ggtacctaaacaggccaaatgttgcctttggggttcctgtttcaacagcatggtgtgaagcgctgcatcaaccttctctgcctcatcctgcaaggtggcaaattcctcaagaatatgaccaagcttatctctctgtcgagccctgttatgtccatggatctgaataagactacagaatggccgaacacagtgagtaacaaaggagtcgatacagtccttagcctggtgattattatataggtagcacttgggggaaagcaccggaggactgacaaaagaccgaagtgcatctttcaccatgtcttgcatgagatgagttccaaagacctttttgttatccaccggaaagtggtttg

SEQ ID NO: 15323 - DNA, 373 bp, Homo sapiens
cccttagcgtggtttcggccgaggtaccagctggagactggccttacccgccaccccgaggagaagcctgtgaggaaggacaagcgggatgagttggtggaagccattgaatcagccttggagaccctgaacaatcctgcagagaacagccccaatcaccgtccttacacggcctctgatttcatagaagggatctaccgaacagaaagggacaaagggacattgtatgagctcaccttcaaggggaccacaaacacgaattcaaacggctcatcttatttcgaccattcggccccatcatgaaagtgaaaaatgaaaagctcaacatggccaacacgcttatcaatgttatcgtgcctctaacaaaaagggt

SEQ ID NO: 15324 - DNA, 616 bp, Homo sapiens
ggtacagtgaaaagagccaaggctgtgtgaccccctcatcacttagccaggcgtatggtcctggtttctgaggctgccagaaagcatcttagcaatttgtgtttggatggtccatgcctgactattctaggctggaggttcctaaagagtaacaagaggaagagaaacaagaatctctgacacttgttgagaatagagcacagtcccatttgtttgaaaagagacaccaggtagccatgtttatgtgccagaaatgcattccacctcaaggaggacttaatttatggacccgtgtgtgccaggctgagctgggcaagatctttctcaggacaaactctgccatgcggctaaaagcctggaaactaaaggatttcatgtagtaaactatcttccaacccctgtaagcatcagaccacaggatgaggtttcagaaggtcataaggcaaaataggtaagcctacagggcttacagtctgacagacctgggttcaatttttgggtctttatcactagtttcgttacttcaggaagatgactccacgaaccatagtgagcctcagtatcttctatgtaaatgaagtaatactatttacttcaccaggctgggaaaggatat

SEQ ID NO: 15325 - DNA, 358 bp, Homo sapiens
ggtactttaattagttaatagaaaccactgtaaatgagttatctatctccagaacattctcagagaatttacacgaactaaaacaggaatgaagtgctctcagagacttttttttcagggaaatgtatttagtagtttgagtagttgatctgcaaaaactttaactttaattaactacatagatgaatattttttattttgaaatttgagaatgtcctaagaggatgtctacaggatatgaaactactgggtgcaggaaaattttttaaatgttagcaaattgtggcaagaggaaaacaaacagtggagaaaactgtggtagagaaagtaaagaaagggcaggagaaagctgtaatta

SEQ ID NO: 15326 - DNA, 379 bp, Homo sapiens
accctagtcctatcttagtggtgtcaggtgcaaagtcactcattctgagaaattttacttctgtagccattcagattaaattttttaaaatagggagttgaactcagcttgaaattgaaggcttcctataatctgatcctaatgcatcttctctgagctttgcttctggcaattcacattatattatctatatgagtaagccaaacttgtctattcattattccaggaataagtgatatactcgtgtacctcaattaattttaatgcaaacctctctcccttctacttacggaaattataatgggtttttagggttcataattctatttccattaggcttcagagtctgataatgcttcacagagatacacctttaccc

SEQ ID NO: 15327 - DNA, 378 bp, Homo sapiens
ggtacttgtagtcttttaataaccatagaaagcactaaaagtaattttaaaagcctggaaagttaaatgaaaactgatattatatacaattaatttaaaattatagttttactctgtttatttacaaatttgctagataaaacataatctcagaaaaaaagtgtttctttttgttgcttctgcactatagtaaatatctagatatctataacaggcatataatatagtttatatatagggaattctagtgaagaatatagcagttatagaaatatatatggagagaaatcttataaaatggttatgttctaagtattcataatgaattcctataaattttattgcaggaaaaaaacattgaaaagtggtagtggtgtg

SEQ ID NO: 15328 - DNA, 354 bp, Homo sapiens
ggtactggaagagtttttgaagattgaatattgatacttaaattatttctgaagctcttcaataaagttttctaattataaaaactccacataatttggttcaagccaagaaacaaagtcattttactctaagatttattctctaaatatagtaatgagatctgtaaagtctgtgttttgctaattaaaagagtaaatctgcgtattttctgcagactgctttctttgaatctgtttctaaaccacaacttgataagtttttatgggtaactgggaatatggtcaacactgagttttccaagggttccatccaggagtatttcattttaggatgctgtttggacacagggtttg

SEQ ID NO: 15329 - DNA, 464 bp, Homo sapiens
cccttaccgtggtcacggccgaggtacatgggactacaggcacgccccaccatgcccagctcatttttgtatttttagtagagacagggtttcaccatgttggccaggatgatcttgatctcttgaccccatgatccgcccgtcttggcctcctaaagtgttgggatcacaggcgtgagccaccactccttggccctgtatttattctcttttaaagagaggagaaatctatgagaggcccaaaattatttaattttaattttttaccttaagcaccatgggggaaaaaaaatgggaattttggcctaattataggttgatggaagcctttccacaatgaaatttgaaacaattctacatttttttgtaaaaaggctaaaaaatttgaagactttattaagcctattattggtcgctttatttttttgggttgggggaaggaaatttgacagaaagaaattttt

SEQ ID NO: 15330 - DNA, 422 bp, Homo sapiens
atgctccttagcgtgttcgcggccgaggtacaaggacactaagacagtgtagcctgctgacttgagaatgttctgtaaggactggaaacactagaatcttgaagaaacgcctggctagaggtgagggtaagctgttaattacactgattacagtttgtgcctctcagactgagaactcttttcttcttgctgggggcattgctatctctaggatgttagccctgaagtcctgatagtctctttggggttgtaataaatggccaaaaaatttgttggggggttacaaaaggcgttaataagccccttttgtttgggaaaaaaacattgtttaaaaaggggggggaaaggaaatttttttttgcttgggggaaaaaaacctttttaaaaaaaatttttttggtggtggaaattgggcaaaaaag

SEQ ID NO: 15331 - DNA, 277 bp, Homo sapiens
ggtacccgaaaagaaaggaagctttagtaatgaaaggattgctgccaaaatcctgtttcccccttgcagatcttacagaaagcagccacagaatcccaaggcatcagcaccaagagagcctgtagaaactatctggtctaagctcctgaagcccagagataagaatgacttaacccaagctgcacagcctcttaacagtccactgttaaccccagaaacagatgcatttgaatctgaaaggagacaggattcctaatcctactgctcagggacttgg

SEQ ID NO: 15332 - DNA, 793 bp, Homo sapiens
  misc_feature 88, 492: n = A,T,C or G
acccgaaaagaaaggaagctttagtaatgaaaggattgctgccaaaatcctgtttcccccttgcagatcttacagaaaacagcacagnaatcccaaggcatcagcaccaagagagcctgtagaaactatctggtctaagctcctgaagcccagagataagaatgacttagcccaagctgcacagcctcttaacagtccactgttaaccccagaaacagatgcatttgaatctgaaaggagacaggaatcctaatcctactgctcagggacttgctgatttactttgctgtctattggcctttctgtgacatgattttctaccaagcaaagtcttttattcaagtctcccagagatttcctatttaagcgtttgctatttggccacttaaaaaagacagaagagaagtaaacagaagcatataccacacaacccaatccagtcagtagttgactctcaagatggccgatgtcactgagatggctgagaaaaangaaccgatgtggagaaaagagtggcagtggaagtagcttgtttgtctacctgctggatacctgggaagccagactttgtggtgacagtgatccctatcttaagaaactttcctgtgctggcatcagagccaaggagaactgcttttcaccttgagaaatcctctttttggttcttaaggaccccggccgcgaacaccttaggggaaattcacaaatggcggccgtactagggatctcactcgggccaaattgcggaacaagggcaaactggttctggggaaaagtaatccccacaatccct

SEQ ID NO: 15333 - DNA, 388 bp, Homo sapiens
acagagaggggctcgctgcgctgggtagaggaagcagaaagtttgctgaactcagacggaagaaaaaggattcctctggagaatcccagcaaggtttctgattggacaatgggtccatgtccttgtgaagtactcctcctcctgaacctgccctgctctgtgacttgcttttgaccaccagcatgctgcagaagtgatgccagtgtgaacttctgagccgggtcataaggaagccttgcggtgcggcctgggttcttcaggaaatgcttgtttgaggaaaaccactgttcatgtaagaagttatggctaccctgagactgtcatggtgtgaagacttctaaatgaagtcacatgtggatggccaccatattcaagctcttaattcttc

SEQ ID NO: 15334 - DNA, 456 bp, Homo sapiens
acaccaccatacctggctaatttttatttttcatagaaacaatctccttatgttgcccaggcttaaaactttttaagaagtttctcctctttttctttgcatgcctggctggcaactgctcttctagggaacctgtttactggcaatggctttcccctttttaattttgtaatcttatttttggaaatgagcatttcaaaaatttaggttagatttgaactttaggttaacaaatataacatataagctaacaacataaggtcttaagtacttaaagggtataaaaaagaatgcttcaacccttttggaaacaatcccactaaggagttttttgtattaaaaaggggtcaatttccttgttgtccatgaaattaaagatgaagaagtaacacttcggttcggcgaaccaacgtcttaaagggcgtaattttccaatcaccaactgggcgtgcacgt

SEQ ID NO: 15335 - DNA, 331 bp, Homo sapiens
ggtactgttttgataggcagctggctggtgtagaaaaaccagttagccatagaactgacatcacgcagagagccccgactccctgattagcccaccccaactcaaaatctgactccagggatgttttgttgaaaatgttatttctctaaaacagtatttcttttcctctcctgggggactaggagggcaggagacaatgaggagcaggcctgggcccctggttccaacatcaagagtgacagggtggtctcagggatgtcctgtgagggcagcctgagccactaaacaggtccagtagagatggtattttatctttaaaaaatctgtattg

SEQ ID NO: 15336 - DNA, 326 bp, Homo sapiens
actaaaaacgtgaaatttcctcatcactgaaaacacgctcatctgaaatctctgtaaaaaaggatttggctgttgaaacttgttatcaatgcctcttctcgtagccaccatgacaataaatttggctaaacatttaaatttaccctcagttttggttttcctttaaaaaaatatgtaaacaaatgaacaggaaatctctgcttgtaagaaaaatctgaatataacaggggaaggtcagcagacggtcaccggggaaagcatccaggcatcttgtcgcctcgctgggctggccggggctcagtcactatctgactcctccttgtacc

SEQ ID NO: 15337 - DNA, 758 bp, Homo sapiens
  misc_feature 242: n = A,T,C or G
ggtactttgaacgatagcaacccttctttgtgtaactctgaagctgaaaatattgagccttcagttatgaagatttcttcaaatagctttatgaatgtgcatttggaatcaaaaccagttatatgtgatagtagaaatttgacagatcactcaaaatttgcatgtgaagaatataagcagagcatcggtagcactagttcagcttctgttaatcattttgatgatttatatcaacctattgngagttcaggtattgcttcatctcttcagagtcttccaccaggaataaaggtggacagtctaactctcttgaaatgcggagagaacacatctccagttctggatgcagtgctaaagagtaaaaaaagttcagagtttttaaagcatgcagggaaagaaacaatagtagaagtaggtagtgacctttctgattccggaaaaggatttgcttccaggaggacaggccgtaatatgggttattctgggaaatttttgcaagaggcttaagaagaaggggatccctatggcctgaaagaagaagaagacccgaaatttcttatattgaaaaagaagaaggaggcctggtccttacttctgataactacaaagtggattttcttcttggagttggaatttaaccttgaaaaccgggttggggaacttaaccttaaaatgggacgtgagggtattgccccaaaattgggttaaagtaaggaaatattttgggtttttgaaagtcaaatgataaaggtgtcaaa

SEQ ID NO: 15338 - DNA, 390 bp, Homo sapiens
actacgagatgcactgggactcaacgtgaccttatcaagtgagcaggcttggtgcatttgacacttcatgatatcagccaaagtggaactaaaaacagctcctggaagaggactatgacatcatcaggttgggagtctccagggacagcggaccctttggaaaaggactagaaagtgtgaaatctattagtcttcgatatgaaatcctctgtctccgtaaaagcatttcatatttacaagacacaggcctactcctagggcagcaaaaagtggcaacaggcaagcagagggaaaagagatcatgaggcatttcagagtgcactggcttttcatatatttctcaatgccgtatgtttggttttattttggccaaagcataacaatctgctc

SEQ ID NO: 15339 - DNA, 426 bp, Homo sapiens
acgttcccttcccatatgtcataaaccaatgtattttaaagaaagcaaaagctaagtatttgaaaacgttatctttcttctaacacttgctgtgaaaagggagtaaattcaggcaagctagttgaaaacattctttaaaatggccagtaaaagcaaaactctttgtgctatacggaacactcgggagtattacaaaaccagggagggagtaaaagaatggccatttctctataaccaaattgaagacagtaaagtagaaaatgtaatttccattgtgcaccaaatactcagaacacaaattaaagcaaaaacaaaatggatgtgcacaccaaaacaaaggtttttctgtagcatttatatgaagagcatgtgtaaaacattctcaatctgcccctctgaatggattatgaaagatcagtatgtacc

SEQ ID NO: 15340 - DNA, 354 bp, Homo sapiens
acacataccccatctttgggcaagccctaaactattacaggttcccatacaactccttccccagtaggtaaatttagaacttatgaataaggaaaataagtctctagcttctgcttttactgaaggaagccaaacatagccgctaatactattcactccttatttcaaagagtgaattgaaaaagaaaataagttatttactccattgctatactctgaacttctataaatgggtgctagaaaatcttaatacattagtatttagccatactttgtatttatttaatatgaactgaacacatcttgcaagcattctccctctctagctcactttggcatttggagtgtaataat

SEQ ID NO: 15341 - DNA, 381 bp, Homo sapiens
ggtacccacagcattggctgttcttcataggagactcagagaagacttcataggagactcattattgtttactggacatcaggtgctatattgtatagcattcacattccacaggtgaggaaacaggctcagaggaataagtggcatgccaagatcactgagtatatcagtagcagaattaggattcagactttgttaggcctaactccaaagccctggcttttttttttttttttgagatggaatcttactctgtcaccgggctggagtgcagtggcatgatctcaactcactgcaatctctgcctcctgggttcaagagattcccctgccttagcctcctgagtagctgggactaccggcatgcaccaccacgcccagg

SEQ ID NO: 15342 - DNA, 386 bp, Homo sapiens
ggtaccctctatctctacttcacctcaatgtctttcaccctccaattttaaggtgaaaatatctaggcttctgccctctgcaactgatttctattgagggcctatggaggtaaaatgacaataatcattgaatctagaaagaaaaagcatcaagcacaatttacacgaacaatagtttcagttgacatttaactgaatgcttctaacttatttaatcttattagataggcagtgttttaatcaatttacagatggagaaaccagggatggtgcaacttgcaagtggcagagccctgtttatctccaaagttcctgttcctctgagatgaagttatagattaacctaagtttgtcctttcttgatgtaaccaactaatatctttgag

SEQ ID NO: 15343 - DNA, 362 bp, Homo sapiens
ggtacaaggacactaagacagtgtagcctgctgacttgagaatgttctgtaaggactggaaacactagaatcttgaagaaacgcctggctagaggtgagggtaagctgttaattacactgattacagtttgtgcctctcagactgagaactcttttcttcttgctgggggcattgctatctctaggatgtttgccctgaagtcctgatagtctctttggggttttaataaatggccgaaaaaattgttgtggggtttcaacaggcgttcataggcacccttgcttggcaatataacatggcttttgatgtttgggtgttggaagggatctttggagtgctgagagggactcagtctttttcc

SEQ ID NO: 15344 - DNA, 361 bp, Homo sapiens
accctaataaagtaatcaatagaagcctggattgttgttggaaaaagtaaggtaggaccaagaaacggaaaccaccaaattgccaagcaaagcagtatgataacactaaaggatataacacaagtctgcccttctgcattcatttagtgtcagttataatttcttccaaaggagaccttgaattttttaattatgttctcaaattacaacatttgaaatggtaactctagttgaatactccttcttctagggcgttgtatcttctaagaaatgtcccccattccagctctgtacgcgggggaacaaaatgaaaatggtcccatcttcagtgaagatacatctaaactgtatgctttgaaat

SEQ ID NO: 15345 - DNA, 424 bp, Homo sapiens
acgcggggacagccatgaacagcacactgaggaggacacaaaagaagtagacagaatctctgcctctgcttaggagtatgcaattttaattggggggcgaacaaaacttaaaatgcttagaaccaataaaaaggaagatttacaaaggcaacttcgcaaaatttctggaacaaatcagggaagttcccaagccccccaatgaatcctggccaagaaattccttccagggttaacctttgaaggaatagttttttgtaaaaattcttggaggttcttcaaatgttattcagaaactttgttaaagagttatcccagaaacggcccattaacccccaggggaaactgggagttcaacctttccccaatttgggagaaaattcccaaagccaaaccattactattcatggacatggaaactcggggg

SEQ ID NO: 15346 - DNA, 435 bp, Homo sapiens
acgatcttggctcactgcaacctctccctcccgggttcaagtgattctcgtgcctcagcctcttgagtagctgggattacaggcgcgtgccactgcgtccggctaatttttgtatttttagtagagatggggtttcaccatgttggccaggctgatctcaaacttcctgacctcatgtggttccaccccaccttgtgccttcccaaaagtgctggggattacaggcgttgagcccaaccggcgctcaagcctaacaagccaattttttttaaaaaaaactgaacaccctaattactggataaaaatttcttttggtttaaaaaatccttttttaacttattttttaaaagaataagtatttaagttttttttttttaaattcccaataagtttcgggtttattgggataaaaattttaaaggccttttttcaatt

SEQ ID NO: 15347 - DNA, 449 bp, Homo sapiens
  misc_feature 97: n = A,T,C or G
acgtctactgtaaaaccccatccgaggcacaagcagagacagatgtaaacccttttcctccagagtcacgcacatactcgtcatcgcattacttggnaagaatggttgtatcttaatggaaaggaatttatcacaatcaagggaggtcatgggaaaagttaacttggaaagcaaaacgccccctaaaagtttccccattcacgttttcaagtgtaaaatggattaacttattagaagaacatttggcgtaattcttaattttcccaaaaacggtttccaacttaaaaaaaacattttttccctaattaaaaataagaaccctttccaaatataaataaaattttaattattgaaacggttacccataaaattgtaaccttttttttttaaaaaagggcccaaattcccacaaggggaaattagggaacaacagaacccctattcagtct

SEQ ID NO: 15348 - DNA, 498 bp, Homo sapiens
  misc_feature 46, 47, 48, 49, 446: n = A,T,C or G
tttttgaaaaattcgccttttcaagcggccgcccggccaggtactnnnnattttttttatttttatttaggggtctttgtaaattctttattgccaggaatggaaccctaaagtggctcaaaaaaagtgccctatttttttttaatttaactacaaaggacaaaacacatttttaaaagttgagataagttgaccctttattgattttgccaaaaatttctaaaagcgcacttcacccatgaaaatgggatataaggtttaccttttgggggaattttgcacttgcaatgaaatttcttgtgaaaaagcctttgttgggattattggttgattagaatattagaagaaaatgaaagtcatatttatattaaagaattactatggagggtttcccccttgccttttgcttttcacaattccacaaggctttacaaaaacgttgctcnccaataaaacaatttccctttttgtgggctttttttgcatttttaattattt

SEQ ID NO: 15349 - DNA, 394 bp, Homo sapiens
  misc_feature 68: n = A,T,C or G
ggtaccactcccctcactttccaaagagaagtaattcccagctaggaccttcccttgctgggaggggngcccaggtgtggcctctctgtgaccttggaccctggcttcggcatatgccagcctggcctttccccagggtagggagctggcaccctgggcattccccggccagcatccagccttcttgggcagggcctttccacaccattcctcccaaatcctcactggcccaccctggaacaaatgcaggcggaagctcgcatccccacctctgctgtttctgctgggtccccaaagagctttctttagggaaaaagaaagcaggccagtgcctgcttcttttagaccccccagtggggcatggggtgggccttggttggccttaattttccat

SEQ ID NO: 15350 - DNA, 718 bp, Homo sapiens
  misc_feature 470, 471, 473, 474, 479, 480, 482, 483, 485: n = A,T,C or G
ggtacactgacttatgtgaaatacaatataatattttaccagtttaatgaatgatcagttggaagtgggagcccctttgcaaatcacttaaattagaagtgatttgcaacgcttaggttaaggagaagagcgggctgtgtcattaatgcaggaacttagggtatccagcggggtccagtcaggagacagaaaccacacatgattcaatcagagaaagtctgatgtgaagaattcttagttggggattgggttataagaagtaatgatatgtgaattatatctcaataaagctgttatctttaaaaaaataaataaaaaagaaataaagaggaccctgaagaatataggagccaggaacagtggctcacgcccataatcccagcactttgggaggctgagacaggaggattgtttgagaccaggaattccagaccagcctgtgcaacacatagaaaccccatctcgcaaannannaaatnntnnanaaaaaaaggttatctgcgttgttaccactgcttacccggggagagaccggtgcggcgcgggtccttcatatgctgagcgccggtcccctgggcccacttttctttctctatactttggctctggggcctttcttttctcaagcctttcgtccaactgaggagaaatgcccacagctgtggaggcgcaagccacttcaatttgtgcccaaaggggttgctttctctagggtgaa

SEQ ID NO: 15351 - DNA, 723 bp, Homo sapiens
ggtaccacagtttgcttaaccattcactttttgaaggacatctggattgtttccagttactgactactataattaaaactactacacatatttttgggtaaccttttgggtgggcataagttccgtttctgtgggataaatgcccaggtctccaggttccttatttggcctctgttgactctcaagttgtagcagggagtctgtctccaactgctagggttgggacttccaactccacacgaggtgtctgctggtaactcactgactgcgatggatatgagtgccttgtcatggctccctaaatggcctctactaataataccaccacaactaccaacactactaaagtcatgtggactctgctaacagtaaggtggactccttaccacccagtgagaatgaaactaccaattccttactcagctttcccagacgttaccctggaaggaagggtgagtgccttgccacagtcaggcatgagtggaaagcttggcttccccacttggcttttgccatgggtggggtagagccacagtttttttgttattgttgttgtggctggctggagtaaagctgttattgtctaaaagttttctgtcttactagtcttctcaagactgtcttggatttttggctagagagaacaggcttttgttggagattgtttattgtttttcagtgtccattggacctgcccggcgggcgctcgaaaggcgaatctca

SEQ ID NO: 15352 - DNA, 374 bp, Homo sapiens
actgccctccttatttcagcgctgtcattctgatcactctaggaccggttgagactttttcgtgaacagtttcctacctttttaggcaaccatctgtaagacaaggtagaatgctaccataaccatgattaacatttgcaaacactctgccacagtgcagccgctttctttgtctccagctgaagaaattgaggtgcacagaggttaaatttgatgctcaaagcaatacaactagaaaatataggaggctgggctgcctgattgattcccagcttagagattgaaagtcacatgcgaagcgctttagcagatagagaagggggagtcatactccagcgtgcattttagtttgtgccttttctgtccttgaatag

SEQ ID NO: 15353 - DNA, 336 bp, Homo sapiens
accttccaggatactactcccttatctacaagcaatccaaatgactaagggataatttccaaacacttctgcttgttaacccctcctctccagtgctgaaaaactcaagacaagtaaaagacacatttttaattaacatttggaagatggcttttgttagttaatagcaattgttaactctcaaaataaacaggaaatagtgccacttagcaagttggatgttccaaacccaaaagtaatgggccttaagaaatccaagtactcagtgcagcaaagaaagactacagacatcttaatggcagggggtgaagaataagaaaggctgctgactttact

SEQ ID NO: 15354 - DNA, 368 bp, Homo sapiens
ggtacttgataccatgcctagtgcatagttggtgcccaattaatacatgattggattatagcataatcactgatcactacatttaaagcagtccaatagtggaacaggctgcctcacaaatagtgagctctcgtttcctctacacagattctactatgggccaggatctcagccaagcagtggagccagaggctggacagacacaagcagagattttggaaaaagactgagtccctctcagcacttcaaagatcccttccaacacccaaacatcaaaagccatgttatattgccaagcaagggtgcctatgaacgcctgttgaaaccccacaacaattttttcagccatttattaaacccccaagaag

SEQ ID NO: 15355 - DNA, 365 bp, Homo sapiens
ggtaccaggagggtattgatgtttgaggtccaaactgaaaacccatcacctccttcccactgctatagcagcgttggccctggggttcattatctagccagttcacaccttcttaaaggggggctctgaaaatgtcttacttccctcacagacaaagcaattctcaagcctcctgagatcacccaccaaccagagcaactgctgtcacttggaggtgcagctgaattcttctaattgtgacacaaactcttgaaactgtaaatgctgaaagattaaatgaggttataacactcagaaggttttacaagtaaaagtaagtcaaatcaataggtctttatttcatatctgtaatggtttaactctgc

SEQ ID NO: 15356 - DNA, 541 bp, Homo sapiens
acgcgggattattgaagtgacagaaatgttgcataatgccagtttactcatcggatgatatttgaagaacaactaaaaaatctccgaacgtggttttttccaagtggccccatagccattctaatggaaattccccatcttgttcaatcaaatttctggccaaattaaccttgttatatttcctttgtgctttgggagaaaaaagtcctttaaacccccttggattcaacccccagaatggcaattggaaaaactattttttactctctcccaggctttttttgtgaaacttttcaattcaatgggaccaaagggtccctaagtataatttttatcttgggaaggggaatggaatttgcaaccttttgttccccaaccttgaaggaaaagaaatttattaaaaggcttaattgggttggcctggctaaaaaaaaaccagggttgcgaacttggttttggggaatttaatcaagataagggttacttaaatggcaagtattgtttccttctggaattttaccaaaagtaaaataattttaat

SEQ ID NO: 15357 - DNA, 308 bp, Homo sapiens
  misc_feature 308: n = A,T,C or G
cccttagcgtggtcgcggctgaggtactatgttttcaataatgtgcaaatatttaaacaacttaaatataaaatattcacttatatttttaatggatgtggtatctcaatccatttgtgtcactccagatcacaacataatttcttaagtaagatgcatattgagtcatgtaagtaacacataaaaagttataaaataaattgtgatcacacttgggctaaatatagaatacactaaatatctgatgggcatccacacattatagaaattagacattcaaccctatatagtaatttaaaaactaccgn

SEQ ID NO: 15358 - DNA, 436 bp, Homo sapiens
ggtacatgtaaatatacatcatcccaagttaaatttgataggccttcctgacagtagccatatagataaatagaagttttcgttggtttagtggcaaaactgaattcttaatgtaggtatacaagttaaatatgatggttagaaatgaagttttctgaaagtagttcgttgtatgctccctaaaagaattagctttatatttatcttaagaatatctctaaacctatgcaaaaatatggcaaatagtcttctttccattagtctagttcaacaaaatctgactcagagacagtaaagaaagggcaagtagaagatctaatgccaactaagaagataattatttctgaaatatttagttgaagataactttctttcttaagacattactgtggttatgatgcacaagtcaaagaacatgtggcatttccaaagagta

SEQ ID NO: 15359 - DNA, 383 bp, Homo sapiens
ggtacttgcaaagtaatacagaaacgtgactttcggcagccacccaagatgatgcctattttcagtgttgatgtattcaggcagggaaaaggtttacttggtggaaactcctgttagaatttcattcggggtggaaagaatcttctcgagctctctgtaagtgaggatctaagaataaaaggctcagcctagtcatttttttctgtgccctactgtatgagttgggcagaattgagtgccacctaagccgggcttctgtgtgccaaaatgctggtgggtgaaattagtgaaattctttctattcattcctttgcccttctcccaagaaaacccatggggaaacaaattacaggggatgaattcctttagaactttccctactt

SEQ ID NO: 15360 - DNA, 377 bp, Homo sapiens
cccttattttggtcgcggccgaggtaccattcttatctcagaatgctgtaaaccatcagtagaagcagtttagatttggactgcatggtaaaatgaaaagtaataaccctccaaccacaacctagtcagggtattaataattatatgtagcaagaaaacaaagaagaaaataatattgaaaaaatggagattccccaaccagtttcatatttgaaggatctgagttgtatttttattaaggaaattttttttctgaatactgtcttccaaaatgttaacattaaaatctgaatcagaggactctgaatggaaaagaagtttgatcactgacacctagggctctgaagcgtgtgtggccacatggaaaaagtcaagga

SEQ ID NO: 15361 - DNA, 424 bp, Homo sapiens
ccctttcgagccggccgcccggccaggtactgaggctgtatacagccacagcctcttcccatccctccagccttatctgtcatcaccatcaacccctcccatgcacctaaacaaaatctaacttgtaattccttgaacatgttaggcatacattattccttctgcctgagaagctcttccttgtctcttaaatctagaatggtgtaaagttttgaataagttgacttatcttacttcatgcaaagaagggacacatatgagaattcattatcacatgagacagccaaatactaaaagtgtaaatttgattataagagttttagatgaattttatgaaatgcaagtatcccacaagggaaatgttttatgggggcccgttggtaaagcctgggatgtgaagcaaaggccgggaacccttatagta

SEQ ID NO: 15362 - DNA, 390 bp, Homo sapiens
aggtacatatcatttccatcttccaatgggctgctgccgatcctactagcttatgacttagtgcttcccacaggacctagttaagatgagcagttctggatacagcatcactgggtctcaaagttccgtgtctaccagggcccagtagcacagcagaggctgtttttcaaaaagcatatgatcctctcctgtggttagaaccaccttccttcagggccccagggacctgcactgggattctttcattgggccttgtcatctattccacactgcatcttctttccccctacctccaatacataagatctgccacatcacataattcaagctgctaatttctttatatctggcccttctggttctacttataatgattaccctttttttgtg

SEQ ID NO: 15363 - DNA, 350 bp, Homo sapiens
tgaacatattttttgggttgctggagttcatctataagtcatttttgaggaataagatttatgttaagactatcaaacacagtgttgcctacaatagcaaaaatgtgaaaataacaacaacaacaaaacagcagaggaattgttatgtattttgtagtctatctatatgatgcctatttttaggctttaaaaagtcttcaaaatctttaatgactgatttatctagttaaatgcttaatccttagcaggctcttattctttaattaaacgtgcctttgagtagatgtgaataaaataaaaacaagtttcgaaaaaaaaaaactaaaaaaaattaaatgtaccttgtacgt

SEQ ID NO: 15364 - DNA, 478 bp, Homo sapiens
  misc_feature 25, 28: n = A,T,C or G
agaaatttgaaacatctggaatccncanagggttcggggcaaaatccggtggcggccgaggtaccattggtaataggaaaatgcaaacctaggtgtcttttaacggaaaaatgagaattagagtttaggagatttcagatcactgaagttttaaaaataatgtggaatagttggtaagaacaacttattttatgaaagctgacatcaaagtctcactggaacattgtagaggagaggttttctaggcatgtggaaatgcagtaagaggcatgggtaaaagcaccttttagtttttaaggaattaggttaaagaattagctgcatgcttgagtgtttattttggttatttctgatatgcagttctgaacctcaggaataatttgttatctaactaaaatagtaagttttaaaaataaagctcatttatattttcttctagaataataactgcttattacaggaaatttgcaaaatgcag

SEQ ID NO: 15365 - DNA, 381 bp, Homo sapiens
aggtacatagaatatgaacacagcacacacatgagagacgcaagtgccaaatgccttggcctgggcttcacgtgtcaagcccaacacagtcttaagaataagcagatatgagaaggagatgagaagtgagtccaggccaatggcggagatgatgacgataaggccatagacgacattgacccggatatcatcacaggccagcttcatgacatcttggtgtaggcagtaggaatgggaaaggatattggagcggcagaagggcagctgcttgatgaagacaggaaggggtgccatcagtgcagccccccgcaccacagcagccacaccaattttggtgacacgaggcaacgtaagtacctgcccgggcggccgctctagaac

SEQ ID NO: 15366 - DNA, 342 bp, Homo sapiens
gagctcaccgcggtggcggccgaggtaccctgaggcctgccagttcctgccttaatgcatatgtagtcgtaattgagttctgacacggccttgggtgtttctgtcctaaatagctgacattgcatcttcaagactgtgtgagtaatcctgatatttttttttaagctcagtaaattaattacatgccctgggagggagtgattgtaagtagaaaatactgaactagcagatgattcgtttttaaggtgctatactatgtgtatcaagttcaagacgatgaatcttaaagcttctaagaactggcagggttattccagctttgtgcccccgcgtacctgcccg

SEQ ID NO: 15367 - DNA, 495 bp, Homo sapiens
gaaaaaatgttcgacgcatctacgtatatcgggcgaattgtagctgcacagctgcggcggccgaggtactttctttatttacttgtatttatttcctctagttcttgaacccgcgcatcacttttttggttttcctcattccaccacagcatttaggtgaccgttaccatttatgtttcattaagcttcactaggaatgtaaggataatattagagcatttgcagaaaattgttatctccttttgtaggggattcgagacatatttgtagctacttcacggctgtagagttagtgggtgatcgggtattctgcattgttccttatccctttgtcagtgacagacacattgacataagagattcctacaggattataaggagagataaattattaaccatttttttacttgatccaactactccatgtcccatcaactagtggtaactgatgttgataggattttttttaagtccagtaactattcttgcagtata

SEQ ID NO: 15368 - DNA, 460 bp, Homo sapiens
gaatgagcaatcgtataccgcgaattggatctccggcgaggtcgcggccgaggtacataaaggttaccgaggacagttttggtggaatgatgttggcagacgcttcattggcatgggttcgagagagaaatgaaagaggattgaagacagtgagtatagacagctcaggaagtttagctgtgtaagtgaacacagagatgagtggtcactagaaggagaggtgagccaagagggaatgatgggagaagttataatatgttgatggtcaagatagaatgactgattaaaggggaattgctggggctctgttcctgagtaggcaagagcaggtgagatagaagacataggtggagggattggccctaaatacatgcgtggacagatcctccttatgaaaaaaagaaggcaaagtgtatgaactcacacagtagtaggagagtatataggtggtacctgcccg

SEQ ID NO: 15369 - DNA, 429 bp, Homo sapiens
ccgggcaggtaccagctttatataccacttattagaggttgccaagtgtgatatctaggccttaatctagaaattaagctaatgaggccctatttacacaatagactcctctatccccctttgtcacttcagatttaagaattgtcttgttctataaatcagatctcttgtgtgttttctgttcccgtgacccgaagcagctgttttcagactttagcaagcatcagagtcacctggagaggttggtgtatcacagattgtgggtcccaccctcagagtttcggaatcagtaggtctggggcgcaccctgagaaatctgcatttcttagaagttttaggtgatgctgatactgctgattggggttccacactttgagaagcactagtctaaaggactgtatggcttgttgtagtgaaatgaaaggaagc

SEQ ID NO: 15370 - DNA, 438 bp, Homo sapiens
  misc_feature 343: n = A,T,C or G
gaagacgcctttacactacttagggcgacttggagctccttcgcggtggcggccgcccgggcaggtacaagatttcttagggcgaatccaattccatcaatacttggggaaacacaaaaacctggtgcagctggaaggctgctgcactgaaaagctgccactctatatggtgttggaggatgtggcccagggggacctgctcggctttctctggacctgtcggcgggatgtgatgactatggatggtcttctctatgatctcacagaaaaacaagtatatcacatcggaaagcaggtccttttggcgctggaattcctgcaggagaagcatttgttccatggnggatgtggcagccaggaatattctgatgcaaagtgatctcactgctaagctctgtggattaggcctggcttatgaagtttacacccgaggggcca

SEQ ID NO: 15371 - DNA, 368 bp, Homo sapiens
gcgaggtacctaccttggcctggggtaaccaaaatgggggtggctgctgtggtgcggggggctgcactgatggcaccccttcctgtcttcatcaagcagctgcccttctgccgctccaatatcctttcccattcctactgcctacaccaagatgtcatgaagctggcctgtgatgatatccgggtcaatgtcgtctatggccttatcgtcatcatctccgccattggcctggactcacttctcatctccttctcatatctgcttattcttaagactgtgttgggcttgacacgtgaagcccaggccaaggcatttggcacttgcgtctctcatgtgtgtgctgtgttcatattctatgtacctgcccg

SEQ ID NO: 15372 - DNA, 397 bp, Homo sapiens
ccgggcaggtacgcggggactggcgtccggtgtgcaggtggccacatggatcctggcagccggtggcggaacctgcccagcgggcctagcctaaagcacttgactgacccctcttatggaatcccgcgggaacagcaaaaggcagcgttgcaggagctgacgcgggcgcacgtggagtccttcaactacgctgtgcacgagggtctcggcctcgcggtgcaggctatacctccctttgaatttgctttcaaagatgagcgtatctcttttactattctggatgctgttatcagtccacctacagttccaaaagggaccatctgcaaagaggccaatgtttatccagcagaatgccggggccgaaggagtaccctggccgctctagaactaggggaaa

SEQ ID NO: 15373 - DNA, 527 bp, Homo sapiens
aggtacatcgcatcagctctgtcttcattaatctttggctcttattccatttctttggttaaatactggtatcattgaggctgggtgttctgacattaaagccatcagtaactgtagcacatttatgaaatatttttcattcctcaatgtaattgtaaaggaaggttaaatttaaatatacttcttgaatggttcatactttctcttgtacaccttttgtatactaatacactgttaaggctgttatatgtcccacttacttgatccaggcaagggatttaaattataccccaaggtcagttaaattatcttattaaaggtttgtaggccatatatttctttttaaataaacctgatttcccttaatttctggctgttattgagttgggttgttaggaatggggttagccaagttttcacaaataaaaaattttcaagtcaagaaaccaaaaatttttgtcttttaataaggggggaaaaaggtattgaaaacccttttttgccagggttggttaatggttataccc

SEQ ID NO: 15374 - DNA, 187 bp, Homo sapiens
ccgggcaggtacttaaagcattattccgtatttcagcacagaatgactttggtgaaactgtagctgttagcgagtaattgcgttacaggcagacccagtcttaaattaacaaatctgggttcccttaactatcaggtttatgttggttttatttgcttctatctggatcccttctctttgcctggga

SEQ ID NO: 15375 - DNA, 88 bp, Homo sapiens
tcctgggcctcggactaacaagcggctttaattgctgggcaggtcatgtggaaggtgctcctcccttcaacccagtaaattcaatctc

SEQ ID NO: 15376 - DNA, 373 bp, Homo sapiens
ccgcccgcccggccaggtcctaccgtggcctcgggtaaccaaaattggtgtggctgctgtggtgcggggggctgcactgatggcaccccttcctgtcttcatcaagcagctgcccttctgccgctccaatatcctttcccattcctactgcctacaccaagatgtcatgaagctggcctgtgatgatatccgggtcaatgtcgtctatggccttatcgtcatcatctccgccattggcctggactcacttctcatctccttctcatatctgcttattcttaagactgtgttgggcttgacacgtgaagcccaggccaaggcatttggcacttgcgtctctcatgtgtgtgctgagttcatattctatgtacct

SEQ ID NO: 15377 - DNA, 400 bp, Homo sapiens
aggtacaaaataaaactcattgctattgatagtttgactgtaaaggaagacaaaataacacaagaaagagaggtcagatagattggtagtatggatatttgtattaagaaagatgcagagggatagaggtgaggagaaccaagcggaaatgctgaaataatataggaagtcggaaattaatagaagtagcagataatcaatatttgtagtgagttaaagtatatcctttccttcttacatgttagctaacaacggcttaagaaaaattggtgcttagcatgaaattggaaatttggaattgctaaattctttcttaaggtctgctgtgcttgatttatttaatggtctacgctctttgcagtgtgacatcacagttcattagcaaagtggttatttgggt

SEQ ID NO: 15378 - DNA, 461 bp, Homo sapiens
  misc_feature 101: n = A,T,C or G
gcctcgattcgatgcaattacgtactacagggcgaatatgagcgccaacgccgtggcggccgaggtaccattcttatctcagaattctagcaaccatctgnagaagcagtttagatttggactgcatggtaaaatgaaaagtaataaccctccaaccacaacctagtcagggtattaataattatatgtagcaagaaaacaaagaagaaaataatattgaaaaaatggagattccccaaccagtttcatatttgaaggatctgagttgtatttttattaaggaaattttttttctgaatactgtcttccaaaatgttaacattaaaatctgaatcagaggactctgaatggaaaagaagtttgatcactgacacctagggctctgaagcgtgtgtggccacatggaaaagtcgaaggatgcgctgtcgaatctccttttgtcttcactccatagacaattg

SEQ ID NO: 15379 - DNA, 406 bp, Homo sapiens
tgcttcttttgaccacacaattagaattcatggtttaaaatctgggaaaaccctgaaggaatttcgtggccattcctcctttgctaacgaagcaacatttacacaagatggacattacattattagtgcattctttgaaatggccccggtaaagaactggaatatgaaagaccccagaaatgtttcaaataccctttaaaatccctgggcaagcaccgccaggggacagattattaaccgttcaaacagtgtgaatttctaactttccttaaaaaaacccctggaagcaccttttgagggatgttgccaaccaggaatcaaaaaccaccggtgggttcaatcattgaaaacattggccaggggggccaggaatttggtccagaaaagcctttccagatttcctggg

SEQ ID NO: 15380 - DNA, 238 bp, Homo sapiens
aggcggggccttttttaaaacccccccccggggggtttcataaactgggggggggggggatttggtcaaaaagtggggggggggggaaaaaaaacccccttttataaaccccccggggggggggttatattaggaagaaaatttttggtgaggttgaccccccttggaagaaaaagatattttttttgctccggcgtctcctccttttttgtataatgaaaatatagatgtggttggg

SEQ ID NO: 15381 - DNA, 259 bp, Homo sapiens
aggtactcttggctttgctgattgcttccctgatgctgcttttgtcctccttcatcctgttttccacaggctttttctgttgattctctaccttgctatcccaaacacatgtgtcaccaaccttagattcagggataggatcctccacttttggccacttagatgctgcatttccaacattttcatattcttcagttggttcctcatcctcagtgctcgtcttcaaatgtgacatggctgtggcggcgccgcggaaacc

SEQ ID NO: 15382 - DNA, 275 bp, Homo sapiens
ctgttccgcccttttcttcccttttcgggaaaagcagttggcgccttttcttcatttagcttcaacgcctgttagggttattcttcaggtttcgtgtggtagggggtcgattcgccttcacaagactttgggcctgttgttgccacggaaaccctcccctgtttcaggctcccgaacacgtcttgccgcccttttatcccgggttaaacctaatccgtgcttttgaaggtccaaactccccggttaaggacaaccggaactttattctgcccact

SEQ ID NO: 15383 - DNA, 121 bp, Homo sapiens
aggtacctttggtttgtgagtttgatagggaaaattaagacacctctgaggaaaatacagaaagtggttttatttaaaaccactcctggttgacaattgaacaaaaagattgtatttaaaa

SEQ ID NO: 15384 - DNA, 500 bp, Homo sapiens
ccgggcaggtaccacttggcacaatgcgagctacaggagactttgtgactgtgaaagatggagagattttttttttgggacgaaaagacagtcagatcaaacgtcatggcaaacgtcttaacattgaacttgtgcaacaggttgctgaagagcttcagcaagtggagtcttgtgcagttacatggtataatcaggaaaaattaattctcttcatggtgtctaaagatgcttcagtaaaagaatacatctttaaagaactgcagaaatatcttccaagtcatgcagtcccggatgagcttgtattgatcgattctctaccatttacatcccacggcaaaattgatgtttctgagttaaacaagatatatttaaactacataaacttgaagtctgagaataagctcagtgggaaagaggacctttgggaaaaattacagtatttgtggaagtctactctgaatctcccagaagatcttttgagggttcctgatgagtcactc

SEQ ID NO: 15385 - DNA, 291 bp, Homo sapiens; identical to SEQ ID NO: 6216

SEQ ID NO: 15386 - DNA, 237 bp, Homo sapiens; identical to SEQ ID NO: 6349

SEQ ID NO: 15387 - DNA, 344 bp, Homo sapiens
gtcagtagggtgtgcgaatacccgtacagggacttataaaatgataaccagcgccgttttcctctcctgtgaagtcttcccttcgttgccgcttcttccatgtttccgaacacctggccgccttacccgtgataaccttgttcccgtcctttttctacccctttctggggaagacgttgtgccgcttttcctcaattagcttcaccgcttggtaaggttaatcttcaagtttcgggtgttaaggttcggtttcgctttcccaaaacttggggccttgtgttgcacctaaaaccccccccggtttcaagccccgaacccgcttggcgccctttataccggggaaa

SEQ ID NO: 15388 - DNA, 154 bp, Homo sapiens
aggtactaaagtcaaaagaggaaagccatgaacagtcagcagaacagggcaagagttctagccaagagctgggattgaaggatcaagaggacagtgatggtcacttaagtgtgaatttggagtatgcaccaacttgaaggttcctgcccgggcg

SEQ ID NO: 15389 - DNA, 362 bp, Homo sapiens
aggtaccaactaatatatttcttttttttttctttttcttacctattaacccactaaaatttctaatctaaaagcaatattcaagttacattttattacagaaattggaaagcaatttgcctgggaagcaaaatgttgatatgattcacgtgattttaacattaaatctaacttgtaacaaacaacggattatttatagataaataaattgagactattatttgcatagcacagaaagtcaaacatgacccacacatttatgcacatataattaatttcaataaaatgtttatatttatttcgaataaataaaaaaacataagaaatcattaaaggtacctgcccgggcggccgggtttaaa

SEQ ID NO: 15390 - DNA, 298 bp, Homo sapiens
tccgaacccttgccgtcttaaccggtatacactgttccagccttttcttccactttcggagaagccgttggtcgtctttttcttcatagacatcaccgcctgttagagttaatctcaagtatcggggtgtaatggttcgttttcgccttcccaaagcctgtgggcttgttgttgcaacgtaaaccccacccggtttcagtctctcgtacacgtctgtcggccctttaattccggtttaaacttattcgatcattggagataccaaacccccgggtaaagaacaacgtactttaatcgc

SEQ ID NO: 15391 - DNA, 395 bp, Homo sapiens
ccgggcaggtacgcgggacagtcacagttaacatcctcattctcaatcctacccatgatgcagacagattacctcatttcagctcaataagacatcaccaaattcccttaggcagaaaaagggtggggagtgccctttcttgaaggaatcccttaagtgcacgtctcccgttttcttttcacatcaatgcagagtccctctgtgaatttacaacacccaacacccatgagttcagtccttaagaaggaaaattgagcaagtatttaattggttggacattgcataaaagaggtccatatccaggctaactctagaaattttattctcaaacttagttggcctctttttcttctgtcagaggaccattcttagtggcactggggaaatcttggcac

SEQ ID NO: 15392 - DNA, 363 bp, Homo sapiens
ccgggcaggtacatagaatatgaacacagcacacacatgagagacgcaagtgccaaatgccttggcctgggcttcacgtgtcaagcccaacacagtcttaagaataagcagatatgagaaggagatgagaagtgagtccaggccaatggcggagatgatgacgataaggccatagacgacattgacccggatatcatcacaggccagcttcatgacatcttggtgtaggcagtaggaatgggaaaggatattggagcggtagaagggcagctgcttgatgaagacaggaaggggtgccatcagtgcagccccccgcaccacagcagccacaccaattttggtgacacgaggcaacgtaagtac

SEQ ID NO: 15393 - DNA, 190 bp, Homo sapiens
aggtactaaatgctgtgtaagtagacgttaatctggctggaaccatgggaagcactttgcagtgttcagaagagaggctccatttgtggttattatgtagaactgggccagagccagtccattgcctgtttttttaaataaggttttactgagcacagccacactcatttgtttatgcagtacctgcccg

SEQ ID NO: 15394 - DNA, 311 bp, Homo sapiens
tgggacgcttctttccgcattccttcgtctcaacttgacttcgactgtcgcctcgtgtcggttcgtgctgacggacgagtcggttattcatgcttcacttcaaaagggccggttaaattacgggtgtattcccaacagaatattcaaggtggaattaaccggcacggaaaaggacacaatggttgaggcataaaagtgcgcaagccaaaaaaggtcgcatggtaaacccgtaaaaaaaagggccccgacgttttgcttgggccgttttttttttccaataagggccttcccgcacacctccctggaaccgg

SEQ ID NO: 15395 - DNA, 65 bp, Homo sapiens
aggtacaaattgttccttgaaatgactcagagacattttctgaattggcttccatcagccaggca

SEQ ID NO: 15396 - DNA, 67 bp, Homo sapiens
agggtgcggtagacgctggcggccgagcccgtcgccaggccgaactgcgccaccagctgttcgcctg

SEQ ID NO: 15397 - DNA, 14 bp, Homo sapiens
gttagccgcccgta

SEQ ID NO: 15398 - DNA, 245 bp, Homo sapiens; identical to SEQ ID NO: 6452

SEQ ID NO: 15399 - DNA, 814 bp, Homo sapiens
ccgggcaggtacctgaaggaacgaagaagagggatttctcaaggtgagaagcagttctccatggacactgatgacagcacaggcaaagtttcctatgactagggatcactgtccacacagagtctggcttcccaggtatccagcaggtagacaaaacagctaactccactgccactcctttctccacatccgttcctatttctcagccatctcagtgacatccgccatcttgagagtcaactactgactggactgagttgtgtggtatatgcttctgtttacttctcttctgtcttttttaagtggccaaatagcaaacgcttaaataggaaatctctgggagacttgaataaaagactttgcttggtagaaaatcatgtcacagaaaggctaatagacagcaaagtaaatcagcaagtccctgagcagtaggattaggattcctgtctcctttcagattcaaatgcatctgtttctggggttaacagtggactgttaagaggctgtgcagcttgggttaagtcattcttatctctgggcttcaggagcttagaccagatagtttctacaggctctcttggtgctgatgccttgggatcttgggcttgtttttgtagatctgcagggggaaacaagatttttggcagcaatctttcattctaaagcttcctttaatttcgggtacttggccgtttaaaactaggggaacccccggctggacggaattgatttaagcttattgatcccgccaactcaaggggggcccggaccaactttggttccttaaggagggtaaatggccccgcggaacaag

SEQ ID NO: 15400 - DNA, 369 bp, Homo sapiens
gtgattgctttccaaggccaccgagggtatctgagactcccaggccctggttggtcctgcctcttctccttcatagtgtcccagtgttgtcaggagggcgctggtggtagcttggaccttgtgtgccaacgcttcctcaggtctgggcctaacagcctccactgcctgggctcactcagggagcgcctcattatttgggcagccatggattctatcccagccccatcatcagttcggggacacaacctgactgaagatgccagacatcctgagagttggcagaacacaggaggctattctgaaggagatgcagtatcacagccacagatggcactagaggaggtgtcagcgtcagatccactggcaagc

SEQ ID NO: 15401 - DNA, 68 bp, Homo sapiens
aagatgttcttgggaaaaaatggaccgtgggagcctggggcttggaaccccgaagtttccccttgccg

SEQ ID NO: 15402 - DNA, 92 bp, Homo sapiens
ccgggcaggtaccaatcccagggatgaagaatgtgaaagaattgtggcaggaataaaccagttgatgacactagatattgcctcagcatttg

SEQ ID NO: 15403 - DNA, 294 bp, Homo sapiens
ccgggcaggtactcctcatgatcatctacacaacattctgtgacacgttctctaacccaaatattgacctggataaattcagccttgttctcatactgttcataatattttctatccagctgagttttatgcttttaactttcatcttttcaacaaggaataattcgggtttcacaccagcagacacagtggctatcactttctgttctacacacaaatcccttacattgggaattccgatgctgaagattcgtgtttgcaggccatgagcatctctctttaatatctgtacct

SEQ ID NO: 15404 - DNA, 155 bp, Homo sapiens
taaatgaaattcgggccaaacgccgcggtgggagaaggacggttttgcgttatttggggcgccttctttccgccttccctcgccttcacctgaaccttcgcttgcgcctcgggtccgtttcggtcttgtcgggcgagccgggtaatcaagcttaa

SEQ ID NO: 15405 - DNA, 235 bp, Homo sapiens
aggtacatttagagaacatttgtcaaaggcctaagtacggcaaaggaaaataaacacagaatataataaaatgagataatctagcttaaaactataacttcctcttcagaactcccaaccacattggatctcagaaaaatactgtcttcaaaatgacttctacagagaagaaataatttttcctctggacactagcacttaaggggaagattggaagtaaagccttgaaaagagt

SEQ ID NO: 15406 - DNA, 474 bp, Homo sapiens
  misc_feature 269: n = A,T,C or G
ccgggcaggtacatgggactacaggcacgccccaccatgcccagctcatttttgtatttttagtagagacagggtttcaccatgttggccaggatgatcttgatctcttgacctcattgatccgccacctcttggccatcccaaagtggccgggtatcacaggtcgtgaagccacccacaacctgggcccttctaatttatttcttcttttaaaggagaagaagaaaaacctattgagtagggcccaaaatatattttaaattaaaatncttttacccttaagcaacaatggggaaaataaaatggaaattttgcccttaattaataagggtgaatgaaaagcattacaacatatgaaaacaggaaaacaaattcaccatttttaagtaaaaaaggtcaaaaaaaattttgaggaactttattaaggcctatattgggtaagctttatttttttgggttggggggaaaaaaaat

SEQ ID NO: 15407 - DNA, 304 bp, Homo sapiens
gcggcccggccaggtccatagcacctcccctttttctctcttcctctatctccagtcatgtaagacatgcctgctatgccctctctcaccactcctattcaacatagtgttggaagttctggccagggcaattaggcaggagaaggaaagaaagggtattcaattaggaaaagaggaagtcaaattgtccctgtttgcagatgacatgattgtatatctagaaaaccccattgtctcagcccaaaatctccttaagctgataagcaacttcggcaaagtctcaggatacaaaatcaatgtacct

SEQ ID NO: 15408 - DNA, 421 bp, Homo sapiens
aggtaccctagcctaatccatattgggcactcaaatttttactgaatgactaaatgaaaagatggatgaacatctctataaactatggaaagaaaatgctgataaagcatttgccagaaattacttcactagtgccacacacggacagaattgaggacatttagacttttttgtttgtttgagatggagtctcattctgtcgctcaggctggagtgcagtggtgctatctcagctcactgcaacctctgcctgggcaagactctgtcccaaaaaataaaaaaataaataaaattaaaaagtctggaaagtaaagggaagaatgaatacaatttagttaagaatactgccaggattaaacaaacaaaaaatcaatcttggattggttcatctttatttctagaaataatactatatacctta

SEQ ID NO: 15409 - DNA, 412 bp, Homo sapiens
aggtacattttcattgtatgtatctaccacggcctatttattcatccattagttgaagaacatttggatggtggaagagaatatctttgtcttattctgaattaaggggcattcagtctttcagcatggagtaggatgttagctgtagggtttttgtagacgccctttacagagttgaggaagttctcttttattcttagtttgctgaaagtttttaccatgaatacatgttctagtttgccaaatgctttttctgcttcaattaatatgatcatgtgtttctttcttcttcatactgatagtttgacagttccattgattcatttttgatgaacgaaccttacattcttgggataaattgcccttgccatggtgtattgttccttttaatgtattgttggatttgaatttg

SEQ ID NO: 15410 - DNA, 423 bp, Homo sapiens
aggtacccctcttggatcttcattaatgagaagacattcataaccagactgaagatggcaaactaattgttgaaggaatgctggacattttctggggagtaaaacgacctatacagctaaaaatacaagatgagaagccattctcttcttttactagtatgaagtcatcagacgtcttctccagcaaaggaatgacacgctggggggaatttgacgatctctatcgtattagtgagctggacaggacccagattcctatgtctgaaaaaaggaattcccaggaagcaacaccctgaagccacatgcaaaggatgaaccagactccccagtgctctatagaaccatgagtgaagcagctctggtgagaaaaaggatgaagcctctgatgatggacagaaaagaaagacagaaaaatagagcctt

SEQ ID NO: 15411 - DNA, 401 bp, Homo sapiens
aggtaccaggagggtattgatgtttgaggtccaaactgaaaacccatcacctccttcccactgctatagcagcgttagccctggggttcattatctagccagttcacaccttctaaagtggggctctgaaaatgtcttacttccctcacagacaaagcaattctcaagcctcctgagatcacccaccaaccagagcaactgctgtcacttggaggtgcagctgaattcttctaattgtgacacaaactcttgaaactgtaaatgctgaaagattaaatgaggttataacactcagaaggttttacaagtaaaagtaagtcaaatcaataggtctttatttcatatctgtaatgggttagctctgcgggaagtgttagcagctatatgaattaggaagaatt

SEQ ID NO: 15412 - DNA, 10 bp, Homo sapiens
gatagcggcc

SEQ ID NO: 15413 - DNA, 362 bp, Homo sapiens
agggtgccgcttgaggaaaacgtgagtttgtgaaggtgagcagtctgggtcggtagcgaaagcggagaccttagctgaccccgcagctgtctttctctttgttaacctcaacacatcgcgcccccttccgggaacacttgctcttctctccttggcttaactagtcccggtttttcattctttatccgtgacctttagggaaccgtgggggggaagtctggtttccgtcctgctgctttccttcaactacaagatggcttgtcataaggacgcatgcaatgccattccttaaagacagtttgttgatatgacagtgttcgtatattgaacacgttcaagtgtcaaaagtatcactttggcag

SEQ ID NO: 15414 - DNA, 472 bp, Homo sapiens
aggtacttttgataataactcactctgtgcgatattcctgaataagtccatctcaaaagtttgggattttcctcctcttaactttcttaatatttggacatgcaagttgtcgccaaactaagggtatttcatggaattttctagtataatagaaataacctatacttttgagtactggaaataactgaccaatatactataaggatatcataaattgtcttacaaataaatacaagatgattttttagactattatattcacaatccatgaggaaaattttattaaataattgtaaaagcccattgccccaaaatttttaaacaaagtattacaataaattatgtgtatataaaaatttaaaaaataaaaatataccttgcactaaggagggagaagcttttataaaaaattagttgaaattctactagggaattagataaggaaattattaatattaaaaacttttattag

SEQ ID NO: 15415 - DNA, 394 bp, Homo sapiens
aggtactttgggaggccgaggcaggcagatcacaaggtcaagagattgagaccatcctggccaacacggtgaaacctcctctctactaaaaatacaaaaattagctgggcgtggtggtgcatgcctgtagtcccagctactcaggaggctaaggcaggggaatcacttgaacccaggaggcagagattgcagtgagctgagatcatgccactgcactccagcccggtgacagagtaagattccatctcaaaaaaaaaaaaaaagccagggctttggagttaggcctaacaaagtctgaatcctaattctgctactgatatactcagtgatcttggcatgccacttattcctctgagcctgtttcctcacctgtggaatgtgaatgctatacaac

SEQ ID NO: 15416 - DNA, 176 bp, Homo sapiens
tgtagcttaaactcacaattaatttgccgttgtcgcttcacttgtccccgctatttccagttcagggtaaaaccctgttcgttgcccagtcttgtcattaaaatgaaatatcggaccaaacgtctgcgggagaaagaaggacgggtttttggcattaatttgtggcctgcttcttt

SEQ ID NO: 15417 - DNA, 11 bp, Homo sapiens
tttaattttga

SEQ ID NO: 15418 - DNA, 90 bp, Homo sapiens
aggtaccaatctaaaaacaggcacaaactgcttagcctatgacccttaactataaaaaaacaaatttataagttaaatacagaaaagtta

SEQ ID NO: 15419 - DNA, 246 bp, Homo sapiens
ggcatctctaccacggatctatgcgctaccattagtgcttcctgtgtgtgtgcatatataaaggggctggaaatgtgcagaaacatgatactactcacacattatatagacatcttgctgcctctagtgatgatgattatcttcatttgctcatatgtgccgcctaccatggagaaggcaccagcccccatcttttgtcacccctgccattgagatgtcgggcgcctgtctttgctgcactgagta

SEQ ID NO: 15420 - DNA, 391 bp, Homo sapiens
ccgggcaggtacagatggggttttaccatgttgctcaggctggtctcaaactcctggagtcaagggttctatttgcctcagcctctcaaagtgctgggattacaggtgtgagccacggctcctggctccttgctccagaatcagttttttaatggaagatagctcatactttgtttttgtttttaaagagactgggcaacatagcaaaaccttgtcactataaaaaatacaaaaattagccaggcgtggtggtgcacgcctgtggtctcagctgctcagtcggctgaggtgggaagatggcttcaagccgggagatggaggcttcagtgacctgtgacctgtgatcacaccacttaattcctcaaagcatttgtgtcccagttccctccat

SEQ ID NO: 15421 - DNA, 192 bp, Homo sapiens
aggtactgctactaacggaacccaggctctgagttgtctcaagtttcctcttttcctgtttttctcaggtagagtttctctcctttagctcattctgtcctgagagaaacaccactcccggatgttgacccatctatagcaggaattctccaagtgtggcccctccccggccaggcacggatctgggaggaa

SEQ ID NO: 15422 - DNA, 321 bp, Homo sapiens
aggtaccctgaggcctgccagttcctgccttaatgcatatgtagtcgtaattgagttctgacacggccttgggtgtttctgtcctaaatagctgacattgcatcttcaagactagtgtgagtaatcctgatatttttttttaagctcagtaaattaattacatgccctgggagggagtgattgtaagtagaaaatactgaactagcagatgattcgtttttaaggtgctatactatgtgtatcaagttcaagacgatgaatcttaaagcttctaagaactggcagggttattccagctttgtgcccccgcgtacctgcccg

SEQ ID NO: 15423 - DNA, 418 bp, Homo sapiens
ccgggcaggtacagtgaaaagagccaaggctgtgtgaccccctcatcacttagccaggcgtatggtcctggtttctgaggctgccagaaagcatcttagcaatttgtgtttggatggtccatgcctgactattctaggctggaggttcctaaagagtaacaagaggaagagaaacaagaatctctgacacttgttgagaatagagcacagtcccatttgtttgaaaagagacaccaggcagccatgtttatgtgccagaaatgcattccacctcaaggaggacttaatttatggacccgtgtgtgccaggctgagctgggcaagatctttctcaggacaaactctgccatgcagctaaaagtctggaaactaaaggatttcatgtagtaaactatcttccaacccctgtaggcatcag

SEQ ID NO: 15424 - DNA, 399 bp, Homo sapiens
aggtacctatgatttaaatactctccttttaaatactttgtaaaaactgcttttccgagccccttttatgctctgcagttgccatatccactaggtggtattgcaaataagtaaagcatcctggccatgacgctgctagtgagaatccctgaccaaagttactctcctcacctcactgcaaacctccaggaagcggaaactactacccctccacagacagagctcccctgccactccatgaggcgctgctgccggcatcagttaccgaagccctcacccacacccagcctgcaatggtccactctatattccacaatacaggaaaaagcccaaggagtcagatcagttacgcccctgggatgcagaaagaaccagtgattcttcagatatgacagcagg

SEQ ID NO: 15425 - DNA, 10 bp, Homo sapiens
ggtaggggcc

SEQ ID NO: 15426 - DNA, 249 bp, Homo sapiens; identical to SEQ ID NO: 6257

SEQ ID NO: 15427 - DNA, 368 bp, Homo sapiens
ccgggcaggtaccattcttatctcagaatgctgtaaaccatcagtagaagcagtttagatttggactgcatggtaaaatgaaaagtaataaccctccaaccacaacctagtcagggtattaataattatatgtagcaagaaaacaaagaagaaaataatattgaaaaaatggagattccccaaccagtttcatatttgaaggatctgagttgtatttttattaaggaaattttttttctgaatactgtcttccaaaatgttaacattaaaatctgaatcagaggactctgaatggaaaagaagtttgatcactgacacctagggctctgaagcgtgtgtggccacatggaaaagtcgaaggatgcgct

SEQ ID NO: 15428 - DNA, 67 bp, Homo sapiens
tgtgattatttactatgtcctagattacaattcatggcccttgccaccacctccccaccgtgtacct

SEQ ID NO: 15429 - DNA, 224 bp, Homo sapiens
ccgggcaggtacagccaggtgtggtggcccgcatctgtaatttcagctactcaggagtctgaggtgagagaatcactcaaggccagaagtttgagcccagactggcaacatagcaagaccatgtctctttgccgtgggccgctcctttcgaggcttcggctacggcctgacgtttctgccactgctgtcgatgctgatgtggaacctctactccccgcgtacct

SEQ ID NO: 15430 - DNA, 418 bp, Homo sapiens
aggtccaaatttgggaactaattattaaaaatgagtgtggctggatatatggagaatgttgggcccagaaggaaccgtagagatcagatattacaacagctttgttttgagggttagaaatatgaaatgatttgggtttgaaccgccagttttaaggcgcagggcccgaaatcctgaccctctgccccgtggttattctccttcccagcttgggctgcctcatgtcattcacaggtattccattttgttttgttgccatgttcttgtggaaagccattaagaatttttctcgtactggttttccttttaattggggtaatgccttcacttttggtgaacattccattttcaaatttcctagtaattccccgtttctaaataaaattatttccccaaaccagggatcctggtttttacc

SEQ ID NO: 15431 - DNA, 441 bp, Homo sapiens
ccgggcaggtactctacggtgtcaataattatttcattctctgctgcaattagtgctaattacaatacctgagctataaaaataaaagatttcattatagcaaagttcacaaatatcgttttagttcagttatccacattgttcatttaaaagtaatacatttttctttacatataacctgtcttagacttgtaatttgaggatatcttgatgaaacaggatctgtatcttgaaacagtcacttattatgctaaaacatcttgcattaagggaattgaaaaaaaggtttagcacaccctagttttttttcaattatgtcaggatattttggagtatgtacaacagtaaaaacttaccattccagtatggaatggacctggaaattatttccactttgttcttttctcgagccattttttggtccatttgggaataggaact

SEQ ID NO: 15432 - DNA, 410 bp, Homo sapiens
ggagctccaccgcggtggagcggccgcccgggcaggtacgcggggaaatggaaaaacagcaaagggaacaagttgaaaaaaaacatgaaagatgcaaaagacaaattggaaagtgaaatggaagatgcctatcatgaacattaggcaaatcttttgcgccaagatctgatgagacgacaggaagaattaagacgcatggaagaacttcacaatcaaggaaatgcacgaaacgttaaaagaaatgcaatttgagggcaatgaaggagggaaacgactgttataagtaggagggaaagagattgaattgatttccgttcaaaacgtgtaggattgggaaagaaacaaaattgaatggcggccccaagggaagagggaaaaggtttaccagccccgaaattgggggccttaca

SEQ ID NO: 15433 - DNA, 455 bp, Homo sapiens
caggtactagctcctgtcctgctgtctcaggacctttcagttcaagcatcctcctaacctgagtctctgtgtctcttacctcaaattctctctctcaaaaaaaaaaaggtgggggggattggctgggccagaatttggcccaaagccaccactggtctgtggtgaccaggagcaataccatattgatttcccaggccccaccctttcagcaagaggctggaatttggggggagggtcgtgatgtttcctactaactggccattagctggatcatcatttccaaaggaatctaatacaataatgtccacaaaaagcagtgaaggatacagagaccacaaaatagatccacaacatgggacagagtggcattggcctcccaacagtttcacaggaaccccttggatgctgcagagcatgggtctctggggactggaggagctgaaggccactcccag

SEQ ID NO: 15434 - DNA, 336 bp, Homo sapiens
ctcttctctcctttcgggtaagcagtggcagctcttcatcatatgcctcactgcctgtcaggtagtcgtcagctctcgggtgctaggatcgttttcgcttcccaatgcatggtgactgttgtagctacgaaaccccttcccgttttcaagtcccggtaccgacttgtcgtcctttattctcgggtaaacataattcgtctttcgagtttccaaaccctcgggtaaaggaccacggtaccttttatccggcccacttggtccagtcatgcccaacttgtgttaaacagggaatttagacatgaagccggagggtttatgttaagggcgtgttgcctt

SEQ ID NO: 15435 - DNA, 358 bp, Homo sapiens
aggtacttttgataataactcactctgtgcgatattcctgaataagtccatctcaaaagtttgggattttcctcctcttaactttcttaatatttggacatgcagttgtcgccaaacttgggtattcatggaatttctagtaaatgaaatacctatactttgatactgaagactgccaaatacataggaattttctttcttaaaaaacagtaatgaagactatatctcctttcccagcactgaatgttttactagcactgggtgctcaccatgcaactgaagaaaatgtggaaactcaaaaggtcaggacagacttccaagcacttgcaactgatgttactgtcttcaattttaatac

SEQ ID NO: 15436 - DNA, 361 bp, Homo sapiens; identical to SEQ ID NO: 6284

SEQ ID NO: 15437 - DNA, 359 bp, Homo sapiens
tgcccttcgagcgcttctgaaccactaagggctatgggaaatctcgcgcggtggcggccgggactatgcacttcccatgctcctagggttatgaatagcttcaaacatgattggcagacataacaacttcaaatactcggactggggcataggactccagagtaggaaaaagacaaaagatttggcagcctgacacaggcaacctacccctctctctccagcctctttatgaaactgtttgtttgccagtcctgccctaaggcagaagatgaattgaagatgctgtgcatgtttcctaagtccttgagcaatcatgggggtgacaattgccacaagggatatgaggccagtgccaccag

SEQ ID NO: 15438 - DNA, 74 bp, Homo sapiens
ccgggcaggtacttgtcttaaaagagaatccatatcccattgctgaagtggagcagttggaccgacttgaggag

SEQ ID NO: 15439 - DNA, 134 bp, Homo sapiens
ccgggcaggtacatttacctacgttaatgaaagttgacacactgttctgagagttttcacagcatatggaccctgtttttcctatttaattttcttatcaaccctttaattaggcaaagatattattagtacct

SEQ ID NO: 15440 - DNA, 183 bp, Homo sapiens
atttgcagagcctcaggggcctgagctaatggagttgctgccattttgaccattgccaaccatgataccagagggaaatgaaatgtgggtccaggggcactgttcaatccactgtagcatgggaagccctgataaaaagagacacaggacaaaattaaagttgtgaaaattatatacgtacct

SEQ ID NO: 15441 - DNA, 360 bp, Homo sapiens
aggtacttactaccaaataaagattttacctatagattgaaactaaattgtaaatgtcccaaatacttttcccgatgaaattcaaacaaaattagacttttatacacacaaagcaaaacaaaacacaacctatatataatttcaagattaagaaaaacaaaacaaataaaagcattctctcaagaccttgcttcagttgtgtaaaataattaaatgtgctattccaagttgattttagtttttaaatacagaatttgataaaagataagtaaaagaaggccttgggttcagggtggcagatatttagtgcaccctttatctagttcaggaaacacttgaaagatttatcaagtttcctta

SEQ ID NO: 15442 - DNA, 187 bp, Homo sapiens; identical to SEQ ID NO: 15374

SEQ ID NO: 15443 - DNA, 400 bp, Homo sapiens
aggtacacttttcatactaagaactagatcaatgtctttaattccttaaatgtcattagctcaagtttgaacagaaacatattacattactttttttttaaccaaaaggcttcattcatttaataaaacaagaacttacattttatttccttgaacggacagagaaatacctttcatttatcaagtgtgtaaataatgcccatgtgacagaaacatgcataataatctcataagagaatatccagagataaaagacaagttgaaactcagggacattttacccaagcaattaatttccagatggagttgccttgatcagtcatgtaaccactgggtaagagttctaaactatcagaaagagttctaaactatcagaatcaaaacagacaatacaatagaa

SEQ ID NO: 15444 - DNA, 410 bp, Homo sapiens
aggtacatccaaaatcatttcagcgtataaccacattctcctagactttgtctctcttctactccaagaagcccagttaccctttctcctctcttttatccccaaggatacagaacatcaaccacatcagccatcttgtgccctgcgtgctgagaggagcttttcttccatgaagatcccttgatgcagagccctgtaaagactgcatcatcccagctactttcctgctgacttccacttgggtttactcaatgggtgacactcacaggacataagagattagaaagagggataaggtttttttatatatctgctccctccctacttaaagccatggttttagcagaggcccaaggtcgtggcttttttgagcagcccctttatcaaaggtctggaaagagtctaccttc

SEQ ID NO: 15445 - DNA, 366 bp, Homo sapiens
aggtacactctagcattgtaactttttccccctgagaagtaattttaagatctatcagtctcaatttaaatgatctgttaatcagccagagttttagtttcataatatcgttccattgcctgacaaagatatacacactgaagtgcctttagcagacctgggaccgtcaagaatcttgttaccctgattattgcaagatgacatatttcttaagccatttataatctcatattcgggttgaatctgaatttacaaataaaagggttaaattgaggcagtttcaagcagcatttaggaaaatgaagtggcttcaaattttagtgtttctggttacattattttgtttgaattatacaattacataat

SEQ ID NO: 15446 - DNA, 403 bp, Homo sapiens
aggtactagtgtgatctcacttatgctgtggttgcaattttcatttagatgttagtaacctctaaatttgtgtttccagctcagacccccttcaaaacttcagacttctacagccagctgcctaataaatattttgctttgaagatctcataggcatcttaattttaaaatatataaattctaatttggttattggttctggaatttgattctctatccatatttctccaatctgtaattagtatcaacagaaacttgagaatttccccagacttatcttattaatcattaaattatttcattactttctatattcctgtggttactaagtctattaactattgcatcagaaatattcaaatgtagcccctaatttgtaatcttaacttgccttatggtagag

SEQ ID NO: 15447 - DNA, 152 bp, Homo sapiens
tcttcatatgcttcacggcttgtaggatattcttcaggtttcgggtggtagggtccggttcggcttcccaaggctgggggcttgttggtggccaccgaaactccccccccgttttcaggcccccggaacccggcctggcggcccttttattg

SEQ ID NO: 15448 - DNA, 446 bp, Homo sapiens
aggtacagaaaatatgtatccttcaaaaattttgggatccttccctctgggaaatgggtaacctgagtccattccccactaaacaggaccataaacggcagcatgagtcagataccaccaccaatatttattacccaaagcaatctgaaagaatcgggcacaaggtcatggctattcccaggtttacaacgaaaatcatgaaccttcttcaaacatcaccctaccactccataagccataagtaaaggaaattaaagggctaatagctccaagtctatgatcatgagctacttataatacctcaattccttgatggaataagaccttcaaaagtcaacaaaggttgggcaatgaaagacaaattttagggtctaaaatacttaacccagaaaaaaaaaacccaaccaattaaaaaaaagaaccaaggtttcataagaaaatcaata

SEQ ID NO: 15449 - DNA, 467 bp, Homo sapiens
caggtactagctcctgtcctgctgtctcaggacctttcagttcaagcatcctcctaacctgagtctctgtgtctcttacctcaaattctctctctcaaaaaaaaaaaggtgggggggattggctgggccagaatttggcccaaagccaccactggtctgtggtgaccaggagcaataccatatgatttcccaggccccaccctttcagcaagaggctggaatttggggggagggtcgtgatgtttcctactaactggccattagctggatcatcatttccaaaggaatctaatacaataatgtccccaaaaagcagtgaaggatacacagaccacaaaatagatccacaacatgggacagagtgtcattggcctcccaacagttttccaagaaccccttggatgctgcagagcatgggtctctggggactggaggagctgagggccactcccaggttggctcaatct

SEQ ID NO: 15450 - DNA, 459 bp, Homo sapiens
cgtggtcgcggccgaggtaccattcttatctcagaatgctgtattccatcagtagaagcagtttagatttggactgcatgataaaatgaaaagtaataaccctccaaccacaacctagtcagggtattaataattatatgtagcaagaaaacaaagaagaaaataatattgaaaaaatggagattccccaaccagtttcatatttgaaggatctgagttgtatttttattaaggaaatttttttctgaatactgtcttctaaaatgttaacattaaaatctgaatcagaggactctgaatggaaaagaagtttgatcactgacacctagggctctgaagcatgtgtggccacatggaaaagtcgaaggatgcgctgtcgaatctcctttgtcttcactccatagacaattgggttgagcacaggaggaaccagcagatagatattggccaagatgacgg

SEQ ID NO: 15451 - DNA, 249 bp, Homo sapiens
  misc_feature 15, 37: n = A,T,C or G
gaaaaagtgtggaanctcctatggacaacccggagcncctccttgggaaaaggccggcgcgcagccgctggccgttggtgaccagcgagtcgtcgcccagccttgcgatgcggcccgagaccgcccagcgccacaggtcggcattcggcagcccggtgagctcgctctggacgaagggctggcggcggtccaactggatgccggtcaccgggcgccagcccaggccgggcacgcggttgtggatgtagt

SEQ ID NO: 15452 - DNA, 237 bp, Homo sapiens
cggttaatacccggttattcccacagtaactcatgggggataaactgcagggaatagaaccattgttgagtcaaaaagggccatgcaaaaaaggcccagggaacccgttaaaaaaagggcccgcgtttggcttgggcgttttttttcccattagggctccccgccccccccttgacgaagccattcaacaaaaaaattcgaccgcttcaaggttcagaggttgggcgaaaaccccgg

SEQ ID NO: 15453 - DNA, 363 bp, Homo sapiens
  misc_feature 363: n = A,T,C or G
ccgggcaggtacttcagaaggatggaagctgaattcagaagggaggaatgagaaggaaaagttgctaagaaatcgataaacacatagataaatctaaattaagcatagccattaaaaatcagtaacaacaatgatatgaggatgattaactgagatgactgaaagcaaggtgaagctaaaatataaaaaagtatgtaggatgagctggagggtgcatttacttgcatttctagcattggataggaggagattagagatgctgattggcattaaactcgagttaacactgcagacaaccagggatagtcgtatgtaacttctgagccagtagaacagaagtaacactgaagaaagttcagtgcn

SEQ ID NO: 15454 - DNA, 203 bp, Homo sapiens
gggcgtgttcgacgctactctgaatatccggcgaattgtagctgccagcggcggcggccgaggtactaatattatctttgcctaattaaagggttgatatgaaaattaaataggaaaaacagggtccatatgctgtgaaaactctcagaacagtgtgtcaactttcattaacgtaggtaaatgtacgcggggctttctggtct

SEQ ID NO: 15455 - DNA, 443 bp, Homo sapiens
ccgggcaggtaccaaagtttgttaaaacacccagagagaagacgatgcttgagtaaatgtcttgctttcttgaaccctcaatcaacacatttaagccatttggtatatggagaactgccatagtgccagacaattgaataattctgctggattctgttggaacactgtcttgtcttcaagagaagactgaagatttctgaagtcatgaatcacctttattgcttgtcctctcgaaaattatacattcttcccctctgacttaaccaaatagaatgttgtcacgtgacttttttcctacatttcacaaataaatgttgcaaatcacagacagttctctagaaagtgaaagacatgtattttgcaataatacagtgatttttgtctctattattcaggatgattgatgtagatgtaatcagtctgtctcttagatattggtaaaa

SEQ ID NO: 15456 - DNA, 351 bp, Homo sapiens
ccgggcaggtacactctgggtctccaggcagcagccgtcgccgcatccccggcagcggctccaggcaaagtgacaggaaaagacgatttctctctgattcacaatcctgaaaatgtgatctcccttaaaaagaggacagtgctgatgtgagtctgacgaagtggacatcacctgcagtcagtccagagctgcccagtcttgaatataatcatggccaaaccttatgaatttaactggcagaaggaagttccctcctttttgcaagaaggaacagtttttgacagatacgaggaggaatcctttgtgtttgaacccaactgcctcttcaaagtggatgagtttggcttcttt

SEQ ID NO: 15457 - DNA, 90 bp, Homo sapiens
cagcagcccatcactgtgtctttcacccctagggctcacagtgacattttctggccccatcagggtgtgctgcacacctgtgtggagtct

SEQ ID NO: 15458 - DNA, 338 bp, Homo sapiens
aggtactctacggtgtcaataattatttcagtctctgctgcaattagtgctaattacaatacctgagctataaaaataaaagatttcattatagcaaagttcacaaatatcgttttagttcagttatccacattgttcatctaaaataatacattttctttacatataactgtcttagacttgtaattgaggatatttgatgaaacagatctgtatctgaaacagcactatgatgctaaacatttgcataaggaatgaaaaaagttagcaacctagttttttcaatattcagatatttgagattacacagaaaactacatccagatgaatgactgaat

SEQ ID NO: 15459 - DNA, 401 bp, Homo sapiens
aggtactttagtgtattgttcccttgctccacccttctatccccttatctaaatggagttactgttgcttcgtgtttttttaacccttccaattccagtccttgctttcctgagtttaaaatttatcctgggaaagaaatatattaaaataattgtggcaaacaattatactttgcttttaagaatgaattttttttgtaatatattaattctgatatcctttaagttaagtaaatgcacagccagtttatacatcttcattgctcattttgttgttttaagatacattgtaaagaatattttatttcctaaaaattttatttcctgcatatcttctctaagattctctggctagcaaacattgttatatatgcatagtttacaccttattagaagtaaaa

SEQ ID NO: 15460 - DNA, 347 bp, Homo sapiens
cagtgaccgctaatagtatcggcgaatgggagttcctccgcggtggcggccgaggtacatagaatatgaacacagcacacacatgagagacgcaagtgccaaatgtcttggcctgggcttcacgtgtcaagcccaacacagtcttaagaataagcagatatgagaaggagatgagaagtgagtccaggctcaatgggcggagatgatgacgataaggccatagacgacattgacccggatatcatcacaggccagcttcatgacatcttggtgtaggcagtaggaatgggaaaggatattggagcggcagaagggcagctgcttgatgaagacaggaaggggtgcca

SEQ ID NO: 15461 - DNA, 282 bp, Homo sapiens
aggtacacttttcatactaagaactagatcaatgtctttaattccttaaatgtcattagctcaagtttgaacagaaacatattacattactttttttttaaccaaaaggcttcattcatttaataaaacaagaacttacattttatttccttgaacggacagagaaatacctttcatttatcaagtgtgtaaataatgcccatgtgacagatacatagctagtggatcccatggacagtatgacatagatataagagcttattgaaactcgcggaccattat

SEQ ID NO: 15462 - DNA, 263 bp, Homo sapiens
aggtacaattttatcattcagctctatgaatctgcttaactatttcccaattagaggaagttgcagacacaggttacggcatagggcaaaaaggttgctgcctaattgaaaaaagatgctgtccagggacctataaatagctctttaaaaacctccacctttgctatcattttcattcaatttatgacttttaaaactgcagttccaaaactgggtgccagagtgccttggggcactaccatgaattccccgcgtcctgcccg

SEQ ID NO: 15463 - DNA, 417 bp, Homo sapiens
ccgggccggtaccattcttatctgataatgctgtaaaccatcagtagaagcagtttagatatggactgcatggtaaaatgaaaagtaataaccctccaaccacaacctagtcagggtattaataattatatgtagcaagaaaacaaagaagaaaatattattgaaaaaaatggagattgcgcaaccagtttcatatttgaaggatctgagttggatgtttattaacgaaattgtttttctgaatactgtctttcaaaatgtgaacattaaaatctgaatcagaggactctgaatggaaaagaagtttgatcactgacacctagggctctgaagcgtgtgtggccacatggaaaagtcgaaggatgcgctgccgaatgtcctttgtcttcactccatagacaattgggttgagcacag

SEQ ID NO: 15464 - DNA, 133 bp, Homo sapiens
aggtacttggcagcttcgggcctctgcatgtgctttttcctttaggtctcactttggagactgccctccaccccaaccccactgcattatgaggggccactttttttcacagttctggtgaccctgtagtttc

SEQ ID NO: 15465 - DNA, 364 bp, Homo sapiens
aggtacatagaatatgaacacagcacacacatgagagacgcaagtgccaaatgccttggcctgggcttcacgtgtcaagcccaacacagtcttaagaataagcagatatgagaaggagatgagaagtgagtccaggccaatggcggagatgatgacgatatggccatagacgacattgacccggatatcatcacaggccagcttcatgacatcttggtgtaggcagtaggaatgggaaaggatattggagcggcagaagggcagctgcttgatgaagacaggaaggggtgccatcagtgcagccccccgcaccacagcagccacaccaattttggtgacacgaggcaacgtaagtacctgcccg

SEQ ID NO: 15466 - DNA, 149 bp, Homo sapiens
aggtactaaagtcaaaagaggaaagccatgaacagtcagcagaacagggcaagagttctagccaagagctgggattgaaggatcaagaggacagtgatggtcacttaagtgtgaatttggagtatgccccaactgaaagtacctgcccg

SEQ ID NO: 15467 - DNA, 174 bp, Homo sapiens
  misc_feature 156, 157: n = A,T,C or G
tcacgtcggtcgcatcgtaaactggacagtttcgaaatgttggtctgtgtattgtagatgcagtctaccttcaatcagttactccgcatatattttcgttgagtgtattaactgttaattagaatgtaactagcacctttcttcctcaaataagcnntaggtgtcgccgtatat

SEQ ID NO: 15468 - DNA, 306 bp, Homo sapiens
acactgtgagtccaaaagggccagccaaaaagggccagggaaacccgtaaaaaaggctcgccgtatgactgagcgctttattaccataaggccttccgcaccacccatggaccgagtcaatacacaaaaaaattcggacggcctttaaagatcaagaaggatgggccgaaaaacccgaacaggggacttattaaaagaaatacccagggccggttatccccccctgggaaagactcacctacgatggcagcctcatccctgtatacccgaacccctgcccgctttaacccgggaataaccctggtc

SEQ ID NO: 15469 - DNA, 448 bp, Homo sapiens
caggtactagctcctgtcctgctgtctcaggacctttcagttcaagcatcctcctaacctgagtctctgtgtctcttacctcaaattctctctctcaaaaaaaaaaaggtgggggggattggctgggccagaatttggcccaaagccaccactggtctgtggtgaccaggagcaataccatatgatttcccaggccccaccctttcagcaagaggctggaatttggggggagggtcgtgatgtttcctactaactggccattagctggatcatcatttccaaaggaatctaatacaataatgtccacaaaaagcagtgaaggatacagagaccacaaaatagatccacaacatgggacagagtgtcattggcctcccaacagtttcacaggaaccccttggatgctgcagagcatgggtctctggggactggaggagcctgaggccct

SEQ ID NO: 15470 - DNA, 478 bp, Homo sapiens
  misc_feature 478: n = A,T,C or G
gaagttgagacactacgaatacggcgaataggttctcagccaaagtcgcggccgcccgggcaggtacgcgggcaagagatcatttgccaaactgtattctctagctttcttgcaagatgaaaggagactaccattaatgagccactagactatttagcaaatgcttctgatttccccgattatgcagctgcttttggaaattgcactgatgaaaacatcccactcaagatgcactacctccctgttatttatggcattatcttcctcgtgggatttccaggcaatgcagtagtgatatccacttacattttcaaaatgagaccttggaagagcagcaccatcattatgctgaacctggcctgcacagatctgctgtatctgaccagcctccccttcctgattcactactatgccagtggcgaaaactggatctttggagatttcatgtgtaagtttatccgcttcagcttccatttcn

SEQ ID NO: 15471 - DNA, 124 bp, Homo sapiens
  misc_feature 98, 107, 111: n = A,T,C or G
ccgaactaattttttttcactaaattgttgattaaatacgtatataaaatattcattcgaaaaattttactcatatattttgttaatagatcttctcnttttttttntgancattagtccgaga

SEQ ID NO: 15472 - DNA, 376 bp, Homo sapiens
ggagctccccgcggtggcggccgaggtacttgagttttcctgagccaccttttctaaattagtgtcatttgtaatatcaataacacattttggtgtgggtggtctggatacaaacttctcctttggtagcaattccatggtatgtgttttatccatattgcattcctgaggaagtaaatcattagaattatgatcagaaactgtggactgttctgacgaatgaataatcatatcttcttgaagctgaatgtcaacagacttccgcttctctgcttcttcatgttttttatcttcctgtatttgatcccagggaggctggctattttttaaggtctcttctcctgccttctcattattatggaggttttccttctta

SEQ ID NO: 15473 - DNA, 472 bp, Homo sapiens
  misc_feature 472: n = A,T,C or G
aggtactccgttgctgggtttggacaatgatcatgggattagtcccaagtttgtagcttggaacggtagcatttttgcctgcgtgatccttgtcagctattcacagaaggaaatcttccgaaactccgtctttcatttcagccggtgaggctgttatccttctctgtcaattagcattcatgtggttttcgctctttccacctttgtcacttcttgtttaaattaaaaattacccccactttgggtttattggccttggccttttttttttaaatttcgggggttattaatgtggcccccttaaggggggggaatccctccttccccccaagagaaaaaaaaagcttttttttttttttttttataacaaaaaacgccccgccgccccgcccccctatttataatttttatattttcccccccccgggggggggggggggggggcccccccttctcattttttttgtggggn

SEQ ID NO: 15474 - DNA, 410 bp, Homo sapiens
aggtacataaaggtcaccgaggacagttctggtggaatgatgagggcagaagtttcattggcatgggttcgagagagaaatgaaagaggattgaagacagtgagtatagacagctcaggaagtttagctgtgtaagtgaacacaagatgagtggtcactagaaggagaggtgagccaagagggaatgatgggagaagttataatatgttgatggtcaagatagaatgactgattaaaggggaattgctggggctctgttcctgagtaggcaagagcaggtgagatagaagacataggtggagggattggccctaaatacatgcgtggacagatcctccttatgaaaaaaagaaggcaaagtgtatgaactcacacagtagtaggagagtatatagggtggtacctgcccg

SEQ ID NO: 15475 - DNA, 17 bp, Homo sapiens
tgtttgtacgatactaa

SEQ ID NO: 15476 - DNA, 251 bp, Homo sapiens
ggccccgggtacaccaagctttttggtttcccttttaattgaggggtttaatttgccgccgccttgggcgtaaatacatgggtcaatagcctggttttccttgtgttgaaaaattggttaattccgctcaacaaatttccaccacaaacaataaccgaggcccggggagccaataaaaggtggtaaaaggcactggggggtggccctaaatagagttggagcctaaactccacatttaatttgccgtttgg

SEQ ID NO: 15477 - DNA, 19 bp, Homo sapiens
acgtcctgggtcatcgatg

SEQ ID NO: 15478 - DNA, 399 bp, Homo sapiens
aggtacttcttggatcttacataggcctgaaagtttagttgcactactttaggaatctctttttatgcatttgttcaattaaaaggcaacaaagacaaatccttaagaaaataccagtatttttcctacatataaaatcaagggtccttgtctgacgatggattttactagttacgagaatcttcctatatttctagttgaatccctgtcatttcctgtaatagacttatattttaccagcagcccttatgcgatttctttgtgaaaaatatttctctgtatagaggaaagtttatcatttggaatgttaaatgcaattatattgacatatggtgataatgggacaaagcatacgggttaaaggttgcaggaaccatggcttggcaattagcgatgtaa

SEQ ID NO: 15479 - DNA, 406 bp, Homo sapiens
aggtacagacaataagagagagaacctcaatgaggtagtatcggccttaacagcacaacaaatgcgttttgaacctgataacaaaaacactcaacgtaaagacccctattatggagcagactggggaatagggtggtggacagctgtagtgataatgttgatagtaggtataataacaccagtgttttatttgttgtattatgaaattttagctaaggtggatgttagtcatcattcaacagtggactcttcacatttacattcaaaaatcacacccccatcacagcagagagaaatggaaaatggaattgtgccaactaaaggaatacatttcagccaacaagatgatcataaactgtatagtcaagattctcagtcacctgctgctcaacaggaaacatagcaa

SEQ ID NO: 15480 - DNA, 391 bp, Homo sapiens
aggtacgtaactgtaagaggactgaaagttccagactgtataaagccatcttaccgctctatgatggctcttcaggaggaaaaaggtaaaccagtgcattgtgaacgtcaccatgagtcaagctcagtagacacagaacctggattagaagagtcaaaggaagtaataaagtggaaacgactccctgggcaggcttgccgtatcccaaacaaacacctcttctcactaaatgcaggagaacgaggatgtttttgtcttgatttctcccacaatggaagaatattagcagcagcttgtgccagccgggatggatatccaattattttatatgaaattccttctggacgtttcatgagagaattgtgtggccacctcaatatcatttatgatc

SEQ ID NO: 15481 - DNA, 409 bp, Homo sapiens
cgagcggccgcccgggcaggtacataaaaacaatcacatacaattaatgctggattgttcccacaattttttgatcaagtaattatgaattaaaactctcagttttctaaaaacaatcacaaagacaattctgttaagatgaagacattataattgaaaaacaatctataattgtatgtgtagatatatttgttgaatttatgaccttcatagtctaaaatttaggaaagtaatgtttttgaattgatcagcacagctaattaactaaattcacatacttaaaatttgaaattctagcaaagatgtatataaaaaacaattagacaatgtccagctgaattttagaattatccaaagtattgctaagaatttgtagatgggccctcatcccgcgtacctcggccgctct

SEQ ID NO: 15482 - DNA, 396 bp, Homo sapiens
ccgggcaggtaccaaatcttcagaatcttgacttaagaaagtcagaattggaaacagagctgttacaatggcaatgacgagctgctcagctcctgaaacaaattttctttgtcctacagcaacggatctgcaaattaattttctttctttgctggaatctgttaccttgcatccactcatgggcagtcacctagaggcttccccaccaccggcccagacacatctccttcattcttatgttgttttagaaatgtgcacggatgctttctttttaataaaaaaaaatataaacttagtctataacagatatgcacttgtaatgaaagttttattaaatggaaatataagtgagagaaaaaaaaaaaaaaaaaaaaaaggagtacctcggccgcgacc

SEQ ID NO: 15483 - DNA, 419 bp, Homo sapiens
ggtacccccaagattattcaatcattgcttatgactgtggcaaacaattttgttaccgacaagaactctggagaagtcatgacagtcggaatcaatgctataaaggagataacagctagatgggcctttggcccttgaatggaagaaactttctccaagaccttggctcagttataaaaccaccacaatgaataaggaatgtaagtgaatggtcttgctagaaaccttttgatttcaaccttctttcccgaaccacctgaaattccttcagaatgcctgccataaagaaagatttcccgggggttaagcccttaccagaaaggcccctcccattagaaaagccaagaaatttcccctgccccccggagcggggcccggtttcttaaaaacctttggttgggaatttccccccccgtgag

SEQ ID NO: 15484 - DNA, 245 bp, Homo sapiens
ccgggcaggtactcttttcaaggctttacttccaatcttccccttaagtgctagtgtccagaggaaaaattatttcttctctgtagaagtcattttgaagacagtatttttctgagatccaatgtggttgggagttctgaagaggaagttatagttttaagctagattatctcattttattatattctgtgtttattttcctttgccgtgcttaggcctttggcaaatgttctctagatgtacct

SEQ ID NO: 15485 - DNA, 371 bp, Homo sapiens
agagtcgacacgaatactatctgactatatggcgacatcgcagctgtggcggccgcccgggcaggtacactgcatgtgaaatgtggaaactctacagcatacacaccacagcttctttccagacaatcataactgactttgcacacacacaagcttcatagcatctcaactttgggccttgcaaaatatacatcttgacttttgggttgctgtgataaagcatcatatcaaatctgtaagtggggtctgtgcttaaatagaaccttataacaaaagctgaagattataaaacacaataaaaagagaaaactactcattacatatactgaaaggagatcaaaccatggagagtaatcataccttcagtacct

SEQ ID NO: 15486 - DNA, 375 bp, Homo sapiens
atggtgaagcgcagcgtgtcgtccttgtcggtcgtggcctcgtacatcgcctgggcgatgcgcagggccgcggcaaaggcatccttgcgggcggcgcgcggcgtggtgccggcatgcgcctcctcgcccacgatctcgacgatatagcggcggctgccctgaatggcggtgacgacaccgatcgtcttccgctcgttttccaatcgcggaccctgctcgatatgggcctcgacatagccgtcgagcgggaaaccgggcttgccgtcgcgcatcggcgccggagcgaccttcaaggtctcggccagggcgtccttcagcgcgacgcccttccagtccttcacgaggagcatctcttcgagcttggtgtgcccggca

SEQ ID NO: 15487 - DNA, 275 bp, Homo sapiens; identical to SEQ ID NO: 6318

SEQ ID NO: 15488 - DNA, 324 bp, Homo sapiens
aggtacttacgttgcctcgtgtcaccaaaattggtgtggctgctgtggtgcggggggctgcactgatggcaccccttcctgtcttcatcaagcagctgcccttctgccgctccaatatcctttcccattcctactgcctacaccaagatgtcatgaagctggcctgtgatgatatccgggtcaatgtcgtctatggccttatcgtcatcatctccgccattggcctggactcacttctcatctccttctcatatctgcttattcttaagactgtgttgggcttgacacgtgcagcccaggccaaggcatttggcacttgcgtct

SEQ ID NO: 15489 - DNA, 841 bp, Homo sapiens
ccgggcaggtaccgatgaatcggaatttgtctaatgaggagttaacaaaatcaaagccatctgctccacccaatgaaaaaggaaccagcgatttacttgcttgggaccccctatttggaccatctcttgattcatcttcttcatcttcactaacttcatcatcatcagccaggcccacaactcctctttctgtaggcaccattgtcccacctacgaggcctgcttccagaccaaagcttacttcaggcaaactcagtgggattaatgaaatacccaggccattcagcccacctgtaacttccaacaccagcccaccttctgctgcaccattagcccgggcagaaagttcttcttctatctcatcatctgcttcattgagtgctgccaatactccaacagtaggtgtgtcacggggtcccagccctgtcaaccttggaaatcaggataccttacctgtggcaagtgcccttacagaatctgttaatgcctactttaaaggagcagatcccaccaagtgtattgggaaaaacactggtgatatgacaatgtcatttccaagtggaattattaaagtctttaccagcaatccaactccagctgtgttgtgcttcaaggtgaaaaatatcagccgacttgagcagattctttcaaatgcacagcttgtgttcagtgatccattacaatgggattccaacacaaaagaattttgatgaacatgccagctgttacagtctaacttcagaaactgtcaaagcaaaaatcaactgcttttaatataatgtggatgtttaaaagttcaggtttctcaaatggtttcaggtcactcctttgaatctgcaat

SEQ ID NO: 15490 - DNA, 255 bp, Homo sapiens
ccgggcaggtaccagtcaatgtgatgagttgagaaagtgaaataagattacaaatatgggaataaaattatcaacctacccagaactattacccaactgaaaaaggcgaaagaaattaacaacagcaaaacctttagaataattcagtaactggctagttacaaaatcaataaccaatcgccaagttaaactattatacaactacacactactctcttatgcagaggtaagaatgaggtagattgatgtgtacct

SEQ ID NO: 15491 - DNA, 84 bp, Homo sapiens
gcttgccgatcgtgctgatcaggttgccgaagaagccgccttgcggggtcaactggccttgttgctgttgcatctgctgcatct

SEQ ID NO: 15492 - DNA, 424 bp, Homo sapiens
tgccggctttcttctatagttgtaagatggctgcctcataagataatatctcaagacagaaaggaagggtcattccctttcatgcattgctcttttgatttgcaaaaacatccctgagaagctccccagccagcatactctcgtgctccattgtctagaactggcttacttgcccaccagcaaaccagtcactggaaaatgggaatgggattgccatgatgggtttagaccaatagtggttcagctcttgggctggacctgccttttccgagcactttgctgcctgcctgatacctgagtaaaatcagggctctctcaggaagaaagatgggggaaatggctcttggtcaaataaccagttcttttatctttataataaccagtttttttagatgaattaaccgagttccagaataactgggtg

SEQ ID NO: 15493 - DNA, 284 bp, Homo sapiens
aggtacaccttatcatcctcataatcaataaatacacctttatccattgtccagatttcccaaacaacacctttaatggttggtgaaaaatctggaatctcataggtagcgtcattgactggacagtaaacaaatccatcacttttttcatcaatgaaaactaatctggtcccatttgggtcgggaaaaatctttttcacactgacaggatgtcgataatcattaacgaattgccagtcttcaatgtagaaatactgaacgacaccagtatctgtacctgcccg

SEQ ID NO: 15494 - DNA, 89 bp, Homo sapiens
tccggccctggcgatgcgccaggcggcctgacgccgacgattcgtgtcttcgtttgacgccgggctggtcccggcgtttttttatggcg

SEQ ID NO: 15495 - DNA, 98 bp, Homo sapiens
aggtacatccaatacccgaaagcacaagattagaagtctccaatgattcttgtttagcttcttccccagttacctcattattgtaagaacagatgaaa

SEQ ID NO: 15496 - DNA, 413 bp, Homo sapiens
  misc_feature 413: n = A,T,C or G
aggtacatcaccctgctgagggacatccaggacaaggtcaccacactctacaaaggcagtcaactacatgacacattccgcttctgcctggtcaccaacttgacgatggactccgtgttggtcactgtcaaggcattgttctcctccaatttggaccccagcctggtggagcaagtctttctagataagaccctgaatgcctcattccattggctgggctccatctaccaattggtggacatccatgtgacagaaatggagtcatcagtttatcaaccaacaagcagcttcagcacccagcacttctacctgaatttcaccatcaccaacctaccatattcccaggacaaagcccagccaggccccaccaattaccagaggaaccaaaggaatattgaggatgccttcacccn

SEQ ID NO: 15497 - DNA, 353 bp, Homo sapiens
ccgggcaggtacttatgtatttcacgccctttaatttcaaaggccccaaccctacaaggtatagatcaactttgcctattttttagtgtggaaactgaggtttagagaggcctataaaatttgtctacagttccatagccataagcgtctgattgataaagcaaacccaagttctttgtagaagagctgttatactgcctttagtgtgtaactacttcatgaactcagagtccattatgattgtgtaaggtatgacagtttggcatttctaccaagaaatgaaggcttgaatggggcagaatgacagcacttggtggttaggaagagaagaaagttttggataatgggataat

SEQ ID NO: 15498 - DNA, 347 bp, Homo sapiens; identical to SEQ ID NO: 6329

SEQ ID NO: 15499 - DNA, 38 bp, Homo sapiens
aaaggagaacgtcacaaggcatggtaaggttgaactgc

SEQ ID NO: 15500 - DNA, 392 bp, Homo sapiens
aggtactttttttttttttttttttttttttttgggcccatcattctcttactcaattctcttgccttctttcctaaggggaggttttaccaaggacaacatatttcccacacactctacttattcccaatgacagggcagttgcccctggatgaggctccctgaaggctttattaaaagcttgggaatttctgatctgaacaattacaacctgatggtgttttacgaccagaagagaggataaaccatagtccattccatgatatttcaatcttgcatctctcctctagctgttcttatgctccttcttgataacaggatggcatttcaattccatcttcggccataaaggctctgagcgcgcctttgccaatggcagttcacctgaggga

SEQ ID NO: 15501 - DNA, 224 bp, Homo sapiens
tcggctcccagctactcacagagaacgtttctgtttctgacagcagagtaagagaagaggtgagaagagagacagcccattctcttttggcctaattcctaaggaatcatgcctctgccttcgggccattctcaagtcttgttcaaggataaaatgatttattgatggccgtaattaaaaagcaatgccaacggaagcagcgtcagcatttttcatttgtacct

SEQ ID NO: 15502 - DNA, 365 bp, Homo sapiens
ccgggcaggtacatagaatatgaacacagcacacacatgagagacgcaagtgccaaatgccttggcctgggcttcacgtgtcaagcccaacacagtcttaagaataagcagatatgagaaggagatgagaagtgagtccaggccaatggcggagatgatgacgataaggccatagacgacattgacccggatatcatcacaggccagcttcatgacatcttggtgtaggcagtaggaatgggaaaggatattggagcggcagaagggcagctgcttgatgaagacaggaaggggtgccatcagtgcagccccccgcaccacagcagccacaccaattttggtgacacgaggcaacgtaagtacct

SEQ ID NO: 15503 - DNA, 322 bp, Homo sapiens
aggtactcagaacgtctttccccagctctgagattttcttaaaaatcctttgaggttgctccttgcatgtctatggtttcatttctttctacatccagtccactttaattcttcatgaatttatcctgatgtgtgagataagaatcccactttcatttttttttaaggccgacagaattatctctaaaactagaacaaattcattttaaatccacatggggaaaatggcaagctaaagaaaacaggaacattctgggggaaaaaaaggagtaaagggacccatccagatgtcgaggactcggcccacccgcgtacctgcccg

SEQ ID NO: 15504 - DNA, 679 bp, Homo sapiens
aggtacatgcccacgccagccacaccgaccaactggagggcagccgagcaggcacggacacagctgtccagaccagggccaaccaacctgcaaacctgccacgtgaaaggagtgtcaggagaggagaaaggcacagctcccctgcagctgcacccctctgggtgcagttacggggctggctgatgagacagacaatgggtgtggcatgtgggtagtaaactgtctcatggtgtaaaaatgcttgtcacatttcatgtgaacagaatcaactaaaaagttctgccacaaatgtcataggaagaatgacaaaaaagaggttcagtgatccgcgtgcctataatcccgaggcatctacgtcactgagataagaaagggcagccggcatatcttccctcccacccctcatgtatctcttcccatcttgatttaaaacaaaaccagtgttagaggagactggagttttcagattgttggctttctttttgctgccatttctattcctcaccaagaaaagaataataaagctaatactgaaactttcaatttacaagctcccaaggttgaaaatacatagatatgaacgaagttacctttcagagaataataaccactggccctgcaggataacaggacagtgcttattattttaaattataagtggaatggagaacagcctttt

SEQ ID NO: 15505 - DNA, 877 bp, Homo sapiens
  misc_feature 539: n = A,T,C or G
aggtacctgaggtagctggagacaatatactgtcagggaaacgggaatctgaaacgcgtctgaactggttagatttgaaggcagtaaagtggctgccagcattgaaggatgagacactggcagtccacagtatctggtggtaaagagatacttaaattatcccctgtgcttgtgggaaataaagtgcccatagaaggaaggctgtgtcaggctacatgtctactgtcgagggcaagtatggcaaaaatgagaagcacattgactatggagtatgtctggctgtattcaactgtgttcaaaatcttaaagtcagaaaatgaaacactcaggacttttcattctcagcttatgacgtagtcagtggaccaggtaacatctgtggctttaaggctatcttattcgagcggtcgcccgggcaggacaaccctgaaaaagaggaggctggacacttgtatagacttatgcaaagcttatgctttgaaaaaatatgtggaaattggcacctccatgtagagtcaccacatgaatgtttatcttanaaacttgttacaagcacactggtggtaactggggctttccaattcgtaattatagacaaagacttaataaacattatttgattgggaggcttaaactgtctgttgctgtgcccctacacaagggacaataactggaaacctatgccctggttctctactttgtaatgggtgaaagtggtattaaacctttcaaggattccttatctccttaaaattggcggacggaatgccgttttcctttttacaggccctcatttgaaagggtccccggaactgtttacttttccggtcttttttaaacaatatacaaagtttctaaatggttttcaaaccccctc

SEQ ID NO: 15506 - DNA, 364 bp, Homo sapiens
aggtacttacgttgcctcgtgtcaccaaaattggtgtggctgctgtggtgcggggggctgcactgatggcaccccttcctgtcttcatcaagcagctgcccttctgccgctccaatatcctttcccattcctactgcctacaccaagatgtcatgaagctggcctgtgatgatatccgggtcaatgtcgtctatggccttatcgtcatcatctccgccattggtctggactcacttctcatctccttctcatatctgcttattcttaagactgtgttgggcttgacacgtgaagcccaagccaaggcatttggcacttgcgtctctcatgtgtgtgctgtgttcatattctatgtacctgcccg

SEQ ID NO: 15507 - DNA, 817 bp, Homo sapiens
  misc_feature 497: n = A,T,C or G
ggtacacagaaagggaggtgtcaacaaaagaagataagcccatacagtgcacacctcagaaagccaagccaatgcgggcagctgctgacctggggagggagaagatcctcaggccaccagtagaaaaatggaagagacaggatgacaaagacttaagagaaaaacgttgttttatttgtggaagagaagggcacattaaaaaggaatgcccacagtttaaaggctcttcaggtagcctttccagtaaatatatgactcagggaaaagcctcagcgaagaggacccagcaggaatcatgagggaaggaaaatgcagcactctaaatggccactcaggcgttcctattcactcggaaaattaggttcatttcacaggacacagcagtgtagatcaggcttcaacttaacatttaagggaaatgtcagattttttttttaatttaatgaaattgttaatgaggaaaaatttttaatatagtcttatctaccacacatccncatagatttaaggattttaatagaaagacatgatgtacgtatttaagccacgttaaaagaaaaaatataactatggaccggtattcagtgaatacagtttcatggttttaattctttcaaagcacattaaaaatgggggctgataaaccccaagtaaattaaccccttttccgtataaaatcattttttgttttggaagagggaaaatatatttattggtggttactgaaatccggtgtgaagcatattaaatattgtttaactggtactgctggacctgcccggccggccgttaaagggcgaattcaaccacttggcgt

SEQ ID NO: 15508 - DNA, 364 bp, Homo sapiens; identical to SEQ ID NO: 6339

SEQ ID NO: 15509 - DNA, 873 bp, Homo sapiens
  misc_feature 873: n = A,T,C or G
tagggcgtcattctactgactatttggagcttcgcagctgcaccgcggtggcggcacacgaaccgcaaagacaagatagggctacttaatgcaccacaagcattactgtcttcaaagtctccttcttcaagcagaaactgctggcctttaaaatgttctttttcataggcaacccacactccaccaatgacacgcagctgatccaatcctgtgaaaatatccattatttttcaaaaaattaggaacagaatctatatgttcactaaactctttagcctgtccatggaagtgaggtttttcataaataataacctttaagttcatgggcatttccactttcagtccacccatttgaagtggatgtaatgatttcatttctgctgtagaaatctcaaagagcccatggtcttcctccagaactgtagcttgtcccttaaaattaatatctgggtaggcaagccaaactcctgacttcacagtgaaggacacagatttggagatattcagttcttccaaattggggactgctctctgtatgtaaacaggacaacaggctgggtcagattgtgggaaaagctctatttctggaatgctgcagtcctttaagacacgtttgagagaacccaatataaagtttttttgggatgccttcttgtctgaagaatccagtcacgatttaacaccttttccccttcttctaacacacatttctgaccttcgaaatgtggtttctattataaattcggcagccccctacaatttttattaaactcctttggaaaaaacctgaggttcatcaggattattcagttgacctttggttatatgacctgccgggcggccgttgaggggctaatgaaggactaactcctn

SEQ ID NO: 15510 - DNA, 567 bp, Homo sapiens
ccgggcaggtacacaggccgggcacagtggttcacacctgtaatcccaacactttgggaggctgaggcgggtggatcacaaggtcaggagatcgagaccatcctggccaacatggtgaaactctgtctctactaaaaaatacagaaaattagccagtcatggtggcacgttcctctagtcccagctactcgggaggctgaggcagaagaattacttcaacatgggatgtggaggttgcagtgagccgagatcgcgccactgcactccagcctggtgacagagcgagaccccatctcaaaaaaaaaaaaaagttgtatgtgacagctaaccataataaaaaaaaaagaaagaaaaaagagagagaaagtagggacaacactaaatcattagtaatttgagcacatttcctccaaggcatatgctatttttcaacttggtttcaatcatgtatctttattgtttttcttaatggtataagcatgtttggttttattgtaggctttaaatcatgtaatacttcattagtatgtattattccacataatagtcctttaagtagaagtacct

SEQ ID NO: 15511 - DNA, 13 bp, Homo sapiens
gagcgtaatcact

SEQ ID NO: 15512 - DNA, 166 bp, Homo sapiens
accgtctggatccccaagggagcgcaatggcgcacgctggacttcgaccgcaagcgccagggcgcctatggcgcgctgcagtggaagaaggacaataccctcaagagccacctgacctggttccgctccaaatacgatatgcgctgggacgagaacgcgctgttct

SEQ ID NO: 15513 - DNA, 125 bp, Homo sapiens
agtgtgaggcatttaagggtagtctgccagaacctctctgccttgggcagcccagaaggaccttgaagcacaagttcaccctgggacagaatataaccaagtgatagccactgacccaagtacct

SEQ ID NO: 15514 - DNA, 373 bp, Homo sapiens
ccgggcaggtacatactcccttaactattgccaagatccctatgaggcagcttcaattaatccccacaagtttccctattccagaacccctggcctgctcatgatcacagactctgccgccagaaaagaagacctgtttctcccagcctgggcagcatggcaataccccgtctctacaaaaaaatacaaaaattagccaggtgtggtggcacatgcctgtagtcccagctacttgggagactgaggtgggagaatcacttgagccccaggaggtggaggttgcagtgagtcaagatcgcaccactacactccagcctgggcaacagagtgagaccctatctcaggagggaaaaaaaaaaaaaaaaaagtacct

SEQ ID NO: 15515 - DNA, 389 bp, Homo sapiens
aggtaccattcttatctcagaatgctgtaaaccatcagtagaagcagtttagatttggactgcatggtaaaatgaaaagtaataaccctccaaccacaacctagtcagggtattaataattatatgtagcaagaaaacaaagaagaaaataatattgaaaaaatggagattccccaaccagtttcatatttgaaggatctgagttgtatttttattaaggaaattttttttctgaatactgtcttccaaaatgttaacattaaaatctgaatcagaggactctgaatggaaaagaagtttgatcactgacacctagggctctgaagcgtgtgtggccacatggaaaagtcgaaggatgcgctgtcgaatctcctttgtcttcactccat

SEQ ID NO: 15516 - DNA, 691 bp, Homo sapiens
aggtacccgaaaagaaaggaagctttagtaatgaaaggattgctgccaaaatcctgtttcccccttgcagatcttacagaaaacagccacagaatcccaaggcatcagcaccaagagagcctgtagaaactatctggtctaagctcctgaagcccagagataagaatgacttaacccaagctgcacagcctcttaacagtccactgttaaccccagaaacagatgcatttgaatctgaaaggagacaggaatcctaatcctactgctcagggacttgctgatttactttgctgtctattagcctttctgtgacatgattttctaccaagcaaagtcttttattcaagtctcccagagatttcctatttaagcgtttgctatttggccacttaaaaaagacagaagagaagtaaacagaagcatataccacacaactcagtccagtcagtagttgactctcaagatggcggatgtcactgagatggctgagaaataggaacggatgtggagaaaggagtggcagtggagttagctgttttgtctacctgctggatacctgggaagccagactctgtgtggacagtgatccctagtcataggaaactttgcctgtgctgtcatcaatgtccatggagaactgcttctcaccttgagaagatcctcttcttcgttccttcaagtacctgcccgg

SEQ ID NO: 15517 - DNA, 384 bp, Homo sapiens
ccgggccggtgcctttgtgtctagttataagccttttgatcccaggtcctgccatgaccttcagcatgggggccaggtcttcagcatagcgtcacataggaccagtgcacacaaacaactcctgggctctcacatgcaagggaaactgacctttgttgggaaccacacctggagaaggcttgtgtccaaatataccatcgaagaaagcaggcattcgaatgctaccaccaatatcagagcccacaccaataactgagcaggcatctaccagtgtgcagccctcaccaccagaactcccacctacaatatgctgtaaatcatatgggttgtttgatcggccatagatcttgtgactggattcataccacatacacaactcactac

SEQ ID NO: 15518 - DNA, 158 bp, Homo sapiens
tctctgtcgataactgccgggctgtccaatctttcccctgatagaaaggcgcctgggggtcagcctgaagaagctctggagggaagaggcggctgtttgattcagagcctcctcgctgggctggaattaacctggctctttctctaatgaaactgact

SEQ ID NO: 15519 - DNA, 832 bp, Homo sapiens
aggtaccggaaagacaagatagggctacttaatgcaccacaagcattactgtcttcaaagtctccttcttcaagcagaaactgctggcctttaaaatgttctttttcataggcaacccacactccaccaatgacacgaattgatcaattctgtgaaaatctccattatttttcaaaaaattaggaacagaatctatatgttcactaaactctttagcctgtccatggaagtgaggtttttcataaataataacctttaagttcatgggcatttccactttcagtccacccatttgaagtggatgtaatgatttcatttctgctgtagaaatctcaaagagcccatggtcttcctccaaaactgtagcttgtcccttaaaattaatatctgggtaggcaagccaaactcctgacttcacagtgaaggacacagatttggagatattcagttcttccaaattggggactgctctctgtatgtagacaggacaacaagctgggtcagattgtgggaaaagctctatttctggaatgctgcagtcctttaagacacgtttgagagaacccaatataaagtttctttgtggatgccttctgttctgaagaatccagtcacgatttaacacccttttcccttcttttagcacacatttctgaccttcgaaaagtggtttctcatttaaaatccgggagccccttacaacttttattagaacttcttttggaaaagaccatgatgtagcatcgggattttacagtaaacttttgttattatttccttgccgggcggccggttcaggtgcttatgagtgacctaactcccattaattggg

SEQ ID NO: 15520 - DNA, 552 bp, Homo sapiens
  misc_feature 291, 293, 519: n = A,T,C or G
acaaccagaaccaacaattgtatttctctatagttattttaaaatagtaatcaatgctatgtatttgatgtatatgtttctaaattagaaatttcttttggctttgtgttttttttatgtgcgttaaatatgtaaactgaacctgttcctaaaatgcattaaacttgaatgctgtgtctatccaatgccaaaatgctcagaagaaaagtgaataattcagtcattcatctggatgtagttttctgtgtaatctcaaatatctgaatattgaaaaaactaggttgctaactntnttcattccttatgcgaatgtttagcatcatagtgctgtttcagatacagatctgtttcatcaaatatcctcaattacaagtctaagacagttatatgtaaagaaaatgtattattttagatgaacaatgtggataactgaactaaaacgatatttgtgaactctgctataatgaaatcttttatttttatagctcaggtattgtaatttagcacttattgcagcanagactgaaataattattgacaccgtagagtacc

SEQ ID NO: 15521 - DNA, 379 bp, Homo sapiens
aggtactggtcacagcctgaagaccactgagagaaactttttcatgaatggtaaaatacatcacaaattaattctatattttgaaaagtgctacttcttatttgccataatgaatattatcattgatcttagttaaaatgtaaaaacacaatttaaaggaagcaaagaatgtgccaggcattttcatgtctattcatacattcattaataaacagaagcatgcataactatgatatagcaaaacaaagaaataattggtttaatgccacatgttgacctaaaatatttccgtaataaactatgacggtgaatcaccaatgaatctaccttgtcccagacccacagtgctgggctaacttatcacagttacttgctcaga

SEQ ID NO: 15522 - DNA, 398 bp, Homo sapiens
aggtacttcttggatcttacataggcctgaaagtttagttgcactattttaggaatctctttttatgcatttgttcaattaaaaggcaacaaagacaaatccttaagaaaataccagtatttttcctacatatgaaatcaagggtccttgtctgacgatggattttactagttacgagaatcttcctatatttctagttgaatccctgtcatttcctgtaatagacttatattttaccagcagcccttatgcgatttctttgtgaaaaatatttctctgtatagaggaaagtttatcatttggaatgttaaatgcaattatattgacatatagtgataatgggacaaagcatacgggttaaaggttgcaggaaccatggcttggcaattagcgatgta

SEQ ID NO: 15523 - DNA, 922 bp, Homo sapiens
aggtactgtatttttaaattaaggagttttagttataatgaaattgatttgtagtctgctttgccgtaaacttgtttttctttaaattgttcttacagtgatatcttactatttttaactgtctggggtttctgatatggggatttcagcccctggttaatcagtcttgtccctacaagtccctgatgcagtatgtttatttgtgatgtttaaagaacatttcttggctgggcgctgcggcttgcgcctgtaatctcagcactttgggaggctgaggtgggtggatcacctgaggttgggagttctagaccagcctgacaaaacatagtgaaaccccgtctctactaaaaatacaaaaattagctgggcgtggtggtgggtgtctggaatcccatctattcatgaggctgaggcatataaatcgttcgcactccggagggagaaggtacacttcgctggtcaatccttgttaacgtacttgatcttttttgtccttatggtcacactcatgtctatataaatatctgtattatttagttctgacaaagcgaatataaactttaccactaccgtggtttttacggtgtgataactatacatattatcttgtttcgttgggaactcctctaactgtgaccctaccgcctgttcaatgaatctgttagtttaatacatattcgcattcacttataacgcgtatatagcggataccctgtcattgtctcactaaagatctctattttaacttgattccttatcaatctatacatcttatacatctaatatgcttgacctcgatttatccttataattatcttattctttcactatcgaatattatttcttagtgttcgcttatagaaataatcattaaccacgagttaatcgtgaatatctcttaagttttctgctctcaacaccg

SEQ ID NO: 15524 - DNA, 382 bp, Homo sapiens
ccgggcaggtacgcgggatctctgggagacttgaataaaagactttgcttggtagaaaatcatgtcacagaaaggctaatagacagcaaagtaaatcagcaagtccctgagcagtaggattaggattcctgtctcctttcaaattcaaatgcatttgtttctggggttaacagtggactgttaagaggctgtgcagcttgggttaagtcattcttatctctgggcttcaggagcttagaccagatagtttctacaggctctcttggtgctgatgccttgggattctgtggctgttttctgtaagatctgcaagggggaaacaggattttggcagcaatcctttcattactaaagcttcctttcttttcgggtacctcggccg

SEQ ID NO: 15525 - DNA, 288 bp, Homo sapiens
gaagactctcctacgtgccgcctctacctgtttcccgacaccttgcgcgcttaacccggtagtaccctgttccggcctttatctgcccctttcggggaaaagcgatggggcggcttttacttcattatgcatcaacggcctgttaaggataattctccagatttccggctcgtaatgttcccgtttcggcttccccaaggcctgggggcttggtgattgccaccgaaaacccccccccgttttcagtctcccgaactcgccttgtcgcccctttattcccgggttaaa

SEQ ID NO: 15526 - DNA, 734 bp, Homo sapiens
  misc_feature 145, 149, 177, 213, 322: n = A,T,C or G
agtactttttctttttttctttttttttgagatgtagtgtcgctctgtcatccaatctggaacgcagtggtgccatcttggctcactgcaacctccgcctcacaggttcaagcaattctcctgcctcactacttggaaggctgangcangagaatggtgtgaaccctgaaggctgancttgcagtgaaccaaaatcataccactgcactccancctagacaatacagtaaaattccatctcaaaaaaataaaaataaataaaaatctacctactactaatatatattataaaacctttatatatttctctaaaaaaaaccantataaaactaacctttaaaacctaatatccaactttatttccaacacctttcccaacctaataaacttagtaaaaacactactatccttacaccttaaataaacaactttaatatctctataaaatcttaattagaaaacataaaacaacttaccattaataattaaacaaattgcaactccccaatcaaaatcatacacttttaaacactttctacttcctaaaaatattccttaaaaaaaaaagaccctcaattatcgctataaaaaaaattagataatcataacaattttttctttattctacccaataaacaccctttcaaaattctttttaataaaattaaattcataaaaatatccccaattaaaaaatcttataaagaaaagccaccattacaaaatatccacct

SEQ ID NO: 15527 - DNA, 621 bp, Homo sapiens
aggtacattttaaaatgcgatttttccggagaatattgctctgtgctggatttttatttcttttacttaacagccaattttgaagttaattattttatttaaatactagaaaaagtagttaatgttgccaaatttaggagaaaaatctgtcaattaacatttagattatctgaagttatatttcttttcctagtgatagaggcactttttttaaactgtgaaaaggatgttgtagttgtgttcagccctttccaatttgatttattaaaggtttcctttcataatccaggaggggaagggtggaattactccagtatcacatctctctaataagaaaatttcagctgatttaggaatcttctccgcataaaagtaaaattttcttaaaaaatatcatcacttgttcttttagtgttttcctgttcccattgtgccaggcacacttgtttggctttggaaacttcgtggaatagtgaaaaaatgggtgttgtttcagattctaatgctgctacatgttaactttgtgactttggataagtgactttatccctgacctttattttctttgcttttaaaatggggaaaaggacttttagcttacagattgtcaggaaaatgaaa

SEQ ID NO: 15528 - DNA, 815 bp, Homo sapiens
actccttccggatgtgcaaagcatactgatgaaacagagtatctgaaaagctgtccccaggaatcacgaaggctcagtcactgctgctataccattaaagaaacaaaaaacaaaagctgccctaaacatatgcagcgcgatcaatgcctcctgttgccccatatgttttacaatcatttgaaagaaatgtgcgaaaggcgcctaagctgtttttctttaaaaaaaaaaaaaaaaaagtgtattgctagtattgtctgagaacaagagagaaacagccaaatggtcacaacattcagattaacagctatccagtggggacaaagacaaggttaatgtgagatttgacatcgttacctagccaagttgggggtttaattccttactgtccccactagaaactatggcttagatctgtcccggggagctggtcttcttggataaggcaactcagccaggacacagtgggattgaacctactgctggttggttcttgcagagaaccctcaccctgaacaggagctgggtcaagtcaaagaatggaatcagtttcaaggaggagtgatggattcccaatgcttcctggttggggatcttggcctctcagaggtgaaagggactttaatgctcatattcaacattctcatttggaagatgagagaaaaggggcccaaggtcacacagcaggtaagaaacctttaggtttctgattctgaagatggttaaagttaagtgaactactttacaaacttatattactcagctggcttggtttatttttttgtggaaggtgggtccttgggccgggacaccgctat

SEQ ID NO: 15529 - DNA, 378 bp, Homo sapiens
ccgggcaggtacaaagactattgtatagactatccgggttagtttgcaagggaagccaatgatgagtaatttgaaagaaattcacctggtgagcaatgaggaccttactgttgctgcctttaaagctgattaagaatttattcctagggaagagtgagctggtacaagaaaccaccccttctttcaatgcaatggacgtgaacaacctgaccctacagattgtccagggccacattgaatggtaggcggaagatgtaattgataattttgtaaacccacatgatattacagtatggacctgtagcaaattcaatttatacatcaaacaggagttaaaatgagataaaatattatttgccacaatagctaataattttt

SEQ ID NO: 15530 - DNA, 192 bp, Homo sapiens
gaatcgctgcaccagaccaggcccccagggcccagctactcgaagaacagccaatggattggaacgtcctaggacagatgccacggctttgacccaggctgggggtgcacggatctcactggggttagttggtcggaggggaaagccccatgggtccaccaggatgaggtgtttaactctatcagggtacct

SEQ ID NO: 15531 - DNA, 550 bp, Homo sapiens
  misc_feature 290: n = A,T,C or G
acaaccagaaccagcaattgtatttctctatagttattttaaaatagtaatcaatgctatgtatttgatgtatatgttctaaattagaaatttcttttggctttgtgttttttttatgtgcgttaaatatgtaaactgaacctgttcctaaaatgcattaaacttaaatgctgtgtctatccaatgccaaaatgctcagaagaaaagtgaataattcagtcattcatctggatgtagttttctgtgtaatctcaaatatctgaatattgaaaaaactaggttgctaactnttttcattccttatgcaaatgtttagcatcatagtgctgtttcagatacagatctgtttcatcaaatatcctcaattacaagtctaagacagttatatgtaaagaaaatgtattattttagatgaacaatgtggataactgaactaaaacgatatttgtgaactttgctataatgaaatcttttatttttatagctcaagtattgtaattagcactaattgcagcagagactgaaataattattgacaccgtagagtacc

SEQ ID NO: 15532 - DNA, 417 bp, Homo sapiens
aggtacctgaggtagctggagacaatagactgtcagggaaacgggaatctgaaacgcgtctgaactggttagatttgaaggcagtaaagtttctgccagcattgaaggatgagacactggcagtccacagtatctggtggtgaaagagatacttaaattatcccctgtgcttgtgggaaataaagtgcccattgaaggaaggctttggcaggctacatgtctactgtcgagggcaagtattgccaaaattgaaaagcccaatgacttatggagtttgtttggctggatttcaaattgtgtttcaaaaattttaaaggcagaaaaatgaaaaacactcagggacttttatatttcttagctttatgaccgtaattccggggggacccaggtaaacattttgggggtttttaaagggtt

SEQ ID NO: 15533 - DNA, 671 bp, Homo sapiens
  misc_feature 308: n = A,T,C or G
agcttctgctccgaccgctgctccgatcgtggcgccggtggcccaggccgccgaggaagcgccgaaagtcgtgcgcacccgcgccgtgcgccgcgtcgagaccagcccggcagcccccgtgagcgccgtcggcgccgtagcaagacaccgacgccgccgcgctggccgcgatcgacacctcgggctacctgctgccgcaggtgaaggtcccgggccgccgcggccgcaagccgagcgagttcgtgccggagaacgatgaagtcgcggcgctgaacgccgtcgagcgcgccgaactgaaggcggcctcnaaggcgcgcgagcgcaaggccaagggcctcggcatgctgaatgaagccggtttttcggaagccgaactcgaaaagcgcctgcagcagctgaagaacctgatcaatatgggcaaggagcgcggctacctgacccatgccgagatcaacgaccacctgccggaaaacataatcgatccggaagcgaacgaaggccttatcgtgaccttcaacgacgtgggcatcggcgtttacgaacgcgcccctgaagctcaaatgatgcttgttgtcgaaccaggcgtgacccctaccagctaagaccaaatttgggggctccgtcggaaccgggctgttacacgttgaattccgactttggccgggtttaaa

SEQ ID NO: 15534 - DNA, 158 bp, Homo sapiens; identical to SEQ ID NO: 15518

SEQ ID NO: 15535 - DNA, 351 bp, Homo sapiens
aggtacttacgttgcctcgtgtcaccaaaattggtgtggctgctgtggtgcggggggctgcactgatggcaccccttcctgtcttcatcaagcagctgccgttctgccgctccaatatcctttcccattcctactgcctacaccaagatgtcatgaagctggcctgtgatgatatccgggtcaatgtcgtctatggccttatcgtcatcatctccgccattggcctggactcacttctcatctccttctcatatctgcttattcctaagactgtgttgggcttgacacgtgaagcccaggccaaggcatttggcacttgcgtctctcatgtgtgtgctgtgttcatattct

SEQ ID NO: 15536 - DNA, 389 bp, Homo sapiens
ccgggcaggtacctatcaaactttacaatgttatttgtgtttccttctatttggtttagcaatttaaaatgtttatcgtgtaggtaattcctgagtgtgtgtttgttactatggcaggtttattttttttagcctgtaagtttgtgtcttaaatattatttagtatgccttagttgagatgatcttttgttgagtttttgcaaaaggcaaattttaggccatgagcggtggctcatgcctgtaatcccagcacgttgggagtccaaggcaggtggatcacatgatgtcaggagtccgagaccaacatattgaaaccctgtctctactaaatattcatactattagataggcttggtttgtatgcttctgtacattccatttcttttgtg

SEQ ID NO: 15537 - DNA, 359 bp, Homo sapiens
aggtacatagaatatgaacacagcacacacatgagagacgcaagtgccaaatgccttggcctgggcttcacgtgtcaggcccaacacagtcttaagaataagcagatatgagaaggagatgagaagtgagtccaggccaatggcggagatgatgacgataaggccatagacgacattgacccggatatcatcacaggccagcttcatgacatcttggtgtaggcagtaggaatgggaaaggatattggagcggcagaagggcagctgcttgatgaagacaggaaggggtgccatcagtgcagccccccgcaccacagcagccacaccaattttggtgacacgaggcaacgtaagtacct

SEQ ID NO: 15538 - DNA, 488 bp, Homo sapiens
  misc_feature 302: n = A,T,C or G
ccgggcaggtacaaccagaaccaacaattgtatttctctatagttattttaaaatagtaatcaatgctatgtatttgatgtatatgtttctaaattagaaatttcttttggctttgtgttttttttatgtgcgtaaatatgtaaactgaacctgttcctaaaatgcattaaacttgaatgctgtgtctatccaatgccaaaatgctcagaagaaaagtgaataattcagtcattcatctggatgtagttttctgtgtaatctcaaatatctgaatattgaaaaaactaggttgctaactttnttcattccttatgcaaatgtttagcatcatagtgctgtttcagatacagatctgtttcatcaaatatcctcaattacaagtctaagacagttatatgtaaagaaaatgtattattttagatgaacaatgtggataactgaactaaaacgatatttgtgaactttgctataatgaaatcttttattt

SEQ ID NO: 15539 - DNA, 621 bp, Homo sapiens
aggtacccattgcccgaatagtgaacactctacccagtcgtttttcatccctcactttcctaccaccctccaacattttggagcctccagtgtctcttattccactctgtatacccatcgtttagctcccatttccaaatgagaacatgcagtttctgactttctgtctctgagtcatttcacttacgataagggcttctagttccatccatattgctgcaaaagatgtgatttcattatttttgatggttgcgtatgtattccatggtatatatgcacattttaaaatctaatcatctgttgatggacacataggttcagcccatgatgttgctattgcgaatagtgaacagttgattattagactgaagagagaaaaggccttcctcccccatgacttaacaggaacgaaggacgttgcatttataaaaggatggccatcaccagctactgggtaggctgaggcttttgatcaccataggttgcaattggtgtgttaggtggacgagggcaagaggatatggtaattagaaatatctaagttacacagcacgtagtttttaggaaactggaaatcacacacacataaatctaataaagacatgggtacctgcccgggcg

SEQ ID NO: 15540 - DNA, 354 bp, Homo sapiens
ccgggcaggtacccgaaaagaaaggaagctttagtaatgaaaggattgctgccaaaatcctgtttcccccttgcagatcttacagaaaacagccacagaatcccaaggcatcagcaccaagagagcctgtagaaactatctggtctaagctcctgaagcccagagataagaatgacttaacccaagctgcacagcctcttaacagtccactgttaaccccagaaacagatgcatttgaatctgaaaggagacaggaatcctaatcctactgctcagggacttgctgatttactttgctgtctattagcctttctgtgacatgattttctaccaagcaaagtcttttattcaagt

SEQ ID NO: 15541 - DNA, 245 bp, Homo sapiens
ccgggcaggtacatctagagaacatttgccaaaggcctaagcacggcaaaggaaaataaacacagaatataataaaatgagataatctagcttaaaactataacttcctcttcagaactcccaaccacattggatctcagaaaaatactgtcttcaaaatgacttctacagagaagaaataatttttcctctggacactagcacttaaggggaagattggaagtaaagccttgaaaagagtaccc

SEQ ID NO: 15542 - DNA, 244 bp, Homo sapiens
aggtactcttttcaaggctttacttccaatcttccccttaagtgctagtgtccagaggaaaaattatttcttctctgtagaagtcattttgaagacagtatttttctgagatccaatgtggttgggagttctgaagaggaagttatagttttaagctagattatctcattttattatattctgtgtttattttcctttgccgtgcctaggcctttggcgaatgttctctagatgtacctgcccg

SEQ ID NO: 15543 - DNA, 409 bp, Homo sapiens
aggtacactctagcattgtaactttttccccctgagaagtaattttaagatctatcagtctcaatttaaatgatctgttaatcagccagagttttagtttcataatatcgttccattgcctgacaaagatatacccactgaagtgcctttagcagacctgggaccgtcaagaatcttgttaccctgattattgcaagatgacatatttcttaagccatttataatctcatattcgggttgaatctgaatttacaaataaaagggttaaaattgaggcttgtttcaagcagcaatttagggaaaatgaaagtgtgcttcaaatttttagattttttctgggttactattatttttgtttcgaaaattttaccaattgccataattcttttttgcaatcccataaattggt

SEQ ID NO: 15544 - DNA, 138 bp, Homo sapiens
gtggatccccttttagtccaagctggttccatctctgccatgtctctcctttatatctcaccaatagcgatatatttcacgttgttatctttttcctaggataaaaattctgtgttaattttagtttttaatttgagt

SEQ ID NO: 15545 - DNA, 494 bp, Homo sapiens
ccgggcaggtactaccttctctgctacaagtcgagcgaggagccccgcatgagccctgacacctgtgccaccattttggaaaaagctggtctcgataactgggctcttggaaaaacaaaagtgttccttaagtattatcacgtggagcagttaaatctaatgcgaaaggaagctattgacaagcttattttgattcaagcttgtgtcagagcattcttgtgttcaagaagataccaaaaaatacaggagaaaaggaaagaaagcgctataataatacagtcagctgcaagaggacaccttgtcaggaaacaaagaaaagaaattgttgacatgaaaaacacagcagtaacaaccattcaaacttctgatcaggaattcgactacaagaaaaactttgaaaatacaaggtgtctgtaaaggagaggagccaaaaatattgagacccccaagacgaccccggaaacccaaaaaaaaaaaaaaaaaaaaaagtacct

SEQ ID NO: 15546 - DNA, 382 bp, Homo sapiens
aggtacttttttttttttttgtaacatacaagggaaatgactatagattaaggccatagaagaggtgaagcattgttcctcatggatgcatcaaatgggaatgtattcataggtagagatgaaccattggagaaagaaagtttcaaaagaaatttcgaagaaatcagtgaaagtaatggaccaagttccatagattagaataaaaaattacatagtatttataatccaatagaaagacatttttatttaagagataagaagggagtaaaagtggactggtgaagatatgttggacaggggtaaaaaccaatggagaaatatgtgaataatatttttttgaacttcttttgtgagtgatgctttgtacctgcccgggcggccg

SEQ ID NO: 15547 - DNA, 404 bp, Homo sapiens
aggtacatggtctcaaaactagttagtgtttgagcaagaatctgaacccaggtcagtcacacatgatagccataccattgacaatagcatggagaatactgatgacactataaggtctagttcagcagattaagacagccacaagctatagcttataatagtgcaatgaaagaggagcatcattgtaatccgagtgggcagaaaaattagttgagagaatatagcttatttcacaagagagaaaatgaaagtatatatggattggagaggatgggtcggaaagattctagagtgaaggctgcacaaaagagaagcttgggggaaatttagtgcctccttctaaggatattcattagtccccctcttgtcttgaatataaacacttaagatttttttcaatgtaa

SEQ ID NO: 15548 - DNA, 670 bp, Homo sapiens
aggtacatagaatatgaacacagcacacacatgagagacgcaagtgccaaatgccttggcctgggcttcacgtgtcaagcccaacacagtcttaagaataagcagatatgagtaagggagatgtagtaagtgtagttctcaggtccaattgggcgggtagatggaatgtaccgattaaagggctcaataaggaccggaccaatttgaaccctcggggatgtattcaattgcaaccaagggccccaaggcggttgctattagaaccatttcctttgggggtggcttaagggtccaagtttatgtgggaaaattgggggtaaataggaggaattaatttttggtgttaggccgtggttcattgtatatgggggtccaaagcctttggtccttttggtaatgggaataaggaacccagggggtataagggggggggttggtccccattttctaggtggggccaatgtctcccctcccaccgggtataccccaaacatatggaagtgctcccaccaacccccataaattttttttggggtgggggaaccaacccggaaaggtggcaataacccgggttaagggggttactccccttgggccccccccgtggggggacctggggtttcccgttgttttctctttttataatattctttaggggtggggtgtattt

SEQ ID NO: 15549 - DNA, 386 bp, Homo sapiens
aggtacagtggcacgatctcggctcactgcaagctccgcctcccgggttcacgccattctcctgcctcagcctcccaagtagctgggactacaggcgcccgccactacgcccggctaattttttgtatttttagtagagacggggtttcaccgttttagccgggatggtctcgatctcctgacctcgtgatccgcccgcctcggcctcccaaagtgctgggattacaggcgtgagcaattactgtgtttcttatccatgtagtgtgcatgcagtgacggcatcctaatacgggtcctccttctagcatagatatggggatcagcacaaacaaagcaaacagtagcattcttacagccagcatggacagtaaaggcatttagggggt

SEQ ID NO: 15550 - DNA, 297 bp, Homo sapiens
aagtaccactgctccctggctaatttttgtattttttgtaaagagagggttttgccatgttgcccaggctggtcttgaaatcctggactcaagtgctccgcccgccttggtgtcacagtgctggcattacaagcactttgtaatcttgaaaatggctctcatgagccaccctgctaggccaaaactggaagtatttaatggaactttgaaagggtaaaaagaaacaaagagcttctgccacagaagacaatccagctgatcctacagaaagtgacagaacacccgcgtacctgcccg

SEQ ID NO: 15551 - DNA, 479 bp, Homo sapiens
atgacctaccattacgtctcgtatatagaaggtttatataccagctgggagaaaatcttgtgtgattaaactataacttttttgtaagttattcttattaggggtgcactagcgagtaataatgaacttattatgttgatatgtcgcaggtccgagggactaaatattatgtaagtaagctgggatgtaagtagaaatgtattttttaaggaattaatgtccgaacggatatacttagggtgtgacaatgcacctcatttaagatgtaacttattagtgtggtaagtatcaacattatagcgatatacggatgtaatgtaggtatttaggtacataataacgttaaagttatgtatgaaagtaaggatagctgttcgtaaagatagaaattaggtagtcgtttaggtaggtagatagtaatgaatgaattatactatatagtaaattagttgcagtatttaatgaggtatcaattaatt

SEQ ID NO: 15552 - DNA, 367 bp, Homo sapiens
aggtacatagaatatgaacacagcacacacatgagagacgcaagtgccaaatgccttggcctgggcttcacgtgtcaagcccaacacagtcttaagaataagcagatatgagaaggagatgagaagtgagtccaggccaatggcggagatgatgacgataaggccatagacgacattgacccggatatcatcacaggccagcttcatgacatcttggtgtaggcagtaggaatgggaaaggatattggagcggcagaagggcagctgcttgatgaagacaggaaggggtgccatcagtgcagccccccgcaccacagcagccacaccaattttggtgacacgaggcaacgtaagtacctgccccggg

SEQ ID NO: 15553 - DNA, 193 bp, Homo sapiens
ccgggcaggtaccacaaggtgtctttttacacagctcatttgaatacaggtgttctgagaaggggtttctattttaaaattaccatatcaaaataaatgtgccttatttttttataagtcttgttaaatcagtgtccatattactgtttggggaagggggaatgttgtggggtctgggagagggtgggtacct

SEQ ID NO: 15554 - DNA, 538 bp, Homo sapiens
aggtacatgtagagaacatttgccaaaggcctaagcacggcaaaggaaaataaacacagaatataataaaatgagataatctagcttaaaactataacttcctcttcagaactcccaaccacattggatctcagaaaaatactggtcttcaaaattgaccttctaccagagaaggaaattaatgtttttccttctggggacacttagtcacttttaaggggggatagtatgtgggaaggttaaaaggctctttggaaaaaaggagttatctcttgtctctcgagggcgtgaccccggctttcttagggaaacttaagttggggattctccccccggggtcctggccagggtaaattttcggaattatttcaaaagtcctttaattcggaattaacacggttgcgtacctcttgtgaaggtggggggggtccctcggggttatctcacaaggctttttttggttttcccccttttttaggttggaagggggtttttaaattttggccgccggcctttggggccggttataattcattgg

SEQ ID NO: 15555 - DNA, 164 bp, Homo sapiens
ccgggcaggtaccatggaaacccactctttcattgaaaggaaattaggttgaacctccaggagcccgtcagagtctgaggagaggctggcttcatgtctagatacgacgacagcaaggctgcttagagctaacagcgcattgcctttcactaccggactctcct

SEQ ID NO: 15556 - DNA, 452 bp, Homo sapiens
aggtacccccaggacccgcaaatagtaaatagtgagaagcaaaggctgaggaagcttccgcagagcagggagggcagaggtccacgccggactactatagagctcgtcagaatgaaactggccagttggctttacccaatgccaagcccaaggcattgagtcccaaagaaacactgggagaattggtcactggtgactttttggaaaaggtggccaagagacagaagaggaagaaggcatgcacaccagtgcccggacaccccacgcaccaacctgcccctccgcccacaaaccagcgtgtgaggtggagacctagaggaggagtgccagaatggggatgccaacaagaagttactcaaacggttactgactgtgcaagttactgcccacattccacagtcaatgccccccacccataaaaataatgtaagatggtcataagtacctgcccg

SEQ ID NO: 15557 - DNA, 295 bp, Homo sapiens; identical to SEQ ID NO: 6388

SEQ ID NO: 15558 - DNA, 584 bp, Homo sapiens
aggtactggtctctgtctttacagctgaagcatcagaggatggagtgaccaggctggttccaatgacagttatacggccatggggagtagacatggagtctaattcagtgcttgaggctaagaatgaagtttgtatgctatgtgtggaatattgttttccaggaggattctttgcaaactttttcatagtttttgaaggttcattgttcttgttgaaccagttgccaaggaaaatttctggaatggcaagccttgttgagaaaagtaacccagggttgtgtaaagggtggtggttttcttggtaagtaaaggtttttgttggccggctcttattttcttgttggagtctccgggagggttggccttgtttctcaattggggttaaccctttgttcccccgggggactgtggtcacgtctttctttaggaaaaactttaagtttggggaattctcccctcacggggggtccttgactaagggtaaaattttccggtatatttttctaaaagcccctttaaattgcggtatttaaccccggttcccgaacccccttttttttaggggggggggtgggcgcccccct

SEQ ID NO: 15559 - DNA, 97 bp, Homo sapiens
gcgagacgtgtaatcagtcttcacttcaaaaggccggataattaccgggttattcccaccagaaattagaggggtattaaacgccacggaaaagaat

SEQ ID NO: 15560 - DNA, 962 bp, Homo sapiens
  misc_feature 153, 154, 171, 172, 200, 201, 294, 345, 346, 375, 435, 439,440, 446, 447, 448, 457, 458, 474, 475, 476, 487, 500, 501,514, 523: n = A,T,C or G
ccgggcaggtacctgtctgggcaacactgtcccacaggggcccccatgaccaaactaactctgcttctacccagaaagggtgcagagtagccactagacttttatgtggcaaatgggatggttatgcccagcctgaagccaagaaatgccctnnttctggttgccttgatnnttgtgtttaacagctttccaaatgcctnntaatgagtgcagtatagaagaccgtcttctttcttgtggcaagtacaccttcggcgccgcttctaagaaacttaggtgggaattcccccgcgngccttggcaaggaaattctcaatattcaaggcttatatcggataccgcgtnncgaccttcgagtggtggtggcccccggtnaccaccagcttttttggttccctttttagtggagggggttaattggcgccgcccttggcngtannatcatnnngtcatagcnntgtttcctttgtgtgnnnaattgttatcncgctttcacaatnntccacacaacaantacgagccncgtggagccataaaagttgtaaaagccctgggggtggcctaaatgtagtggagctaaacttcacatttaattttgcgtttgtcgctcaactggcccgctttttccaattccggggaaaaccttggtcgtgcccagcttgcatttaaatgaaatcgggcccaacgccgccggtgaagagggccggtttggcgtatttggggcggctctttccgctttactcggtttacttgacttcggatggcgctcgggtcgtttcgggcttgcggcgaagcgggtattcaggctcaactcaaaggggcggtaattaccggtttaatccaccaaaaatcaagggggatataacgccaaggaaaagtaaccattgtggagcaaaaatgcccaaccaaataggcccagggaacccgtataaaaagggccgcgttggctgggcgttttttca

SEQ ID NO: 15561 - DNA, 785 bp, Homo sapiens
  misc_feature 184: n = A,T,C or G
aggtacctatcaaactttacaatgttatttgtgtttccttctatttggtttagcaatttaaaatgtttatcgtgtaggtaattcctgagtgtgtgtttgttactatggctaggttttatttttgtttaggcctgttaaggtgttgtagttctctacaataattttaattttaaggttatcgccncgtttaagttttggtaaaaatggaattcttttcggtttggaaggtttctttttgtttaataataggggactaaaaagtttttttatggggcctccatgggtatagtgggtgttggggttctttacaaattggcccccttggggtaatattttcccctcaaagtcttaaccaggttttttgtgtggttatagttttcccctaaaagggggcccaaagtagtgttgtgggtaatttccaatccaaatttggtataggggttttcaatatgggaaaatttttttttctgtatagggaaacctccaataaacccatatatatgtgtttgtgtaaaagatccctcccggttggggtgctcttgtccttaaaccatttgaaaaataaaattatttcaattccaatgtatataataaatattatttttaacgatctctatttatgtggaggtcctatatatgaagtgttggtatgtagtataagagggtccctgcatcctcctcttggtgtttaataattttatccctcccaaacggttcttttataccctttattatatagcgtgaatagtggctcctttttgttatttgaggtctcaatggttaat

SEQ ID NO: 15562 - DNA, 523 bp, Homo sapiens
aggtactcatggatatttgaaagagaacgtgacaaaaaaattttaaatattttatcatcgctacaaatgtagataaaattaatttttattttttaaagtattttaaaagtagataaaatacactcattatattttacagaaagagttttagagttctgttttagacatgtaagttcttaatctatttgaagttgactttttaatgtggcttgagataatgacccaattttatcttgtcaatatagaaaaccattttttgtggcctgaagcacagtggctcatgcctgttatcccagcactctggaaggctgaggcaggtggatcacttgagcccaggagttggagaccagcctgggcaacttggtgaaaacccatctctacaaaaaatgcaacaattagccaagtgtggtggtgcacacctgtagttctagctatttgagaggctgaggttggaggattacgtgagccctgaagaggttgagggttgcagttaagctaagattgaactctgccccgggctgct

SEQ ID NO: 15563 - DNA, 211 bp, Homo sapiens
tgggcgatctgggggccaggtatgcaagaagggtctctgggctcagccattgcctgggattccagtcacaatgacaggtgttttggcaatttgtatttactcttttgtaaataactttgtgtctataaccttggcttgaagtggatctgaaaaccacccaacggtttgggtgaatttttttttaaaccgtgaaatggtatgttctgtacct

SEQ ID NO: 15564 - DNA, 781 bp, Homo sapiens
aggtacagacaggattgacggggggaatccctaaactttttattctaacaagttttatttatttattttcttttttgacatggagtctcgctctgtcgcccaggctggagtgcaatggcgtggcctcggttcactgcaacctcgcctcccgggtttaagcaattctcctgcctcagcctcccaggtagctgggattacaggtgcatgctactgcgcccggctaatttatgtatttttattagagatggggtttcaccatattggccaggctggtctcaaactcctgacctcaagtgatccactcgcctcggcctcccaaagtgctgggattacaggcgtgactcactgtgcccggccagcaaacaagttttagatttaactttatttgaatgcaatagaaaaaaaattaggcattaaattgaaggggctgctgaacttcagataaatgtttcttcattggttcctaaaagggataaataagccagttattctcaaactcaagtatgtgccagaatcccctggaggacttgttaaatcacagaatgcttggccccacccccagggtttctgattcaggaggtctgggggtggggcccagaatcttgcatttttaacaagttctaaggtgaagctggagttgccgggccggggccccactttgagaccacttgttttagggaaggaaaaaaaagatggggaaaaacttaaggtgggacttgccgttttcccatattattatttaagacctgagtacttgacacctgccataaatgataaccgg

SEQ ID NO: 15565 - DNA, 173 bp, Homo sapiens
tgagcggcgcgcgattactattcgtatatggcaactccaccgtggtggcggccgttgtttactctttaagctaaaatattctctctccacagctgcaattagagagccgcatggtgacctacttgaatcaacaaaatttgagacctgtgattataattctcattatgacgata

SEQ ID NO: 15566 - DNA, 232 bp, Homo sapiens
ccgggcaggtacatgaataaataatgagtgtttcttgtaggtattggtttggagattgttttacggtagtatgaactgttaactggaaaagaaacctgagattgcagtcagccaagattgtgccactgcaccccagcctgggcaacagagactccgtctcaaaaacaaaaaagaaaagaaaccaagaaacctcaggcatgaacctaatttaatctccatgaaagaggtacct

SEQ ID NO: 15567 - DNA, 431 bp, Homo sapiens
aggtactttcctgaatgcctctcctaagtaaatggctctagtttctctattggccactgcactgccactaggattcctgcaagggatccgatgggcccagagcaggtagccaaccacttctctgttggatggaatgcaatgctgtttgccagcatgtttgagccagtccttcaagatggattctgagtgactaactggacctaaatttaaatagctcaaagcagccctttgctaactaggtttcatactaatgcctcttaatttcctggaaaaatcccacacctcctttaacttttggaacttttaaaaaaataatccctataatcatataaatttaaaaaaattcctttgttgtaaatataattaaaaagtttttctcttgtaatttttccctttatgtaataattcctcagttaaattttaaaaatttt

SEQ ID NO: 15568 - DNA, 408 bp, Homo sapiens
ccgggcaggtacccagaaaataagaaagggttccaaaatgaagaatcgctccttttgcaaaccttatggtaacaaatataatatttataaaaagtgaattaggtaatatgttaatggagaaataaacatcattatgaaatgctattttaaacaaaaaattagagaaaatattagtttaaaaataagaacttatagttcgatttaaaaaaaggcaatgaccaaaaactctttaggcttattcacaaagaaaagtttacttttaacacattttcacaaatatttaaaagggatgtagaaaaaaccatgggatttattgaaaaattttgaaaacccgaaattgaaaacactattagttaaggcctggtggccaaaatttttcagaacaaaaaattataacattcattaaag

SEQ ID NO: 15569 - DNA, 402 bp, Homo sapiens
ccgggcaggtacagaatatttgccttttgattgccacaaagatgaagaatctggcaccaagactccagggccatgctagtgactttccctcctatctcctgaggacacggtgcttccaactctgaggatcaggatactgaaattgactgtgtgagaagagaaagtgggattttctgtgggaaaagactgttttgagcataattttcaagtaataaatatattctaccaggagacacactgccatcatgctgacggtgtatgttgcttttgacattaacattatgatcatcaatattattggggtgttccctagaaaatgaccaattatcacagaattaacgagtcattttcattttagttttttttcacacttccagctaaatccactgagtttactgagtt

SEQ ID NO: 15570 - DNA, 624 bp, Homo sapiens
  misc_feature 46: n = A,T,C or G
ccgggcaggtaccagttgagccgagtgcctcaatcccaatatcagntctatacagatacaaggtgatgctgattatttcatcaaccatcttggagttcccatcgtgtagtttgcttacgaggacatcaaaacattagagggtccaagttttctctccgaggcccgtttttctacttttgcaacaaaatttgaagaaatggatcgctctttcaaccttcatgaaaccattactaagctctcaggagaagtgattttgcaaattgccaacgaacctgttctgccctttaatgcacttgatatagctttagaagttcaaaacaaccttaaaggtgatcaacccaacactcatcaactgttagccatggcgtcacgcctgcgggagagtgctgaactttttcagtctgatgagatgcgacctgctaatgatcccaaggagagagcacccatccgcatccggatgctgaatgacattctccaagacatggagaaaagctttctggtaaagcaggcaccaccaggtttttatagaaacatcctctaccaccttgatgaagagacaagccggttttcaatacttatagaggcttgggaacactgcaaaccccttgcatcaaatgagaccct

SEQ ID NO: 15571 - DNA, 160 bp, Homo sapiens
ccgggcaggtacctaccatatgtgaaacagagttcaaggtgctatcaatacagctagtcttccaaagctcgtgaccttcagatcttttgttttagattctgttatgaaaatgtcactagtgtaagccacatttttaatgcaatcaatgcccgttgtacct

SEQ ID NO: 15572 - DNA, 434 bp, Homo sapiens
ccgggcaggtactttcaagtcacctggttcccatacagctgacttttcccagcactggaaacacgacgcatgcctagacctttagagaatcctaattttgcccacccccaactgtcctgtaacaaagcttggttcacccaaaaatgccagggagtctcaaacccaaggctagttaaaactattgggaaaggtaggccccctttccacagggattgctaacctggtattgtttaagctccaaatggctggagaaaatctttgggccacatttacagggaaattttttgctgggagttttacccttaacatatgtgggtaccattttgtcattttaaaaagacgattatccgtttccccttgttaacttaaatttttttcctcaagattctccattttttaaatttatcccgtttaggttatttaaatttaatttt

SEQ ID NO: 15573 - DNA, 318 bp, Homo sapiens
aggtacttacgttgcctcgtgtcaccaaaattggtgtggctgctgtggtgcggggggctgcactgatggcaccccttcctgtcttcatcaagcagctgcccttctgccgctccaatatcctttcccattcctactgcctacaccaagatgtcatgaagctggcctgtgatgatatccgggtcaatgtcgtctatggccttatcgtcatcatctccgccattggcctggactcacttctcatctccttctcatatctgcttattcttaagactgtgttgggcttgacacgtgaagcccaggccaaggcatttggcactt

SEQ ID NO: 15574 - DNA, 362 bp, Homo sapiens
acgtacctgaaggaacgaagaagagggatttctcaaggtgagaagcagttctccatggacactgatgacagcacaggcaaagtttcctatgactagggatcactgtccacacagagtctggcttcccaggtatccagcaggtagacaaaacagctaactccactgccactcctttctccacatccgttccgatttctcagccatctcagtgacatccgccatcttgagagtcaactactgactggactgagttgtgtggtatatgcttctgtttacttctcttctgtcttttttaagtggccaaatagcaaacgcttaaataggaaatctctgggagacttgaataaaagactttgcttggt

SEQ ID NO: 15575 - DNA, 154 bp, Homo sapiens
gtatcccttcattattaaacgtttcatttaaccaatttcttttatataattatttattttctatgcttatatttttaacgtttattaattcacttctttattctcattttttttatacctctctttttaaactaatgtttgttttgactcctga

SEQ ID NO: 15576 - DNA, 318 bp, Homo sapiens
ccgggcaggtacttacgttgcctcgtgtcaccaaaattggtgtggctgctgtggtgcggggggctgcactgatggcaccccttcctgtcttcatcaagcagctgcccttctgccgctccaatatcctttcccattcctactgcctacaccaagatgtcatgaagctggcctgtgatgatatccgggtcaatgtcgtctatggccttatcgtcatcatctccgccattggcctggactcacttctcatctccttctcatatctgcttattcttaagactgtgttgggcttgacacgtgaagcccaggccaaggcatttg

SEQ ID NO: 15577 - DNA, 320 bp, Homo sapiens
aggtacagaggaggagggcgccaaagctgagagaggcaaccccccaaatattaaaaaggaagaaatggcgtgataggctagcacattttatggaaagccatgtcttaattaaatgttttccctacaaatgttctctgtatcaagaaacctggcacatagggaatgcatgaaacctgatttataatcagattcagtctacttaagtaataacctatatctagatgatagattgtcaactgtgctactttagccatcatcacatacccagcgtttctatccttagtgacacagctgggccagaggcaaggcctgcattcatg

SEQ ID NO: 15578 - DNA, 390 bp, Homo sapiens
aggtacttagcccttggggaacacaggtagttccttttcactgtgtttaatttgggaaaatccagatccacatcattgtagagtctgagggttagaaggaagtcattgtgtctaacataacaacagagcagtttgtgtcactgagctccagtctgtgctggattattgatattgttggtggcggtcaccattcctggaaagggactgtcccaagccacttaccttcccgaggagtctgctggttctccttgaggatagtgcttagataacagactcattaaacatttactgagtgtctgtcagggatcattcacattcacatcatcctcccggcccctccccgtgttgttcatggagggagtacctgcccgggcggccgtttctaatctt

SEQ ID NO: 15579 - DNA, 315 bp, Homo sapiens
aggtacctacttgaaggacttcataagcaaattacgatttaatttacaagaacactatgtcacacgtatacacacaggttttttatatttgttgtcttttccgtgattatctcttacagtgttgtatatttaatatattcattttattttaattttatgtaggttcctcattccttcatatgtgtattacatttccctggaactatcacgtattttatatacttagcaatggaaagctcctggtttcagttgtctgtgcagcaggcagggggaggagaagaaaatgggtcacactcctgaccctgcctgcatagc

SEQ ID NO: 15580 - DNA, 364 bp, Homo sapiens
aggtacatagaatatgaacacagcacacacatgagagacgcaagtgccaaatgccttggcctgggcttcacgtgtcaagcccaacacagtcttaagaataagcagatatgagaaggagatgagaagtgagtccaggccaatggcggagatgatgacgataaggccatagacgacattgacccggatatcatcacaggccagcttcatgacatcttggtgtaggcagtaggaatgggaaaggatattggagcggcagaagggcagctgcttgatgaagacaggaaggggtgccatcagtgcagccccccgcaccacagcagccacaccaattttggtgacacgaggcaacgtaagtacctgcccg

SEQ ID NO: 15581 - DNA, 367 bp, Homo sapiens
aggtacagtgaaaagagccaaggctgtgtgaccccctcatcacttagccaggcgtatggtcctggtttctgaggctgccagaaagcatcttagcaatttgtgtttggatggtccatgcctgactattctaggctggaggttcctaaagagtaacaagaggaagagaaacaagaatctctgacacttgttgagaatagagcacagtcccatttgtttgaaaagagacaccaggcagccatgtttatgtgccagaaatgcattccacctcaaggaggacttaatttatggacccgtgtgtgccaggctgagctgggcaagatctttctcaggacaaactctgccatgcagctaaaagcctggaaactaa

SEQ ID NO: 15582 - DNA, 834 bp, Homo sapiens
ccgggcaggtacttcagtcttttatcagttaaaatactaacagatagaaaataacaaagaatagactgttttcctgcctattgtaagacaaaatgaaatgtttactgttggaaacactatacctttttttagcctctctcccctatcttcttattttccttgatggactctttctcttatctgagcaaactttttgtttgtttgtttgactcagtctctcagtgaacagtatagcgacccattagctccagcgttggactctgactgtgtcaagagtagaagtttgaagtgcaattcttatccatcatatttctccaattattaactctcctttactgccttttaaatacttcacaaaatggaaaccccttttgaataagaacagccgattttctgggagatggacaaggaaaagctatggagagatgctgggtttcttagtttaacatgtggctgcttgaaagttgctattagatccagagaaactttttgttaagtgtgattagagttcaaagaaaatgtttatttcttagatacttctattgaaagaaacataaggggtctatatctgtatatctataataaaattcagaaggcaagtatattatttaatctatattaactgcacacataaaaacagaaggttttgggatgggtaaatttcaaaagtctgagatccaaataaaactccaaacttctatacttatctgaactcctcattcaaaaaccggatggttgctttagaacaggatttctagaaaattcctcacctttagttttgaaaaccagaatttccactcaatactttgctttgatgcaaataaattacgaacc

SEQ ID NO: 15583 - DNA, 241 bp, Homo sapiens
  misc_feature 17, 113: n = A,T,C or G
ccgggcaggtacgcggngaatctaagacctgaaactactgccacagccatgcataaaatgaaatgctgctgctttcctctctgttaaagagaatgttcaaggccgaggacacnataaaaaagagcagcattgctggctctgttattagctgtgtgttcttgaaaaagtcacttctccagacatatctcagcatttataacctaagactgaatcactgcattttacccttaatgaggtacct

SEQ ID NO: 15584 - DNA, 518 bp, Homo sapiens
ccgggcaggtaccattcttatctcagaatgctgtaaaccatcagtagaagcagtttagatttggactgcatggtaaaatgaaaagtaataaccctccaaccacaacctagtcagggtattaataattatatgtacaagaaaacaaagaagaaaataatattgaaaaaatggagattccccaaccagtttcatatttgaaggatctgagttgtatttttattaaggaaattttttttctgaatactgtcttccaaaatgttaacattaaaatctgaatcagaggactctgaatggaaaagaagtttgatcactgacacctagggctctgaagcgtgtgtggccacatggaaaagtcgaaggatgcgctgtcgaatctcctttgtcttcactccatagacaattgggttgagcacaggaggaaccagcagatagatattggccaagatgatgggcagcggagagtcacgccggttgctaaagcgatgcaccatggacaatccaatgaaaggtaacctcgg

SEQ ID NO: 15585 - DNA, 151 bp, Homo sapiens
gtaaacatttatttatacactattattttacaattatattataaatcattcttaaaaatatttttagtatattttttaaaaattttcagtattatttcctaaaatattttctataatattttactaaatttttttaagagacgcgctatac

SEQ ID NO: 15586 - DNA, 241 bp, Homo sapiens
ccgggcaggtacgcggggaatctaagacctgaaactactgccacagccatgcataaaatgaaatgctgctgctttcctctctgttaaagagaatgttcaaggccgaggacacataaaaaagagcagcattgctggctctgttatttagctgtgtgttcttgaaaaagtcacttctccagacatatctcagcatttataacctaagactgaatcactgcattttacccttaatgaggtacct

SEQ ID NO: 15587 - DNA, 323 bp, Homo sapiens
agcgcatctatcggattacgagttatttacattattccgtaagttcatagacttacacgagacttttcatgtttctataatggctgtaatatcgtttaccgccgatatctggtgtaacttcgtcaaaccctttatatgtaaatagatactattacgccattgacctttaaaggtcctgctcggctcaaacgctatttaatgtggcttattcatagaaatcctctcgtattatcgattgttcctactgtcctccgaccgagatggtgatttggcggtgcacttgacagtcgacgattgtgtttatgtgttacaatcatggatct

SEQ ID NO: 15588 - DNA, 364 bp, Homo sapiens
aggtacttacgttgcctcgtgtcaccaaaattggtgtggctgctgtggtgcggggggctgcactgatggcaccccttcctgtcttcatcaagcagctgcccttctgccgctccaatatcctttcccattcctactgcctacaccaagatgtcatgaagctggcctgtgatgatatccgggtcaatgtcgtctatggccttatcgtcatcatctccgccattggtctggactcacttctcatctccttctcatatctgcttattcttaagactgtgttgggcttgacacgtgaagcccaggccaaggcatttggcacttgcgtctctcatgtgtgtgctgggttcatattctatgtacctgcccg

SEQ ID NO: 15589 - DNA, 697 bp, Homo sapiens
  misc_feature 597, 665, 682: n = A,T,C or G
ccgggcaggtacctatgatttaaatactctccttttaaatactttgtaaaaactgcttttccgagccccttttatgctctgcagttgccatatccactaggtggtattgcaaataagtaaagcatcctggccatgacgctctagtgagaatccctgaccaaagttactctcctcacctcactgcaaacctccaggaagcggaaactactacccctccacagacagagctcccctgccactccatgaggcgctgctgccggcatcagttaccgaagccctcacccacacccagcctgcaatggtccactctatattccacaatacaggaaaaagcccaaggagtcagatcagttacgcccctgggatgcagaaagaaccagtgattcttcagatatgacagcaggcaaagttctgccctctccttcccatcttctatcaggaagcgatcccataaaatctcttccagggaaggaaagaggcagctctggcttcttggagagacagagaagcaagagggtgaggaaggagtcaccaagctatccaagcagccagaggcgagaaggtgggagcagggcaagaagaaaatgcagaagactngttctcctcagtgggcctcttccctgagtttgatttttgagttgaaattttacctaatttcaactcanaaaaaaagaaaagaaanaaaaaaaagtacctt

SEQ ID NO: 15590 - DNA, 112 bp, Homo sapiens
ccgggcaggtaccttccactttcctacccttccattcagaaaagacaagcagggcatgttaattcaaaagacaaaatgattacaatgccagataccgatctaaaatgtattc

SEQ ID NO: 15591 - DNA, 384 bp, Homo sapiens
ggggccattgagactgccatggaagacttgaaaggtcacgtagctgagacttctggagagaccattcaaggcttctggctcctgacaaagatagaccactggaacaatgagaaggagagaattctactggtcacagacaagactctcttgatctgcaaatacgacttcatcatgctgagttgtgtgcagctgcagcggattcctctgagcgctgtctatcgcatctgcctgggcaagttcaccttccctgggatgtccctggacaagagacaaggagaaggccctaggatctactggggaagtccggaggagcagtctcttctgtcccgctggaacccatggtccactgaagttccttatgttactttcactgagcatcctatg

SEQ ID NO: 15592 - DNA, 299 bp, Homo sapiens
ccgggcaggtactggtctctgtctttacagctgaagcatcagaggatggagtgaccaggctggttccaatgacagttatacggccatggggagtagacatggagtctaattcagtgcttgaggctaagaatgaagttgtatgcattgtggaaattgttccaggagatcttgcaactttcaagtttgaagtcatgtctgtgacagtccaggaatctgatgcagctgtggaagaccaggtggaagggtgttctgtagaagttgtgcgcctctctgtggccggggtgctgtccatggtacct

SEQ ID NO: 15593 - DNA, 585 bp, Homo sapiens
aggtacaatttatatgtattaattataaccaattagaaaatataacaggagaatgagttttatatttcaactaaagctataagatctttctgcatacattaaacaaaatatgtgcacgttgcttggttttgattttcttggttcatttggctggttttagaggaaacttggaaatacagctgagggacatgaaagaaaatattagtgagtggagtgattcaccacattcttaaatggaaaaactagtgttgatttaagaaagatgtcaggccgggcgcggtggctcacgcctgtaatcccagcactttgggaggccgaggcaggcggatcacaagatcaggagttcaagaccagcctggccaacatattgaaaccccgtctctattaaaaataaaaaaattagcttggcttggtggcgggcacctgtaatcccagctactcgggaggctgaagcaggagaatcgcttgaacctgggaggcggagtttgcagtgagccaagaatgcgccattgcactccagcctgggtgacagtgtgagactccatctaagaaaatacactaaacttggaaaaaggttcctgcccg

SEQ ID NO: 15594 - DNA, 451 bp, Homo sapiens
aggtactttgtaattatatttgggtgatgatttgacaatgtctatactaaatcatgaagctatacgtttcatgaaagcaagaactgtgtctaatttgccactacttgtatcctggcacataatatatattcatttgttgagaaaataaatgaataaataaatttgaattttgtctacttcatataatggatcaggaccttaaaaaaccatcatttaacagtatttatatctcacggactagtgttttgcatttacttccagccacaggatgctacttgattccccaactatggcaggtaattgggtgtaggcttggggcagggaatctgaaatcaatgagatcccaggacactggttattgtagttctttccccttcccctaaactgttggcaaacaaagtcaaacaaacattcctcaggatactccagaaaactcgatgtccaaacaagg

SEQ ID NO: 15595 - DNA, 584 bp, Homo sapiens
aggtacttgataccatgcctagtgcatagttggtgcccaattaatacatgattggattatagcataatcactgatcactacatttaaagcagtccaatagtggaacaggctgcctcacaaatagtgagctctcgtttcttacacagattctactatgggccaggatctcagccaagcagtggagccagaggctggacagacacaagcagagattttggaaaaagactgagtccctctcagcacttcaaagatcccttccaacacccaaacatcaaaagccatgttatattgccaagcaagggtgcctatgaacgcctgttgaaaccccacaacaattttttcagccatttattaaaaccccaaagagactatcaggacttcagggcaaacatcctagagatagcaatgcccccagcaagaagaaaagagttctcagtctgagaggcacaaactgtaatcagtgtaattaacagcttaccctcacctctagccaggcgtttcttcaagattctagggtttccagtccttacagaacattctcaagtcagcaggctacactgtcttagtgtccttgtacctgcccg

SEQ ID NO: 15596 - DNA, 448 bp, Homo sapiens
ccgggcaggtacctgggaccccaccacctacatcaccactacggatcctaaggatacaagttcagctcaggtctctacaccccactcagtgaggacactcagaaccacagaaaaccatccaaagacagagtccgcaccccagctgcttactctggaagtcctaaaatctcaagttcacccaatctcaccagtccggccacaaaagcatggaccatcacagacacaactgaacactccactcaattacattacacaaatttggcagaaaaatcatctggatttgagacacagtcagctccaggacctgcctctgtagtaatccctacctcccctaccattggaagcagcacattggaactaacttctgatgtcccaggggaacccctggtccttgctcccagtgagcagaccacaatcactctccccatggcaacatggctgagtacct

SEQ ID NO: 15597 - DNA, 245 bp, Homo sapiens
ccgggcaggtactcttttcaaggctttacttccaatcttccccttaagtgctagtgtccagaggaaaaattatttcttctctgtagaagtcattttgaagacagtatttttctgagatccaatgtggttgggagttctgaagaggaagttatagttttaagctagattatctcattttattatattctgtgtttattttcctttgctgtgcttaggcctttggcaaatgttctctagatgtacct

SEQ ID NO: 15598 - DNA, 818 bp, Homo sapiens
ccgggcaggtacttgtgaaaggaaaatacatggtgcttgaatatagcagggaggcctgctgaagtcagagagggtgatctttaggaaaggctttcctgaagaagtggcactggtgaaatgatggctgaagcatgaatagaagtttcctaggaaggctgggtgtgtggtgtgtggtgtggtgtgtgtggcgaagtgctgggattacaggagtgagctgccgtgcccagccggcaaagttgattctgaaaccctgtattacctcaataatcgttgaagtgcctattatatgcaatgcaacacagccgggtggctaatgctgtgagcaccggatccatgtgttaaaatcctggctgtcctacctgctagctgtgggaacttgaggaaggcacttggacttatctggtcctcagtttctctatattgtaaaatggaaattaatcataactacttcctgagggtgctggcagcagtaaacaatgataaaggttggaaagcacacttgagcgctcatacacactccataccacactacagacacgaacataaacaccatacactcagcctttttaggaaacttctattcatggcttaggcattatttcaccagtgccacttctttagggaaggcctttcctaaagataacctttttgacttaacaggcccccctggtatattaaagcaccggcttatttcctttacaagtcccttccggccggccgcctctcgggtgatctccatacgccctattgggtcgtttacccgccttacgggccgtgtttaaaacttgggactggaaaacctggattacccactttat

SEQ ID NO: 15599 - DNA, 364 bp, Homo sapiens
ccggcaggtacttacgttgcctcgtgtcaccaaaattggtgtggctgctgtggtgcggggggctgcactgatggcaccccttcctgtcttcatcaagcagctgcccttctgccgctccaatatcctttcccattcctactgcctacaccaagatgtcatgaagctggcctgtgatgatatccgggtcaatgtcgtctatggccttatcgtcatcatctccgccattggcctggactcacttctcatctccttctcatatctgcttattcttaagactgtgttgggcttgacacgtgaagcccaggccaaggcatttggcacttgcgtctctcatgtgtgtgctgtgttcatattctatgtacct

SEQ ID NO: 15600 - DNA, 245 bp, Homo sapiens; identical to SEQ ID NO: 15597

SEQ ID NO: 15601 - DNA, 367 bp, Homo sapiens; identical to SEQ ID NO: 15581

SEQ ID NO: 15602 - DNA, 771 bp, Homo sapiens
aggacgcgggtgaagaggacaggagtagttcttgtctgcaggctaaactgacagatctacaggtcataaaaaatgaaactgatgctcgctggaaagagtttgaaattatttcattgaagttagaaaatcatgtgaatgacataaaaaagccttttgtaattaaggaaagagacacactaaaggaaagagaaagagagcttcagatgactcttaataccagaatggaatctttagagacagcactgcggcttgtgttacctgtagagaaggcatcacttcttctctgtggctcggacctgcctctccataaaatggccatccagggatttcatctcattgatgctgatcgcatctatcaacacctaaggaatatccaagattccatagcaaaacagattgaaatatgtaaccgcttagaagagccaggcaactttgtattaaaggagttacacccatttgatctacacgcaatgcagaatattatactgaaatacaaaacacaatttgaaggaatgaaccacagggtgcaaaagaatgaagatactttcaaagctctggaagactttttggcgtttctcagaacagctaaactctctgctgagcccggtacagacctttcagcctcagatacacaggtggcaacaagaaaatacgttgacagttaaaaataaagagggagaaattcatttgatgaagacaagggccaacatttggattaaatgttgaaaatgcttatattaaccttaaaatgctaaatggggtgataccacc

SEQ ID NO: 15603 - DNA, 899 bp, Homo sapiens
  misc_feature 351: n = A,T,C or G
ggtcaaatgtaatcaccaaagaaatctgtcacataaaaacactggtggcatttctcaagtgatgcccattactcttgactttactatgtcaatggaacacgcagctaagggcttctacatcttggaatggcagtctcagacttgcccacctcttaaattagacatgaaatagaaacatagaatagatgctactctaaagtcacaatggaaatgcccaacacatttcacaaatacaattatatgtaaacaaaaagagaactctatgtatcaaaatgactttgcaagtttaaatacaatattgatgcatctatggcaattttcacatagcccttgaaaagcaccaggtagctnggtgttattatatgactctatcccctagaaaagaatgaacaggtctgaaaagaccttctagattattcacatgagaaaaagggtaagaaaataatagttaccaataatataacctgtgatgttggagaaacctggaagggcatttatagtctaatatgatattaattactaagttaaacattttattaggagaataaaaaaattcacaaaaaaaacaataatggcgcaaatttttagtgaaaagaagtttagatgattataacttcctttcagagaacattgtgaagtaaaatcaataactcccgggcacgttcaaaaaaagtaaggctgcatcaaaaaggcgtatgtaaagaataatgggggcctatttaccttaacgatatccagaaaagggattattgttatagccaaaaaaatctgggcccatttaaaataaatttaggtttaaaaaattcatttacaaaaacgttattggcttaaagagaaattcccattgaagaaaaattgaaaaaatttggaaaggtctattgatcttaaacaactccaat

SEQ ID NO: 15604 - DNA, 257 bp, Homo sapiens
agacgtgtgcgccttttctcataggcttcacagctgtaagggtatcttcagttttcggtggttaggttcgtttcgtcttccaagccttggggctgttgttgcaacagaaccctcccccgttttcaaccccggacccgcttgacgctctatattctcggttaaccttatcgtgtctttgaggttccacacctcggttaaggacaacgaactttattcgtccaactgggcaagtcagccccacttgtgtaaacaaggat

SEQ ID NO: 15605 - DNA, 383 bp, Homo sapiens
aggtaccatgcacaccaactcagagatggaaagaacctaggcattgcaatcagttatgacttgtgtgggcataataatttttgggggaaattaaacactcacaaaagagctgtcgaagacctaagggtcaactttgcaaggcatgcagcctaggttcaacctgcagcttttcccagtggaatctggcccatgcattttctcatagtttttcccccacagatccagaaagaaaccaaagacagcctagtctcagagtgccccatcaaactttcaaatacagaaaaaagaggggagactttcagcattttaacctttccatttaaaatttttttaggcagacagatttttcttatctataagttaatgagaaatgttgaggtcta

SEQ ID NO: 15606 - DNA, 353 bp, Homo sapiens
aggtacgcggggacagattctccgggatattaccggagacggagtgttttattattagcctttcttaggtggacatttccatttgaattaaaagtcctttaggctgggcgtggtgtatggctgtaatctcagcaccttgggaggctgaggcaggaagatcacttgaggccaggcgttggagagcagcctgggcaaggtggcaagaaccttgtctctacaaaaaaaagcgtctgccatcatggatgttctcgcagaagcaaatggcacctttgccttaaaccttttgaaaacgctgggtaaagacaactcgaagaatgtgtttttctcacccatgagcatgtcctgtgccctgg

SEQ ID NO: 15607 - DNA, 224 bp, Homo sapiens
tcggctcccagctactcacagagaacgtttctgtttctgacagcagagtaagagaagaggtgagaatagagacagcccattctcttttggcctaattcctaaggaatcatgcctctgccttcgggccattctcaagtcttgttcaaggataaaatgatttattgatggccgtaattaaaaagcaatgccaacggaagcagcgtcagcatttttcatttgtacct

SEQ ID NO: 15608 - DNA, 300 bp, Homo sapiens
aggtacgcgggaggccgaatgctggtcctttccatatgaatgctccctaaactatcccgcatcatgttcatctgatacacaactgtgtataactatggctgcccctgcatgctgtgacatgcatgccaatcttatccacacatagctagcagacatttggcgacgaaactcaccataaagatgcactttttaatagtggttggattacacacatacaatcctcttctaccttaactgttctctgagataaattgaaaggaattgactattccgcatgaccctagacatgggacctgtccc

SEQ ID NO: 15609 - DNA, 257 bp, Homo sapiens
ccgggcaggtacacctctttctaagatgaaagagctcaaggtgaaatagcatgtggggaagattgtcttaatcgtcttctcatgattgaatgttcttctcggtgtccaaatggggattattgttccaatagacggtttcagagaaacagcatgcagatgtggaagtcatactcacagaaaagaaaggctggggcttgagagctgccaaagaccttccttcgaacacctttgtcctagaatattgtggagaggtacct

SEQ ID NO: 15610 - DNA, 390 bp, Homo sapiens
aggtaccctgcccagagatttctccaaaaggagctcttgtgaatgcaggcaagctaaagccacacaatgaagctgaaattcattcagcttagcttctcctgagagccttctttttgtgggggtaacattgcccttttgtttcacagcgaggtctgtgctaagacttgctacttagggagtcaaagctaataaaacataccgtctagaaatacagacataactggtagaactatacaagaaaaagaaagggcagaggaagaagaggaatgtgattgtggagaggtatgaagggggattacaaatccctgcttctcagagcgtggtccatggactagcagtgtggacatcactttcaaatctattagaaatgtgaatcttacacgcaaccca

SEQ ID NO: 15611 - DNA, 836 bp, Homo sapiens
ccgggcaggtacttcagtcttttatcagttaaaatactaacagatagaaaataacaaagaatagactgttttcctgcctattgtaagacaaaatgaaatgtttactgttggaaacactatacctttttttagcctctctccctatcttcttattttccttgatggactctttctcttatctgagcaaactttttgtttgtttgtttgactcagtctctcagtgaacagtatagcgacccattagctccagcgttggactctgactgtgtcaagagtagaagtttgaagtgcaattcttatccatcatatttctccaattattaactctcctttactgccttttaaatacttcacaaaatggaaaccccttttgaataagaacagccgattttctgggagatggacaaggaaaagctatggagagatgctgggtttcttagtttaacatgtggctgcttgaaagttgctattagatccagagaacttttttgttaagtgtgattagagttcaaagaaaatgtttatttcttagatacttctattgaaagaaacataaggggtctatatctgtatatctataataaaattcagaagggcagtatatatttaaatctatattaactgcacacataaaaacaagaagtatatgtgatgggtaaatttcaaaaggtctgagagtcgtaataaacactccaaacttcatatacttatctgaacttcttcatcaaaaaacggatgggttgttatgaaacaggaattttaagaaaattctacacttttagtttctgtaaactcaaaactttttactcaattactattgctctgattgcaaacaa

SEQ ID NO: 15612 - DNA, 50 bp, Homo sapiens
agaaaaattcttatctctttaatgagttggggtgtgtgtgtgtggtttgt

SEQ ID NO: 15613 - DNA, 895 bp, Homo sapiens
  misc_feature 150, 160, 167, 332: n = A,T,C or G
aggtacattttgggattaaaatcaacatgatagtaggaccctataatgtttaattgtaacacattttcacttccatatattcagatatatgttttccattttcaaaggagatttgaggccactaaacattttttaaagcacaaatgcacnagaattgaanaatgatntaacctaattttgagcagataaggcaaaaatgaaggatgagaatgagatcatatggaagaccatagttaaaggatgctatttcaattgcgcaataacaaatcttagctgagaggcctagtagttatggccaaagggagacatatatttaggcataatcttaattntattttattgtttaatttagatgagatccaaatggatgtaggaagtttcacggttgcagtcacgtataatgtgagtttaactcatgcttcataagaaacaggaactaagccgggtgtggtggcttatgcctgtaatcccagcaattttggatgctgaggtgggcggattacctgaggtcaagaagttaagaacaagcttgaccaacatggaaaaaccctgtctttactaaaaatacaaaatttaccagagtgtagtggtgcatgccttgtatcttcacttcttgggaagcttgaggcaggagaaatactggaaccttgggaacaaagaatgcaatgagctgagataccgctcttggtcttcaagctggggaacagaactgaaactttgttccacaataaaatataattttgaaaatggtccctgcgccggcgggcggtttttaaattaagggatcccccggctggaggatatgaatttcagcttattgtaccgttaacctcaaggggggcccggccccactttgttcccttaataaaggtaattggcccttgggttatattgg

SEQ ID NO: 15614 - DNA, 334 bp, Homo sapiens
  misc_feature 334: n = A,T,C or G
aggtacatttgttgggggcgtgacattaacatataaccacttagagtggacatgcagttagagaaaagtcaatgagctggaaccaagctgggaattccaacatgtagaagttaaacacaagaggaggagccagcaaaggaaacagaaacagagcttccagcaggtggggggcatttggaagaaaacgatgccatagaagccaagatgaaatagacatcaaggagaaggaagtagtcaattgttttgaatgccatgaagaaagataagaataggtgagaaataagaaaggctgctgactttaccatctgaggccacacatctgctgaaatggagn

SEQ ID NO: 15615 - DNA, 364 bp, Homo sapiens
aggtacttacgttgtttcgtgtcaccaaaattggtgttgctgctgtggatcggggggctgcactgatggcaccccttcctgtcttcatcaagcagctgcccttctgccgctccaatatcctttcccattcctactgcctacaccaagatgtcatgaagctggcctgtgatgatatccgggtcaatgtcgtctatggccttatcgtcatcatctccgccattggcctggactcacttctcatctccttctcatatctgcttattcttaagactgtgttgggcctgacacgtgaagcccaggccaaggcatttggcacttgcgtctctcatgtgtgtgctgtgttcatattctatgtacctgcccg

SEQ ID NO: 15616 - DNA, 365 bp, Homo sapiens; identical to SEQ ID NO: 15502

SEQ ID NO: 15617 - DNA, 184 bp, Homo sapiens
ccagcacccacctgtcaccagggtgaacagtgaaccctaggtatccaggttcgaccacgtagatagtgctgttgggtaacctagaagcaccttgcatgcgaatactcctgtggccaaggacgaggctgctctgtcccagctgcagtgcagtgaccatcgacgtgtcctgggccaagacagccac

SEQ ID NO: 15618 - DNA, 445 bp, Homo sapiens
ccggcaggtactgagattataggcatgagccaccatgcccggcctttgctcttaactactgatgttgtcttcctgatcttttctacaagaagcttttaaactttttggactttaacctacaataagaaatctcattttacatgttcacatgtatctataacaacatttatatttctaaaacaaacttttcatgaaacaagatatacctacatatgtcaggcactctgatattttctattctagtccaccttttcaatttcattctatttatgggaaatatatgttggttgggagtcactgagttaatttaatgacccactaataggctgtgagtggcattggaaaaatacctgcttgtaagatatgcgaacacacgttttaaggttgtttgggcatgtggaaatattttggggtgctaatctgttttaacctcagtttggacctt

SEQ ID NO: 15619 - DNA, 413 bp, Homo sapiens
aggtacgcgggcacagtgctttaaattaaagcaagtttgcccataggacaaaagagcatttgattcccttttttctgtcacatgtcccttgaggctggacttcaggaatcctggaaaattaatatgagtgcagcatgtgaggggtcagagacaggccagcagggcgtctgcattcctccctgccacaggtctctccccagaggctggtttagtgtagggtattgccaggaaacggactgaggctgctttgctaagagctcctgaaaatgccctgggcctgtcctggcgtttctgaagagccctcatacagggacagccaccatctgggtcaaggaggtctgggttccctgctggtgggctccatcctgcgatggagtgaaccaggcgagaaaggatgacgatgttcttcatgt

SEQ ID NO: 15620 - DNA, 488 bp, Homo sapiens
  misc_feature 266, 299, 362, 379, 401: n = A,T,C or G
gcggcattgtactcgcacgcattatagggaaaatacaagccccagcatcgagaactgaccaccatcgaagacctttagacaagaatgcattgcattaatcaacaacggacaaacaaactggtaacaccactaccaacacttccgggctacactccattgcattaacaccagagccctgccgggacgataccgcccgattttgggtctcctgatagaccacgctcgggcccagcttttacgaacatagccgaaatgctcctccgggngcttgccagggaggtatgtattgtgcatggccnttaatacagataacacggttcacactctgcgcagcggcgtgtagcacacgtgagacgcgcatncctcttctgggtcccgntattgaaaagtagcggttaaanaatatgcctgtcagtcttaggaccgcgaactgcactcgtgtcagtgagggcgtggtctcccgccttgacgccaagacattttgtgta

SEQ ID NO: 15621 - DNA, 245 bp, Homo sapiens; identical to SEQ ID NO: 6452

SEQ ID NO: 15622 - DNA, 400 bp, Homo sapiens
gagtgatgccatctgcagttttgtgatctgcaatgattcttcccttcgaggtcagcccattatctttaatcctgacttttttgtggagaaactccgacatgagaaacctgagattttcactgagttggtggtcagcaatatcacaaggctcatcgatttacctggaactgagttggctcagctgatgggggaagtggaccttaagttgcctggcggggctggcccagcatcaggattcttccggtctctcatgtctctcaagcgaaaggaaaaaggagtgatatttgggtccccactgacggaggaaggcattgcccagatataccaactgattgagtatctacacaaaaacttgcgagtagagggtttgtttagagtaccttggccgctctagaactaa

SEQ ID NO: 15623 - DNA, 181 bp, Homo sapiens
agtcttagtttctttatccggaaaggccacttcctcatattcaaggcctctgccaacccagtttttgttttcttctcacagcatgtgagagtctttgtttcacccatacatgttagaattccgtagacaatgtaatcattcaaaaactatttattgaatgcctactgtgtgcctggaacct

SEQ ID NO: 15624 - DNA, 383 bp, Homo sapiens
ccgggcaggtacagatctgcgttaatttttgacagctcatatatacagatttttagaaatgtaatagaaaatgattttgcacatatggtgcaagtcttgctggtgtatgtttaatgtggcaacacgtgccagaactgtttggcaaaacatgtcaaatggagtgcttgagtcagaactctaatgtaaatgtgtctaaacagcagtatgtatcattatgatgtatttttgtaaacatagtgatggctgctttcagtcatgtaagtgctggataaaaataaccacttcagttggagtaatgtaggaaaacgtcacccagcagatgggtagtactctgcaaagttacactgtcagccagtggcactggttcttttatttatgttggg

SEQ ID NO: 15625 - DNA, 797 bp, Homo sapiens
aggtacttgtagtattgtgtaagtttaacgtgcgcattgccaaggttatatttgaatgacgtttttatgtagatgtcgatttattacacgtttcacgaacgctattgtttgtgattgtatgatacactctagctagattattatcttttcttttttttttccttttctttttttttaaaaggtggagtttcgctcttgttacccaagctggagtgcaatggcgtgatctcggctcaccgcaacctccggttcccgggttcaagccattctcgtgcctcaccctcctgagtagttgagattacaggcatgctccaccatgccccggtaatttttcgattagtactagagacgacatttctccatgttgctcaggctgtgctcgacttatcaacctcaggtgatatcccttcctcaggctcccaaagatttggaatttcacgcgtgagctcccgattccaactttcttttgttgcttttaagtggcataacttatttgcagactgtggcttgacctgggtgaacaaaaaatctttaagagcttgaccttgacccaaataaatagaacaagttgcacccttgaggctgccttaccatttcccccttatattttataccaataacttactaggattgccattttaaaaataaagatatccttagaccgcattatattggtagttgggcataacactcaaagaattcaatgatggtggggaccccgggtcccgagatccaataaatgcgttttccgttccccctcagaaacacggggtctcggagttagatagagagaaact

SEQ ID NO: 15626 - DNA, 669 bp, Homo sapiens
ccgggcaggtacaaaatcctttagccagaaatggcctgaaaacgcagaggaggtaggcacaatgaacagcctggaaatcagagtttcttcctctctctgtgctgtgctggtggcatgacaacttacttgttctcacaggctccttcagtgcctgggggcagtttcctgcctcagggttaaagggctgccttcccctccttactcagcttctgaagccaacagatccacctcctggtccgtttctgaacctgatacctgcagaaggaaattcatcaacaacctctccctgactgtcagggtgacttataatgagcttcttctccttctcccagatggggagattcctgtcctagcccaaagacttttttggctggaaaccaggttgccttaaattgccaggagagccagcctccctggcctggtcccagccctctgtgctcaccttccccctgctggtctgacttacaggctcccattttgtgtcagcttctcctctatcggtgggtgtgggcctaagacttaggaccccttccctggctaattcttatacctcaggctggaagagactagctcctgcctacccagctgaatctggctttccagatatggtgatgtgcccagtaggttggcaagctgtttggttctgaccacctctggaattaatacctt

SEQ ID NO: 15627 - DNA, 364 bp, Homo sapiens; identical to SEQ ID NO: 15580

SEQ ID NO: 15628 - DNA, 385 bp, Homo sapiens
aggtaccttccctaattcaccagcccagtatttatttgtatttgtgtttgtttcgctggccggatttgactctctatgggaacatcataaatattatttactccaggattctgaaataagatagatattttatttcatgttctttaaattctccaaagatttatttttattactttcctttcccatttctggacattgatatatttcagaacttttgtgcaggttttcctacctacctacacctcctctcccttctccccttactcctttctttctggaatgtaattctgtctatgaaacatgacagtaagctgaaatgtccctgatgattttcactcctctggattttcactccttttagtgacagaaacttactaattctgat

SEQ ID NO: 15629 - DNA, 399 bp, Homo sapiens
ccgggcaggtacgcggggagagagaaggttaagagcaacaagatgggaggcagctgcatggaacctgtcccactgaggaagtaaaacagagttttactcttgttgcccaggctggagcgcaatggtgcgatctcggctcaccgcaatctctgcctcctgagttcaagcgaggagcaaccctacctgatgggctggacttctgcctggattggagtttgatcatgcctccatatgggtgtttaccaggcgtatgcattgaacctgagtttgtctcttcaatacaaggaaaatctctgccgcttagtgattttccaagaaacatgagcttctgcctttcaatgaggaagatactcagaagtcatgttcgagcactccggaaaatgtccttggagtttcaac

SEQ ID NO: 15630 - DNA, 409 bp, Homo sapiens
ccgggcaggtacaaatcactaataccactggactggcccaggctcctgggttagcctcccaaggcatcagctttggcattaagaataatctggggaccccattgcaaaaattgggagtgtcattttcttttgccaaaaaggctcctgtcaaactcgaatcaatagcatcagttttcaaggaccatgcggaggaagggacctctgaagatggaacaaaacccgatgagaagagttctgaccaaggactgcagaaggtaggagactctgatgggagcagtaatcttgatggtaaaaaagaggatgaagaccctcaggatggagggtcccttgcctcaacattatccaaattaaaaaggatgaaacgagaagaaggagctggggctacagagcctgagtattaccactacat

SEQ ID NO: 15631 - DNA, 407 bp, Homo sapiens
cctgccaggttcgcagggacggcacctatgaagaaaatgatcgggctctgtaaagcaaggcatctccatacggacggtttggagtgctatgatgcgctcagtgcttgatgccatatactcgcaagtgcagatctattgcaccagccagtagactcttgggcactgcctaccacagaatctagcactgctccacatgcatgtctgcctatgcatctgaatagctgttgataccgacaggcacacacagtatgaccatcgataacacctctcggctaagtacttatcccaagggatatttttaatgaaatttcagaacatttttttccctgtgggattattttcttccaatcctaaaaaaaaagatgggccaacccaagggaaaaattattttaagatggccaacctta

SEQ ID NO: 15632 - DNA, 565 bp, Homo sapiens; identical to SEQ ID NO: 15138
  misc_feature 565: n = A,T,C or G

SEQ ID NO: 15633 - DNA, 752 bp, Homo sapiens
  misc_feature 473: n = A,T,C or G
accttacaatgttagtaactgtcttttattaaggaagaaaaagttaaaatggcatgtaacttaagaaggtgggagaataataaaggaaaaaattaagaacaaaacgaaaagaatcatgaaatagtaaaacagtaaaattaagatataaatctcagagttggttatttgaaaagatcaatgaaacagagtaattctggaaaaaccaatgagaacaaaaagggaaagcacacgcaacatgggaatgaggaagcagaatactacaactccaggccaacaaatctgaaaatagaacagaatcactatttaggaaaattcacttaattaaaaaaaatttttttttgagaaagggtcttgctctgtgtcccaggcatgctcacggctcactgcagcttcggcccccagggctcaagtgatcctactgcttcagcctcctgagtagctgggactacaggcacacaccaccatgcctagcntaattggagtggcggctatgttgcccaggctgattgtgaactcctgggctcaagcaatcttcctgcctccggcttcagaagtgctgggactacaagcatgagccactgtgcttagcccgggaaaatttaaattggccaaaacttacggaatagaaataaagtttgaagaaaattatgagcatgaaaaaaaataaaaaaaacaacaaccccatatttcctaaaaagcactactagattttgacagtttcatacattgtataaaaactcaaaaagcaaaat

SEQ ID NO: 15634 - DNA, 771 bp, Homo sapiens
  misc_feature 363: n = A,T,C or G
acccgaaaagaaaggaagctttagtaatgaaaggattgctgccaaaatcctgtttcccccttgcagatcttacagaaaacagccacagaatcccaaggcatcagcaccaagagagcctgtagaaactatctggtctaagctcctgaagcccagagataagaatgacttaacccaagctgcacagcctcttaacagtccactgttaaccccagaaacagatgcatttgaatctgaaaggagacaggaatcctaatcctactgctcagggacttgctgatttactttgctgtctattagcctttctgtgacatgattttctaccaagcaaagtcttttattcaagtctcccagagatttcctatntaagcgtttgctatttggccacttaaaaaagacagaagagaagtaaacagaagcatataccacacaactcagtccagtcagtagttgactctcaagatggcggatgtcactgagatggctgagaaataggaacggatgtggggaaaggagtggcaatggagttagctggtttgcctacctgctggatacctggggagccagactctgtgtggacagtgaaccctagtcataggaaactttgctgtgcttgcataagtgaccattgagaactgcttctcaccttgagagaattctcttattcgtccttcaggccctcgagcggaccaccctagggcgattacaacactggcggcccgtattatggatccagctcggcccaacctgggtaaatatggaatagctgtttcg

SEQ ID NO: 15635 - DNA, 742 bp, Homo sapiens
accctcaataaggtaagagtccagcttgggggttggaggaagctgtctgatccaactggaggtgtgtcctaagcctctgactctggctgggaaaggataataggccctggtcacagttagtgttcttctagatggcgagatgatctcatccaaaggacttctgactgggccaaaccatcaaatgtagtgacagcattggggtcctgccctctctgtcactgtcctcccaaaacaggttgccatgaagcatacgtcagctgtgacagcttgtaatctggatctggagaacctgggcacagattcaaaccgcagcattggcacgctggccatcaccaccctgcttaagacgggcagcgagagcagcacgcctcgtgaaacgaaactcctccttttcttcatgaatcaagtctgagttaagggtgtggtggtgtgcagtccatccaagcccggggccggagtattaactatccacccagccccccctgtccttatgaactgcctcgtcacgatgctgaagagaggagggttggctttaaaaaatcaattccctgtccgggacctgtttctttagcggtgatgaacagaaacctcacagggcccagggggaccgggcttggttcaacggtgtgcaagtccataagaggattgtacagttcactggacactgccaacccgtgatattacctgatccggggccagagaggggcccaatgaacaccaatattcttaaaggacacctgcg

SEQ ID NO: 15636 - DNA, 820 bp, Homo sapiens
cgtccgaggcatcaaaggctgcataatgtctcctccacaggtattggtggttacttaggaccattgcctactagtgaaacaatcaacctcaacccagctttgcccttctgagcccctgaaagatcagctcgaatggggctgggaacatggaggggcgtgctgctgcacatggacctgtgaagtagtcagggcttctgtcccacgtggctgccccaaaacctttgtgaggtactgccctctgtacagtaagccatcatagtgtacatccgtttacttttatagtaagagacagaagaagagggcacagttttaaaacaatgatatgtaaaacagtgcgaaggtatgatttcctctctgaactaagtgtgaccgtgggtaactcttggtgtgttggacacccacttgaacagccactaccctggcccagatcagaatacggcaatggcatcccgaaccactgtatggcactcagcctgcggaaggggaaagtcacagagcaatccccaagagctttgagtctgaaaagtctgaggcaaacaaactcacacaggatcaatttaagtaacagagaacactgacaggggagcttgttcctagacagcagtggcttaccggtgctaaaaacagacacactgtccagagccaggcctttgttcaactttcctgcctggggccacaataagggacattgtcagtacccatcaattttctgaatggaagtttttgaacctttgaggggataggctataccaattcaatgcaccaaaggtactgaggtttgaatattttggatcgacttatcaaaatgtggtgtaattcg

SEQ ID NO: 15637 - DNA, 265 bp, Homo sapiens
acgcggggagttgtgagggggaaggtagactctttccagacctttgataaaggggctgctcaaaaagccacgaccctgggcctctgctaaaaccatggctttaagtaaggagggagcagatatataaaaaaccttatccccctttctaatctcttatgtcctgtgagtgtcacccattgagtaaacccaggtggaagtcagcaggaaagtagctgggatgatgcagtctttacaggttatatgctgaaatgattttggatgtacc

SEQ ID NO: 15638 - DNA, 474 bp, Homo sapiens
  misc_feature 88, 89, 429, 430, 432, 438, 444, 460: n = A,T,C or G
accaagccaatgagttggagtttgccagggaggcttctaaatttattctgctgtgaattctaagtggggcatttggaaacttcatatnncctggacattttcttagcgtgacttagtaattaaatgtgcatccaaaaaaaaaaaaaaaaaacctgcagatttgcgctcaaccccaatttggttcatctgaacacaggagcacttgagaaatgcaaaattctttaatcactccaaattgcccaagcacaaaccaggccaagagcgtcaattgcttctaaaataagatgcaggtgttctgaaaaatctacaagcagtctgctcattttaaattactcttcactccatgtgcccatagggaagggaggattgaagaaggcgtttttttttcatcacagccttactggtggaatgacagtaatgattacccannanaaaaantaaaanaaagttccttggccgngaccacgctaaggg

SEQ ID NO: 15639 - DNA, 502 bp, Homo sapiens
accattcttatctcagaatgctgtaaaccatcagtagaagcagtttagatttggactgcatggaaaatgaaaagtaataaccctccaaccacaacctagtcagggtattaataattatatgtagcaagaaaacaaagaagaaaataatattgaaaaaatggagattccccaaccagtttcatatttgaaggatctgagttgtatttttattaaggaaattttttttctgaatactgtcttccaaaatgttaacattaaaatctgaatcagaggactctgaatggaaaagaagtttgatcactgacacctagggctctgaagcgtgtgtggccacatggaaaagtcgaaggatgcgctgtcgaatctcctttgtcttcactccatagacaattgggttgagcacaggaggaaccagcagatagatattggccaaaatgacgggcagcggaaagtcacgccgcttgctaaagcgatgcaccatggacaatccaatgaaggtacc

SEQ ID NO: 15640 - DNA, 530 bp, Homo sapiens
acatattatatgcaaggttacaaaaaaaaatcaatggttaatgattttttagctcaaccaagctaaaagatgtgaacaacgaaattgaactcaaaacaacttaagatacaaagctcttgttactgataatgtctaataatattcatcaatttaccatatcttgttcttatattaaaatgttctatcattttcctaattattttaaagtcgattacaaaaatatatatatattcttgtagtgccagaaaattgaatacattaataaatggggtagaatagatgaatctcccatgaagaagaattccaaataatttatgaactctgccctcaaggatatggagcacaactttctacttctctagtgtgagctgaatagtgacttccttccaaaaattacatatggaaagggggaaaataactttgtagtggagaaatctgataaacactatctcggctaggttatcaagattaacactaacattaataagtcacactgaatgtatgtacccttgccgcgaccacactaaggg

SEQ ID NO: 15641 - DNA, 304 bp, Homo sapiens
acccgaaaagaaaggaagctttagtaatgaaaggattgctgccaaaatcctgtttcccccttgcagatcttacagaaaacagccacagaatcccaaggcatcagcaccaagagagcctgtagaaactatctggtctaagctcctgaagcccagagataagaatgacttaacccaagctgcacagcctcttaacagtccactgttaaccccagaaacagatgcatttgaatctgaaaggagacaggaatcctaatcctactgctcagggacttgctgatttactttgctgtctattagcctttct

SEQ ID NO: 15642 - DNA, 291 bp, Homo sapiens
ccgggcaggtacaggtgttactatattacctgtaagaccacactcggtgtcatctcctgcaaactagtcctctcctgactcctctgtttctgtgagtgattctgcgatggcttgaggtcatccgtttgctttgaaagatcacacaccaggatacatacagagatgtgacccggatggatggacccttgcctcacaatcagggtagaagcctctggttttcttatttctttgtcctcctctgtggtgtgacacaggttcaggaggaggtacctcggccgcgaccacgctaac

SEQ ID NO: 15643 - DNA, 513 bp, Homo sapiens
ggtactggaacatttgcagctgaaggaaaatctccaaaaaagatttcaaagagactaaagtaggaatgggtgctggaaatgagcaagaagggtgagagtcccacgggtgaagggagaaagcagcagagaatgaatataagcccggagaatgaacataaatgtgaggggaagaggccagaggccaacactggaaggacagtgagggccaagaaaggaactactaatgtttctgagacctgcagggaaccatggtattaagctctcattaccagcacctaattttttagaggctggttttccaacttaagtgaaagaaattcaccctgtttttagcaattatgacgcactatatttacttctgtcacattagctgattctgtggtggactgggtaatttgaaaagctcctttgaacatgaattgtttgtaaacttacagtctagcaataagcctaatttttaaaacagaatgcttaatttctccctgtaccttgcccggcggccgctcgaaaggg

SEQ ID NO: 15644 - DNA, 664 bp, Homo sapiens
acttttctttgtctttttttttgagacggagtctcgctctatcccccatgctggagtgcagtggcgcgatctcagctcactgcaagctccgcctaccatgttcacgccattgtcttgcctcagccttccgagtagctgggactacaggcacccgctaacatgcccagctaatttttcgtgcttatagtagaaatggcgtttcaccatcttagccaggatggtctattttcttctgttggccagtcactaaattagtctctgcgaagactgtagctcagaacaaatgaatagcacaaataagtcttcagggtgggactgcctacctataggacattttaatgccatcttctttatatgtctgggacattaaaattcaaatctctgttgaaaatgaataatgtaaaacttagttgcacacaggatggaaaataagtgatgatgaaatatttggtttcatacaaacatgctttcccattctaaatagatgctagttttcttttttccttgctgtaaataaaagtgccccaggggaaaaaaatactaacttgatttaggggccctgggcgggcccacgcttagggccaattttaggccaatggcgggcgctacttagggatcctaatctggaacacaactggcgtaaaaatgggcaaagctggttccg

SEQ ID NO: 15645 - DNA, 504 bp, Homo sapiens
ggtaccattcttatctcagaatgctgtaaaccatcagtagaagcagtttagatttggactgcatggtaaaatgaaaagtaataaccctccaaccacaacctagtcagggtattaataattatatgtagcaagaaaacaaagaagaaaataatattgaaaaaatggagattccccaaccagtttcatatttgaaggatctgagttgtatttttattaaggaaattttttttctgaatactgtcttccaaaatgttaacattaaaatctgaatcagaggactctgaatggaaaagaagtttgatcactgacgcctagggctctgaagcgtgtgtggccacatggaaaagtcgaaggatgcgctgtcgaatctcctttgtcttcactccatagacaattgggttgagcacaggaggaaccagctgatagatattggccaagatgacgggcagcggagagtcacgccgcttgctaaagcgatgcaccatggacaatccaatgaaaggt

SEQ ID NO: 15646 - DNA, 737 bp, Homo sapiens
  misc_feature 457, 458: n = A,T,C or G
actattctcctcacctatagtattggactccttgaaaccaatgtgaatttacctggtattctgtgaggtgacctactgttgtttttctagaatagggagtagcaatagatgactgttcatggtgaactctaccttgtaaaacagaattatgtatttgcctgacttgcttgatcaaatggctactgtctgtcaccctgagaagaatattgaaacatagatgttcactgctacttcacttcactggctaagattcctgggtagacttcactgggctcctggtctctatttccattaagactcctttgctttgctatagcagcctgaaaaattccaagaattttaaaaagttatttttcatcttcagagaggacacattactcgatgtagagtggaggcagtcacttctgcacattctgtgctgctgaggcaatttctgctattcggtcctctgaacttnncttgggtttgttaacttctattaaaatattcatttttccagaaaagtaaagtgctactgcttctataatttggactttcctacctaaactattttaaactactcaaaactatattctgctttacaagagccttaatttaactcattgctctggttggggtcctgttttgcaagggccaaaacctgaataaaaatattgcattctaatttcaaccccaaatgtggccctaactctttctaatataataatccatgcctctggagctaaaattattggtag

SEQ ID NO: 15647 - DNA, 276 bp, Homo sapiens
ggtactactaaagaagagattactatttctggaagaaacaaggagagaggtgacagctgcttattacaggaaatgatttaccagagatcctatagcaagttaggagcggactcagggctagaaacagaatcaataaaataggtattaataataatggaagtctctgaattctcttcatttctttccttttctccttttttttctctcttcctttcttttttttttgagagggggacagggtcttgctctgtcacccaggctggagtggcacagtgt

SEQ ID NO: 15648 - DNA, 548 bp, Homo sapiens
  misc_feature 533, 536: n = A,T,C or G
ggtacctggaggtgcaaggtgtgcgccgaggaaatagagttgaagaaagcaactggggactagttttatgaccagaaagtgaatcgctttgcttaccgcacaggtagtgagataatcaggatgtccctgcgccacaaacctgcagtgagtaaaagagagacagcgggacagtccctccttcatcagacacagatgggtgacatctggccaggaagaaagatcattcaggagcggcagaaggagcccagtgtgctatttgaagtgccaaagctgaaaagtggaaagagtgcattggaagctgagagtgagagtctggatagcttcacagctgactcggatagcacctccaggagagactctctggataaatctggcctctttccagaatggaagaagatgtctgctcccaaatctcaagtggaaaaggaaactcagcctggaggtcaaaatgtggtatttgtggatgagggtgagatgatatttaagaagaacaccagaaaaatcctcaggccttcagagtaccctgcccggcnggncgctcgaaaggg

SEQ ID NO: 15649 - DNA, 507 bp, Homo sapiens
ggtacgcggggagggtagagcgagaagcaccagcaggcagtaacagccaacccttaccattgctagggcagagaactggtggagcctttctcttactcccaggacttcagcacctaagacagctccaaaacaaaccagaacagtcagctccgggggagcacgactgggcgagaggcacagaaatggacaccagaaataaggcccagctccttgtgctcctgactcttctcagtgtgctcttctcacagacttcggcatggcctctttacagggcaccttctgctctcaggttgggtgacagaataccctttgagggagcaaatgaacctgatcaagtttcattaaaagaagacattgacatgttgcaaaatgcattagctgaaaatgacacaccctattatgatgtatccagaaatgccaggcatgctgatggagttttcaccagtgacttcagtaaactcttgggtcaactttctgccaaaagtacctgcccgggcgggcggttca

SEQ ID NO: 15650 - DNA, 714 bp, Homo sapiens
ggtaccattcttatctcagaatgctgtaaaccatcagtagaagcagtttatatttggactgcatggtaaaatgaaaagtaataaccctccaaccacaacctagtcagggtattaataattatatgtagcaagaaaacaaagaagaaaataatattgaaaaaatgggggttccccaaccagtttcatatttgaaggatctgagttgtatttttattaaggaaattttttttctgaatactgtcttccaaaatgttaacattaaaatctgaatcagaggactctgaatggaaaagaagtttgatcactgacacctagggctctgaagcgtgtgtggccacatggaaaagtcgaaggatgcgctgtcgaatctcctttgtcttcactccatagacaattgggttgagcacaggaggaaccaacagatagatattggccaagatgaccgtcagcggagagtcgcgccgtttgctaaagccatgcaccatggacaatccaatgaaaggcacctcggacgggaacacgcctaagggcgtataaaaggataattgacacccgtactatgtgatctcgggttgtttctaagcttgccataaaaagggtctaggtgttttcattttgaaattggattccccttaaatttgccaaaaggttccatttcgaagaattaagttaaaaacccgttttcctaagggaaatccaaataaattattggcg

SEQ ID NO: 15651 - DNA, 819 bp, Homo sapiens
cccacgcgtccgaggcatcaaaggctgcataatgtctcctccacaggtattggtggttacttaggaccattgcctactagtgaaacaatcaacctcaacccagctttgcccttctgagcccctgaaagatcagctcgaatggtgctgggaacatggagggcgtgctgcctgcacatggacctgtgaagtagtcagggcttctgtcccacgtggctgccccaaaacctttgtgaggtactgccctctgtacagtaagccatcatagtgtacatccgtttacttttatagtaagagacagaagaagagggcacagttttaaaacaatgatatgtaaaacagtgcgaaggtatgatttcctctctgaactaagtgtgaccgtgggtaactcttggtgtgttggacacccacttgaacagccactaccctggcccagatcagaatacggcaatggcatcccgaaccactgtatggcactcagcctgcggaaggggaaagtcacagagcaatccccaagagccttgagtctgagaagtctgaggcaaacaaactcacacaggatcaatttaagtaacagagaacactgacaggggagctgttcctagacagcagtggctaccggtgctaagaacaaacacactgtacaaagccaggctttgttcaccttccctccctggtcccccaaaaggacattgtcagtaccccatcactcttccgaatggaagtctttggaaccctcaagtgattatgctttacccaatccatggcaccagtggactgtggcttggatatttttgatcggacttatcaaatggtctggag

SEQ ID NO: 15652 - DNA, 530 bp, Homo sapiens
accattcttatctcagaatgctgtaaaccatcagtagaagcagattagatttgtactgcatggtaaaatgaaaagtaataaccctccaaccacaactctagtcagggtattaataattatatgtagcaagaaaacaaataagaaaataatattgaaaaaatggagattccccaaccagtttcatatttgaaggatctgagttgtatttttattaaggaaatttttttttctgaatactgtctttcaaaatgttaacattaaaatctgaatcagaggactctgaatggaaaagaaatttgatcactgacacctagggctctgaagcgtgtgtggccacatggaaaagtctaaagatgcgctcgacaatctcctatgtcttcactccataaacaattgtgttgagcacaggaggaaccaacagatagattttggcccagatgacgggcagttgagagtcaccctccttgctaaagcgatgcacccatggacaatccaatggaaggtacttctggcgtgaccacactaagggc

SEQ ID NO: 15653 - DNA, 740 bp, Homo sapiens
accacttaatagtattgagttcatccgaactggtgaggtcgagacaggctgatctgttgtcctgttggttgatgtgatcaagagggtcatcggaatgacagctaccagtgaaatgatccacaccacagcacaggctacaactgcacatcgagttttgtgaatggaaaagcagctcattgggtgaatgatcacacagtagcggaagatgctgaaacaggtgaggaagaggatgctgctatacaggttgaaatggaagctgaagcggataaacttacacatgaaatctccaaagatccagttttcgccactggcatagtagtgaatcaagaaggggaggctggtcagatacagcaaatctgtgcaggccaggttcagcataatgatggtgctgctcttccaaggtctcattttgaaaatgtaagtggatatcactactgcattgcctggaaaatccacgaggaagataatgccataaataacagggaggtagtgcatcttgagtgggatgttttcatcaatgcaatttccaaaagcaactgcataattcgggaaatcagaagcatttgctaaataatctaatggctcaatcatgggtggcttctttcatcttgcaagaaaacaagagaattcagttttgccatattaattaaatgagcagtaactcacttgttaaggaaaacagaaaacattaatgtttgggtataaaaacacggtctacttttaaataaaaatattttaca

SEQ ID NO: 15654 - DNA, 746 bp, Homo sapiens
  misc_feature 326: n = A,T,C or G
atacctcttattccagagaagtggggagcagagaggaagatggagtggaaaggggcgaggcaaggccctcctgaaatacctcaacccaaatcttcaagaaatccccaagtcctcacagtgctttttgtggatttttgtggaaaccggtaaaaagggctgatttgctgaccccagtgggtagaaaacagagactgtcaagagaacagaagagaaggcagaaaggggatggggaagtggggttcgccatgttcacgagctcctggagccacagggccccccaagaacaacagagctgagactgggtggccttgtttcttggcccattncctgggaccaacacccctggaagacacttgagccctactcaaggaccccccacaacatcttagcattgtcggtccttaaatgccaaggtttgtgcttaccattttcaatccttaagattcttaccagggaaaacccccaccaacagcttttgtccctgcgactttgggtgagtttttgacaactggcctgggcttcccgttttggcccggtaccacttttttacaggattacttttccagaagaaatgacctttttgttgtacgggaaatcaaaaggcttaaggctcgggaggccaaagcaggtaaattacttgtaattaagagtttaaaacaacctttaccccatatgaaaaccctttttttcttacattccaaaaattacccggtgtgggggcaggtgccttattccccttcttaggg

SEQ ID NO: 15655 - DNA, 727 bp, Homo sapiens
ggtacctgaaggaacgaagaagagggatttctcaaggtgagaagcagttctccatggaccctgatgacagcacaggcaagtttcctatgactagggatcactgtccacacagagtctggcttcccaggtatccagcaggtagacaaaacagctaactccactgccactcctttctccacatccgttcctatttctcagccatctcagtgacatccgccatcttgagagtcaactactgactggactgagttgtgtggtatatgcttctgtttacttctcttctgtcttttttaagtggccaaatagcaaacgcttaaataggaaatctctgggagacttgaataaaagactttgcttggtagaaaatcatgtcacagaaaggctaatagacagcaaagtaaatcagcaagtccctgaacagtaggattaggattcctgtctcctttcagattcagatgcatctgtttctggggttaacagtggactgttaagaagctgtgcagcttgggttaagtcattcttatctctgggctgcaggagcttaaaccaaatagtctctacaggctcttttgggctgatgccttgggaatctgtggctgttttctgtaagatctgcaagggggaaacaggaatttggcagcaatcctttcattactaaagcttgctttcttttcgggtcctgccccggcggccgctccaaaaggcgaatttcaacacactggcggcc

SEQ ID NO: 15656 - DNA, 753 bp, Homo sapiens
  misc_feature 730: n = A,T,C or G
cccttagcgtggtcgcttccgaggtacagtgaaaagagccaaggctgtgtgaccccctcatcacttagccaggcgtatggtcctggtttctgaggctgcagaaagcatcttagcaatttgtgtttggatggtccatgcctgactattctaggctggaggttcctaaagagtaacaagaggaagagaaacaagaatctctgacacttgttgagaatagagcacagtcccatttgtttgaaaagagacaccaggcagccatgtttatgtgccagaaatgcattccacctcaaggaggacttaatttatggacccgtgtgtgccaggctgagctgggcaagatctttctcaggacaaactctgccatgcagctaaaagcctggaaactaaaggatttcatgtagtaaactatcttccaacccctgtagacatcagaccgcaggatgaggtttcagaaggtcataaggcaaaataaataaagcctaacaggcttacaggctgacagacctgggtcagtgcttggggcttcatcactagttttgtgacttcgggaagatgactcccggagcctcagggagcctcaggtactttatattgtaaatgaaggaattctatctactttccaaggctgttgaaaggataaaatgaaaaggggtggtaaaacccttatggcagggccggcacacaccattaaagcccaaccgggtgatgttgcacttacacatggggaatnccatcaggcaaacttaggcggct

SEQ ID NO: 15657 - DNA, 394 bp, Homo sapiens
tggggtaacaaagggcctaagcgtggttcctgtggggaaatagggtgatcctctcgaaatattccaaacaaacgtgccaacccggtaggcaataaaggggaaaagcctagggagggcctaaatgaggggacgcagacttcacattaaattggcgtggcgcttcactgcgcaggtttttcaagttcgggaaacccggtgggtgccaagtggaagaaaatgaatcggccaaaccgcccagtggaaaggcggttcagacgcataggggggctctttccgatttttatggtaaaagatattggaggggcttgggtcatatcggatgtggggaaagcggtataattttaaataaaagggggatatcatcgttattcacaggataagggtgttataccgc

SEQ ID NO: 15658 - DNA, 744 bp, Homo sapiens
ggtacatcccagctgattcagtatttccttctctttgaaaactctcacagaaactgccctataacttctactgacatctcatctcaatggctagatcagtgctatataacaaaactttctgcagtgatagaaatgttctatatctgaactatccaagatgttagctactagccacttatgactgtttagcatttaaaatgtcacttgtggaactgacaaaatcaacttttaattttacttgattttaataaatttaaatttaaatagatacatgtgtctagtggctaccacaataaatagtgcagggctagaccttaatcacatcactaccccatctgcaagaaaagctggaaaatgaaggtttggagctaaacacgttgctaccctccacaaaattatgtttttcttagtaaggaaaaacaaacaaaaatgaatataggctgggcagataacagcctctgcaaccaagggatatttgcttgctaatattccttaagcccagaggaatggagtgctaatgggtttatcacaagcatgaaaaatggtggggctgggaggatattatgtagttaaaaagccgaatcttggagctggggttcaatccaaatactttctttttacaatgaggaaactgaggcttggaggggcaactgggagacctcattatagagccattggaaaatctgctctgaaatatacagagctattaggggcttataacctcctcatgataaaagtaaaact

SEQ ID NO: 15659 - DNA, 298 bp, Homo sapiens
ggtactacagagatgccttgattccaagtatcccacttactttccacaaccaaaagttttgttccagttttcataaagctctaaatcttttggagaaacactatgtcgcacagttctaaaagcattttcaaaatcaatgtaagctatgggtcgaacttgatccggtgttatggtagcaatgtcagcagtttgtaagctgcgaataggaccaatagaagcctccctgcaaagctgtgtcatgtctgctcctgaaaacgcatcagactgatttacctgtccgggctgcccttcgaaaggg

SEQ ID NO: 15660 - DNA, 321 bp, Homo sapiens
  misc_feature 321: n = A,T,C or G
ggtacccgaaaagaaaggaagctttagtaatgaaaggattgctgccaaaatcctgtttcccccttgcagatcttacagaaaacagccacagaatcccaaggcatcagcaccaagagagcctgtagaaactatctggtctaagctcctgaagcccagagataagaatgacttaacccaagctgcacagcctcttaacagtccactgttaacccccagaaacagatgcttttgaatctgaaaggagacaggaatcctaatcctactgctcagggacttgctgatttactttgctggctattagcctttctgtgacatgatttn

SEQ ID NO: 15661 - DNA, 709 bp, Homo sapiens
  misc_feature 425: n = A,T,C or G
accattagctacagtgatcttagcttccttgcttacaattgttcagtgggtcatctaaattcttccatgtcctgagcatgatctacaaacattgtctagcttctgtctctccgtcttcccgccatcattgtgctgtagccatatggaactcctttcagttctctgaccatgccctttcctgcctcagatttcagcttaaattttgcctcctcagagagatgccttcccaaactccccatctgaagctggcctctgccttttactccctatcatgtcactctctgctcaccatccttatcacaatgtctatttgatttgtttgctagtttactgtcttcacaacataatgtccgtttgtgcaagggtcttatttttcttattcatgtctgtatctcaagggtctagcacaatgcttgatgcatatngtgtgaataaatactttgttgccaaatccgggaaaaactctagttcttgttcactggctggcaggattgacattggatattctctgagatcctttttttttttgctcttcacatatcacactataatctcttaattctccgccccttgctctaaccgtctgtaagggtggggtccctaagtctacctagggcatcatttcttcatctgatatttttccctagggtcttcccaacacaaggacttccattggtttttgaattaaactccctttgactggttcctt

SEQ ID NO: 15662 - DNA, 727 bp, Homo sapiens
acccgaaaatagtgtttctgtcattcaggcaagattctagctttgccttttccctacttcccattttctacctcagaaacagaaattggaatatgagagggtggagaatcgctttagaggaactgaaacggagtttgtaagttgaatggtttctagcccatgtgtaaacctgggtgcggtgtgagaggagctctgcacgactccacggaagggaacccagtgagttgtagctatagtttcctaattgatttagaggtgacagcgtaaacaatggctctaaaaaaaggtgaaactccatttaccaaaaccaaatttgacactagctcccaaagctaacttgttaatacagatttatcttaggctagtgaagtggcactaaatttgaaactgagagtcttgggtgctgtcttttatctgtcttggggcttactgaatggtcacaaataagtcaagtgacctcttcatgttccagttccttttcagtaatgggactaaccattagaaaaaatagtattggcctaaaatgctgatctctttcctttgacccttgaaacctccaagaacttcaggtaggggcttcctcaacctagtgagatttgtaggtggtagaatcttacttatcacccctgactttcttccttttccctcctaaggaaaataaccagcaggttagccaattgagccatattagtgctaaagtttataggcaggggaggtaataacaacc

SEQ ID NO: 15663 - DNA, 752 bp, Homo sapiens
acagtgaaaagagccaaggctgtgtgaccccctcatcacttagccaggcgtatggtcctggtttctgaggctgccagaaagcatcttagcaatttgtgtttggatggtccatgcctgactattctaggctggaggttcctaaagagtaacaagaggaagagaaacaagaatctctgacacttgttgagaatagagcacagtcccatttgtttgaaaagagacaccaggtagccatgtttatgtgccagaaatgcattccacctcaaggaggacttaatttatggacccgtgtgtgccaagctgagctgggcaagatctttctcaggacaaactctgccatgcagctaaaagcctggaaactaaaggatttcatgtagtaaactatcttccaacccctgtaggcatcagaccacaagatgaggtttcagaaggtcataaggcagaatagttaagcctacagggcttacagtctgacagacctgggttcaattcttgggtcttcatcactaggtttgtgactttcggaaaaagactcccggaacctcaatgagcctcaattactttatattgtaatgaaataatactatcttcttcacgaggctgttgaagggattaaatggagaatgggtgtaaaaacctttatgcagtgccgcgcacacaccgtaaatgcccgaactgtggatgttgcacttcaccaagtggaattccaataggcggagcttgggaggcaaattaatcaggattttgaaggg

SEQ ID NO: 15664 - DNA, 684 bp, Homo sapiens
  misc_feature 648: n = A,T,C or G
acgtccccgcggtgacgcccgaggtacaattggttcattccacagtttaaactaactggagctcctaaaagcagcagacaggaactgaatgaaaacccctgcgctgactgacttgtataatctagtggcctagcctggaagcctcatttttgtcacctgtaaaaggagattgtaagaggatgggtataaggagcttcataaacctggatgagatatttgagggggagggaacaatacttaccctcaaagctattaagaggcaggagatgggaatattccacaaagccacttctacaaacacgggagcctgttgagtcccagaagggacagtggttggtggcttccagacatgctgtgtcctcaagaatccaacaagcatcttcttcatcctggtcctgcccccagctgagtccagcgttaaaatgtcttaaaggacttctagggtcctgtgggctccaaaccagcctgggatggaggaagaaaagggacaaaaatattactgatatattatcagaatacaaaactaggcccgggcctgctggctcatacctataatcacaacacttttgggaagccaaagtgggcagaattgcttgagccctggcaataaagtgacacccctaactctggaaaaaaaaacaaaaaaanataaaaggtcttgccgggccggccgtttaaaataag

SEQ ID NO: 15665 - DNA, 805 bp, Homo sapiens
aggtactgcatacattattgcttgtgcattagcttatgtatttgaatcacagaaattgccatcactgaatattgctatagaacatttaaatgggccacttgcagtgtctcatgcctgaatacattggaggctgaggcacgaggacagtttgaggccacgaggttgagactagcctggacaacataaggagatgcctgtctctacaaaaacataaaaataaatcagctggtatcaagcacagttccatggacatattaaaatctttttaaaaagtaaaaataggctgggtgtgacggttcatgcctgaaatcctaacactgagggacgccaaggtaggcgcatcacctgcagtcaagtgatccagaccagccttcccaatatggtgaaaccccgtctctactaatgctacaaaaattacccgtgggcggtgtccggcccctgtaagaccagctactcaagaggctgacacatgagtattgcttgaacccaacaagtggaagctgcagagagccgagatcgcaccactgcacttcagcctgggcagcaaagtgagaatctgtcttaaaaaataaattaatttaatcaaattaattaactggggtgtgggtgattgagactgggtcgcaactacttgggaggctgcagtggaggatcaccttaggacaaaaaggcagggctgcttagctgggaacgcagtacttgggaacgggccccccgtcaagttaacttgttagggctttattaatctgaagaccaaagatgaaagggcatttgagcattggcaaaacggtcctattaattttgt

SEQ ID NO: 15666 - DNA, 249 bp, Homo sapiens
ctgggcaggtacgcgggggccgcgggacgccaggaggcggaggcggagtggagttagattaaatgccttaatggataaagaaaaattggatgttaagattgaatattgtaactatgcaatggattcctcagtggaaaacatgtatgtaaacaaagtgtgggttcaatgtgagaatgaaaattgtttgaaatggagattgttatcaagtgaggattcagccaaggttgatcatgatgaaccatggtacct

SEQ ID NO: 15667 - DNA, 773 bp, Homo sapiens
ggatcttcggcaagactcacgtctccaacaaccaagctccccaaagtcctgacctcaagcaatccgcctgcctaggcctcgcaaagtgctgggattacaggagtgagccaccgtgcccagccaaaaagattttggaagagtgaatgaatacaaggatttccactagactgagaattagtttgtcaacagcatttcagtgtcttgagaagtgtttacatttggcgtggacaaagctggcagatgacgtagaaagtaaaaagttgcctcttcaaagtttcccttcttgttaaagaataaatcataaatgttagaaacaatagtttcttttaaaggactacttacttcaagcctccttgctttgggctaataactctgttaagccctattgtatgtaactgcgggacatgcttacaagcccaggcccgtttcaaattacagcctgtttaccaaatcggggatgaggttaagatattgagggtcagccccacccaacgggttcaggacacagctgtttaggacaacccaaagggcgttagggacaaaaattggctggctttttcttttgtcaagaattgtttttaccattgtttcttttggaattgagcacccttttttgataaaaaaaaaattgcctgctgaaaaaatttttgtgatcaatggtgcattttttttggggtcccaaattttttttttttaaacattaaagggttttttttgcttgagttggcaccaaaattattccaattaatattttttgtagaaccaaattaccc

SEQ ID NO: 15668 - DNA, 771 bp, Homo sapiens
ccgggcaggtacttttatttctaaaaacatctgccaaataaaaccaaccaaaactcattattttcaccattaccaagagctagctctattaaatttatatcaacaagttaatctgtctctatatagggaaggtttccgcaaactaaaatctaaacctaacttttgtagacagggattatggtaggaatttggtattacaactaaaccagccagctaaggagtgaacctaagaaaaaatatattgcatatccttattgacagaatcacagttagatgctgcactaaaaccctaaatggtatatctctcagcccacgtaaaatttcagctcaagaagttcacaaatagaaacagataataatgttcaaatattacttaagagtgattacacttaagtcaaacatgggaaagaatagcaaatacaaaccccaaggaaaaatgagattatggtgatttccaaatgcagtttctatagattaggcagaggtaatcattttaaagtgattcattcagctacccagactctggaaaacaagtcggggatgaagcaaagctcttaatctgaagaaataaaaaaattgtggcctttggtgacaagatgggcatttcagtaaatttttttaatgactttaatgattcttatttaagaaaaagcccttaaataatgctaccaaggcagttatatttgacctatgaaccagaccaaataccccttaattttaagataataaaccttgctgaaaagctcttttacaattgcacatgtacctggg

SEQ ID NO: 15669 - DNA, 307 bp, Homo sapiens
aggtacatggttaacaggcagcttgtgcccaatcccaaagcgggaagaaaggcctggctttggctcactgatgataaagtctcctcccactgcctttcagcagctctgccgaagagctgatcaagatgctgcaaacccagcttccccagaccggccaagagggaagaatgatgagcgtgttttaaattacaaagagggagcagcgcaggcagtttctggtctgggtgataaattgaaatccataaatatagcagtgctaatttgaagttctgtaattgtttgtgccatgagaatgtgtacctgcccg

SEQ ID NO: 15670 - DNA, 476 bp, Homo sapiens
aggtacttgacaggaaatctcacacttgtgaattcagagctcgtgagcataaaattgctcttctaatcacttgcttttatttgctgatctttattggtgcattttattggtcaggatgtgattgagattatgtaataaacccaactgactgcttcttttaacttctgctattgaagtaatccctcagattactgtcttgagagacggagagtgcacacagtccaacagtgtgcactcttcctctgtaaagacagtagaaaggtatccatcttgttttaaatagtagcagggaggtttatcaatggcttaacatggtaggctgggcctggagagctctcaatgtaacagagctcaaatgtggcatttacatgaattctaagttgattaagcgacacaatttgttcaactataaaacataatacattcttaatagattttacctattattgtatatgtaagttcctagtacctgcccg

SEQ ID NO: 15671 - DNA, 195 bp, Homo sapiens
aggtacatttcctaagccggaacactcaagcttttttcagggtgtttggctcttgcagcaaaacaattgagatgctaacagggaggattacagtgtttacagaacaaccttcagcgccgacctggaatggtaactttttccctcctcagatgaccttacttccactgcctccacaaagaccttcttaccatgacc

SEQ ID NO: 15672 - DNA, 540 bp, Homo sapiens
  misc_feature 66, 509: n = A,T,C or G
tgggcggcgtatacgactactatacggcgattcgactcctatacggcgagtcggacctccaccgcngtggccgtatcatgctcatgtactgaacactaatgcactaagagtaattgtgaaagcttcagattgcgctattttgaactatatatctggatgatatattcatatatgcttgaataacttataagcaattgaaactttcaattacagtatactattgaagcaaatcaactaatatatacacatatccattagcaatagtagataatttttgtaaatgtccagcacagttcttcatatgtagaggatgttcaaattggctaagttccttttctctcttaattattagtatttttcctactgctctttgtataattattccttcctctttagctccaatccttacaatctattcttaacatagcaactggaagaaagtttttaaacataaaccagatgatgtcactccaccccacaaaacttgcactattctctgtcacacgtangaacaagattcaaaaaagacgatgggttcct

SEQ ID NO: 15673 - DNA, 116 bp, Homo sapiens
aggtacctagaagagctccctgcaagtgtaaatattaaggatgacctgtgcaaaattatacccacaccagcactagtggtaattattctaaattattgtcaaaaagttttttttaa

SEQ ID NO: 15674 - DNA, 476 bp, Homo sapiens
aggtacttgacaggaaatctcacacttgtgaattcagagctcgtgagcataaaattgctcttctaatcacttgcttttatttgctgatctttattggtgcattttattggtcaggatgtgattgagattatgtaataaacccaactgactgcttcttttaacttctgctattgaagtaatccctcagattactgtcttgagagacggagagtgcacacagtccaacagtgtgcactcttcctctttaaagacagtagaaaggtatccatcttgttttaaatagtagcagggaggtttatcaatggcttaacatggtaggctgggcctggagagctctcaatgtaacagagctcaaatgtggcatttacatgaattctaagttgattaagcgacacaatttgttcaactataaaacataatacattcttaatagattttacctattattgtatatgtaagttcctagtacctgcccg

SEQ ID NO: 15675 - DNA, 571 bp, Homo sapiens
aggtactgatgggatttatgctcaatagaattaaccaggaagcaacccctggagatatagttgaaaaattgggagctgatgcaaaaattctttcaaatgttatctcaaaaagcacgagaccaaatactcttgatattgggaagccacctttaagatcaaaaagagacagtctagaaaaggaatctagtgatgatgatacaccttttgatggttctaactatttggcagataaagtggattctcctggtatttttgacttagaagacttagacagtgaaacagatgtatcaaaagcaggatgtgttgctacacaaaatcccaagaggattcaacgtatgaacagcagcttttcagtaaaaccttttgaaaaaactgatgtcgcaacaggaattgatcccctctctcttttgggtgctgagactgaacagcagcaaaaagaagaagaggaggaaggatgaagatgatagcaaaggcattttaacaccatctgctaggcgtgaatttagctgaagaaattgggatgtatatgaaataacatgagcagtccttttgacaaagtcgtacctggccg

SEQ ID NO: 15676 - DNA, 333 bp, Homo sapiens
cgaggtactgataggcgcccgtctttggttgccacggaaatgtcaagatgctgggatacagggtgatcgggatgtgaatttccacctcctgctggttccacacaggcacctgtagtatgtggacccctccatcctggtccaccacagaggtgagggccgcgtcaatggccgtctgtcccctctttagtgccctgatgcgatggtatgacccattctgggaggacgagagcacctcgaagaactcagcaggaagcacagtttcaattcggatgttgtcagatacatagaccttgttgctgaacttgtcaaaaacttcgatggtgatttcataca

SEQ ID NO: 15677 - DNA, 237 bp, Homo sapiens
ccaggccaggagccaggcgcgatgtcaggcgctggccgaccgcgaccagcagcaggtcgccgaaatggtggccgagggcgtcgttggtttcggcaaaatggtcgaggtcgaccagggccagcaccgcgcccgcgcggcccgggccggccaggatggcctcgagcagctcgaccatgcgggtgcggttcggcaggccggtgagcggatcgtggaaggccgacttgttcaggctggtga

SEQ ID NO: 15678 - DNA, 580 bp, Homo sapiens
  misc_feature 37, 570: n = A,T,C or G
agcctccaccgcggtggcggccgagtacctttaaagnaagacccttggaagtcttctataccttcttctccttccccatctcactccaccccactttgtccctgatgtcttggggaaggtgtagaacaccctagcagttcctattgtatatacttgggagccactgagaacagaggacggccagtgagtccaagcctcgttcctccttctgcctccccggagccacaggatggatttaggagccactgctcagtgcacttctcccttccaactgcatcaactaactctcgggggtgttctgctcaccacaccgtccttcgattcttactgagtcacagactcgcctgcccactacgtgtcctgggttctctctactcagatcccttccagaaactttatatgggtagaggaagccagggcggcaaatgcgagaccaaatatcattttgccaatgagtctgaggctgtggtctctggatccagtcattatgtttttatagaataattaaaccggatgctaacggtggttttaaaaaaataataataaaacaacttgtttcctttttggccnccccccagga

SEQ ID NO: 15679 - DNA, 544 bp, Homo sapiens
  misc_feature 29: n = A,T,C or G
acaacagatgcaaccgtaagacacacagnagcccgcccactgcggggcagcaggaccgagcccagagccctcgggggtttcgtgcgtgacgaagggtctttcactcaagtaaaatggcagcgtcctccttcctcttgaaaacatggggacaaaaagggaccaggatcttcccagcaatcggcatcctcatcgccctctggactgcttggagcccgcccacctgtgcttttaactcatacctgagaaacacggctggtgttttacttagatttttaaatttaaaatgtctaatggaagataaagacttaccttccccaggctaacgcttaaagaatctcaattaactcaaaactaatgtcagagggaatggatgtgataagagaatcttacattacatctaacaaaaaaagtaacaaacatgcaataaaatggacatttggatcagtaagcaatcttcatactgtgttcgctcagcagcccggggcccttcctctctagacgtgtcaggagccacagtcttctcaggaggagggtgcggggccgg

SEQ ID NO: 15680 - DNA, 488 bp, Homo sapiens
  misc_feature 68, 425, 426, 435, 437, 439, 440, 446: n = A,T,C or G
actgcagaataacacctataagataagctttcaaagtgactgtgttaagcagccttcattctccaagnaaaaccactttgtgccttcttttctcaaaacctcacacaacttcctccccctcaccattagcttactagtatttcactgcaaaaataagtcctcagaaacctgcatcataatcccgccaaatctcccaatcacccccattagtctcatctagtctgccttccctagttagtattgataaactctgtgtgttcccatctaaagctaacttttctgcctgtgatttggatattgtctcttttcagtagtttaaagatacttaaactgcttctgcatttatcccctatctctcctgcagcattaacctgtctctactagatcattctcacattccaaaattgctgtaatatctcccattnnaaaaaaaananannaaaaanaaaaaaagcttactgattgcagcccatggcaacagcctccgg

SEQ ID NO: 15681 - DNA, 472 bp, Homo sapiens
  misc_feature 22, 25, 26, 29, 30, 35, 38, 43, 44, 45, 47, 51, 65: n = A,T,C or G
agctgtttcctgtgtggaaaanaanngcnncaccncgngggcnnncntccngcctggtactatantatttgagacaatttaagtgatctcatgagggaaatatatttgaagttcatccagtataaaaaatttcccataaaaacacacttacactttatagccattttatagggtgttagaagaattagaatggcagaataaaaatttccaagagctttctttaagtctccaagcaataaaagcaatacagagagaaataaaaagaaaatgttaaagtagtaattgctgcatatttattcataatttcaaattgtatggcttaatcccaaacatctcaaatgcgaaatattttaacacatgactgcacaagagacatcatccaagctcagatacaagaacacagaagagtttgtaaacttcttaccagcacttgatattctgcgctctccctcccattccagctgttcccttt

SEQ ID NO: 15682 - DNA, 296 bp, Homo sapiens
  misc_feature 93, 172, 213, 223, 236, 268: n = A,T,C or G
tgaagattcctgcaggaaaggaggctgcctctgacaccacaaccccacccagctttctctatgttggaagacagggtggccacagataagcantagaaggctaagggggaatcagaacagcatcagcaccaggctgagtccctcatatgtgcttcttcccacctcccaccangcatatccttacatcctggtccatgcctgggaagggcccangaagcctcangccagactagcanagcctcctccacttacaggccaagactcccancactgctgctgttctgctggtctcactg

SEQ ID NO: 15683 - DNA, 412 bp, Homo sapiens
ggcgggcgcccctcccgcagcctcgctgccgccttgcaggttgatctcagactgctgtgctagcaatcagtgagactccgtgggcgtaggactctccaagccagtgagatgaactcggtatctcagatggaaatgcagaaatcaccgtcttctccatcgctcacgctgggagctgtagaccggagctgttcctattcggccatctttgctcctccctgcaactaactccattcttaattgaagctgcacacatacatgtaagagaagcaaaaatgtcagatgatatcaggaaaaggtttgaatttccaaattctcttatccaatcacaggctgtgggtcatcttattgctgcagtcctaaaggaaaatggtttttcagaaaagattcaccaatctacaaatcagactcctgc

SEQ ID NO: 15684 - DNA, 608 bp, Homo sapiens
  misc_feature 504, 545, 552, 554, 589, 591: n = A,T,C or G
tacagccctgagctgcatcatttaaagaccaattgttaaggaccaatctgagggcctgtgcattagttaaaactccttatctggtcatagagggtggtgtggtttggacgcgttccccttgtctgtgcaattcccaacagaggcaagtgcgcatttgagacaggttgagggttcaagctgtccaatccctgctcatctgcagcacaccaaggaatgtggactaatgaaaaataaactgcatgcatgcaatgcccatcacactgcctgcattttctaatcttcacaataactctgtgttgagaaatattcctgtctgtaatcccggcactttgggaggctgaagcgggcagatcacctgaggtcaggagtttgagaccagcctggccaacatggtgaactccccccaaccaacgacccttcccatatctactaaaaatacaaaaattagctgggcatggtggtggggacctataatcccagctactttggaggctgatgcagcanagtctgttgaacccagaaggcagaggttgcagtgagccaanacagtgncnctgggttccagcctgggcaacaagagtggaaactntntcccaaaaaaaaaaaaa

SEQ ID NO: 15685 - DNA, 268 bp, Homo sapiens
  misc_feature 6: n = A,T,C or G
tcaatnatttagcttaagaaaaaaagggataactacaaactcattaatttgacttatatgttcttaaaaggtatggagctatattttacttatttaaaaaatctgtttatattctgccttaacaagatggagctacattttagtctttatttcatagtaattaacatcttgctttcactgcaaaaatcaacttttaccaattcataatcgtttactattcaaaacaacctattttaacacacatactcactaagtaaaatataaccca

SEQ ID NO: 15686 - DNA, 430 bp, Homo sapiens
tgggtttgaatagtgctcctcatggttagaacaacagcaaaaccttgaggcacatcactagtctcacttccctccatgtctccatcctgaagacttggaaatatcctccatctaaagtcataggaagagtaaatgagctttaactgtaaatcagtgagaaaagccccaaaatttgttttgtttgttgtttttcttaactactgattcaagcttcgacccagagcaattgtcagaactgctgaaatacaacctggatctcagtagttttttaatcatctgggtgattctgaaataatccttgatttggatattccaaccaacgtgaaaaagacgtccttgtagatgctccctaagtatgagcttccaactccttctttctcacagttcccatttttccaaattacagaaaaattccttccttgccctctgt

SEQ ID NO: 15687 - DNA, 429 bp, Homo sapiens
ccgcggtggcggccgaggtactaagcccagccaaggaactacaccttctcgctgaaggaggcgcctccggcttcccattggcagagctgaacggcggcgtgagtgctccggtgctttggggccatgattaggcaaataagagtggcttgaacatggcactgtgatatggtgatgggggatgtgggaaccacaccggctgctaagtgatcaacaggtggtggcatgaatagcctggacacgctggacaaaggttatgtcttatgaagtcaaatggtcaatttcctgatgctcatgtgcctttgggcttccccaaacaccaccactccctgagcagagacgcgcctaacagagagtcaaccgttattttatgccaaagcgaaaggcgtatcacagagggcttgggccttagtatccaatatccccaaagct

SEQ ID NO: 15688 - DNA, 384 bp, Homo sapiens
  misc_feature 368, 369, 370, 371, 373: n = A,T,C or G
agtacttctagaattaattaaggcgggcactctagaatactaatggaaaggacataaattggcacaaactgtttagaaaaaaatattggtaatattcagagctttagaaatatttttcctttatgtcaatagttttgtttctagaaaaccatccaaagaaaataatcataaatatacacaaagattattcataaggatattcctgtttttataataataaaacattggtgtcttagaaatgtaacagactggatgcagtgactcacgcctataatcccagcactttcggaaggctgaggcaggcagattgctggagctcaggagttcaagagcagcctgggtaacgtggtaaaacgccatctctaccnnnnanaaaaaaaaaaa

SEQ ID NO: 15689 - DNA, 260 bp, Homo sapiens
accttcatttctatctgcccaggaggccagccgcttcctgcatagcatttccttcctgcagtatgggaaggaccaggctttctcagaccacagaatcttgagagccatttccacgtggagcaagtggtggctaccagccttgggtctacataactagggcctcatccctggcccaagaatcctgctccacagccttcttgtgtccctgtaggaggagaaacacctggcaacttaaattttttaaaataactttttttttt

SEQ ID NO: 15690 - DNA, 302 bp, Homo sapiens
  misc_feature 4, 5, 6, 19, 21, 24, 32, 37, 48, 56, 74, 84, 107, 118, 133,135, 140, 142, 143, 152, 167, 176, 179, 180, 182, 184, 185,187, 190, 191, 192, 193, 194, 201, 205, 207, 211, 214, 219,221, 223, 236, 237, 240, 241, 243, 244, 246, 247, 249: n = A,T,C or G
  misc_feature 251, 252, 253, 254, 255, 256, 257, 258, 261, 262, 263, 264,265, 266, 268, 273, 274, 275, 301: n = A,T,C or G
tcgnnncgggcaggtacangntgntctgccgngcggnctgcgggttgntggagttnaaaagcactttgtcgcanccagtttgtnattgccccagttttgagatctanagggggaggtnctttttttccctcgncnacttnanngaactggtnttccaccttccaccncatactttnttnnantnnanatnnnnnattgggngggngncttntgnttttngntngggggggcttttnnccnntnngnncntnnnnnnnnctnnnnnntnggggnnngaccacctttttttccaggggcattnt

SEQ ID NO: 15691 - DNA, 485 bp, Homo sapiens
  misc_feature 26: n = A,T,C or G
caccgcgggggcggccgttcatcatnagaattagccttttcctcctcagatagctgttgtctctcatcatcggaaagctgaggcctctcctcatcatctgtgttctgcattttctcatcatcgtcagaattctgcagcttatcttcatcagatccttgtgccctctcctcatcatcagaattttgtatcttttcatcatctgactggtcacttttatcttctctgccccatttttcatcatctgaatgtgctttttcagaaccttctgcttctgaatgatggctccctccatccgatctatgaccttcgtcttcatcatcattaggggcttctgatccactgtgctgatctacatctgaggggtcattgtcctcatggtcagaacgctcagaagcttctgatctattgtctgatctttcagagtgattatcactaccactatgatgtgaagctccctcgtcctcactgtcatctccaaacagttc

SEQ ID NO: 15692 - DNA, 397 bp, Homo sapiens
attggagctccccgcggtggcggccgaggtacaggcgtagtccaagaacagcagagggagttcttgctgcccgaactgtttccatctcagtccagattatcagagcctgtggtctgcaagcagcagccaaggctttggctgaacgggaacccgctctacagtttagtgccacagtcggggtcaatgcctctgtcaccactcatctctccttcctgccccagggagaacagcgccgaacccaccctgtggcctgttctttctgccctgagttctcccatcacgttgagttcacatgtaacttggtgactcagcactgtagtggagagtcctgtttcctagcagagttgttggagtttgcagaagttatttttgctgtctatcatgaaaataccaagtc

SEQ ID NO: 15693 - DNA, 378 bp, Homo sapiens
acaaggaggcagctaaccactgtgccctgctgcaggagcatgcacagcggtgctatgtccgtgggctattccgcagcttgcagcaagcacagagtgtgacctcccaggatttgctgacagcggtagatgcctgtgaggagctactacaagaaatagacatcacctcatttctccttgcattgtgtggccacacttggggtttgcctcatgcacccccaagtcctggtcctctcagccctgggcccttcagcagcagcatggaggagggtgctgaacctcgggaacgagctatcctagcttctgaatccagcatagagaccgaggacctaagcgagcctgagtttcagagcacccgtgtccctggcattccagaccctg

SEQ ID NO: 15694 - DNA, 312 bp, Homo sapiens
tccccagttgagtcccccttctgaggacaagtttgaaactgggaaggagacaccccctggttccgccagcacctatcccactgatagtgatcccctggcctccccgagcctccttaggcaatggccactggtttgtagacagagagtttcttgcagccttgaaaattttattccctaagtggggacagctctggtattactgcttctttaatttgttccacaaaaattatgctgaaatggacctgaatcagccctgggtgtgcttctgttggcgcctgctgctgaggcccggcctgcccatcggcctgtagt

SEQ ID NO: 15695 - DNA, 433 bp, Homo sapiens
acccgggatgcccgttaactaaaagctttgcagaaataagaagtggctgctcctgttagagcggcttgactagctggtccactccgggcctcagtctggggggctggcgggcaggttgcagcctctccgcgatcagtgcgccttggattccattggatctcttagtctggccctcatttttcaagctaacagaaactttctgttgtgacttttggcgtatgctacctgggaggaaacgcagtatttgtgtttggaatttgcccccattagacgataaagcacaaagccttctaaataaaatgcggtcccacggccagctgttcagaggatcttgacgctcttccttgggtgacggacccaggagagttcatcctgcaggaacccgtggcctcaggctttccaggagggaggttagagaaagggaaggagccca

SEQ ID NO: 15696 - DNA, 424 bp, Homo sapiens
ccgcggtggcggcccgaggtgggaaaaagaaaaaggagaaggggagacaggaaggagaagaaaaacaaaagcgagaaaaagagctgaaaatgggacaacaagaaagattcctttttaaggaaaatgaataaactacctgtcaaaataagtataacatccttttcattctggaattttaggaatggttgccttcccttccaaaaattccccatccagttatcataaagcgaattatctgacacctatacacattacatactaaagtatttattgaatgagcaaggaccaccagtcaacaagctctacctatatacaacatttccaatcagtctatctattctctcacattaaaataccgtctagacaggccaggtgtggtggctcatgcctgtctgtaatcccagcactttgggaggccgaggcc

SEQ ID NO: 15697 - DNA, 426 bp, Homo sapiens
acactaagtcagcaggttgatgaaaagtgttctttcttagaaaccaagcttcagggcattgggcatttccagaataccattcgagaaatgttttctcagttcgcagagtttgatgatgaactggatagcatggctccagtggggagagatgcagaaacattgcaaaagcaaaaggaaactataaaagcctttctaaagaaactagaagccctcatagcaagcaatgacaatgccaataaaacctgcaagatgatgttagccacagaagaaacctctcctgaccttgttggaatcaaaaggggacttggaggccttaagcaaacaatgcaacaagttactggaccgagcccaagccagagaagagcaggttgaagggacaattaagcgccttgaagaattttacagcaaattgaaagaattttctat

SEQ ID NO: 15698 - DNA, 415 bp, Homo sapiens
  misc_feature 7, 15, 56, 58, 81, 310, 359: n = A,T,C or G
actgaanccacctanttccctgctgggtcaagccaggctgggcagtgccagccttnantggcatcttgacctgccctcctnagcccaggtgccctggttccacaggccaacccatagaaccactctggaaataaaggagaaaatggaaggagaggtatgggagcttggatgaggggtaggaatgggatccattctctgaggcttataaaagcctctgaggagggaatggctctgaaggggaaaatgaatctgtggggtttgaaaaggaagttttcctgcctgtcttgtatttggtccagtgaagtatganacaggcacacaaggagtggacagtggtgtaggggccctgggagtctaanacttaccttgccccctgaccatctgatcctcccttgcaaaggccacctgacgtgaa

SEQ ID NO: 15699 - DNA, 666 bp, Homo sapiens
  misc_feature 411, 412, 413, 417, 441, 446, 447, 448, 467, 490, 494, 496,502, 503, 515, 530, 546, 559, 560, 572, 583, 605, 606, 625,637, 640: n = A,T,C or G
accaaaacacatatatagaccaatgaaacagaacagaggcctcagaaataacaccacacatctataaccatctaatctttgacaaatctaacaaaaacaagcaatggggaaaggattccctatttaataaacagtgttgggaaaactggctagccatatgcagaaaactaaaactggaccccttcctcacaccttattaaaaaattaactcaagatagattaaagacttaaacgtaagacctaaaatcataaaaactctagaagaaaacctaggcaataccattcaggacataggcatgggcaaacacttcatgactaaaacaccaaaagcaatggcaacaaaagccaaaattgacaaatgggatctaattaaactaaggagcttttgcacagcaaaagaaaagttttttnnngagnggaacagggcccccctacaaaatngggannnaaaaatttttttgcaattntattcccatttggacaaaagggncttntnttcccnngaaatttttccnagggggacctttaanccaattttttccgggnaataggaaaccannccccaagggggnttaataattcncaagaaattctaccagggggannctttaaccaaaatttttcnaagggaaaaaanacnccaacccaccccccttttaaaaaaaa

SEQ ID NO: 15700 - DNA, 412 bp, Homo sapiens
acataaattatatatccagttccctattaccacctgtggtggaagcagagcctttgctagaaatggtcatgtggtatagcagagacccatacctgccaccacacccggctaatttttgtatttttagtagaggcaggattgcactatgatagccaggctggtctcgaactcctgacctcaggtgatccacctgcctcagcctcccaaagtgctgggattaaaggcgtgagccaccgtgcccggccccagagacccatggcactgggctccttggtcggaaggttcttgtgtcccaagtgtgatgaacaagacagctgccaatgtcaagggaccatgaagacctggccagtagcatcttaacagaaactagacaggttaaaaaacaaaacaaaacaacaacaacaaaaaaaca

SEQ ID NO: 15701 - DNA, 230 bp, Homo sapiens
acagcgttcggagcagatacagagggttctcagtggataattggctaccccttacaaaaagtcatcagtaacctctcagtctggagtagtgagcaggaccttgcaaatgacactgtgcagctccttgtcactttggtggaaagaagagaaagggcaaacttagtaattcaatgtgagaactggtggaatttagctaagcagtttgcaagccgaagcccacctcttaattt

SEQ ID NO: 15702 - DNA, 422 bp, Homo sapiens
  misc_feature 366: n = A,T,C or G
gcgccggtgcggctgccggcgcaacgtcggtcgtcaccggcggcgtttcctgcgccagcgcgccgcccgccacccctgccgccatccaggcgcccgccagcagcgcgccgcgcacggcgcgcgccgccgccttcaacttcatattcatcaattgtccctatgaaaccacgtaaatatcgaggagtgtaatcgcgcggcgagcagtaatgacaactattggcgcgggaaacgagggatgttgcgaatctgatacgcggacgatggcaatccggcccggcattccttttggagaaataatgaattgcggattgcgccgattccctgcctttgcataattcatgagaatggtgccacgatgaacgcggncagcgcgccgccagcccgggaggaacgcagcatgacgacttcggtttaccacgacg

SEQ ID NO: 15703 - DNA, 463 bp, Homo sapiens
  misc_feature 455: n = A,T,C or G
tgaaaatctcgcgcttgccgcagatcaggatggcgcgcacggcgtcgtcggtctcggccgccaccagcgcgtcggccagggtctggtacatggcgcccgtgatcgcattcttgcgttccaggcggttgaattccagggtcaggatgccctcgctcttgctgcacaaaatatccatgtcgtctccaaaaagataaagggcgccggggtaatcccgcagcgccctgttttattgctttagcccgccaaacttatacgcgctcgaaaatgcctgccgcgcccatgccggcgcccacgcacatcgtgaccatgccgtacttctgcttggtgcgctgcagcgcgtggatcacggtggcggcgcggatggcgccggtggcgcccagcgggtggcccagggcgatcgcgccgcccatcgggttgaccttcgacgggtccaggtccaggtcgccgatgacggncagggctt

SEQ ID NO: 15704 - DNA, 863 bp, Homo sapiens
  misc_feature 256, 390, 391, 428, 439, 441, 474, 514, 568, 581, 600, 607,658, 662, 669, 678, 703, 720, 730, 744, 754, 762, 765, 769,783, 785, 786, 787, 788, 791, 793, 794, 795, 796, 797, 798,803, 805, 813, 815, 818, 819, 820, 823, 829, 831, 835: n = A,T,C or G
  misc_feature 842, 849, 854: n = A,T,C or G
agctgggcgaggccaaccatgccagcccctcgctccacaccccaccggcttccatcctgaaaggtaatacacacatgcacacacacaccaaattcctgtgtgggtttctttgttagaaagatcatcccactctgaaagatgggggccaatgggaaacagtctgctggctcatggctggacccgctgagagagatggtctgcctcccatccccatttccatctggacagtgctgcctgctaactcggatcatgtcanaatggtggaagagtctctatccccacagggctcagggacccttcctcacctcacaggcccaagggacatgaccgcctgccatgtgcattcgctcactcatcaaacagaaccaggaaatgaggtctcactgtgcnnagccgagtttcgtgggaagagcccgaaacacactatnacacatgcctntntgaggtccacagcagcccactgtcgttttctanaaaatctgatcaaaaagactcccctgcttaacacactttncagggactttcccatcacaccgggtaagggtccaaagcccttcgccaaaaaganggtggtaccctgnccgggccgggcggttttanaactaantgggaatcccccggggcttgcgaggaaatttccaatattcaagccttaatngatncccgtcnaccctcganggggggggccccggttaccccaacnttttgtttccctttaanggaggggttnaattggcccccttnggcgtaaatnatgggcantancagngttgttctgggganannnnatntnnnnnntgttntnacaggaananggnnntcncccttnanaccntggcccngggtttnaaaanaaaaaaaaa

SEQ ID NO: 15705 - DNA, 455 bp, Homo sapiens
  misc_feature 4, 23, 24, 29, 32, 33, 34, 38, 42, 44, 45, 48, 52, 56, 59,62, 63, 64, 65, 68, 74, 75, 76, 77: n = A,T,C or G
tggncatagctgtttcctgtgtnnaaaanaannnccanaacncnnggncttncttnttnctnnnntgnaaaaannnnataaagtgtttcagaattgccctcctccccacccaccaggccagtccatcgtgctcccccaggctatgtgggttgagcaaacagcagcagttgccttggggcttggtttattggggtaatagctttccttttgcccctgagacctggggcagtatgcccagaacccctccctcctgcacaccccacagtaggcacattctcccactggcagcagatgtgttttctggcaagtagagaaaatggctttccttgccctgtgagaggtctcataagatccagccatagccaaggccatgtttgtcacctctggaggcctggtcagtccttctgtgggcacagaacatttctctcccacctaagttaggacctgcatccctg

SEQ ID NO: 15706 - DNA, 309 bp, Homo sapiens
acagtggaatgaccgtgacagcaacacagtcctcacaggacacgcccagctgagcgatcggccaccactcagctccggtccccatctggcaatgtggaatttagctgtggtgcaagtcttaaggttggtttaaatccagctattcgctgtttgttcaagcagacacacacatgcacacacgtgcacacacaaacttaattcgctcactgactttgcttattcacaggaaacaaagtttgaaatcttaaatttttaaatgtcaggagcttcattaatcctggcttgtgctgggtttggctgctgctttaa

SEQ ID NO: 15707 - DNA, 448 bp, Homo sapiens
  misc_feature 249, 328, 406, 432: n = A,T,C or G
aatggggggaacccccatgggccgaagtggtaaaaacctttttcacttctttgaacaatttgaaggggtcaagtggtggtttgaagaagaagaatcccttctgggaatctggttgggaatgccaaggggccaagggaacaaaaagaacaacgcccccttcccaagcccacccattgaacttgggggggggctttcggccaagaaaccccgggaagaaccacccatggccctcatttgggccccaagtgnaaaaacaatggttcagggctgggagctttccccctctctccctgcttcttcggcggccacccttcggcccgcttcttanaaacctaagtgggatccccccggggcctgcagggaatttcgatatcaaagcttaatcgaatacccggtcgaaccttcnaggggggggggccccgggtaccccanctttttgttccctttt

SEQ ID NO: 15708 - DNA, 350 bp, Homo sapiens
acctgagaggcaagcttcaggaaagaatgagccatgtccaggaaggagtggcagaaagcacacaatgttccctgtccctgtgtttgctgtcatctagagaagcaagctgtctttaagaaatccaactatttctgtctgatatgcagagaatccaagggcctctaaaggagaatcaccagtgtatccctccaaagagtcacgtggcctggctaacgacagtcgttccctcctcctttctaaaacgggaatacacagcagagcaggcaggtgggctgtgcaccacgtggggtggcagcagcgagccccactcccgcaggccctgcctcacctgagcggcagcagaaagcagt

SEQ ID NO: 15709 - DNA, 277 bp, Homo sapiens
  misc_feature 41, 43, 51, 90, 189: n = A,T,C or G
agtacttctagaattaattaaggcggggccacatcacgaangncagggaanaatgcaaacccatcctggcttaacaagggtgcaaccctngtctctacttaaaaataccaaaaaattagctgggttgtggtggtgccacgcctgttaatcccagcttactcgaagaggcttgagggcagaaatctgggnaggtaagaggtttgcagtgagccgagatcacgcccactgcactccagcctgggctacagagcaagactccgtctcaaataataataat

SEQ ID NO: 15710 - DNA, 546 bp, Homo sapiens
  misc_feature 546: n = A,T,C or G
acaagcaaaatatctccatgaacattctgagcagttctaaaggtgatgggagatgctttgactcagggacccaattcaaagattcccaggcacagacagagcctctgttttctgccctcagtcatgacagcagggcccagtctggacataggtgggcaccagagcttgtcaacatgacggaaggaagagatgaaccatagcatctttccggatctctatgtattagcctgaaacccctttggatcacatctccctactaaagaggacatttgagcaaagacccagtgcacaaagcttagtgcctgtttgacatccagcggaggtagcttgtggcagttgtcacagatagaaatgccatggaaggcggccagtagcttatggaggcagcattccctggtgggtcaaactgagcctgtgaggtctgtgggattgcagggctggtgatttgattttgtcagaacacacatattgttcaggcacagagagaccacctcctgttaaccaactcttcattgtgggtaaagctcaatgtcaaggcattcattn

SEQ ID NO: 15711 - DNA, 260 bp, Homo sapiens
tgctcccttagatgtggcaaccactgagggagacaaaccctgactaggagcaccccacaggcccctcccactccacagagaggaacgcaggggagagccaggcaggggccccaggcctcccagacacccccttggagcagagccctcctcaggggtaactgggtcacagggacgcgtcttcctcggaggccaccccggtggtgagggctcccaagcagcgccagggctctggaaggagcccagtgagagagggtgggaag

SEQ ID NO: 15712 - DNA, 295 bp, Homo sapiens
ccgcggtggcggccgaggtaccacttccggggggaagaaggccgacgcatattgttgttgagatttcgcggctcagggaattcatattcctgctccggcatcttgactcttgcattctttgccttttccaacttagcaccttcttctgtggagcccttttctccccaacgaacctccattcttttaatgcctccaacgcctctcccaccataataagaggcgtctaccgttggccactttttcttaggcagaccatcatcatcttcttcctcactctcctcggcagggggtggag

SEQ ID NO: 15713 - DNA, 385 bp, Homo sapiens
  misc_feature 213, 228, 238, 242, 246, 256, 261, 263, 272, 274, 275, 276,277, 278, 281, 284, 294, 304, 310, 315, 322, 323, 324, 344,349, 352, 356, 358, 365, 368, 369, 370, 372, 381: n = A,T,C or G
acacacactccccaccccatcactgttgctccagtgttagcattttcacttcatgctcccactttgctctctcactttaattcttttcagggttctgtaatgacagaaacttgaagctcctcactatcagatctttcctcaagaaataagaaatgattctctgttctagagggaacccgaggaggatgggggaaaagaaagtcagacaaagangaggaaggagagacnagggactggncttncctncccttggggngggancnccctcctantnnnnnccnggnctttggccancccccaaaangcccangggcntcctttnnncagggaaggggcccccactnttttnccnttgntntcccccnccnnntnggggggggncccc

SEQ ID NO: 15714 - DNA, 154 bp, Homo sapiens
  misc_feature 11, 13, 20, 22, 27, 43, 45, 48, 51, 53, 65, 67, 84, 85, 106,107, 110, 118, 123, 147, 148: n = A,T,C or G
cggcttgcggncnaagccgntnttcanccttcactcaaaatgncnggntantncggttttttccnanagaatttcaggggggannaccccaaggaaaagaaccttnntgngccaaaanggccnaccaaaagggcccagggaaccccnnaaaaaa

SEQ ID NO: 15715 - DNA, 328 bp, Homo sapiens
  misc_feature 26, 77, 134, 142, 147, 152, 173, 192, 201, 221, 295: n = A,T,C or G
gggtgggcttcaccttggttgctgtncactttcctgtaagggaggggttcatttccaacgttgtatagatagcaaanagaggcccacaaggcatgggaccatctttcaccccaaacaatcactctgagtttgtnaatatttnccggncatanaaagagatttccaaaaattanctactcttcattgtttatncattgttanattcagtaacctcaggggancttaaatatctaccatggcagcgtgattgtcacagcttcaggctcttagggcaggacaactccacacttgtttntttttaggatcttttgcatttgacaaatgttaa

SEQ ID NO: 15716 - DNA, 418 bp, Homo sapiens
accattcaagttctacatttggccaacggaaaactatttgttgagaacccactctgtggggccccagggataaaatgagcaaaaatggggtccctgccctcaaaagtcctgtggtctcctggagacagacattaatcaataactactcaggtgcgtgtgtattacaaactgtgccaagtgctttgaagcagaggggcacagttaagtcttgacatttcaagacttagccactttgcaactaccaggttttggctgcaaagttccagatggcttctgtcttttgcatttcatactttaaacccttgcaggcccttccctaactatcaagggcctgtcccagaagcaactcaagttttgttatttttaatttttttttatttttgagatggagtctagctctgtcacccagattggagtg

SEQ ID NO: 15717 - DNA, 451 bp, Homo sapiens
  misc_feature 284, 380: n = A,T,C or G
tagggcgaattggagctccccgcggtggcggccgaggtacaaacacacacagaggaaggagcacctcaatatggtttaggcgcctgagagagatgcagccgaggaatgagtgggaaccgagagatacttgggaaatgcaaatgaagtggagaggaagggaagggctgggaccagggaacaaaagagaagagtaatgcaaggatgctgggtagaaacagcccagcatacagcaggctctggggcacatgttgtggctgagagaatgacgggaaggaggatagcangggaggcaggagtcagatgaattaagacagggtttcactcttgtcgcccaagctggagtgccttggtgcgatctctgctcagggcaacctcttctnctgggttcaagcaattctcctgcctcagcctctggagtagctgggatttcaggcatgcgccaccacgcctg

SEQ ID NO: 15718 - DNA, 546 bp, Homo sapiens
acacatcatgagttaggatgctgggtggtgcaaagaacccattaatgggagctatcaaaaatcactgaaaacaatgaggctcaaatcagaagtatcaagaatcagctttcatgacccctacaccatgatgtttttctttatgacggcagaactattttgaaacattaaatatatcggcaggcactgtgattcaaaaagtatttgagaacctactaggtgctagacaccaaccgaggcaatgagtatgggtgacaacatgtgccctgccctcacagcaccaatagtccactggacaaataccatctggaacatcaggtaaacacctaagcctgtctggaggaaatctaatttgggcggaatcccacaagcacagactaggtaaggagaaggcagttaaggtgggaagtagccagatttaagagtttgggcaatggccaaaggtgcagaagtttgaactacaagaagttcagtgtagttggtttcgtgtgtttcccgtggagagaggacaaggtctggtggcactgacaagaaattagacccgaaaag

SEQ ID NO: 15719 - DNA, 405 bp, Homo sapiens
acctgcatttatcaaacggtcaccctgtgcccagctccacactggacactttcccatagtctctcatttcatttacttttcactgtatctttaaatacccaaattaccagacatacaaaggagagctaccatttcattttcagataagccttgtccatccagttggcaatttgattgcagctataaaaattttttaatgatgccaggtaagaagccaataaaaactgaaggaattaaaagaaaaaataattgtcaaacatgccagaagtctggagaaaagtggggaaagcaacttccttgtatatcaggcaaggaaaagcctagggaaggctaagaatttctgttgctgagtcccgtgtgctgtggtgacttaggaggcctcccaaagccctcccatttaaagga

SEQ ID NO: 15720 - DNA, 391 bp, Homo sapiens
  misc_feature 317: n = A,T,C or G
acttttgtaacttttcaaaattagtttggggaaattttcaaaagaaaaagttgaagggaaaacttagaatgaattaaaaataagaaataggcaaaagcaaatattttaatttaagtaaattttaaagactttttaaacatatttttggggaaaaatagaattgtattaaagaagggccttttaaaatttttctaggccaggcgcggtggctcatgcctgtaatgctagcactttgggaggccaagtttcaggagttcgagactagcctgggcgacatggtgaaaccccttatctaccaaaaaatacaaaaaaattanctgggccgggcgcggtggctcacgcctgtaatcccagcactttgggaggccaaggcaggtgaatcacacggtca

SEQ ID NO: 15721 - DNA, 449 bp, Homo sapiens
ccccgcggtggcggcccgaggtaccctgccccaaggagctggggatcttggctgggagagttctaggaggaggcagggaagggtgtgccaggcacagggcacggcatatgcaaaggcgcagaggtgagacagagaattattactcagcgtgcctggaccatgcagtgggaggaagggtcagggctgccagcgcaccaaagtctgcccagtaaatatttgtgggggcctcttgagtgtgctggtaacacagcagaggccacagttcaaagatcccggcccttgtgagcagacattgcatgggtgggagcagatggtaagtgaggcagccacgtgaactgcacagcatgcgaaggagagatttactaacaagaaaataaatttgaggggccgggcgtggtagctcatgcctgtaatcccagcactttgggaggctgaggcgggcgggtcac

SEQ ID NO: 15722 - DNA, 362 bp, Homo sapiens
  misc_feature 77, 137, 172, 194, 254: n = A,T,C or G
tccccgcggtggcggccgaggtacttgtaggtgcagcctggattaccaatgaggatgcgagataccggagtgagcanatctttgccttggatcctaaccaggtcccgaaataagcagccatgcttgtgcagtgtganaaaggcttcttgaacctctttatggagctcctcanatacactgctggcttctcgganaattagtttaggatatttcagctgccactgctgatagaattcatcatctttgggggtcanataagggagccaagtgtcttcaagctcttcaagaagcctcagtttcttagcttcgcgctctcgttcctcggcagtcggggtgcgcttcatgctgccactaaagccgcc

SEQ ID NO: 15723 - DNA, 146 bp, Homo sapiens
agccgcatcgcacacgtccgttgccacatggtcacctgtcccaccccggcacatcacagccgagccagccagctgtgctacacatgtccattgccacgcggtcacccgtccttctgtgagaggcatttgagtcatgtcccacactt

SEQ ID NO: 15724 - DNA, 531 bp, Homo sapiens
  misc_feature 432, 445, 479, 519, 521: n = A,T,C or G
actggaattaaacgtcgagtcatattcttccctcttagagcaacaaaatttgaatgtttctctcactttctggaatttttaaaaagcaaactttttaagttattttttcagattttatttctcattagccttttttccctgaactccattttggagtgcaccctgtagttgtaagagcattgtgctgagagcgttccccaaatgagggtctgcagcttgcactgacccctgagttcctcacccaccagccccgtgccgacccgtctaacccgtgtgggggtgctccactcaaataggcccttggcagaaaagattgtccgttctgtccacacactgcctggatacagtctccagctctaggagatggaattggtttgctccatttagaaatagatcaaaactgggcattcagtagatggtacctcggcccgntctagaactaggnggatcccccgggctgcagggaaatcgatatcaancttatcgatacccgtcgaacctcgagggggggggcccggnancccagctttt

SEQ ID NO: 15725 - DNA, 444 bp, Homo sapiens
  misc_feature 1: n = A,T,C or G
nttcttttaaagcacaaagcttgggagaattaatatatgcaggataactgaacgcaagagacttgtggaatgcagttctaacctgataattgtgtgttaatcgggagtaacaggacaggccattacggttggttacacctacttatgctagatgcataatgtttggagccttccccactgatgagaagcaatttatgatcttgtgctagaaagttaataatgcttcacagcatctttttgagaggttgattagaaaacacacacatacacgttggtagtcacttgtgggtgaagcctgaaggggctatcaatttattttttttcagattgactgatggctttatggacagccaggcttgctaggagcttggttgtgttcagggctattgctgtccctttttcctttgaaggaatttaattctctgagatgtaagtcttaatggt

SEQ ID NO: 15726 - DNA, 429 bp, Homo sapiens
  misc_feature 10, 26, 38, 41, 362: n = A,T,C or G
ccaccgcggnggcggccgaggtaccntatgcacttaanaanatgtctagtctgctattgttgttaaaatgttctataggcgttagttgggccagttatttgataatacagttcaagtgttctacattcttaattttttgtctgggttttatctattatagagagtggaatggcctacacagtggctcacgcctataatcctagcaccttgggaggccggggcaagtggatcacccgaggtcaggagttcaagatcagcctagccaacacggtgaagcaccatctctattcaaaatacaaaaattatccgagcatggtggtgcccacctgtaatcccagctactctggaggctgaggcagtanactcccctgaacccgggaggcagaagctgcagggagccgagatcatgccaccgaactccagcccggg

SEQ ID NO: 15727 - DNA, 327 bp, Homo sapiens
actgataggcgcccgtctttggttgccacggaaatgtcaagatgctgggatacagggtgatcggggtgtgaatttccacctcctgctggttccacacaggcacctgtagtatgtggacccctccatcctggtccaccacagaggtgagggccgcgtcaatggccgtctgtcccctctttagtgccctgatgcgatggtatgacccattctgggaggacgagagcacctcgaagaactcagcaggaagcacagtttcaattcggatgttgtcagatacatagaccttgttgctgaacttgtcaaaaacttcgatggtgatttcataca

SEQ ID NO: 15728 - DNA, 477 bp, Homo sapiens
  misc_feature 461: n = A,T,C or G
actggcggtccccattttcatgtatggagacttcaggtgaaagaagttaagtgaattctttgttgggtcacaaatcttgagccagtcagaatttgaacctaagatttttgactgctggttgtcacacttcccgccccacactcaactgttgtgtgaatgagccagacacattgcttaacctgagtccgagatggacaatggtataggaaagatattcagtatggagaatcagatgttaacttgtgttgctatttttgttttgttttgttttgttttgtttttgagacaaggtcttgctctgtcacccaggctagagtgcagtggcatgatcagggcttactgcagcctcaccctcgatttcctgggctcaagcaatcctcccacctcagcccccaagtagctgggcctacaggtgcgtgctaccacgcctggccaattttttaaattttagcacagatgangtctcactatgttgcc

SEQ ID NO: 15729 - DNA, 256 bp, Homo sapiens
  misc_feature 140: n = A,T,C or G
acaatggacagtggggaggcagacaggttctgaataacccagaacaaagagatcatgaaaccacaaaagaagaacagattaaagagaaatgggggatggggatgacagagcacccagggcagcgggtgcaggaccagcanaggtcccccgactgtccttggctgtgtgcacacagaggcgctgcagtcctggggccatgttcataggatgcagagaaagcacactctgtcttttctcaggaaagctgcagggaaat

SEQ ID NO: 15730 - DNA, 311 bp, Homo sapiens
  misc_feature 16, 23, 26, 27, 30, 31, 34, 36, 44, 45, 46, 48, 51, 64, 68,70: n = A,T,C or G
tagctgtttcctgtgnggaaaanaanngcnncancncgggggcnnncntcntgcctggtacctnaatnantatctgcccaggaggccagccgcttcctgcatagcatttccttcctgcagtatgggaaggaccaggctttctcagaccacagaatcttgagagccatttccacgtggagcaagtggtggctaccagccttgggtctacataactagggcctcatccctggcccaagaatcctgctccacagccttcttgtgtccctgtaggaggagaaacacctggcaacttaaattttttaaaataactt

SEQ ID NO: 15731 - DNA, 368 bp, Homo sapiens
actaaaatatcaagtgttttcctttcttccgcagcttcccctcaacctgccatggtgttatttgctacttgacatccttcaggcacagggatatctgcacaataaatgcagaccttccagggttctacccccacatgcgcacccacagctcacacaaactgcccactggctagcggctgagttctctctccttccagctgccagagcaatgctctgtgcaccacctaggagaggtgagctggacatctcccttcccacacacaactctactgctcgagcccacaggcagaaggatgacccccagaagcactacagtccctacataaggatgcattaagcatctagttcaggagtgagaagtttgcccc

SEQ ID NO: 15732 - DNA, 430 bp, Homo sapiens
  misc_feature 378: n = A,T,C or G
accctgcacaccctcaaatgagcaaagccaccccactggcccctgggtgaggccatgtggacccccacacccttggggccggctgggcaagccttgaacccccaatttctgcgtggcctttggctgccctccttctccaaggcgtaactcttactccagagactcaggcgagcacgtgtcccttaccttattttctctcaatcaaactgaaacccattgtgatcccccatagtccagtgcggtctctgttattattacaggtgtctcccttcctccccgtgcccaggacaggccatgagccagagatacaaggggccccaggcaagatgcagggctctctgctcctggctctttatcgtcgtcgggacaccctttgtncaaactcaaggaatcccgggaggtctggctttgccgctttggctgggactca

SEQ ID NO: 15733 - DNA, 408 bp, Homo sapiens
accagcatttatcaaacggtcaccctgtgcccagctccacactggacactttcccatagtctctcatttcatttacttttcactgtatctttaaatacccaaattaccagacatacaaaggagagctaccatttcattttcagataagccttgtccatccagttggcaatttgattgcagctataaaaattttttaatgatgccaggtaagaagccaataaaaactgaaggaattaaaagaaaaaataattgtcaaacatgccagaagtctggagaaaagtggggaaagcaacttccttgtatatcaggcaaggaaaagcctagggaaggctaagaatttctgttgctgagtcccgtgtgctgtggtgacttaagaggcctcccaaagcccttccatttaaaggaggg

SEQ ID NO: 15734 - DNA, 315 bp, Homo sapiens
  misc_feature 155, 172, 202, 208, 249, 261, 271, 272, 276, 289, 292, 301,304, 309: n = A,T,C or G
atttttcactggagctaagacttaaaattagggcattttgaaaggtgtatttgtttctgtttcttgtttgatatattttggttatctactcttttaaaaaactaaaccgtataaaaggtatcttcaaattactgagtgtttcatccatcccagtnggtgaagattctccagngaataaatctatatatatatatatagattntaaaanctcgagccgggtaacttgaaatgtttcagggaaagactatntggaatcataanggaatagctnngatnttctttttaatgnctnaaaatatanaantattngggggg

SEQ ID NO: 15735 - DNA, 411 bp, Homo sapiens
actacacagaaatgagactgctttcacctacacacaggacaaagaggtcagacctaagaagccctgctttgactccgtttatattcagtgagcaacaggcagactcgtcaggccagacagcagcaccacagggcgcctgtgctggggcctttgggggctgcaggctggtggtttctggacctgaacagtgactacgtgggtgtttgtgaaaatgcaccaagctgtaactgatgatctggacttcaggaaacaggttacgaataaatcactgcaacccagaatcgccccacgacatgccatgacaggagtcacacagtcacatcacctaccccaatccgatggccagcaaatgagagagcagcagagatggaaggaaaactttcagaaattctgcagagaatatgccccctt

SEQ ID NO: 15736 - DNA, 322 bp, Homo sapiens
actccaccgcggtggcggccgctgccagggccgccgggtccatgcccagctgggccgggtccttgcgggcccattcgccagccggtggaaaataggctgccttgtcggcggcgaacacgccggcggccggcagcgtcaggcccagtgcggtggtgagggagagtgcgagcaggctgcggcgtagcatggtgggcgaagcggtcgtcattattcggtatcggtccaggtggaatacggagaacggatcaggttggagttgtaatagcgcttgtcgctggtgacttcctggccgatccagtccggcttgtcgaagacggcgtct

SEQ ID NO: 15737 - DNA, 501 bp, Homo sapiens
gcgtaatacgactcctatagggcgaattggagctccccgcggtggcggccgaggtacaagagcacttcttttctgcgatggggcagtggggcttcactcttaaaaggtgtttgtttgatttagtaacacagtccaccccttctccttggttttgttttgagaattttatgtcatcctttaagctaattggaaaaatcctagagggagggggctgtcacccaacttggatgacaaatctctggatttcagcaaggaagaaactgtgataagattgacaagactcttcctgaaagaaatatcattaaccccccaaggcctcattaattatttattatacatttaaataaattaatccctaacaaggcccttcccccccaccacactctagggtaaaaatattctggtgattatgcagtagaatgcagaacaaagccaagccaggttaggaaaattcccaggaaccacttggtctaggacaggttcccattcttgcaacttctc

SEQ ID NO: 15738 - DNA, 540 bp, Homo sapiens
  misc_feature 344, 486, 529: n = A,T,C or G
gaagtcctggttccagactcccctttttgccgggatatgatggatctgtcagctggtgaggcccctctaagaggggtggtatcttcgggccaggtcaggcccatctgggaggctcaggcatttcctgcaagggtgaaggccgctctccatgcacttttagggtcccctgctcccacagcgtagccaccctggctcttctcctggtgagagtctgccttgagggctgaacggtgccactgaggagctggagaagctatagcttcccatggcagcttttgtggccgggagtcctggttcagtcctgtgcctagggattcttgctattgcatgcatgcttgtcttanacagaaagctgggggaggcacaggactttctgtctgaaatgttttgtgcagtgctcagcatggttcacctctcctcgctgccccagtatgatgatttctgcaagagtttatcctgatgattctatttccccactttataaangtgcctaaagtcctaaaagagctagaaatggagggaaattcanatcattttaaa

SEQ ID NO: 15739 - DNA, 566 bp, Homo sapiens
acgtcctctacctccgtcccaccggccccttagcacagaagctttccgacttttggcagcagtcgaagcagatctgcgggaagaacaaggcacacaacatcttcccccacatcacactctgccagttctttatgtgcgaggacagcaaggtggatgccctgggggaagccctgcagaccacggtcagtcgctggaaatgtaagttctcggccccgctgcccctggagctctatacgtcgtccaacttcatcggcctctttgtaaaggaagacagtgcggaggtcctcaagaagtttgctgctgactttgctgcagaggctgcatccaaaaccgaagtgcatgtggaacctcataagaagcagctacatgtgaccctggcttaccacttccaagccagccacctacccaccctagagaaactggcccagaacattgacgtcaagctagggtgtgactgggtggctaccatattttctcgggatatccgatttgctaaccatgagacattacaggtcatctacccctataccccacaaaatgacgatgagctggagctggtccccggg

SEQ ID NO: 15740 - DNA, 381 bp, Homo sapiens
cgagaatcacctgagcccgggaggtcgggggctgcatggaaccgtgatcgcaccaccgcactccagcctgggcaacagagcgagaccctgtctccaaaaataagaataaagaaaaaaaaagaaagaactgcggccccattggcctgactctcctgaacagccaaactgtctccgaccagttacggaagaggcggccttgagagggtagtgtgccattggctcgatgtcctgcccctccgaaacctaagtcttcagcttccaatcaggactcagctttgggaagagcgccacgcggtgggcgaggggatgccctagtaaattcgcaggtctcttgactctttccgcctttgtttacaaccctgccatgatctccctcttgca

SEQ ID NO: 15741 - DNA, 340 bp, Homo sapiens
acttagaagaaaactccactccctattctaggttttgtccagagacctgaactaatgatagagtcaaagaatgtatgcaaagagcattgaggcacctagtttaaggaattgttgagggcagaggctgaaatgcagcacaaagcgggtgagtcagaaagtcccttaggtcagttgttcgcaccctccttctcccctactcagagacacaattcacttgcaactggaagccctgggaagaatttcccacctagttctgtgtctgaggagagaaaaaaaacttgctaaaggaccaagttagagagaaaacccaaatgagaacagcgaatctagccattctttc

SEQ ID NO: 15742 - DNA, 499 bp, Homo sapiens
  misc_feature 16, 23, 26, 27, 31, 32, 38, 40, 49, 56, 161, 168, 173, 282,289, 295, 304, 308, 313, 315, 404, 433: n = A,T,C or G
tagctgtttcctgtgnggaaaanaanngctnnaccgcngnggcggccgnccgggcnggtactataaagctaaccatcccccaagccctacagatatcactagccttacgaccccatatgtaaaaggctattcacagttgaggcattcacacaaagcactcncatttanttganagaatcctattaagggaatgccaactgatctaacaaaacaagctttgataaacaactcccctgccccccaacatcctccccatttcctcctgtggaaactaagtatgtnacttttnacagcnaccgagggncatntcttntnaaaagattagcattccaggccaggcacggtgcagtggctcatgcctgtaaccccagcaccctgagaggcaggagatcacttgagcccangagcccgagaccagcccggacaacgtccngaaaccccgtctctaccaaagcccgggcaacataatgagaccccgtctccacaaattaaaaaaaaa

SEQ ID NO: 15743 - DNA, 725 bp, Homo sapiens
  misc_feature 412, 435, 480, 490, 495, 502, 529, 536, 602, 613, 636, 643,651, 659, 667, 671, 672, 678, 688, 692, 699: n = A,T,C or G
ggagctccccgcggtggcggccgaggtacagttattaactgaactatagagcataggttttaggagggttttttgtcccctggcttttttttgagatggagtctcgctctgtcacccagactgaagtgtagtggcagtatctcggctcactgcaacctccgcctcctgggttcaagcgattcttctgcctcagcctcccgagtagctgggactacaggcatgggcgtgcaccaccacgcccggctaatttttgtatttttagtagagacggagtttcaccacattggccaggctggcctcgaactcctgacctcgtgatctgcctgcctcaagcctcctaaagtgctgggattataggcatagtccgcattatttaactgactggtttctaaggataaagttctgattttcnaaggatacaaaataaaataggangctaggaagtttctattttttgccccttgcaaattctgggtcaanaaaaactatnggganaagggantagcccccattaaaggaatttcttgcnagccacnagcccaccgaaaagggttttcccccccaaaaattaattttttgttgataaacaagccaaaaccttngccctcctttncaaaaaacctctttacttttttnacccacntcttcaanttaacccnttttaaanaaannacttanccctaccctngggnctttttnaaaaaaaaaaaaaaaggggaaaaagg

SEQ ID NO: 15744 - DNA, 425 bp, Homo sapiens
  misc_feature 69, 139, 160, 223, 306, 354, 391: n = A,T,C or G
gccagcgccaccgagtggcgcacctgctgttcctggttcggctggccggcgcgctggatctcgatatanaagtggcccgggaagatgcgcgcccagcgctgggcagttcgcctcggccttcggcaaatcgccgttctcnatcgcctggccgatgtcgccnaaatgggcgcccgacagcacgatcagggcgttggcctggggctcgtcgggatgcagggtcganacggacgtcgccagcgcctccagccactcggtgcgaatctcggcgcggcccttgtgctggttggtgagccaggcgcgcgccancaggtccacaagctgcaggtagccggtatggttcttggccaggatcancaggcggtgcggcttgtcgcggttgtcgtcgttggtnatccaggcgtcaaccccgacgatcggcttgatgc

SEQ ID NO: 15745 - DNA, 329 bp, Homo sapiens
gcccagcaccagcatcgtttcgcccggctgcaaggcagcgcggtcggcgaccgcgtggtacgaggtgccgtaggtgagcgtgatcgcggcggcgacgtcgaagtccatgtcgtccggcatcgggaggaaggcgctgcccggggctacggcctgctcggcgaaggcgccggtgcgggtgaaaccgatcacgcgctggccggggacgaagccgcggacgtcggcgccgacggcgcgcactacgcccgcgaactcgttgcccggcgtgaagggaaggggaggacgcacctggtatttgccctggaccgtcagcacgttggggaagttgacgc

SEQ ID NO: 15746 - DNA, 649 bp, Homo sapiens
  misc_feature 505, 531, 538, 545, 572, 589, 593, 595, 602, 604, 618: n = A,T,C or G
acttagaagaaaactccactccctattctaggttttgtccagagacctgaactaatgatagagtcaaagaatgtatgcaaagagcattgaggcacctagtttaaggaattgttgagggcagaggctgaaatgcagcacaaagcgggtgagtcagaaagtcccttaggtcagttgttcgcaccctccttctcccctactcagagacacaattcacttgcaactggaagccctgggaagaatttcccacctagttctgtgtctgaggagagaaaaaaacttgctaaggaccaagttagagagaaaacccaaatgagaacagcgaatctagccatctttctttgaatcagaattagttggagaaaaagtgtcaggtagaggtagaaccacctacgcccccactttccccaaaatagagttaagataccgacaatggttggtttcctagagtctggggacccaggctacataaatagcctctaacagaaaagcatctttctggactaanggggacagataagaaactcagatatnggcttangtatctnagtgcccaccctaagtgccctgttctnaacacagacaccactgntctntngggcctntntggcttacattttntagaaaataagattatttggcctttttttcc

SEQ ID NO: 15747 - DNA, 499 bp, Homo sapiens
  misc_feature 208, 232, 268, 300, 301, 315, 349, 378, 387, 405, 440, 441,450, 474, 475: n = A,T,C or G
atatggttttccttgatcacggatgccgtcatacaagcgccatgcgctggttcttgccgccgccgacgcgcaccgcgtatttctgcgccaggcgcaggcccggcaaggtcttgcgggtgtcgaggatcgcggcgttcgtgccggcaatgacgtcgacgtagcggcgggtggcggtcgccacgccagagagcagctgcatgaagttcancgcgccgcgctcggcggtgagcancgagcgcggattggctgcggatcgtgcacaccgtcnagtcaagcgccatgaggtcgccctcggcatanntgccagtcgatctnggtatcctggtcagaccgccagcatcaggccctntaaccatggcgccgccgcacaaaaacggnacgctctanaactagtgggatcccccngggcttgcagggaaattcgatatcaaagcttattnnataccgtcnacctccagggggggggccccgggnncccaaactttttgtttccttttaa

SEQ ID NO: 15748 - DNA, 303 bp, Homo sapiens
  misc_feature 129, 219, 254, 283: n = A,T,C or G
acaatggtgactgacatggctcctgaactcgcagagttcacaaataaaaacaaataatcacatcaatggtcaattcatcatatttgtgctaaacgctgcggagaaatacaggtgaggtgggaagattanaagtaaggtatgtaaagtgcctggcacaaataaatgaatcagcaggtcaagtagtggagtatgtaagaacatggtaggaacctagatgtnaaagaaattgatgaagcttagagctcttggcaaangttgtgtccttaataaaaacttgaatggnttgagccatcattccaagct

SEQ ID NO: 15749 - DNA, 559 bp, Homo sapiens
accaatgttcaaagacaaatagcctcaaaatactggtcttgcttgactcctttcctcttcttctctatccaactcaggaagtcttactagattttccttttgccaggcttccatgaaaccatagttaaaatgacagatcacttaggtaagctaaccacaggttagctctgtgatcttagctaagttgttagtcttctcatctgtgaaaggagatataatactctactcataaagtcattgtgaggattaaatgagttacaacatgtgagttattacaaggattaaaaacgttacacgcacctgcacatgttcaacactcagtaatatcaatattactacatcccagatgtcattagtttagttttcattaagctctctttcacctttgtgccccactacagtatcattagcacttaaaaatttgcctagtagtgtttatttgtgcctgttccttccattacagtgtagacttctagaaggtagagatttaacatctttattttactttaccgttcacagaacttcacgtaaatcaaaaatgtttatcaaatggattgtc

SEQ ID NO: 15750 - DNA, 493 bp, Homo sapiens
  misc_feature 459: n = A,T,C or G
acctgtgaatacccactgctctccagacggggcaatataacaagaccctgcctctaaaaataaaaagcaaataaaaattgactgtttatgtcttattttgtgggacatgtaattatagagtattttataagtcttttggtttttaaagattaatccttagagtttattaagttcaataatcaaattatcaatatagaaaagtcaaaatcccaggtttgttttttgtttgtatcattattgtaaataaatagttcaactttcttttggcttcactagaatttatatattggcttatgagtcatcaaatgaaaatttaggaagaattataggtagcattatttatacgttttctcatcatataaaacttgctgtaacttttgaattacttaaatcactttgaaatattttttcctttttgaaacaaaaaagtgacttttccaggtatgtaaattcttaatnatttaaccacttatccttttatgctttattggtt

SEQ ID NO: 15751 - DNA, 356 bp, Homo sapiens
accattctcttcactggcaaatctagcttcactggcaaatcatctctggacatagcattaagcctactcccagactgagagctcttgatgggaccagagattgaatagcctaccctatagcacaagatttctaccttgggattgggttagagctggctggcaggtgagtcacagaagtgacagccacccttgacaaccctttccactccagagagctctaatgctcactcctcttcccccatgctccctctctagggtgttgtggagggaaggagagaggtaagaaagtccttcccagtaacctcaaaatagtgagtgcgcctatttaagtccagcactttgggaggctgaggcgg

SEQ ID NO: 15752 - DNA, 435 bp, Homo sapiens
ctcgcccctcatggtggcccagtggtaggaccctggcagaggtcatggcagggccccctcagccggtgatttagggatcactgcacccaaccagttccctgcactgaggcgctgtctgctttgattggtaaaatttcctcctcgcacctagctttagtgcacattcctctcccataatgccctccccctccgcaaaccctaaccctcctcatctcccaggacccaactaagatgctcctgcctccaggaagccgtcttattccccagccagaagtgacctttccttctcagcaccctctttgcaggaccctcatccttctggatctgtggacaaccaagtctcctcttccatgagctgtaagcactaggaggggctaatgagtgctgctgattaagttgcaatttattggaaaactactatgtgccagccaagta

SEQ ID NO: 15753 - DNA, 451 bp, Homo sapiens
  misc_feature 320, 352: n = A,T,C or G
cgactactatagggcgaattggagctcaccgcggtggcggccgccggcgccgccgtcgaaggcggcagcctggaacacatcaacgccaccttcctggccctgttcggtgtcgccgcggtgctcgcggtggccaccgcggcgcgcttctacatggtgtcctggctgggcgagcgcgtgacggcagacattcgcagcgcggtctacggccacgtggtgcgccagagccccgaattcttcgagaccacccgcaccggcgaagtgctgtcgcgcctgaccaccgacaccaccctgatccagaccgtggtcggcaccagcatctngctggcgctgcgcaacacgctgctgttcttcngcggcctggtgatgcttgttcgtgacaagcccgcgcctgacttcatcatcctgggcctgctggtgctggtggtgctgccgatcgtgctgttcgggcgcc

SEQ ID NO: 15754 - DNA, 233 bp, Homo sapiens
acaagactttgcaccttgaattcaattgcatcaagtgtggatagcaaaataagtatcttaccattgaaatatgtgttcagcctaagattttacccaccagcagaacaaaagtgagggtgagagggatgggccagtgaggggatgggggagaaaaaaaaatcacaggattaccaccaaagccttgttttaaaagggctcccttcactattcaggaagggaagtggaaggagaaa

SEQ ID NO: 15755 - DNA, 369 bp, Homo sapiens
  misc_feature 5, 8, 17, 18, 19, 20, 21, 22, 23, 24, 29, 30, 31, 32, 33,34, 35, 36, 37, 38, 39, 44, 45, 54, 55, 56, 57, 58, 59,60, 61, 62, 63, 64, 65, 66, 67, 68, 69, 70, 71, 72, 73,74, 75, 76, 77, 78, 79, 80, 81, 82, 83, 84, 85, 86, 87,88, 89: n = A,T,C or G
  misc_feature 90, 91, 92, 93, 94, 95, 96, 97, 98, 99, 100, 101, 106, 114,115, 116, 117, 118, 119, 120, 121, 122, 123, 124, 125, 126,127, 128, 129, 130, 131, 132, 133, 134, 135, 136, 137, 138,139, 140, 141, 142, 143, 144, 145, 146, 147, 148, 149: n = A,T,C or G
  misc_feature 150, 151, 152, 153, 154, 155, 156, 157, 158, 159, 160, 161,162, 163, 164, 165, 166, 167, 168, 169, 170, 171, 172, 173,174, 175, 176, 177, 178, 179, 180, 181, 182, 183, 184, 185,186, 187, 188, 189, 190, 191, 199, 203, 209, 219, 233: n = A,T,C or G
  misc_feature 242, 246, 256, 265, 266, 328, 334, 340, 347: n = A,T,C or G
ccacncgncgggttggnnnnnnnnggggnnnnnnnnnnnccggnnggggggggnnnnnnnnnnnnnnnnnnnnnnnnnnnnnnnnnnnnnnnnnnnnnnnnccccncgcggggnnnnnnnnnnnnnnnnnnnnnnnnnnnnnnnnnnnnnnnnnnnnnnnnnnnnnnnnnnnnnnnnnnnnnnnnnnnnnncccggggnccgngggttnaccccccaanattccggggggggnaactttggnaaanattttggggnaaccggggnnggggaaaggaaccaattccaaactggggttggccagtgggagtttttggaaaaaggaaaatncatttngggttncttgggnaaaagggtgttgggaagccttg

SEQ ID NO: 15756 - DNA, 585 bp, Homo sapiens
  misc_feature 492: n = A,T,C or G
actcaccaccccccaagcagacagtgcaaagtctgccttcctgttccttccacccagagctggaatgtggtccacctagacccttgggccttgtttatatcatcctcacccctgccagggccactgactgcttataccttctcacaggatgtgacatttatcctcggcccagcatcctagaccgactcctgactatttctcaatttcaagctcctcagctgctgacagaggcaggatacctaggcctgcagctggccccagatccattaataagcagctcatggccatctcaggattcagagaatagtttgtctggtcagggaccaagtcccagaatggggcaggaaggggctcaaggtcctaaatcaagtcagaaacagtgcctagacccccatcccatccacctcagctcaactcccactcagggcaaacctgatgatcagatcgacatcattgttggcgatggtgatgaccacatctgggacattgtanggagtgtctaggtgactctccattgtggctctcatggcattctttgagcagctcccggcaggatgtagtccaagtgggcataggggatgaaag

SEQ ID NO: 15757 - DNA, 412 bp, Homo sapiens
  misc_feature 188, 412: n = A,T,C or G
tcactgcaacctccgcctcccaggctcaagccatcctcccatctcagcctcccaagtagctggcactacaggtgcgccaccacacccagctaatttttgtattttttgtagagacggggtttcgccatgttgcccgggctgatggtctcaaaactcctgagctcaagcgattctcccgcctcggcctnccaaagtgctgggattacaggcgtgagccaccgcgcccggcctgtgtattcttcaagaggtttcaaatcattttgacggacttagtggatataagcaactatattataaaaatctgtcaagcctaggactgccaaattcacaggcactgggctacagagggcttccctgactggtcagatgctttgagtctgttcccttagaattgttccctcccaagcaaaan

SEQ ID NO: 15758 - DNA, 535 bp, Homo sapiens
ggagaatcacctgagcccgggaggtcgggggctgcatggaaccgtgatcgcaccaccgcactccagcctgggcaacagagcgagaccctgtctccaaaaataagaataaagaaaaaaaaagaaagaactgcggccccattggcctgactctcctgaacagccaaactgtctccgaccagttacggaagaggcggccttgagagggtagtgtgccattggctcgatgtcctgcccctccgaaacctaagtcttcagcttccaatcaggactcagctttgggaagagcgccacgcggtgggcgaggggatgccctagtaaattcgcaggtctcttgactctttccgcctttgtttacaaccctgccatgatctccctcttgcaaaagcgagggctacagaacaggcattcaggagtcctgtgctccagtcacagccttttctgttcttcagctaggagacaccaaaccctcaggaagatttactatagctaagagaaaactgcagcagaaagggcgcggctacctactttttaaatt

SEQ ID NO: 15759 - DNA, 335 bp, Homo sapiens
cgggcaggtacaggcgtgagccaccgcgcccagccgggagatgctgttaatattgaagtcaaggcatcaggcatacagcaggactgtagttggtgggtcaggccatcatatttacagatgtggcctttggcttttgctttgaggagaaaggcatgtcattggagaattatgaaaggtggcacccatcgggaatggatgtttacctaaacagcacccctctagctgctcagctgagaatagattttgggacaagtgcagaagtgggaaaaccagttaggaggctattgtgaaagcggaagaggtgatggtggcttggacttgggtggtaaaatgtg

SEQ ID NO: 15760 - DNA, 277 bp, Homo sapiens
ggattacggtttttttcgccaatacgatgttaaccacatgatttaattgacttatttcgacccgcacttcatttggcaccgccttcgatcgcagtgcctctcgcgtccaaataagtgcgcagatcggcgacaacaccttgctgtgccgccagtttcgcatcagccgctgccaatgccagctcaagctcgcgcatctggtccgcaagtccttgagacttgttgcacgatgcttcaagttgttccttttgcgcctgaagctggatatccctgtcgaggg

SEQ ID NO: 15761 - DNA, 511 bp, Homo sapiens
  misc_feature 12: n = A,T,C or G
acatttccaggnatacctttcttttcttttcttactctttttttttttttcgagaatagagtttcgctcttgtttcccagactggagtgcagtggcgcaatctcggttcactgcaaccgtgaacctctgcctcccaggttcaagcaattctccctgcctcagcctcccaagtagctgggattacaggtgtccaccaccacgcctggctaatttttgtatttttagtagagacagggttttgccatgttgaccaggctggtctcaaactcctgacctcaggtgatccacctgcctcggccttccaatccaggatacctttctaagcttcccaggctttcctcattcaggtatcctgaaagcagtcgtgctggagcatgtggctcccagaacccagagcacagccgctctggggacaggcaacagaatatatacttgggacaaagctgcggcagcactccagctgggggaggatttgtcaactggcaacccccaggcaaatggcagcaggagc

SEQ ID NO: 15762 - DNA, 397 bp, Homo sapiens
  misc_feature 220: n = A,T,C or G
ccgcggtggcggccgagtgaacctaaacgtgttgcgcgaggcggtgcgtcgcgagctgcgcgagttcctggacaagtgcgcaggaagcaaggcaatagtttggtatgaatacctaactggaccctttggcctgattgcacagtattcactattgaaggaacatgaagtggaaaaaatgttcacacttaaaggaaatcgtttgccggcagctgatgtgaanaatataattttttttgtcagacccaggctagagttgatggatataatcgctgaaaacgtgctcagtgaagatagacgaggcccaacgagagattttcatattctgtttgtgccacgccgtagcctgttgtgcgaacagcggttgaaggatctgggtgtcttgggatcctttattcac

SEQ ID NO: 15763 - DNA, 281 bp, Homo sapiens
  misc_feature 149, 207, 245, 246: n = A,T,C or G
tctaattctaaagatgacatatatttaaaatttctaaattattagttactttcacatcttatctgggtgtttttgatagacattgcttatttatttttgtgattccattctttattcaaatatttcatatgatagtcttcagttttaanaacatgcttttttgaaaagcgctagatatttgtgacatggagctccttgactgtgttngaagtccttgggagggtggtctacagccagatattttnnctgctcaagcccacacagagtgaccaacttccttg

SEQ ID NO: 15764 - DNA, 690 bp, Homo sapiens
  misc_feature 566, 638, 642, 659: n = A,T,C or G
tgattggagctccccgcggtggcggccgaggtaccatacacgccagcattgcactggcttctcctgggttgaccagaagtttctgttgtgcctggtgtgggcagttgtaaattacaggctttgagtcagaagaaaccttaagcccacctgatgctctcggctccgactgtgctcaggctctggctcagcagcctgtgctccccggcgtgtccccgcctcacttcgtctagggggttgctctcctggagggcaaggaggctgcagtgtcgcggctgcacctccccgcacgattcggcaggacgtgcccagacggcaggactgaattttcctgttgtgacaaaattaaattctgagcaagtgttataggaggagttttgtctgtaaacgtttattcaagaggcaaaggtagcctttctggctgaaaactagaaactcattctatttaactaatgtgtagtttgcggggaggtgggatttaaatgtatttaaaccccacccctgaactattgtgagctttctagtgtgtgaagccaagataccgaacaagtcggcaagagacaaaaacngggagatgccaggacgagcatccgttctgctcccaatggccccgggggccgggtgtttcccccaaacaccancaancttgatcccgcccacanaacaaggaccccgggccacggtggaggaaaa

SEQ ID NO: 15765 - DNA, 348 bp, Homo sapiens
acccgggatgcccgttaactaaaagctttgcagaaataagaagtggctgctcctgttagagcggcttgactagctggtccactccgggcctcagtctggggggctggcgggcaggttgcagcctctccgtgatcagtgtgccttggattccattggatctcttagtctggccctcatttttcaagctaacagaaactttctgtcgtgacttttggcgtatgctacctgggaggaaacgcagtatttgtgtttggaatttgcccccattagacgataaagcacaaagccttctaaataaaatgcggtcccacggccagctgttcagaggatcttgacgctcttcttggg

SEQ ID NO: 15766 - DNA, 422 bp, Homo sapiens
acagagatgccctgggttgtaaagcaaaaaatcacacctctgacttagcttgtgtttttgtcacacgtttctgatccaaaacataaaatgataaaattcagaggttggaagaacaacttcatttctattttagaaaacacaatcatttgaacatgtttactgaaagcactgatatgttttataaattcagtttttcctttcttttcttgtaaaactttctcattgcttttacacctttactaagaaaaaattgccttgatattgaagagggagacttcccttactgttatcctgtaaaagccgtatttcccacactgcattatatactctcttttattattattattattttttggagatggagtcgactcgctcagtcacccaggctggagtgcaatggcacgatctcggctcactgaaac

SEQ ID NO: 15767 - DNA, 237 bp, Homo sapiens
  misc_feature 6, 28, 30, 33, 197, 214: n = A,T,C or G
atttcnccaaggggaaattgcctgttgngnccnagggtggggaggctcgggcatctgtgagagacagggagggtggctaaggtccagttgcttttgagtgccccgtggaacttgatgggaatggggttggaaaaccttgattgcctcctctgtcacatgccactcttggagctggagcttagtgatatgtcaatganagatactcttgtctttnttttttctttccttttttttttt

SEQ ID NO: 15768 - DNA, 405 bp, Homo sapiens
  misc_feature 147, 157, 160, 161, 164, 182, 189, 227, 233, 242, 295: n = A,T,C or G
acaggaggctgccagaggggaagcagcaagcaagactcaggcacacatgctctacaggtggctctttgtttgcctgaccaaagttctttgcaaatcttagcgcagtttcaaactagtgacctgggaggagatggaaggggtgttgancaggctgacntanntgntgaggtcaaaggctgatnaccccanaggaaggggacaggtcagggatacatctcaccactgtnaataantttgtccanatttttttctaaagttacttcccttggaaagatcacttgagaggacattgtanttaaataatgtgaactgtaacagtcgctactggtttatttttcatattttttaattgaaaattgagcttgcagaaatagccacattctacacatagttctaattttaaat

SEQ ID NO: 15769 - DNA, 439 bp, Homo sapiens
  misc_feature 11, 29, 38, 46, 47, 51, 56, 58, 59, 60, 61, 76, 86, 226: n = A,T,C or G
tgtacacctgnctgggcgccctgcctgtnctgcactgntgtatggnnctgnccccncnnnncacggatgcctgganacagcctgangacacctgggccgctctggagggactctccttctcaccgttccgggaacaaatgctagatacgagttccctacttcagtttatgagagagaagcagcatttgctgagcatagacgagcctctcttccggtcctggtttantctgctacctctgagtcacctggttatgtatatggaaaacttcattgagcacctgggtcgttttcctgctcatatcctggactgctttcagggatttactaccggcttccgggacttgagcaagtcttgaatacgcaggatgttcaggatgttcaagaacgttcagaacattttagaaatgctgttgcgactcctggacacttaccgggacaa

SEQ ID NO: 15770 - DNA, 532 bp, Homo sapiens
acacactgcatgaatacttataaggctcttgatactatttgataggatgaatgcaaacattgaatttaaaaaacgaattcaattcctatagtcccacctactgggaggctaaggtgggaggatcgcttgagtctagaagttcaaggctgaagtgagctatgatcacaccactgcactccagcctggatgacaaagagagaccttgtctctaaaaacaaaacaaaaatttcattttcattcagtttttacattcatcttaacaaatcttatcaagaaagtgctcagcagtgtggtaagatgcaaagatgaatctccgtagtccttaggtcaggttgctctcagctggcaagaaaaaataagataaatgcacattagtaagtgtaatcaacaaaggaattgctggccaggtggaatgtctcactcatgtaatcccagcactttgagagactgaggcaggaggatcgcttgagccctaggagttttgagatcagcctgggcaacatggtgaaaccccgtgtctactaaaaatacc

SEQ ID NO: 15771 - DNA, 571 bp, Homo sapiens
  misc_feature 2, 5, 6, 37, 40, 44, 50, 56, 58, 66, 82, 85, 103, 107, 111,142, 169, 176, 179, 188, 190, 195, 203, 208, 215, 238, 244,259, 269, 278, 303, 314, 320, 330, 381, 386, 388, 395, 421,446, 454, 473, 481, 495, 517, 536, 549, 552, 555, 557: n = A,T,C or G
gncgnnaaaaaaaaccccccaccgcggagagacgganacnaacntttttngggggncnaaaagttnctgaaaaaacccccanagnccagtttgctgccaaggngtgnatgnatttttttcaccttgtgctgtttgcttgctntgcaggaaggccttgaggtcgcacagnccctggnatncaggtgtgncncccanaggtgctntgatnaggaaanaaggtgatgaggaaaggggcctnaccttnttgtcctagaaaaanatgttttttnttgtaaaangaggaaaaagggggggcctaccctngccttaacatncagggnaaaaaaaatnaaggatggaaacccaaggtgcattaaaattatacccaaaaaaaaaccaggnaaccntnagccagnaaaagggccttggttggggtaaagtnataaccaaggggtgggctttgattnccccccanacccaaagggaaatctttnggggaaanccaaaaggcatggncccaggggaaaaaaaaaaacangggggggagaccttagggnaagggaacaaatngcnttngngtgaaaaaggcccc

SEQ ID NO: 15772 - DNA, 410 bp, Homo sapiens
gtatacgactcctatagggcgaattggagctccccgcggtggcggccgaggtaatctccagatgttccagagcagttttcagatattaatttaagcaaatctcttcctcaagaacagaagccacttgaaattaaaccagcaccttttgtgaggagccgattcaaaagaccaaaaccaaacttagcaagagcagctttgaagagagagactacagaatcagaaaaatatatatatgagaagaaatcagaaaccgagaaaatggagactattgtgatgcaagaaaataatgaacaaactgatactctcccttctcaacatgtgagtgtatttgagatggaagttctgtgtgggtgttttttttttttttaagttattaggactactaaaagccctggcattaaaattctaca

SEQ ID NO: 15773 - DNA, 329 bp, Homo sapiens
  misc_feature 203, 262, 279, 297, 305, 306, 308: n = A,T,C or G
acctccaacagctggaccctccagctggtcaccttatgtaggaggcttctctcccccatgggcggagtgcagggcagggtggcctggggtggaggctgcaggcaggccagttccccatccagcctcagcctccttcctgctggggaaccaatcataggggaggaaactgagctttttccttacagccacctcaggctcattgnctgggccccctgttaaaaaaaaatacaaaaaaggggggggcagattaaccatagaaaantctgagcatgtatttancatgtgttacgtcacacngaagctcnntnaagaagtgaacacctgaaggc

SEQ ID NO: 15774 - DNA, 410 bp, Homo sapiens
acccctagcagaaacagagtttcgccatgttggtcaggctggtctcgaacttctgtcctcaactgttccacctgcctcagcctccgaaagtgctaggattacacgtgtgagccactgtgcccagcgtgtccctaaccgaggcagcagcggacgtgagcgataatggcggatatggaggatctcttcgggagcgacgccgacagcgaagctgagcgtaaagattctgattctggatctgactcagattctgatcaagagaatgctgcctctggcagtaatgcctctggaagtgaaagtgaccaggatgaaagaggtgattcaggacaaccaagtaataaggaactgtttggagatgacagtgaggacgagggagcttcacatcatagtggtagtgataatcactctgaaag

SEQ ID NO: 15775 - DNA, 663 bp, Homo sapiens
  misc_feature 333, 567, 574, 577, 623, 646: n = A,T,C or G
accctgggcaggggctagggagagttgtcctctggatcctgcctgctctgtgacttagaacaactctgtcccctctctgggcctctttcctcagtccctccttgagtcagggcttgggaatggggtgaagtggggaggatgcttccttccacaggaatctgggagggtcaggtgcactgctctgataggctgaggcttggggcccttatgggatcctccctcatcagcccttctccctggataccaaactttttggctggtttctcggctaacagcaaggctttcctgaaccctttcttagctggggaagggaggttcaggagggagtctcanagcctctgacaaagttagggaaccccagggaagtaatgaagggggcaatgccatcctctggtctttccaaacagggaacaccttccaaagccacttgggtcatttggggtctagaggcttagagaggacagggacatcttggaaagagctgagctcagccttggtgcttggcttgcaaccaggaccatttggttttcttggttgcatgggaaggggcacttggtcccgaaaaancttttanctnatggtgtaaaagtgctcggtgccatcacaagttttggctttttttncaagaatttatttgtaatcaacnttgtccccaattttggg

SEQ ID NO: 15776 - DNA, 429 bp, Homo sapiens
  misc_feature 16, 26, 45, 55, 67, 305, 349: n = A,T,C or G
ttcctgtgtggaaaanaacggctccncgcgggggcggccgaggtnccttccttanttagcatcccanctacttctactgcaaaaccccaaagcactacatctttaagcaatggccttccatctggagttcatttcccacctcaggatcaaagaccacagggacaatatccttcaatgatgatggcaaccaaaaatcatggaacgccaatgccttatgaacagtatccaaaatgtgactcacctgtcgacatcggatattattccatgttgaatgcatactcaaatctgagtctctcaggcccacnaagccctgaaaggcgtttctccttatacacagattatagaatanagttccgtagcttctgactgcaccagtggaagggagcatgagctgtgggagcagtgactcctacgtgggttacaatgacc

SEQ ID NO: 15777 - DNA, 395 bp, Homo sapiens
gtggttaagttggtgacatggctcagaagtttatttctttaaatttttaagttttttttctttttagtcttcagaaaggcaacagtagtcttttaacgtcactgttaaaagtgtaagactcttttactccctgagagtcccctttccctttcttgcgtcctttcctctttattctttttttttttttttttctttactgagacggagtctcactctgtcgcccaggctggagtgcagtggcgcgatctcggctcactgcaaactccgcctcccgggttcaccctttctctttattcttatcccggtcagactcgccccctcctccaagatatctctctgttttattttatttgattttagttctctttgggtgatcgctccttccctcttcaacg

SEQ ID NO: 15778 - DNA, 566 bp, Homo sapiens
  misc_feature 482, 527: n = A,T,C or G
acagatcttaaaaacaactaccttcgatgatggtagaattactatttcttagttgccaaaaacagtaataacagtttggtcttcactttttatttttatttttgtattcagtatatttggggccaggcgcagtggctcatgcctgtaatctcagcactttggaaggccgaggcgggcggatcacgaggtcaggagatcaagaccatcctgaacacagtgaaaccctgtctctactaaaaatacaaaaaattagccaggcgtggtggcaggcacctgtaaggtgcggtggctcacgtctgtaatcccagcattttgggaggccaagacgggcagatcacctgaggtcgggagttcgagaccagcctgaccaacatggagaaaccccatctctattaaaaatacaaaattagccgggcgtcgtggcacatgcctgtaatctcagttacttgggaggctgaggcaagagaatcgcttgaactcangaggtggaggttgcagtgagacaagatcgcgccattgcactccancctgggcgacaagagcaaaactccatctcaggaaaaaaa

SEQ ID NO: 15779 - DNA, 445 bp, Homo sapiens
  misc_feature 22, 23, 24, 29, 32, 33, 38, 44, 45, 48, 50, 52, 59, 62, 64,65, 66, 70, 75, 80, 94, 98, 168, 173, 204, 209, 220, 277,294, 299, 324: n = A,T,C or G
atggtctagctgtttcctgtgnnnaaaanaanngccanaactcnnggncntncttgttnctngnnntaanaaaanatacngagacccctgtttntaangaaaaatgaaagcctcctgggtttggctgagtccctggtgaatggtggagcggtcctgaaagctgggaanacctntttctggcacagcaaccggggcagaggtganagganaagggcctcancagtgttctggccttttgggttcatccaaaacttgccggtcctgggcctgctggganaggtcagcccctttcangtgancagctctggggccgggtgacccacnccaccgtgtcgggcacacagtggtgcttcgttttcctcactcctggggccacagccttcctgctgcggttctgcctggtgggtgggtccatgctgctttgaggaggcaagtgacctaaagg

SEQ ID NO: 15780 - DNA, 376 bp, Homo sapiens
accttatctttaccactcagggtggctttaaaagacggacagctttaggtttgttctcactggaactggttacactttctgtgcaaacttaaccaagtgatgatcgtctggaagctgcattccctcatttccactgtttggtgtgaatctagtctccccactttatctaaaaggaggctagcagggccccagcctgagcagagcagctagagagtgcttccagattcctttgccaaaggaggcccattttccagctgtgagtgacatctgtagtcattggcttcattgcctggcactagccctgtctagaagtggagaaagctggatcacagctggaccacaaccagccccaatccaggatttcccataccatgct

SEQ ID NO: 15781 - DNA, 322 bp, Homo sapiens
  misc_feature 210, 283, 299, 310: n = A,T,C or G
acgaaagttaaattattccagtccattctgatcaagaatgctcaagagactagctttcccacaacagagatgtggagcaaaaagcatagtccttaccgacttacaccaatgagcatgccacagactccagccagctctagcacatacaaaatttgagtaaggaatactataacccctattttactcctatacctttgctaatgacacctntaaaatctgcagccatatatcaacaccttatttcaccatattgaatacactcacaagtcaaccatctaaaggncaggctcctaatcaanagtgctactgngattagacaaat

SEQ ID NO: 15782 - DNA, 395 bp, Homo sapiens
  misc_feature 271, 352: n = A,T,C or G
ccgcggtggcggccgaggtactcagcagttaaaagattcatctggagtcgcaaaatgaaaagccgtgttctaacctgaggaatcagttaggggacaggagttccgtgggccaggaatgggctcagggagtggggctgcgtgtcacacacagtagctgtgttgcagtggcctagggccttgggggttgtctttaggaaacaccctgaggggaagcaggtaaagagcctgggcagtattgtgactagtttcattgttttcctcctgctgaggnctagcagagcccttgctttgtcctctcggctgggtctggctgccagctggtgtgattttgagaaactgaccttacgcgcanttcaaggtccagctgacaaaggccttgtattccttggctggcc

SEQ ID NO: 15783 - DNA, 147 bp, Homo sapiens
  misc_feature 15, 59, 119: n = A,T,C or G
actcctggaggctgngcagccccaggcctgtatcgatcaccacgtcctgctcggagccncgcaccagccagatgttggcacggttgcccgactcgtagaaacgttcttgaatccagaanataccatcgcctagagacttgtgggcgt

SEQ ID NO: 15784 - DNA, 422 bp, Homo sapiens
  misc_feature 372: n = A,T,C or G
acccgggatgcccgttaactaaaagctttgcagaaataagaagtggctgctcctgttagagcggcttgactagctggtccactccgggcctcagtctggggggctggcgggcaggttgcagcctctccgtgatcagtgtgccttggattccattggatctcttagtctggccctcatttttcaagctaacagaaactttctgtcgtgacttttggcgtatgctacctgggaggaaacgcagtatttgtgtttggaatttgcccccattagacgataaagcacaaagccttctaaataaaatgcggtcccacggccagctgttcagaggatcttgacgctcttccttgggtgacggacccaggagagttcatnctgcaggaacccgtggcctcaggctttccaggagggaggttagagaaagg

SEQ ID NO: 15785 - DNA, 256 bp, Homo sapiens
  misc_feature 67: n = A,T,C or G
atattgacccggagggcaagaagtttgaccgaggtaagtaaggtatgtaggggcggtttggaggaanaggctaacctcgcggacatgcccctgggccccgtgtccacccagctcttgtggcctgcccctaccagcaggtcctggtgtagggacctccctcagtaaacattttatggatgagaaaacggagactcccgagctctctctggcttcacgcatgccgtgcccggtgcctgggtggccttttgtcatggtg

SEQ ID NO: 15786 - DNA, 349 bp, Homo sapiens
  misc_feature 184: n = A,T,C or G
acaacagatgcaaccgtaagacacacagagcccgcccactgcggggcagcaggaccgagcccagagccctcgggggtttcgtgcgtgacgaagggtctttcactcaagtaaaatggcagcgtcctccttcctcttgaaaacatggggacaaaaagggaccaggatcttcccagcaatcggcatnctcatcgccctctggactgcttggagcccgcccacctgtgcttttaactcatacctgagaaacacggctggtgttttacttagatttttaaatttaaaatgtctaatggaagataaagacttaccttccccaggctaacgcttaaagaatctcaattaactcaaa

SEQ ID NO: 15787 - DNA, 436 bp, Homo sapiens
  misc_feature 13, 28, 58, 133, 350, 425, 426: n = A,T,C or G
ggtaccgggcccncgctcgagagtactnctagaattaattaaggcgggctagtgtctncttcttgggaatgtggccctcggggccatggtctcctcacaccattcagaatgagcctatgaccccccaccccancctgctctggaaatgcaggcagcccatataagaagcctggtcacatgctgttcctcttgcttccccctaagtcagcatctctaggcaggggtctcccctaactccagcttcccaaaaacccccattacctttccttctgaagccatgatgtggcggtgcatcgacttgtacttctagctgaactgcctgttttttaggtttttttttcccaaccatnttaactgattaaagtatcctatcagtccccaaatatcaagaagcccatttccaaatgtgtggcattggccaaaannaaaaaaaaaa

SEQ ID NO: 15788 - DNA, 692 bp, Homo sapiens
  misc_feature 300, 317, 320, 322, 324, 338, 355, 419, 421, 431, 434, 453,469, 509, 513, 538, 541, 544, 551, 555, 565, 570, 573, 575,576, 588, 592, 594, 596, 601, 607, 614, 615, 617, 626, 627,635, 637, 641, 642, 643, 650, 655, 656, 659, 672, 677: n = A,T,C or G
  misc_feature 680, 686: n = A,T,C or G
actaagcccagccaaggaactacaccttctcgctgaaggaggcgcctccggcttcccattggcagagctgaacggcggcgtgagtgctccggtgctttggggccatgattaggtaaataagagtggcttgaacatggcactgtgatatggtgatgggggatgtgggaaccacaccggctgctaagtgatcaacaggtggtggcatgaatagcctggacacgctggacaaaggttatgtcttatgaagtcaaatggtcaatttcctgatgctcatgtgcctttgggcttccccaaacaccnccactccctgagcaaanacncncntaacagaaagtcanccgttattttatgccanagcgaaaggcgtattcacaaaagggcttgggccttagtatccaatatccccaaagctcccttgnanaaataatttntgnccttgcctttttccaaaanttggacaaaggggaanaaatcccgaattccttgggccaggacaagaatcaagaatnttcncccaaacttgttgcaaaaaaccggnccngtnccttttnaaanggttaaaaanacttnttntnnttttggagaaantccncntnttaanaaaatntccaaanngntgggggggnncccctttngngaannntaaaacnttgannccnccaaaaccttttnaaatngancccccnttttaa

SEQ ID NO: 15789 - DNA, 396 bp, Homo sapiens
  misc_feature 176, 197, 304, 332, 342, 384: n = A,T,C or G
actaagcccagccaaggaactacaccttctcgctgaaggaggcgcctccggcttcccattggcagagctgaacggcggcgtgagtgctccggtgctttggggccatgattaggcaaataagagtggcttgaacatggcactgtgatatggtgatgggggatgtgggaaccacaccngctgctaagtgatcaacaggnggtggcatgaatagcctggacacgctggacaaaggttatgtcttatgaagtcaaatggtcaatttcctgatgctcatgtgcctttgggcttccccaaacaccaccantccctgagcagagacgcgcctaacaganagtcaaccgntattttatgccaaagcgaaaggccgtatcacagagggcttgngccttagtatcc

SEQ ID NO: 15790 - DNA, 627 bp, Homo sapiens
  misc_feature 16, 23, 26, 27, 28, 30, 53, 56, 58, 65, 75, 159, 171, 227,362, 488, 531, 590: n = A,T,C or G
tagctgtttcctgtgnggaaaanaannncnccaccgcgggggcggccgaggtnccntntgataanactgaggcanactattttctaataggggaggagttctctgcattaatattccaacagattctcttaaaagaggaataacacttacaactataanaatggctataanaattgaacagataggatctgctatcatcaaaccaaaattttgcatcatgatggcanaagcaattacaccaatacttccaagtgtatctgctaggatatgtaaaaatacaccttgtaaaatctgtctgctgggtcctgttgtttcttttaaggacgggccatcatgaaaatgaaagtgtccatgtccatgancatgatcatggctatgtgcagcaccatgtttcacttcatggctatggcaatgatcgacatggccatgtgcctgatctagagcaccattaaagagggaatgactgtgtccgtggccagagccatganaatgtccatgacctccatgtttgaaaacaaatattcctattangtttgccacaaacccaagaatggaaacaagaagcagtctctcatggtggacatctggangggctaatgctctctcaactccttttgagaaaataaa

SEQ ID NO: 15791 - DNA, 414 bp, Homo sapiens
ccgcggtggcggcccgaggtactgcgatatccacatatttttgagaaaaattcccaagccaggcgaatgtggattggaataaagacataggcagtgtataccaccatagcaataatggttagtaagatggtgttaaacatagatcgctcccagggctctaaaacagcacagcagctaatgatttggtattgatagtagagccaggagaaatattccttcacacgcctcaaatccatggttggctccttcaagctgcagtaagtttgtcccaagaaagtccaggtctggttcttcagccttgctccttcgcgaaatgatcctgtgtgggttagttctcctctctgggttgctgtttcctcatctcccagttgggtgtatctccctgcggcttaggtgagcgccgaggctttggct

SEQ ID NO: 15792 - DNA, 339 bp, Homo sapiens
  misc_feature 17, 18, 20, 21, 27, 29, 32, 41, 46, 49, 50, 53, 57, 66, 70,84, 116, 118, 136, 154, 201, 251, 264, 290, 326: n = A,T,C or G
ctagctgtttcctgtgnngnnaagaananctncaccgcggnggcgnccnnccngccnggtaccgantcantgtggacaacgaanacagctacatgcttgtgatgcgcaatatgttnanccaccgtcttcctgtgcncaggaagtatgacctcangggttccctagtgtcccgggaagccagcgataaggaaaaggttaaanaattgcccacccttaaggatatggactttctcaacaagaaccagaaagtntatattggtgaanaggacaagaaaatatttctggaaaanctgaacagagatgtggagtttctagtgcagctgaanatcatggactaca

SEQ ID NO: 15793 - DNA, 455 bp, Homo sapiens
  misc_feature 339: n = A,T,C or G
attggagctccccgcggtggcggccgaggtactctgaggccctgatggctctcgccaccatggcgtcactccgcgaccacagcacaccagaaacactcagcattatggatgacctcatcagctccccaggcaaaaacaaaagtgggaggggacacatgctcattatcagggtgccctcggtgcagctggcgatgttagccaaggagcggctacaggaggtgcgcgacaaactgggtctgcagtatcggtttgagatcatccttgggaacccggccaccgaactcagtgttgcaactcactttgtggcgcgattaaagagttggagaggaaatgaaccanaagagtggatccctcggacataccaagatttagacggtctaccttgtattgtgatattaactggcaaagatcctcttggagaaacctttcccaggtctttgaagtacctgcccggg

SEQ ID NO: 15794 - DNA, 157 bp, Homo sapiens
acgacgggagaaaaatgcatgaatgtcatcagtgccaaaaagccttcaccacgagcgcgtccctcacacggcacaggagaatccacaccggggagaagccttacgagtgcagcgactgcgggaaagccttcaacgacccttcagcccttaggagcca

SEQ ID NO: 15795 - DNA, 274 bp, Homo sapiens
accgagtcagtgtggacaacgaagacagctacatgcttgtgatgcgcaatatgtttagccaccgtcttcctgtgcacaggaagtatgacctcaagggttccctagtgtcccgggaagccagcgataaggaaaaggttaaagaattgcccacccttaaggatatggactttctcaacaagaaccagaaagtatatattggtgaagaggagaagaaaatatttctggagaagctgaagagagatgtggagtttctagtgcagctgaagatcatgga

SEQ ID NO: 15796 - DNA, 410 bp, Homo sapiens
  misc_feature 163, 173, 176, 178, 183, 186, 191, 195, 202, 205, 212, 223,302, 352, 367, 377: n = A,T,C or G
acttgaaccgctttaggtgcagggccaagatcatgggcagcttttttaccctcatccttttctgggcttcttgtttgctgcagcatgtttcacaataatatttttgttcactacacagtgtttctgtgttgctgaagtctcttagacagtgggtaatggatgnattctgctcnacntnaacanaanggtcnaganaattttnatntttgctnctaacagtttnacagttcaagcatcgagtttcattggtaagcgttccctgaaaaatctcatggacccaggtgagttctggtttattattntacgcaggttcgttcatgttgccattttttaattctccattttgtttttnctgtttcttctcctnctgaaggatntccccaatagtgtttatcaaataatttaaaaat

SEQ ID NO: 15797 - DNA, 293 bp, Homo sapiens
  misc_feature 161, 285: n = A,T,C or G
cgcggtggcggcccgaggtaccccatcgactgcgtcaagacccggatgcagagtctacagcctgacccagctgcccgctatcgcaatgtgttggaggccctctggaggattataagaacggagggcctatggaggcccatgagggggctgaacgtcacagnaacaggcgcagggcctgcccacgccctttattttgcctgctgcgaaaagttaaaaaagacattgagtgatgtaatccaccctgggggcaatagccatattgccaatggtattgagccttactgngcttggtt

SEQ ID NO: 15798 - DNA, 648 bp, Homo sapiens
  misc_feature 13, 65, 170, 200, 298, 627: n = A,T,C or G
ccgcggtggcggncgaggtaccctgggccggcaggcagtgggacacccacgggggcccaagcctnttgaggtcggtccgtacagaacagcgtggcggcagaattacaaaacattctcagagagactgcaaaggacacttagctcttccggaatgaaagcacgcaacgcancataaaaagcatcgaaaccccaaacagcanagtgttaaaggcaattgcttccaggtagtgacgtagtagaaccgccggggccaaactcaatgtctgatgagcagccaacatgagaacggggccacctncaaacacccagacacctccaactgtcagatcatcgcctgtcaactcagagtaaactcatggagaaattggggcgagcgctaacctcaagatcgggcaacatatggaacccaaagaaagaagcgaaggaggccccgggcccacagcacagtgtatgggaaaatgacatttctgacagcaaagtggttaatcacagggaggggtgttcagagcctcccaggaccgacttcctgcaagtcagcatcagacggtccactgcgccactagtgggaacttctacttcaaaacaccagctgtgggccctgtgttcttttcaaacaaagggccctgnatttgaacagaatgctttgct

SEQ ID NO: 15799 - DNA, 424 bp, Homo sapiens
acatgaagggcaggtccacgttgtagttggctgggccatcgatgatggtaaggaacagctcgaaggtgctgaacagggccatggggtagtcgtagaagtggcctagctcctcggggtcctctgtctggaagatgatatagaaggctgctccacccaagggggtgagggttaccatggcaaccatgcagacgaccagcccaccccgggctctgcgtgcatgtccatcctggtcccttcatctcaatatcaccagctctgcagtgctccaaactttgggtttttacggtccctagttttgtatgagcctcatcttgatcctaagagccacctctccctaacactcccgatttttctcacctctggaggacgtcccatcctctgataccataggtctcctctgatctctgcattactcctcctcccc

SEQ ID NO: 15800 - DNA, 646 bp, Homo sapiens
  misc_feature 24, 25, 29, 33, 38, 40, 41, 54, 55, 62, 65, 72, 73, 74, 79,82, 83, 84, 89, 90, 94, 99, 108, 130, 132, 139, 169, 171,182, 289, 391, 414, 473, 548, 572, 600, 615, 627, 633: n = A,T,C or G
attggagctccaccgcggtggccnncgcncggnctggntnnaagaaaccaaggnngaaaagnggntcctttnnnataanggnnncgggnnaccnaaggnctacaaggnagagaagggcaagcgtggcatncnacggggntggacggcgtgaagggggagatggggtacntnttggtgatctncttttgcaaacccaacacattctgggtcctatagtcacattgattttcattatctctagtagaaagagctgggatttgaagctctttggaaacttctatgttttcanagataggttctttatcctcttgggttttgaaaaaaaaattacctttttttaggccatgcaccacatctttatcattatcctcatacatgtggttcattccanaaattatttctgtcttccggttnactttctttctaagcttattaatgtttgattcattttgctctgagggttgaatatcagngacatactttttcaaatccaatatattgtggggtcccataatcacataaatttccattatcttttggtgggaaanattggctgggggaaattcatttgngaccgctaaggtttttcataaaatggtnacttttatccctttngggtttggggangtaaanttatcttttttct

SEQ ID NO: 15801 - DNA, 407 bp, Homo sapiens
ccgcggtggcggcccgaggtactgattccctacgatgcagatttgaatcacagagtaattaaaatatggatcaaataaggctggggctcaccaaggctgaaagctgtagccattcaaggcatcatttctgtcatgaaaatataggaccttttcaaaacatgccttcaggaaggtgttctcttttcaaacaaaagtctaatgactgcataactcttcttgaccacatcttacactttctctagacttgcttatttacagctactggaacaaaaagatgaaatgaataaagcacactgattgtcctaagagtcttctgtgactaaaagcacatgagcttctccccaggctgagctttgaccctcccaagcatttccccaaaggccatgacactgcatcagattgctcct

SEQ ID NO: 15802 - DNA, 444 bp, Homo sapiens
  misc_feature 279: n = A,T,C or G
gagctccccgcggtggcggccgaggtaccagtggcaccagcagcccaccagccccctgccgccctgtaccttcgggagcagatcaccaggacagggaatctgcaggccagggaggagcagagcttagccgagtggcaggtgggtgcccagggctgtccagtccctttcctgctgctgctccatcttcctgcatttccacgtctgtgtctgcccgtggggatatgctgccgcagtggcaggaaaagaagaaagttgcctctacccttctaggttctgtgntggcctcagaatgaactgacttaagacagatgaacagcagagaaaaagataaaaaggcaattttaaattacagatgcacacatagggtggagagaaggggcctcaaaaatcagactcaaagaggcagccagagggtaggggctcagtacctgcccggacctgccc

SEQ ID NO: 15803 - DNA, 755 bp, Homo sapiens
  misc_feature 426, 489, 504, 508, 518, 554, 612, 619, 624, 652, 656, 683,698, 706, 708, 721, 723, 737, 742, 743: n = A,T,C or G
acagctttgcaaacaggctaccccagggcttgcccttttttgtgagggtagtcctttgggatcttgaccccttccctggatttttgtctgtgttaatgtcttcatgttgtgtatttttgcacttaatatttgccctgtgtatgttttcccagcttatttacacacaaagcataacagatctgagcataatgagactgcccatctttttagctacagatacctgtaaagttgcatatttgtgggaacctgtattctgagcttaattactgtagcctgggtctttcatttcaagatgatgtgcgaggtgatgccgaccatcagcgaagcagaaggcccccctggaggaggtggaggccatggttccggctccccttcacagccagatgcagattcacattttgaacaagttgatggtctccatgctanaaagaaagggaccgccttcttgatacactgagagagactcaagaaacgctggccttaacccangggaagttacaccangttngtcatgaaanaaattccttgcagaaacagcttaacacgggactttncacagggagttcgcaagcacttactaaagaactcaatgtatgcaggggaacaacttcnttgaaanggganaaaaaaattgcttgaacttgaaagccanaaanggaataaacacccaggcttgctgttanaacattttggaatgncttgtttncnaggcattgaaacngnctttttttagaatnaaccnngggtggaaaaaa

SEQ ID NO: 15804 - DNA, 459 bp, Homo sapiens
tggagctccccgcggtggcggccgaggtccaaggccaagctgaagccaggggctcccttgcggcccaaactgaacccgaagaaagcccgtgcctacgggccaggcatcgagcccacaggcaacatggtgaagaagcgggcagagttcactgtggagaccagaagtgctggccagggagaggtgctggtgtactgagttcagatatcttgccccggtgggccatcattggttggctcctgacaacgtgcacgtcaaatgtcgctgcctccaatgccaagctggctttgttttatgactggctgttctttagtccagacaaggatagcattatgaacatagaaccagccatcctggtcatgcaccactccatgaagccccacccagccatcactgccacactcctggacttcatgtgccgcatcattcccaacttctatccaccattggagggccacgtgc

SEQ ID NO: 15805 - DNA, 454 bp, Homo sapiens
  misc_feature 55, 222, 228, 253, 256, 298, 369: n = A,T,C or G
gactacttagggcgaattggagctccccgcggtggcggccgaggtacacgataanggaagagatcccagttctgatacatatgaggaagattctgagttgttgctccagatacgaaatgatgtgcttgactcactgggtattagtcctgacctgcttcctgaggactttgtcaggtacctcctgcttctggttttaattagagccttccccgattacatttncctgtnaattttttcctatctacattagatntgncatgttaaaaccccctacttctaagggaacttctctaatctnttatcctcatccccaaatagtgttttcttcctctgggttcttataatgttggtatcaatctcacagcattnagtgcctcctgcctggtgtgacagttacctgtgtgcatgtgcaatttctaatttcccacgctagactgtgagcttcctaaggcaa

SEQ ID NO: 15806 - DNA, 537 bp, Homo sapiens
  misc_feature 350, 374, 377, 379, 384, 411, 464, 475, 494: n = A,T,C or G
acccaaagccaggctgtggctgtccatacggtggcgcggtataaccataaccaaaaggtgcctggggagggacggcaacactgggtcctgctgtcagcatcaactggggctgaccataaacaatgggttgtgtctccgtagcttgttcttcttcttttctcagtgattctgaagcatctaatttatccacctttgtcaagtactcttttccccttactgacagctttccctggaagtgactttctcccctctgccaactgactccccactgcctctggggaaggagaccagtatttatggttgtcttgttcctggtgattttttttttttaaagtaggtcccttccactntcgtaaaaccccctggcaggtgtnttntntttcnccacttcagtgtgcaccaaatgttttnttgagcaattactttgggccaggcactgtgctgggtgctgtggctaacaaaanggaaatatgantagggtctatgccctcaanaaacataatcccccagggatttatggggggaaaaatgggggaa

SEQ ID NO: 15807 - DNA, 257 bp, Homo sapiens
acttcggtgcatctaacttaggctgtcttgttcaacttatttgtaaaaatgaacattcttgaagtatatagaaacaatagcaaaacatctttgtaaaagttttgatgcaaattaaaagctacatattggttagggtaaccgaggcttcaaaattcgtcagcgggctacattatcagataggatttctttgtcaatgtagttagtatgtatactgtttagtctcaggaacagaggcaagcagtctttaacattttaaa

SEQ ID NO: 15808 - DNA, 591 bp, Homo sapiens
  misc_feature 1, 3, 24, 32, 34, 35, 46, 55, 56, 57, 59, 63, 67, 76, 99,101, 102, 117, 122, 129, 131, 132, 136, 144, 145, 150, 153,155, 161, 164, 169, 175, 180, 184, 187, 188, 198, 200, 205,207, 208, 210, 213, 216, 218, 223, 224, 228, 232, 239: n = A,T,C or G
  misc_feature 244, 248, 251, 252, 254, 256, 258, 262, 269, 271, 278, 287,313, 325, 337, 339, 344, 345, 347, 349, 352, 353, 360, 361,362, 364, 368, 370, 374, 375, 378, 384, 387, 389, 393, 400,405, 411, 414, 415, 417, 420, 423, 425, 426, 428, 441: n = A,T,C or G
  misc_feature 442, 473, 474, 483, 555: n = A,T,C or G
nanctccaccgcggtggcggccgngacggtangnnccagcaggtgngggggtgcnnntngctngcanctgcatgcnctggatcaccaacaagggtaccngnngggtgtctacctctnccagnacaacgnanntggntagctgcnncacangcncnccattnccnaaaantggggnctggncacntgnnctaggggatntncgttntnncnctncangnactcnnctantgcngccccanatacncctncanntnantngccntaagctntnttgtacnctgatatgnaaccatgtaaggtttcactcaagagngcgtgatggggnatctatggccantnaaaanntntncannccgaccnnnanttgnanattnnctnaagacnaantnatcncaataancaatntggggngcnngntgnctngnnanacacacactctanngaagatacctcacgcttcttgtgttctgctnnctgaacagncaccactgggaacccagtggcctctgtgggactgaactcctaaacgcagggtgcgggagctgggcaggaaangtgacctccaactgtgttcctaaagttcgtcttttc

SEQ ID NO: 15809 - DNA, 348 bp, Homo sapiens
  misc_feature 163, 170, 176, 178, 180, 185, 192, 222, 232: n = A,T,C or G
tcattgttcacgcctctccttcgcgtatgtgttttctactgttcttgcactgtaaaggcagaggttgcatcgggcccttatgcaaagccccaaataattactggctgactcttctcagggaacatttgctaaccctgtcacaagccataaggttccaccacanattgccntgtggntntntcgtnacgtttntgtgtggacgtttccacatggtctgaggcnttcatccaanaagagcaggatgtattagtgactgcacagattctgccttggcccacaaagaggacatccagggcagtcctggtcatctgtaataacattgcccagtgagttgaggctgacctgagt

SEQ ID NO: 15810 - DNA, 455 bp, Homo sapiens
  misc_feature 2, 297, 302, 314, 321, 355, 369, 378, 412, 419, 420, 429,431, 432, 433: n = A,T,C or G
tnaaggaagattgaccctgttggtatgcctgtgggggtgggatgtgagtgggactgataaactgatacttttggttcgtatgtaccgggcagctggggagcaggagaagctggaggccaccaatcgctaccacatgcccaaggaaacccgaggacagccagcccgagctgtggatctagtggaggaggaatcaggagccgcctcgtctcaagttgtataaagttgtctccgtgtcccctcctccctctgcccccagtgtttcttctgatttttttttcccctttccctccctccctntccgnattcttcccttngttcagnacagggagggaggggaaacccgttttacaccttngggcccgttttaanaacctagtnggattccccccgggctggcagggaaattcgaatnttcaaannctttattcnannnccgggtcaaccctttaaggggg

SEQ ID NO: 15811 - DNA, 561 bp, Homo sapiens
  misc_feature 369, 559: n = A,T,C or G
tagggcgaattggagctccccgcggtggcggccgaggtacccccttttttttttttttttttagagacgaagtctcgctctgtcacccagactggagtgcagtgacacgatctcggtgccaccacacctgcctaatttttgtatttttagtaagagacagtgtttcaccatgttagtcagcctgatcttgaacacctgacctcgtgatccacccgcctcaccctcccaaagtgttgggattacaggcgtgagccaccgcctgcacccggcctgaatactctttgagccaatcaaatgttataaattaaaatcacattaactcataatcttattccttaaaatgagtgacttacaggtgtcgtaacaggngacttctcactgcttggagaatccacttgagaattgagatttggcaaatgtagttggttggcttcaggcattttgtccagaaatggaaatgtcagcgttgcttcgggttctggagattttggctttaccaccttttgtgacagcaccaactccacctttccactcatttcattttctggtttcttctggnct

SEQ ID NO: 15812 - DNA, 357 bp, Homo sapiens
aaagactccacggcctcctgccacctgggagatagttggattatctgtgccttagcatggcctcccaggccctccttacccaccttttcagcacatcccaccctccagtgctgtcacgccagatcctgtttgtgcctcgtgccctgcctcagtctctgctgcctccctgagtgccttctgctcccttctcaccagcggggccctcttgtccttcagtgccacacaaggacccctccctgagtatcccatccccacggaaacccttgggctcacaggcccacccaccacttgctggttgcgcagccttgggcaggtggctgaccttgctctgcccacccctggagggcgatgtctgtg

SEQ ID NO: 15813 - DNA, 265 bp, Homo sapiens
actccaggccacctcttctcccagcctttcctgggaggcgccacttggtatctgggacctcctctgctctaacacaaataagaattcctcaaaagttttctagcacacaacttgttctttcacctctttcacctctccaagaaagtcaaacacggtccttgcttttcccagtggccatggttacccaagcacaggaggccaaggcctggggctcaggccagcagagcaggatctctgcagacgtgtggtcccaggcttggccagt

SEQ ID NO: 15814 - DNA, 446 bp, Homo sapiens
  misc_feature 418: n = A,T,C or G
acgaaaaccccacaaacggcagttcttcacccgagaagcctgaggggctcagctggcacggagaggatgaaacccacgaattcttctctggttcatcaaaattggaggtgtcatcgtcagacttgagggtgggaacgaaggggggaggagagttacgaatgttgttccagtcaattttagagaagaaaggatggcagcaaagaccttcaaacttcagtctctctttctggccgcacaacaagctttgaatcagatcaagaaagtcactgctcactttggggtcatctggaaatttcaaaaacccctggaaattcataatgttattgaaggttctggcagaggttccctctgcgaagggggatctcccataaatcatctcataggcaatcacgcccactgaccaccagtcacagtccangccgtaggtgccttttccatccccgttc

SEQ ID NO: 15815 - DNA, 486 bp, Homo sapiens
acaaaacaaaacagaacatgagctgtctttctcagctctctactttgtaaataaaaagggggaaaggtgtgtgtcccttcagcatgcctcgtgcggcacacgataaagaaatcaaggggaatggagaaggtgattttcttcacctgcccatcgggtcaacctcagcacccagaccacagagactccccgcccacctcccaacctgccccatcacaaccctgaaggtcagaccaagtcctctatctgctaggacatggagggtagctgagaacaaatttaatagcttcaccttgaaagacaaaagacaggcaaacttatagcatgagacttaaaatgttgaaacttttctcaccaattctcccttctggccaggaactattttcagatgaggcaaaaaggtgaaaagagctccacaactcacctaaagccatcgccaggtagagaatgacccagctgaaggcctgcccagtgccaggcccaaaaggt

SEQ ID NO: 15816 - DNA, 270 bp, Homo sapiens
  misc_feature 36, 37, 38, 43, 51, 52, 54, 58, 59, 62, 66, 70, 73, 75, 78,80, 83, 86, 87, 88, 89, 92, 94, 96, 97, 99, 102, 105, 108,113, 115, 118, 120, 122, 123, 125, 127, 130, 131, 132, 135,141: n = A,T,C or G
tcatagctgtttcctgtgtctagctgtttcctgtgnnnaaaanaacggccnnanctcnnggncttncttnttncntgntncanaannnncgncncnncngangcngancgctntntantntnnanantgnnnggnctgtanccagcaaattacttcatcatctagattatccattcagttgatcctaattagcaaggataacaagaatcgtccgcactaaagtcccctgcagcgtgaccatgtcgagaccccgggaagaggctggctggg

SEQ ID NO: 15817 - DNA, 510 bp, Homo sapiens
acatgaagggcaggtccacgttgtagttggctgggccatcgatgatggtaaggaacagctcgaaggtgctgaacagggccatggggtagtcgtagaagtggcctagctcctcggggtcctctgtctggaagatgatatagaaggctgctccacccaagggggtgagggttaccatggcaaccatgcagacgaccagcccaccccgggctctgcgtgcatgtccatcctggtcccttcatctcaatatcaccagctctgcagtgctccaaactttgggtttttacggtccctagttttgtatgagcctcatcttgatcctaagagccacctctccctaacactcccgatttttctcacctctggaggacgtcccatcctctgataccataggtctcctctgatctctgcattactcctcctccccaagtttagccagagccagtgccccctagacttcctcatctcttccctgccatggcccctggtcctggacagatgattacctgaagc

SEQ ID NO: 15818 - DNA, 430 bp, Homo sapiens
  misc_feature 1, 390, 419: n = A,T,C or G
ngcccgggcaggtggcggcggagggccgaattcccttttctcaacggcttgatttcagagctgggctggtctctgacaggctcagctggagagggacgggttgggacgcactgtccttttgcccttccccctccgcgagcagaagctgactccgcaggagcgagggtcgcagagctgggggatttcagtctccacatagttttggagccggacttttgaagaatgattcgtgaatccggaatgggtgacagcgtcatcacggcattttattgacagaccatggattcttacagtgcaccagaatcaactcctaatgcatcctcaagacctgaagattactttataggtgccactcctctgcagaaacgattagaatcggtcaggaagcanagttcatttatcctgactccacctcgaangaaaattcccc

SEQ ID NO: 15819 - DNA, 919 bp, Homo sapiens
  misc_feature 6, 27, 32, 54, 65, 98, 169, 190, 237, 305, 307, 348, 404,456, 551, 621, 655, 679, 845, 848, 885, 903, 904: n = A,T,C or G
gggctnggcccccggggcgccaaacgngttancttttggttcccttggcccttnccaaccctttntttaagaaaagccaaaccaaatgggggttccancccggttcccccttttgggaaagggaaccccgaattttttggccaagccctttcaaaaaacgggcttcaangttggttcttcccaagcccanacttgggaaaaaaaggttcttgaaaagaaaagggaagggttttaaanaaaaaaaataccttaaatttggaaaattattaaattacaaggaaaaaaacttaggaaaaccatggttnangaaaaaagaaccatttttggaaaaaggggaaaggtttaagnttattgcccaaaattggaaaagaaaggggtgggggaaattggaatccaaaaaaggnattttttttaaggaaggggcccttaaaaattcccttttttggattggccccnaccaaccttggaagggggaaaaagggttccccttttcccccaagccggttggccttttaagaaagccatttctttggggaaaagccaaggggttnccttggttttttatttttcccccggggccaagggttttttcccccaaagaaaccccctttgggggtttcntttttggccccccaattgggggggggcccaaagnggggggggggttggggggcccggnccctttggccttttgggccttttcccccccctttcctttttgggttttttttaaatttaagggaaaaaaaaaaaaaattgggccccggggggggggaaacccaaaaaaaaacccttggggaaagggttttttggcccttttttttttttgggaaaccccccaaagnccntttggccccccaaggttttgggaaaaaaaggaaaagncccaacccttttttaatnngggaaaaaaaaaaaa

SEQ ID NO: 15820 - DNA, 610 bp, Homo sapiens
  misc_feature 25, 27, 29, 32, 34, 36, 40, 41, 47, 56, 57, 58, 68, 79, 131,189, 195, 208, 258, 264, 272, 281, 347, 360, 386, 448, 466,474, 483, 487, 489, 492, 501, 505, 527, 536, 543, 556, 563,592, 607: n = A,T,C or G
catagctgtttcctgtgtggaaaanangngcnanancgcnngggctnccggccttnnnggccctcggnagcctacactngccaaccaaccccacatccctcccggctgtagccaagaactattcggttctntacttccaacagaaggttgatcattttggatttaataccgtgaaaacttttaatcagnggtacncctgccctccttnttgagggtcccagcctgcgatgatgattcccgccatcaggtcttcccggnatcggnaacacatntccttaaanaggctggctgctgtgtggaccagtggaggctcattcagttcaatgctgtggaaaccgagctggtangtgacagcatcanctactgcctgggtatcagcagctgancctgagcgacagcaaaaaaatgcggtcgtgaataggtgtcagcttgccagtcactcgattgncgatgtaggacccagggnttgttctngaagtcccncccnanaancacgccccngttnaactgcccggcattgatagggntccccaggngaaaacntactggggttttnccatctnggaatggaatggcctcccgggcccccaanccggtgcttggcccnggt

SEQ ID NO: 15821 - DNA, 560 bp, Homo sapiens
actggctgctcccaccctcgcacgcaccctcaatacccacgggtcaccctggaagccgctacattctggctggtagagtcgtggaccctcttctccttggatcagatgcttgtttttgatgtcggcttgttgtggaccaatgtgagaagatgagcttcctgggaattcattcgtttgcttgtggcactaactctagtcacttagggaaaatatcgttgcacctgacttcatctcatgtggctgtgggtagacctgtgcagttagtcagctcccggcctggaaattaacacaaaggaaaaacctgaccacacaggccttcagggaagctgtggtctgagggtggctggtagaactgccagagagtagggcattttccatggctccagatcaccttctgaaaatgcgactatagcccctgcctattcccggggtccacctggtctgcagaccccataataccaggaagagctgggtgttctggcaccagtgaaacaatacctggttttttattttaaaccagcccatcttccccgctgcagttggaaccgttctacgtggat

SEQ ID NO: 15822 - DNA, 304 bp, Homo sapiens
acaatgccattggaggcaagtataaccggggtttgacggtggtagtagcattccgggagctggtggagccaaggaaacaggatgctgatagtctccagcgggcctggactgtgggctggtgtgtggaactggtgagaggggtagggcaagggagaagaagtttcctgcaatggtggtgacttgggtgggaaggggagggatgggcctgaaacttatttctgggttgtgtttgtgtttctttgtctctagtgtgctacggccaaatttagagtgaatcactccaagggttaactaatgtggggag

SEQ ID NO: 15823 - DNA, 406 bp, Homo sapiens
acatgctccacgggcatggccagcagcagggtgagcaggtcggacagcgccaggctgcccaggtggtaatgcaccgtgctctgcaggctctgcagcgacttcttccgcgccagcgtgaacgccgtcaccgtgttgcccaccgtgcccaccacgaagagcgccaggtacattcccactttcaccccctgaggttagaagaggccctaagcaacatgttatccacacatggttgctccaggtcaagtcaccaaagctacctctctgtcacccttgtcatggcagatttgggctgctctgtttagaatcaggcacatgagggagggaagtcgtgtattgacccatgtcccacgcaccctctcatctatgttatatggtggatgcttcacagaagccctgggaagtagat

SEQ ID NO: 15824 - DNA, 610 bp, Homo sapiens
ccgcggtggcggccgaggtacaatgatgtgactgcaaagaaaatgactaaaacaaaactttacaaacatcttcatgtttgtaatgtattaatgcacaaaatatcaaaaatagaaagtctgagtttcttccccgcaggtttatgataaactatcaaccttctatttaatgcatttccttttttttttatttatagagatggagtctcgctatgttgcccagactggtcttgaactcatgagctcaagcaatcctcccacctcggcctcccaaagtgctgggattaccggtgtgagccactgcacttggccttaatgcatttacttttataagccttctctgtttagaagtactattagccatggtcaaccccaccgtgttcttcgacattgccgtcgacggcgagcccttgggccgcgtctcctttgagctgtttgcagacaaggtcccaaagacagcaggaaaattttcgtgctctgagcactggagagaaaggatttggttataagggttcctgctttcacagaattattccagggtttatgtgtcagggtggtgacttcacacgccataatggcactggtggcaagtccatctatggggagaaatttg

SEQ ID NO: 15825 - DNA, 513 bp, Homo sapiens
cgaggtactggtgtaagcccctgtgtttccaaaagttaagttgctcaccaaatgcaacagagcctgttccaaagaaactgcccctgcattttttccaatcaggtagatactatgttgaactcctttgattttgagacagggtctcctgtcacccaggctggagtgcagtgatacaatcacggctcaccacagcctccacttcctggcctccagccattgccccgcctcagcctcctgcatagctgggaccacaggcatgcagcactatgcctggccaatttttgtattttgggtagagacagggtttcgccatgttgcccaggctggtctcgaacgcctgcctaagcctcccaaagtgctgggattacaggcgtgaaccaccccgcccagccccatgttgaactcttaactgccaagcagagaaaaaaaaatccttaccatactaagacaactttaatgatactttcacctttgggcaaagggaaagcattcttgaatatatcttaagaacca

SEQ ID NO: 15826 - DNA, 585 bp, Homo sapiens
  misc_feature 135, 451, 525, 537, 538, 539, 541, 548, 561, 569: n = A,T,C or G
aaaaacagatgcaattcccggtcgtgtagcggtgaaagtggtttggtttagacgtccgggaattgcatctgtttttaagcctaatgtggggacagctcatgagtgcaagacgtcttgtgatgtaattattatacnaatgggggcttcaatcgggagtggacaccagccaggacagagcttcccaagacagcacaggtcccttctcctccaggcagcctaccctgcttgccaggcctgcctgtctcccaccctggacaggagccccaggggcacgggtggtcaggtccacgaaccacaaagtcaaagcaagctgcatccagtccccgttctactgcctagctttatgtgaccctggacaatccccttagccacaccgagtccttacctctgaaacggtgataaaaattctcaccttctaaagttactatgaagattaactgagatcattgcncacacagcaacgtaaatgaaactagcccatggtaaacttttaaatctacctttgctaattattattcgtaaaantctgtgggacannncntaccttncccgggccggccncccggccnggtttttttttttttt

SEQ ID NO: 15827 - DNA, 524 bp, Homo sapiens
ccgcggtggcggccgaggtacagatggaactctgcaaacctccacagacttctccaaattctggaaaactctctcccagtagcaatggctgtatgaatacacttcatatcagcagcacaaacactgtcggggaagtgatcgaggccctgctcaaaaagtttctcgtgactgagagccctgccaagtttgcactttataagcgttgtcacagggaagaccaagtctacgcctgcaagctctcagaccgggaacatccactctacctgcgtttggtagcagggcccagaacagacacacttagttttgttcttcgtgaacatgaaattggagagtgggaagccttcagccttccagaactacagaatttcttgcgcatcttggacaaggaagaagatgaacagctgcagaacctgaagaggcgctacacagcctacaggcagaagctggaagaagccctccgtgaggtgtggaagcctgattaaagcggggctccctgcccgtgaggcccggtgcaggaccgatgt

SEQ ID NO: 15828 - DNA, 437 bp, Homo sapiens
accaacttgccagactcttgtgctaccattttaacggattcttcaggatcaacatgaaaaattaagtttaaaggaaaactagtgtttttcaaaaattgcaaaattacttcgtatttttaaagctaaacaaggcatttttaaaaaaaatttaacataaacattcacaatgtgtccctcgaatggcatttgagaaaagggagcacaggggaagtctcttgcttttcctattcatggtgggcaggaagtgagacaaccaagctggactaaaggcaactcactgtgcccaaatggcagcctccatggagttaagttagagccattgactgctatagaaagcattattacaacatatcagtatttgctattgggaatttatattttttgagaaaatatttacctatgcaatgtttgattgaaaatcactggagttttcctgt

SEQ ID NO: 15829 - DNA, 553 bp, Homo sapiens
  misc_feature 21, 417, 511: n = A,T,C or G
actccagcctgggcaacaagnagtgaaactccgtctcaaaaaaaaaaaagaaagaaagaaagaaagaaaaagctcatcaacaaggccatcgagtccctgcacgggcagcccctgccactctcccctgcacccacacaccatctgcgtggctttcttcccttggagggaggtatcccaagcatgttcttactcctgcccagacactctccccagatcctggcacagctgcctcctccttaggattcaggtctcactgtggatgtccctgtgagagccactcccaggtgttgtccatcgcattaccctatcctgtcatgccccccagcacttagaagcatctgagattatcttctattgtttctccaatttagtgtcagctccatgagggcaaggatttgtgtctgttctgtttattgntaaatccccattaaaactattcctcagggctgggcgcggtggctcacgcccgtaatccctgcactttgggaggtcaaggcaggtggatcacgangtcagcagatcgagaccatcctggctaacatggtgaaacccg

SEQ ID NO: 15830 - DNA, 374 bp, Homo sapiens
  misc_feature 105: n = A,T,C or G
actggctgctcccaccctcgcacgcaccctcaatacccacgggtcaccctggaagccgctacattctggctggtagagtcgtggaccctcttctccttggatcanatgcttgtttttgatgtcggcttgttgtggaccaatgtgagaagatgagcttcctgggaattcattcgtttgcttgtggcactaactctagtcacttagggaaaatatcgttgcacctgacttcatctcatgtggctgtgggtagacctgtgcagttagtcagctcccggcctggaaattaacacaaaggaaaaacctgaccacacaggccttcagggaagctgtggtctgagggtggctggtagaactgccagagagtagggcatttt

SEQ ID NO: 15831 - DNA, 538 bp, Homo sapiens
  misc_feature 529: n = A,T,C or G
acttgttataaaactacttacacccatgtagaatgtgcattttgcagcattaacaatttgtgcatggtggttctattgcataatatatactgaaaaaccatcatctgtaaatcattacaaaaataaataaaacactttagtaacctgtgaaaatctaacaggcaagttaatgaacaaccacaattacacaaaattgtcagtgaaattctaaagaattactgcttatgaactacagaaaaaacagaagggacacacaataggaaaaataatatgttgagaatcactaaattttgaaatatcagcttcaggtaaatgcacattactataaagatgaagaattaggaggggagtctgaaataatttcatgcctgcagttatatgacagcagtatatagagaaactccctgactaggaaatgtcatctagttttccagttctatggccaaaaaaatacatataatgaaagctgtgtgctttaacattttattatgtagagtcagagaaatgttgatatgaaaaaaaaaattcnaaaaagaaa

SEQ ID NO: 15832 - DNA, 418 bp, Homo sapiens
tgattggagctccccgcggtggcggcccgcccgggcaggtgaagaagataacccagtaatacgatcatacttcaaacgtgctgatccattctatgatgagcaggaaaatcacagtctcattggggtggccaatgtcttcctcgagtcacttttctatgatgtgaagttacaatacgctgttcccatcatcaaccagaaaggagaggtggcaggtcggctgcacgtggaggtgatgcgactcagtggtgatgttggggagaggatcgcaggaggcgatgaggtggcagaggtctcctttgagaaggagacccaggagaacaaactggtgtgcatggttaaaatcctgcaagctactgggttgccacagcatctgtcccactttgtgttctgcaaatacagcttctgggatcaacaggag

SEQ ID NO: 15833 - DNA, 429 bp, Homo sapiens
acattcagatcataataattcttaaaatgaattatttcctcaataaacccatttgctacatctggaaatcttgcttccgtttctttcactagtagttcaacgagctcttgatctacctctgcagcttcttgcccccaaatgttttccaaattgggctcttgagattcttgcattggaaaggctggacctggctcttcatcatcacttgctaactgctggtcttcaaactctcctagaggatgggcaggctgaggagaagaggggcctgaaatcccaccttgctggggttccggccttggaaaagcgggccctgggaattcatgctgaaacaacaagcggcccagttctgcttcaggctgccgttcctgaggaacgacctggtttgttatttcacggggctgttggttcagagactggaagtaaggatga

SEQ ID NO: 15834 - DNA, 382 bp, Homo sapiens
  misc_feature 274, 285, 294, 309, 325, 336, 340: n = A,T,C or G
ggcggcctacctgcagtggcggcgcttcgttttcttcgacaaggagctggtgaaggagccgctgagcaatgatggggccgctcccggggccacacctgcttctggatccgctgcttccaagttcctttgcctccctcctggcatcactgtctgcgactcaggccgagggagcctggtctttggagatatggaaggccagatctggttcttgccacgttccctacagcttacaggcttccaagcctacaaactacgggtgacacacctgtacctnggccgctctanaactagtgnatcccccggcttcangaattcgatattaaancttatcgatcngtcnacctttagggggggcccggtacccacttttgttccctttagt

SEQ ID NO: 15835 - DNA, 434 bp, Homo sapiens
acccaagtcggggacatgaagttggacggaggaagacaatcaactggtgtagtgagtttgaaagagatcattggtctggaaggtgtggagctgggtgctgatgggaagactgtttcctatacccaatttctgttacccacaaatgcctttggagcccggagaaataccatagactccacctcctctttctcccagttccgtaacctgagccaccgcagcctctccataggccgggcaagcggcacccaggggagcctcgacacaggtagtgacctgggagactttatggactatgacccaaatctcttggatgacccccagtggccttgtggcaaacacaaacgcgttctgatcttcccttcctacatgacaacagtgattgactacgtgaagccctcggatctcaagaaggacatgaacgagaccttcaagga

SEQ ID NO: 15836 - DNA, 452 bp, Homo sapiens
  misc_feature 18, 430: n = A,T,C or G
acgctctgtctccaaagnatgaaaaaggacttctctgccctcaagggaaccccacagtatcttagaggagacaatcatgtcggtgagatggtgtggtgatgaagcctgctgggtatacagctcagggaaagtcatcgatgatggctcaggctcagcctgggcacgccccagaggagagagatggagtggggcctcaaagggcaggtttaggcagaaaagaaaaagggcattccagctggggcatgtgcaaaggcagcacgtaatgtgtaagttctagatcgtcagggaggaagggtcagttgggtgcctgtttttctgtttttagtcctttaaaatgagtagaagcaacctgttaccctggaaagagcactggacatagacctagtgctgcgtgatgttgagcacgtttcttcttccctttgagtcccantttcccttttggttacaggggg

SEQ ID NO: 15837 - DNA, 256 bp, Homo sapiens
ggtagcccggagtcgtttcagaagagtcctgggatgcttggggtggcgtgggcttgcaaggcgctgctggtttttgccggggatttactatcacgtagtagtgaagttatgggggctctatggcacagagcatcactgggactccgggaccgatggtggcgcccagtgaggatgcccactagcattctgccccagttggttggtggggggacacctgaccactgagcctttggtaaccttattttttatagtaagt

SEQ ID NO: 15838 - DNA, 279 bp, Homo sapiens
acttttgtctcctccaccccacccccatcattagactggcaatgtcttttgtcacgttgtcaaagtgtcctcagagaagcggtgtctagatatcgccgatttctggttaaagtggctgaagtgatcccagcattaattaaatgcaggagaatcgagattctcctgatagtttaaggaaaagaaaaattcacacaagcaaacgggcaaccctttgaatgttttccgacgacgtggtgctttaggatctgaaagatgcgacttggttgttgttgttgttgt

SEQ ID NO: 15839 - DNA, 349 bp, Homo sapiens
  misc_feature 236, 266, 267, 269, 270, 273, 274, 281, 285, 288, 293, 295,307, 308, 309, 310, 311, 312, 315, 316, 329, 334, 336, 337,339: n = A,T,C or G
acaaaaaagatgaaagttatgattggaataagaaatactatgcaaacattggctgaaatatggttaaaatacctgatatattttatcagaaaaagtagagttgaaggtaaaaatgaaaaatactggagttatgaagacattgtacttaccttagagttttccaatttatctcaattttatatggcttgtgattcattttcttaatccaaatatatataaacgtgtgtggtcttaanaaaaaaaaaaaaaaaaaaaaaaaaaaaaanngnnttnnccccccncccnttnaaaananggggcccccccnnnnnnggnnaattttttttccnccttntnnancccccccccc

SEQ ID NO: 15840 - DNA, 334 bp, Homo sapiens
  misc_feature 272: n = A,T,C or G
actgagggaccagccccacagcaatggtgccccggactccactgtccacaatagacacctcaaaataattgctgtccttggtcaggggtcgagaagccacgtagcagccaacttcaccagagtttccatgataacttaaagtatctccatctacaaggatatgtttgaacctctcctgatatcggaaagctcggacctctcgaatctcccggatccgccggcgccaattcagaaaccggtagtgcaggttgggtcatccatcttgtcatganaacaaaccggggccgccgcgtcctcctcatccataggcctctcagctccgcacacaagctct

SEQ ID NO: 15841 - DNA, 330 bp, Homo sapiens
tgaccaccaccgccactccggccccgatcatcacgccaagcaccattccagtttgcagcggagcctccatcggttgattccagctggacggccgatctggtagcccggagtcgtttcagaagagtcctgggatgcttggggtggcgtgggcttgcaaggcgctgctggtttttgccggggatttactatcacgtagtagtgaagttatgggggctctatggcacagagcatcactgggactccgggaccgatggtggcgccattgccaggggccgcagccggggtccactccgcgccaacaccgatagcgttccacccggctccgcaggc

SEQ ID NO: 15842 - DNA, 198 bp, Homo sapiens
  misc_feature 107: n = A,T,C or G
attggagctccccgcggtggcggcccgcccgggcaggtactcggcaaaagtcagcacatagcacttctcctcaatgcaggccacactgttctggtcctgatgtcgcnatgcaaacacttcattctgcaagggctcaaagggagacaggtggaggttgttaccagggctggaaagcacctcattcccagagcaaggcag

SEQ ID NO: 15843 - DNA, 402 bp, Homo sapiens
  misc_feature 170, 355: n = A,T,C or G
ggctcccccgcgggccctgtgggggcggggtcaggacagcagaccgttttattgcttaactcagtgggttggaagctgtaaccccgacatgggcttgcgctacgtcctgcccctccgacccccgggaaaggtgtaaagagatgcattttagttttgagctgcagctgaanaggaactctcctccaagtgccaagactgctcccctcctccagtcagctctcttggaaccagaaacttcctcctgggtggtgttgagaatcatggtgatgctctgcagaaaacctctcctctacattcacggcatggtgtaactcccacctccggaaggcggggacacagatcgagaacatcgaanaggacttccgggatggcctgaagctcatgctgctgctggaggtcatc

SEQ ID NO: 15844 - DNA, 494 bp, Homo sapiens
  misc_feature 22, 471: n = A,T,C or G
actgattatcggtccagcctcnaaggccgcagcgatagggaggccccaagctgcagggccaactctgaggagttcatccccatctttgccaataacccgcgagagctgaaagccttcctagagcacatgagtgaagtgcagccagactcaccccaggggatctacgacacactccttgagctgcgactgcagaactgggcccacgagaaggatccacaggtgaggcctggccagggcttcaggagaaaagacagttcgtgccgtctccattcttccgtcttggtggctgcctttcactgcattccttagaccagtaacaccttacctcggggctcaatggtcctctgtgaagagggaatgggactgagggaaagagttgactggctttgtcccaagaggaccttgtgatttttcccctttttgtccaagccagctcttgccctccttcctctccagggtcaaaagaggaangcttttcacgcaagaggcccatt

SEQ ID NO: 15845 - DNA, 306 bp, Homo sapiens
tcattgttcacgcctctccttcgcgtatgtgttttctactgttcttgcactgtaaaggcagaggttgcatcgggcccttatgcaaagccccaaataattactggctgactcttctcagggaacatttgctaaccctgtcacaagccataaggttacaccacagattgccctgtggctctctcgttacgtttctgtgtggacgtttccacatggtctgaggcattcatccaagaagagcaggatgtattagtgactgcacagattcttgcttggccacaaagaggacatccagggcagtcctggtca

SEQ ID NO: 15846 - DNA, 507 bp, Homo sapiens
acagaatgaaatcaaatcaatgaagaaaagaatgagtgagctatgtattgattttaacaaaaacctcaatgaggatgataccttccttgtattttccaaggctgaacttggtgctcttcctgatgatttcattgacagtttagaaaagacagatgatgacaagtataaaattaccttaaaatatccacactatttccctgtcatgaagaaatgttgtatccctgaaaccagaagaaggatggaaatggcttttaatacaaggtgcaaagaggaaaacaccataattttgcagcagctactcccactgcgaaccaaggtggccaaactactcggttatagcacacatgctgacttcgtccttgaaatgaacactgcaaagagcacaagccgcgtaacagcctttctagatgatttaagccagaagttaaaacccttgggtgaagcagaaccgagagtttattttgaatttgaagaaaaaggaatgcaaagacaggggttttgaatatt

SEQ ID NO: 15847 - DNA, 317 bp, Homo sapiens
  misc_feature 2, 263: n = A,T,C or G
tncaccgcggtggcggccgatctggtatgcccggagtcgtttcagaagagtcctgggatgcttggggtggcgtgggcttgcgaggcgctgctggtttttgtcggggatttactatcacgtagtagtgaagttatgggggctctatggcacagagcatcactgggactccgggaccgatggtggcgccattgttggaaaattcctgggtggccggtcctcttccacctcagggcacagctggctaccggtgtggaaacacccangggccgaaccggggtccactccgcgccaacaccgctagcgttccgccggctccg

SEQ ID NO: 15848 - DNA, 369 bp, Homo sapiens
gtattattccttctaggcatagtagggaggatatgaggtgtgagcgatatactagtattcctagaagtgagatggtaaatgctagtataatatttatgtaaatgaggggcaggggatgtccaaaccggacacacacagcacacaaaagaaaccgacaaatcgggcttccttaaaatgccaaacttctttcatctaaagccagcatgaggaagacaactgggtcagccacaaactgagagaagccatcaacggggagaaggtgaatactctggcttaatggcagggaagacatgagcaggtgttttatgaaaggtgacatgcagatgggcagtggaacggccagcctctttcttgccgctgtcctaaaga

SEQ ID NO: 15849 - DNA, 352 bp, Homo sapiens
ccgcggtggcggccgaggtacacccactctgccctcccagggtgggctcaccttggttgctgttcactttcctgtaagggaggggttcatttccaacgttgtatagatagcaaagagaggcccacaaggcatgggaccatctttcaccccaaacaatcactctgagtttgtgaatattttccggtcatggaaagagatttccaaaaattagctactcttcattgtttattcattgttagattcagtaacctcaggggagcttaaatatctaccatggcagcgtgattgtcacagcttcagctcttagggcaggacaactccacacttgtatattttaggatctttgcattga

SEQ ID NO: 15850 - DNA, 504 bp, Homo sapiens
  misc_feature 163, 200, 317, 351, 377, 438: n = A,T,C or G
acaagcttttttttttttttttttttttttttgagacggagtttcgctcctgttgcccaggctggagtgcaatggcgcaatctcggctcaccgtaacctccacctcccgggttcacgcgattctcctgcctcagcctcccgagtagctgggattacaggcgtntgccaccacgcccagctaattttcgtatttttaatanagacaggctcttgccatgttggccaggctggtcttgaactcctgacctcgggtgatccacccaccttggcctcccaaagtgctgggattacacacgtgtgccactgtgcccggcctntgaaacatttttaaatgaaaaaccgttgtcacanagtttggtgtgagtgtccacttttanaggggtgaagctgttgcctgccttctctcactccttccctcaaaacaaacgcacaactcanaaataagttgtaaaaaaaattttgttatttataaatcaattacacaataaaataattatttttaaa

SEQ ID NO: 15851 - DNA, 710 bp, Homo sapiens
  misc_feature 28, 32, 34, 65, 71, 254, 266, 282, 284, 295, 318, 361, 399,461, 482, 484, 485, 495, 522, 551, 564, 575, 588, 616, 634,637, 639, 647, 652, 655, 663, 667, 674, 675, 677, 680, 685,687: n = A,T,C or G
aatacgactcctatagggcgaattgganctgnanctccaccgcggtggcggccgccgggcaggtncctgtncacatttcaagatagcagcactcagtccatgccctattatccatcttaaaagttcacacattattgtttactgaataatatttctactgtctttacccccaaacattgcaaaacctgcaatggaacaatgctgtgagttataatgtagaaattttttttttttttttttttaggaaaatcagntacttcattttnttaatattctgaatgngnagttatcaganctctatacctaggtcatactcgngaagcaaaaatgctgcacaccactgaaaataataacgttatanatgtctatcaagattcatgaaaaccaaccaggcgcagnggctcgcacctgtaatcccagcactctgggaggctgaggcgggtggatcacaaggtcaaganatagacaccatcctagccaananngggaaacccngtctctactcaaaatacaaaaaattancttggcatggtggcgtgcccccctagttnccagcctacttangggaggctggnggccaggaaaaancccttggaacttggggaaggtggagggncccaatttacccaaaaancancntttactgnatttncanccgtgggncaanaaaaaannanaanttccncntttaaaaaaaaaaaaaaaaaaaa

SEQ ID NO: 15852 - DNA, 317 bp, Homo sapiens
  misc_feature 157: n = A,T,C or G
cctccctgtgctgtctgcaccgaggagagcggcctgccggtgggccaccatatctggaaactacagtctatgctttgaagcgcaaaagggaataaacatttaaagactcccccggggacctggaggatggacttttccatggtggccggagcagcancttacaatgaaaaatcagagactggtgctcttggagaaaactatagttggcaaattcccattaaccacaatgacttcaaaattttaaaaaataatgagcgtcagctgtgtgaagtcctccagaataagtttggctgtatctctaccctggtctctccagt

SEQ ID NO: 15853 - DNA, 447 bp, Homo sapiens
ccgcggtggcggccggcacgaatggcatgggagggttctctgcacgggacggcataacggcatgccatccttcaggctggcaggagcctgcgcaggtgtggcaaaatcttgaaacagcctgtgtcctgcctggcttttcactttcctatttaatataagaaagcacttttttttctgctttacctacaaatgggttgaaaatggcctcctctgtcctctcctctcttttatacactctgtaaaatcacaaaggtgcttcaacaccgactgtcatgcaaataatacatttaaaatagttgcatggtttcaaagacaatgcagacgtaattggcctttgactttgggacctcgggttactctcactccctactgcaaaacaaactaagggttgaaagcaaagcattctgttcaaatccagggccctttgtttgaaaagaacacagggcc

SEQ ID NO: 15854 - DNA, 471 bp, Homo sapiens
ccgcgagcccgtctctcctcgaatgaaaggaaataacctccggcgacagagccccgctctcaggcactgctggagaaccgagaccgacttctttctctttaccctcattggcgcttctctcctgcagtccgcctctgggccctgccgcatttcttgagacttaaagtggcattctaaaggcaatttaaaaatcatgtcaagctcagttgaacagaaaaaagggcctacaagacagcgcaaatgtggcttttgtaagtcaaatagagacaaggaatgtggacagttactaatatctgaaaaccagaaggtggcagcgcaccataagtgcatgctcttttcatctgctttggtatcatcacactctgataatgaaagtcttggtggattttctattgaagatgtccaaaaggaaattaaaagaggcacgaagctgatgtgttctttgtgccattgtcctggagcaacaattgg

SEQ ID NO: 15855 - DNA, 317 bp, Homo sapiens
cgccaggcaccacagtgggaggctggtaattaacgccaaccttgaagccagtggggcaccaatccacaaactggatggtacacccctggggctgtgcggtggccgtcggcggggccagcttcaaagtccaacccacaaggcacaggttttcaaatctttacctctgtgtactgcctatgttcaagaacatagacctggtatggtgagaacaaaaggttcctatgccaaatccagatggctatatcatttgttggctacaagtgagcctgactgcaaggtttgcttctgctgagaaatcccatggtgagagtagaact

SEQ ID NO: 15856 - DNA, 367 bp, Homo sapiens
cgcaactgtgtgatttgcttgttgagttttttgttgtctggtttttttgtttgtttgtttataccaataagaatgagccaccacacctgatcaaggacctatgttcctaaggagctccctggtaatgctaatactgctggtccacggaccacacttttgagtagtgagggcctgtgttcagcagcacagtagccaggagccacgtgtggctgtttcagtctccgtcttagttaaataaaactagaaaatccagtgcctcagtgactgtaattgcattgcatggaggaaagttctaattgggcagtgccacatcttaaaggaccgaatgatccactttttctttacttttaaattttctttctttata

SEQ ID NO: 15857 - DNA, 769 bp, Homo sapiens
  misc_feature 366, 422, 455, 470, 517, 529, 562, 571, 576, 582, 588, 602,604, 606, 614, 625, 635, 650, 669, 673, 676, 681, 682, 685,687, 688, 689, 691, 708, 715, 717, 719, 720, 724, 725, 726,735, 739, 744, 746, 747, 748, 749, 750, 753, 756: n = A,T,C or G
acccaaacctccccaagccctctgcattgcagacactgcagcctgcttggctacccctccccaacacactagattactatgtcaaatagacctgcaaaagggaaaggtgcacactcaggtccctgaagagcaaagaagttggacactgcctgctcaagaagttcattgttataagactcaggtattcataaaaggcctagggctaagctagtagcacagaaaagccgttaaggggatcacagcagaatacacagggcagaagagaagagttggcagcaggggaacggagtctcaaggtgaccagtagagagcacaacattctcaaatagtccttgaggtgctgattcctgggagtagtcagcaganggccagaacatctcccaggggtccttttggggaaggatgacttcactaagttttangggtgaagagccactgagctgggtgcacagaangccatggctcaaaangggaaagactggatctgagaaatcaaaaaggaagtgggggcccagancaatggctcacncctgtattccatccctgggaggcccagaagggngatccttgnggcangagttnaaggcnacctgggccaccgngngnaacccccnttcttaaaaantcccaatttnctgggcctggggggngcccctttattcccccctntttngangcttnngcnannngnttctttaaaccgggggnggggggngntnncggnnnccaaaaaancccnttttncnnnnnaanccngggggaaaaaaaa

SEQ ID NO: 15858 - DNA, 527 bp, Homo sapiens
  misc_feature 66, 272, 310, 494: n = A,T,C or G
gccgcccgggcaggtgtgcatgggagagagtgaagcacaagggcccaggcccctgggagtgcctgncctcaagttggaagagcccttgggcacagcataggcgcctggcagaattggactgggccatgacccagggcattgggacctcacctaggagttggggttctggtcagaagccctgtggagacagggtctcccctgtgggcaccaaactgacctcaaactgctggttctttggccctggggacggggcttgttgaagtacagcattnaccaatttgacatatggaattctgcctccggttatatngacgctgttgatgccggcaatattgctacttcgcttttttgcaaatgcattcactttgacaccatataatggaacagaagctctggtatggcttttccaccaaaagcctgaatctctcaatcctctgatcaaatatctgagtgccaccactggctttggaagaaattacattatgacccacaanatggacctagatgaagacactgctgaaaaattt

SEQ ID NO: 15859 - DNA, 536 bp, Homo sapiens
  misc_feature 22, 464, 503: n = A,T,C or G
cgcgggggcggccgaggtacanaatgaaatcaaatcaatgaagaaaagaatgagtgagctatgtattgattttaacaaaaacctcaatgaggatgataccttccttgtattttccaaggctgaacttggtgctcttcctgatgatttcattgacagtttagaaaagacagatgatgacaagtataaaattaccttaaaatatccacactatttccctgtcatgaagaaatgttgtatccctgaaaccagaagaaggatggaaatggcttttaatacaaggtgcaaagaggaaaacaccataattttgcagcagctactcccactgcgaaccaaggtggccaaactactcggttatagcacacatgctgacttcgtccttgaaatgaacactgcaaagagcacaagccgcgtaacagcctttctagatgatttaagccagaagttaaaacccttgggtgaagcanaacgagagtttattttgaatttgaagaaaaaggaatgcnaagacaggggttttgaattgatgggaaaatcaa

SEQ ID NO: 15860 - DNA, 450 bp, Homo sapiens
  misc_feature 131, 193: n = A,T,C or G
acttctagatgctgtattgaaattgctggcagagtttattctatacaaaatgaacaatctggccccttgttttatttgtaaaggttcaatgtatctatgcctgcctacctcaatctgcaagggagtgtcanaaaggccccgcattcgccaagcccaaaagggagacacttcagctggaacaaaatagtggaanaaatggcgtctggggttcagtggggattcgcagagatacaactcgtcaacgaatcaaattcagtgatgacagagtatgcaagagtcaccttctcaactgttgtcctcatgatgtcctttctggaactagaatggatcttggagaatgtctgaaagtccatgacctggctttaagagcggattatgaaattgcatccaaagaacaagatttttttctttgaacttgatgccatggatcatctgcagtcattcattgca

SEQ ID NO: 15861 - DNA, 583 bp, Homo sapiens
  misc_feature 24, 30, 41, 43, 45, 46, 48, 52, 56, 61, 74, 75, 90, 94, 103,105, 108, 116, 119, 121, 130, 132, 138, 139, 142, 143, 147,148, 149, 158, 160, 162, 169, 178, 251, 253, 262, 263, 264,265, 266, 268, 269, 271, 272, 275, 279, 280, 281: n = A,T,C or G
  misc_feature 286, 287, 294, 298, 320, 327, 409, 453, 501, 551: n = A,T,C or G
agtacttctagaattaattaaggngggganagggaaaaacnancnntntgtncttnctttntgtgacaaaaccnntaccccctgggctgntttngatacctananctnggcactangancncacattttnangggtcnnaannctannnaagaaaatncngnctgggtnaatgctgtnggtgttgtacatgtctctggtttgaagaggtatacacaattcatgagatacaagcttgaaaaatgccttaaananacaatggannnnncnntnnccnctgnnntcccnntatatancccntaattacttaaagcactcgccntcgtacnttaaggaattgcgtaaaatgtttagctgtatctgtaggctccaggtaacttaattttttaattgtattactatgatgttcantaaatgctgagtgaacttacattctttaaaatacatcaaaagangctgggtgcagtggctcacacctataatcctagcactttgggaggccnaagcgggtggatcacgaagtcaggagctcgagaccatcctggctaacccngtgaaaccgcgtctctactaaaaataccaaaa

SEQ ID NO: 15862 - DNA, 435 bp, Homo sapiens
gccgcccgggcaggtaccaggagcccatggatggcgtgacccagcaggcagcacagaatgtacttaacagaacttttgtttcgcacaatacgagaggcttgaagaagtggagccctagctgggattcgcttttttgaggccggcgttgccctgccctttaggggtgcccacgctctagctgcggccccggctcccttcgcattgtcgttagaggatggtgtgaagcaacagagatccttagctttcaacgaattcatatttgtgatttcctgtttgtcaaaacccttcctgcccacctaggaagtggtgctggccaagcaagtttactgtctgtccacgcgaggtctttctgaaccttggggtcggtgagctctcccgttaggtaatttcagttcgctagaggttgagtatgggacaattcgtggcaccatagtt

SEQ ID NO: 15863 - DNA, 382 bp, Homo sapiens
  misc_feature 2, 3: n = A,T,C or G
cnnattggagctccccgcggtggcggccgaggtactcaggtcagcctcaactcactgggcaatgttattacagatgaccaggactgccctggatgtcctctttgtgggccaaggcagaatctgtgcagtcactaatacatcctgctcttcttggatgaatgcctcagaccatgtggaaacgtccacacagaaacgtaacgagagagccacagggcaatctgtggtggaaccttatggcttgtgacagggttagcaaatgttccctgagaagagtcagccagtaattatttggggctttgcataagggcccgatgcaacctctgcctttacagtgcaagaacagtagaaaaacacatacgcgaaggagaggcgtgaacaatgg

SEQ ID NO: 15864 - DNA, 530 bp, Homo sapiens
  misc_feature 25, 37, 492: n = A,T,C or G
agctccaccgcggtggcggcccgangtactgatgcanacacaaattcctcggctggtcagtttaccactgaggcctgtaaaatgatatgcctgcagaatggctttcacattttccaatttctcttccaatgcttcttgctcattgatctccactgtttggttgggttctacattggcaatacatgctttcacgctggctcgccggtgccgcaccacagccctcagctcatctcgcagacgccttagtttatgaatcttggttccaagagcaccttcctgggcctgcacgctctgcagctcttcagactgtttacgggatctgctcacttgggtctctagcctttccaagtgagctaaaacacctcctttggactcgccatctggacgtaaagggttcgcctgctccatctcagattcccaagggccttcccatgaagttgtctaggcaaccggtgatagggactccaatgtccttgccaggccagaagcganaattcccgccatccacgtcttcaaaacctgcccgggcg

SEQ ID NO: 15865 - DNA, 425 bp, Homo sapiens
  misc_feature 202: n = A,T,C or G
ccgcggtggcggccgaggtactttgctttgattgaaggctgtagagctgagttaccaaaatttctatttcaaaggaaaccaaaccttaaaaaaaaaaacaaaaactgggctgggtcttccaaacctaccatgaaaccctggtgtgcaggctgcactcaatgacctcaacccaacaccgccctgagtgtgcttcttggaagancctataagattcctggatggagaccccattggttcagcctcaagtctggcccgtcttcgaaaaaacaaacacatttgtaagctttgtgggagcttccaggcctgctctaagatgccttgcttgtcctttgacccatcagcatggagcacagtggttgctgtttggttctgcaggctggtggggaggccgcccatcgtggtggggcatctgtccagccccattg

SEQ ID NO: 15866 - DNA, 444 bp, Homo sapiens
ggcggcggagggccgaattcccttttctcaacggcttgatttcagagctgggctggtctctgacaggctcagctggagagggacgggttgggacgcactgtccttttgcccttccccctccgcgagcagaagctgactccgcaggagcgagggtcgcagagctgggggatttcagtctccacatagttttggagccggacttttgaagaatgattcgtgaatccggaatgggtgacagcgtcatcacggcattttattgacagaccatggattcttacagtgcaccagagtcaactcctagtgcatcctcaagacctgaagattactttataggtgccactcctctgcagaaacgattagaatcggtcaggaagcagagttcatttatcctgactccacctcgaaggaaaattccccagtgttcgcagttgcaggaagatgttg

SEQ ID NO: 15867 - DNA, 411 bp, Homo sapiens
cctgagtctgaccatgagcccagatggggccacagtggcatccgcagcagcagatgagaccctgaggctatggcgctgttttgagttggaccctgcgcggcggcgggagcggggtgtgtgacctttgagttcagccaccttggccatggttgggtacaacaaattcatctgaatctacagacggcactgtttcagctgcattgcataaggcttgacaggacattctcgattgtgttagcttctgagtacaagcctcaccaagggcaaccccagaaaagtgaatgagtttgtcttctccaatcatgacttcctcgataagtttgcaacttccaagcttcaccagttctgggtgatcaaaggtagaggcaatttcaccacctgtgacaagagctaggcgttccacacctgcaa

SEQ ID NO: 15868 - DNA, 263 bp, Homo sapiens
acactgggcgctccttgctggaccacagaaaacaaatgggtaaggccacgtcttcatttattctactttgaaaccgtctgatttttctaagctgtttcagtagctcatgcgttgaataagtagccctggaaacactgacaatgaactctaggcttcactggagagatctcggcacagacgaaccctcttggcagaagcttccaccccacacttgggcctgggcctgtccatcattcactgtggatggggcctggggcaggggt

SEQ ID NO: 15869 - DNA, 385 bp, Homo sapiens
  misc_feature 221, 368: n = A,T,C or G
gactactatagggcgaattggagctcaccgcggtggcggccgcttagctccctgcttatgcactgtggatgtctctcccatgcctgaggacaggctgtgggtggatgttttgcacggcttggcagctgtactggcagcggtcgcccaggaagccgggtaggcatcggcactggggctggttgccctggttgacagtgcaggtgctgttgttggcacagtancccgcacacacctgctgggtgcatttggggcccgtgaagcccgtggggcaccggcacgtgggcatgccagagggggaggcagcacaggtgcccccattgcgacagtgctcccagcactggtccagttcacacttgtcacccgtgtancggggttggcaagcggc

SEQ ID NO: 15870 - DNA, 543 bp, Homo sapiens
  misc_feature 478, 533: n = A,T,C or G
aaatgtaatttttgatgagggagagtttctccaaggaggcaacatctgtaaagacctgcaggagttgagggcaggcgccattcatcttccagcctttgggcaggcctgcccacttctctccaaggaccttctcctgccctcatgtgggtcctctggtccagaatagacttgtgaagtcattgacaacaatcctcaaacactgcactcccccaagactgcataataaactcattcatactaaggtattagcagttcttcatggagaactcttgggtggggagccaagctctgaaaagccccgtgagggaatgccttatctcaggaaggagccctgggatgggaaccacccctcctccctgcctctctcccccacagagattgagtctcacattataaagcaagaagatatacttaatggcaaagagaatgagattaaagagttgcagcaagttatcagccagcagaaacagatcttcangtgaggggtctgggcccggctgggggttgttgatgacactggggagccagacctnttggccccta

SEQ ID NO: 15871 - DNA, 276 bp, Homo sapiens
acttggagggcttcttgatatggaagttcacgttgtccagctccacgttcaggctgatagaagcggctgagtcactgtccactgtggactggaaactgctgactgatgtgcgcttgctaggactggcagaattagccaaattatcgtcaccttcttcagctatctgttctgtgtcactgtcatcaaactttatgtctttaaaccaggatggctcagagtgtccttccacggagttcactgagtcactgtcgggagaaggcgtctcagaaaattctg

SEQ ID NO: 15872 - DNA, 299 bp, Homo sapiens
gcggagccgggcggaacgctagcggtgttggcgcggagtggaccccggctgcggcccctgggtgtttccacaccggtagccagctgtgccctgaggtggaagaggaccggccacccaggaattttccaacaatggcgccaccatcggtcccggagtcccagtgatgctctgtgccatagagcccccataacttcactactacgtgatagtaaatccccgacaaaaaccagcagcgccttgcaagcccacgccaccccaagcatcccaggactcttctgaaacgactccgggctaccaga

SEQ ID NO: 15873 - DNA, 561 bp, Homo sapiens
  misc_feature 8, 496, 515, 558: n = A,T,C or G
ggtacttnccaaacacaacatccatcctctcaccatgccgacacacaaaaaggcatcgcttctgggggccgggctggctgttgaccctcagcggctgcatgggctggcagatgatagtaagaggagtcgtctccccgagcccctggtcctcataaggccgcctctccaatactccatccccaaacgtgagagagttggacgacgatgtatttaagattgaataagaaccatgaaatatccaggtgctgcattcatcagccttggtaatgtaattctcaggcaggagtccagagcagccggtggttaaggacgtgccatagatccaaccctcgctggtgctggtctgctccattggagacatgaagatgaagtccccggggaccagctccagctcatcgtcattttgtggggtataggggtagatgacctgtaatgtctcatggttagcaaatcggatatcccgagaaaatatggtagccacccagtcacaccctancttgacgttcaatgttctnggccagtttcttctaaggtgggtaggtggcttgctttggaaantgg

SEQ ID NO: 15874 - DNA, 427 bp, Homo sapiens
  misc_feature 3: n = A,T,C or G
atnggagctccccgcggtggcggccgaggtacttttatctttctggcctttgcttcaaagttcaatatcatgggtcttgtgctttgcatctcacattgcatttcacactccaaggcctatgatattgaactttgaagcaaaggccaatatcataggccttggagtgtgaaatcttgtgcagattacaaatatccctattctctaaagtatgctggactaataattgttaaataattgacttgtaacatgtgcttgccagctgactttcttctctaaggcatcctaaaactagggaaatgagactactggattctattcccagctctgccacttgatgctatatgaccctgggctgcccacatttcttctccatgcctattattttcctttcctcacaaaaacctcatgggcttggctgcatatgcat

SEQ ID NO: 15875 - DNA, 462 bp, Homo sapiens
  misc_feature 398: n = A,T,C or G
acactgggcgctccttgctggaccacagaaaacaaatgggtaaggccacgtcttcatttattctactttgaaaccgtctgatttttctaagctgtttcagtagctcatgcgttgaataagtagccctggaaacactgacaatgaactctaggcttcactggagagatctcggcacagacgaaccctcttggcagaagcttccaccccacacttgggcctgggcctgtccatcattcactgtggatggggcctggggcaggggtggtcttcagagctctccagagagttccgaggtgcaaccaaggcccagcagcacgctgttctgggaagttgagtggtttattctgtgtaacacagaatactaagatagaaaacagacagggtcaaggcttacttanacacttgttcttaaagatgtgaattttctttaagagacagcagaattctaggaccagggccctt

SEQ ID NO: 15876 - DNA, 300 bp, Homo sapiens
cgactcacttagggcgaattggagctccccgcggtggcggcccgaggtaccctgggcacctggcagccatcaccctcagccgcatggaggagattctgcatgagcacagctacatcgctgaggattatgtggaagaattacacaaatggcggtgtcctgattattatgagaataacgtccacaagatgcagctcccattttccagcaagctcctgggcagcactctgacctctgaggagaaacaagaaaggcggcagcagcaattgcggcggctgcaggagctcaatgcccggcggcggg

SEQ ID NO: 15877 - DNA, 296 bp, Homo sapiens
  misc_feature 23, 48, 53, 59, 83, 92, 147: n = A,T,C or G
gctccaccgcggtggcggccgangtacccacaccctcagtgcagtcanacagngacatnactgtcctgcgacacctggagaanctgggctgncggttggtcaatcgcccacagagcatcttaaattgcatcaacaaattctggacgnttccaagaactggctggacatggggtccccatgccagacaccttctcctatggtgggcatgaagacttttcaaaaatgattgatgaagctgagcccctgggctacccagtcgtggtgaagagcacacgaggccaccggggaaaagctgt

SEQ ID NO: 15878 - DNA, 299 bp, Homo sapiens
ctatagggcgaattggagctccccgcggtggcggccgaggtactaactacgtcctaaaaggtatggagaacaattaaggtggaaccttttttttcttttgttttagactccattcagaagagagaagaggggagtgactttatgtctttggaaaagtaataaggatttgcttgattcaagtcatgatactgaggctgagtatattggctagaaatctaaagggatgcgtgaggctgaagcgagtttatcactgggaacaagcttctagagcacagcatgttagaatttttgaaggagcc

SEQ ID NO: 15879 - DNA, 366 bp, Homo sapiens
acttcctgcaggacaacctgccgagggcaccacctgctgcctcgaggtcactgcccagcaggaggagaagcaggaggatgcagccatctgcccagtgacagtgctccctgaggtaagcggggagtatcaccctgttttggtcacagcatctcctgtgaggcaggcccacccctgaggcatccactctgccctgggctttcctaagacctcccacaggctgggacattctgagattctgagctcttaggtctgtgctgaagcaatctgagtatgaagagcagccctgccctccagccactgtggcatcactggagacaacgcatggtgacccgggagctgagaaagcaggaggcaagagggaaggga

SEQ ID NO: 15880 - DNA, 358 bp, Homo sapiens
ggcggcccgaggtgggaaagaacagacaagccatgggaagttggcagtggggagatttccactgtggaaaccgcctgggaattccggccagcagcttcctccttcagccacctggccataccccttaaataagcccctcaccttgctgcctcaggaccttcaagattccatctgtgggctggccggcaagatggcaccagtggggacccacaccctggctgggcagaggtgctgctagcaacctctcttctctataagaggaaatggaaaatgcagggtgtggaattgccctttggggtccttccttaattgaaggccaccttctcacaggtttcattctgcaagggatttactggaa

SEQ ID NO: 15881 - DNA, 267 bp, Homo sapiens
  misc_feature 52, 137: n = A,T,C or G
ttttttttttttttttttttttttgtagagaaacaagcggagttaaccgaanagggggtcgaggagagccggagtcggggacccaggagtttcctgtgtccagcgctgccggagccgcctgaggtgccatgtttcanaacagagtaagacccctggtaaagaagaactgaagatattatacagataccagatatagcctaattacaaagaaagcattaacctgcctctgaggtgactaaaggggaataatggtgattttgcgccggg

SEQ ID NO: 15882 - DNA, 423 bp, Homo sapiens
  misc_feature 30, 31, 34, 45, 50, 52, 60, 63, 64, 65, 67, 72, 73, 82, 85,86, 88, 89, 90, 96, 101, 103, 104, 107, 112, 113, 122, 134,136, 139, 142, 147, 151, 163, 167, 172, 193, 194, 199, 202,206, 210, 220: n = A,T,C or G
gctccccgcggtggcggccgaggtaccganntgnctgatacggtnatcangntctggctngannncncctgnnaccttgatnttnnannntgattncatgncnntcngggtnnagagtgcanggccaccactgncntgntgnacccnctgnctgcatttcctnctgncctanaaatagacttgggtgtccatnncaggntangaangctngccacccctnttcctgacggactggacagaaatggttcctctcgtggcatgaaggactcaggtcagatctcccaaaggatatgctcagggaccagagaaaaagccagtgaagctgtgctcccagggttgccatgaaagtcaaagtaggctagttttggaggtggtgtgtgaggacagggtcctggacaagatgaccccccctcaccgggcggt

SEQ ID NO: 15883 - DNA, 549 bp, Homo sapiens
cgcccaggctgaggctggcctcccactcagggctccgaaggcctattttattttatttgagacagagtctcgctctgtcgcccaggttggagtgcagtggcacgatctcagctcactgcagcctccgcctcccaggttcaagcgattctcctgcctcagcctcctgaatagctaggattacaggcgtgagccaccacgcccggctaagtttttgtatttttagtagagacaaggtttcagtatgttggccaggatggtatcgatctcttgaccttgtgatccgcccacctcggcctcccaaagtgctgggattacaggcgcctgccaccacgcccagctaatttttgtatttttagtagaggcgggtttctccgtgttggccacggtgacaactggtgtttctgccctacagttttcccactgtgatgtaggaaccagccccgtaaaacccaaataagaccaagatggccagttcacagatgcccaagacttggacagcagcccgagttctggcaaggaacagatggtactccaggatggctgcgctgt

SEQ ID NO: 15884 - DNA, 512 bp, Homo sapiens
acatgaaagacagtgtgccctctggaccacactgaaagtggtaatatcagttattctgacatcaaagtatctgcacagtagaaaaacactttgctcattatcagggattaagcaattctttcaaaatgtccagataactgaatcatcccattctgtctagtggaaatcccccagagatatgttgcgcacacacaccccatcttaggggcacactcagatgcaccccatcgcagtaagcagcagctgttgtcctgggtgcttggccagtggggcccttgggatctgttgggtgactgtgggacccagtttccttccagactttttgaattcttagcattcccctccctctttcacaggccaaagtcacatttctggctccagcgcatgtgcccccaaccaaccgggtacaaggcagtgttcattttggaagagttgctgagccccattgtcacacccctcatcctcatcttctgcctgcgcccacgggccctggagattatagacttcttccg

SEQ ID NO: 15885 - DNA, 339 bp, Homo sapiens
cgaagagcttgtgtgcggagctgagaggcctatggatgaggaggacgcggcggccccggtttgttctcatgagcaagatggatgacctcaacctgcactaccggtttctgaattggcgccggcggatccgggagattcgagaggtccgagctttccgatatcaggagaggttcaaacatatccttgtagatggagatactttaagttatcatggaaactctggtgaagttggctgctacgtggcttctcgacccctgaccaaggacagcaattattttgaggtgtctattgtggacagtggagtccggggcaccattgctgtggggctggtccctcagt

SEQ ID NO: 15886 - DNA, 666 bp, Homo sapiens
  misc_feature 519, 596, 607, 629: n = A,T,C or G
cgcggtggcggcccgaggtactgtgtgacatgtgatagctaccttatttcattacttcatttattcccttgaggcttggagactgatgtgtgagggaggagtctgagggctcctgggccctcgcccatgggagctgggtgcgtggctgtcctgttgttaggacaagctgcagggagagactgtgtttccttggccatgtcccgtggggcccagcatgatgtcctgagtagcagaaagatgggtgagggatgggctgcctggatgatgactggctgatgcattttctgccctcagttttcaccatggccaggatctcttcagagtcatgattcaatggaatttataccaagtgtgccctgatttgggggtgtttctcagatgatgtgtagtgcccccactcagaggagccagaagccaaagaaactcagatacacttgattctctaattcattctctcacaggaattgtcttctaaactgcaaatattaaacagcgcagagaatggtctcacaagctcanaagggatctggggaggaaatgaactgctaaaagggttattttcagctactttcacttactgctttaaactgtgcttntattggttganggttttgcagtgagcacatacnacttatataataaaaaaaattccattttgaaacctgc

SEQ ID NO: 15887 - DNA, 329 bp, Homo sapiens
  misc_feature 308: n = A,T,C or G
acatgcctgcctggcaccccaatgcccaccccttgccatccttgtccactgcccgcccccccaggggtgtctacttgtaaacttggtttcaatccaaaccacaatcctggaagtgggagtgggggaggaggacgtgcttattgctgtaaacaggggaaggaagcagcaggcagtgctgccccttgcccatctagtcccctccccatgttctgcccctggaggagagcaatgggggtgcctcccacgcttcgatttgctctctctgggggcatatgtctctctggggggacaaagggagagggcaccangagtcaagggaaaggtacctc

SEQ ID NO: 15888 - DNA, 338 bp, Homo sapiens
  misc_feature 300: n = A,T,C or G
acagatgtccagtagacctactggatatgcaggcctgcagctcaggggagagctgggttaagaaccgtcaaggcagtaatcatctgcatttagatggcgagtgaagccatgacaggggctgaaatggcccagcaagaataaatcaaaccatgagaaacacatacatttaagaataaggagatgtggtcaggcgcggtggctcacacctgtaatcccagcactttgggaggccgaggcgggtggatcacgaggtcaggagttcgagaccagcctggccagcatggtaaaagcccatcttcnaaaaaaaaaaaaaaaaaaaaaagcttgtaccttggccg

SEQ ID NO: 15889 - DNA, 933 bp, Homo sapiens
  misc_feature 7, 110, 173, 265, 281, 322, 686, 698, 704, 737, 755, 822,828, 861, 880, 901, 917, 923, 929: n = A,T,C or G
ggggaancttcccacccgcgggtgggcgggcccggccccgggggccaagggtaacaaacccccgttgccttgaatccgaagaatcccttgggtggggaaagggttgaatngggaatccctttccctttccgtggtggcctttggaaaaaatttgggaagccttgcccccttcngggccccaataaaagcccctttggttttgggggaaacttgaagaaaagtggtattatggggggccccaaaagcttaacttgggttggcccangaaaaccacaagaagnaccaggccaagcccccaagtggccaaattgccttggtccgnaagccaattttgccaaaaaccgccccaattgttggttgggaaaacttaaggggaaggggaaggggaaattaatttcccattccttttgggccaaggaaaaaccccaccaagcccattttggggttttttttttttcttaccttttggttggttggttccttgggggggggaaaatggaaaaccgccaaccaagaaatccttggttttttggaacctttttggttttaattaaaaaaaaaaattaaggggggccttcccccccccaaccccttcccccccccaattttttccttggttggttccccttttttaattttggttaaagccaattttggcctttggttccttggcccaaaaggggggnaagccccccccnttaaanccccccccttggggccaaagaaacaatttaagncctttggcctttttcaanatttggccccccccttttttttccttccttccttggcctttaagaaattggggaaatggtttttggnaattgnccaacccttggggaaaggggttccttttttttnaaacccccttggccccccnttttggccaattgggggccgnccccttggccttgggnaagggnaaaggnaaaa

SEQ ID NO: 15890 - DNA, 460 bp, Homo sapiens
  misc_feature 443: n = A,T,C or G
acaggtgaaaagcagcgcttggggtgtgctgctgcaagctggggaaggcgcgtgctcaacttggatgggacacacctagtctttcttcaagtccctggattcaaagagcttcaaccgttcttgcaccgtcaggccttccttcagactctgggtagagacagagcaggaggagaaaataaacacaccgttagaccccctgcactggaccggaccggaccagaccggaccgctggtggagccggcatcagtcagagagccgggtgcaggtgcggttagtgggcatgccaggaggagagtccccgggaaatgctgttattggaggatgttttccccttcacaaaattacttggatgaaaaaggaaaaaaaatcagagagacaagaccatgtgtttaagcagctaaattctgagcttagggctctttagagaagcagtgatcaaacnaatccagccagggaaaa

SEQ ID NO: 15891 - DNA, 530 bp, Homo sapiens
  misc_feature 445, 449: n = A,T,C or G
actccaccgcggtggccgaccggccgcccgggcaggtacggcttcgggagctaggccgccgctccagctttgcacgtttcgatcccaaaggccctttttagggccgaccacttgctcatctgaggagttggacacttgactgcgtaaagtgcaacagtaacgatgttggaaggtaactttggcagtggggcgacaatcggatctgaagttaacggaaagctaccgcggcccatagcgctcacagccgtaaagacttaagtcgttgaccgaaagcggctttttcacttacctgggcttttttttttttttttttttttaaagcctctatcggtatgaaaggttgaatgctctaggtttgagcactgctttctcggcttgctcttctggtgcagtataggcacacctagagggccacgtcagtctttgcgatcaccaaatctggttntganaaataggcactggcaatttacacatgccttgctgtgtaatctcactatatttgctcaggcaaagtgggagaagcagcctta

SEQ ID NO: 15892 - DNA, 401 bp, Homo sapiens
tgctgggctggagacggcgggagccgctgctctccggctgagggaatcagagacagctccgtccctagtggagcgcaggggaggcagaagtcatgacaggcgaggtgggttctgaggttcacctagaaatcaatgacccaaacgtcatttcacaagaggaagcagatagtccttcagatagtggacagggcagctatgaaacaattggacccttgagtgaaggagattcagatgaagagatatttgtaagtaagaagttgaaaaacaggaaggttctacaagacagtgattccgaaacagaggacacaaatgcctctccagagaaaactacctatgacagtgccgaggaggaaaataaagagaatttatatgctgggaaaaatacaaaaatcaaaaggatt

SEQ ID NO: 15893 - DNA, 482 bp, Homo sapiens
  misc_feature 1, 453: n = A,T,C or G
ngattggagctccccgcggtggcggccgaggtacaatgccatgcgagcagacccagcactttgcttcctggagaaagttgggatgcccgatgagaagtccctttctgcagaacagggtgttacagatgggacctcagacattcctgaaagaggcaacacagataaagaagacaatgctggggacaaagtagatggcctccagaaacaaacggagagttccagtgatggaggtgatggcgtttttagcgaaaagaaggatgacagccgggcagcccaggatgctccgacccagacaatcgccctggccagtttcctccgccctcacagctcgtctcagacgtctggtcactgtttaccagcgctgcaaccgcaaggaactgtgccggcctgaaattctgggaccaggtaaccaaggatattgggttcaggaagagatgttcaggagaacctcanaaatggacctcatcaacaaggaagcccaa

SEQ ID NO: 15894 - DNA, 315 bp, Homo sapiens
gacgtgggatggggaagcctttaccatacctaggcctgggaggttgagtgggacaagaggagatgaagaaccttctggaaaccccctaaccacctgcaggaagggacgagataaataaatgcacgtctctcttcagctcactgaccatctgcctacctcccgttaatggaaccgcgactcacagcaagtaactggcagaagttttggtgataaagattttcggacaggtttagaaaatggaatcctcctctgcgagttgctgaatgctataaagccaggacttgttaaaaagatcaatagattgcctacccccat

SEQ ID NO: 15895 - DNA, 549 bp, Homo sapiens
gtggggacctgatgctgcacatccacagcgacgtgttctctgagccccgtgccatcttttattccgcctgcgtggtgctgggcctacagtttcttcacgaacacaagatcgtctacagggacctgaagttggacaatttgctcctggacaccgagggctacgtcaagatcgcagactttggcctctgcaaggaggggatgggctatggggaccggaccagcacattctgtgggaccccggagttcctggcccctgaggtgctgacggacacgtcgtactgaggaaatattttgtaaagtgagctttgggtataacttagccccatcattatttagagaatagaggaggaagaaagaggaaggattttaaaggcagacaatgacagaccattcaggataggtagggttttaaagggagataaacacagtctcatcaactaaggagagatttgctgcagtaaataggatgagggaaatagtctgtgggatgcaagcaaaggaagcagggtgccttagacactgagtggagccagaaagatcatgcggcctt

SEQ ID NO: 15896 - DNA, 411 bp, Homo sapiens
  misc_feature 22, 32: n = A,T,C or G
ctccggactcgccgctcagggncaaaaggaanggtggtatggtggctgctcatcttagccaagaacagtggccaaaggttaaggcaaaggtagtaaaaggttgccacgagaaccctctgttttgcattaaaaatacagattatttttctgtaacaatttgctatattacacttaaataatgtattatttttaaataataaagctgaaggtgaactgcctcaagcaatacattcctcagtaattaacatctccacttttacgctcaatgaaaatgaaaacattgaactatttcaggccacggtatagcacagagctagaaatcagatcaagagaagaaacataaatgtcttcagaacagcttggagaacggggaaccgttttcctaagatccaccacctgctcctacttcta

SEQ ID NO: 15897 - DNA, 209 bp, Homo sapiens
  misc_feature 114, 169, 186, 199: n = A,T,C or G
actatcttttcccagtctcggttcgacgactccattttcctcggtgggggcttagcgcactggaggagcggcgggcttcagacaggcgatgggaagaaagagaacacagctatntttccaagctgtgtgcagcatggagcaccagctgccttgagacagaagaaagctngttgttttcatcaggangacatttcaactncttgaaaatg

SEQ ID NO: 15898 - DNA, 293 bp, Homo sapiens
cggtgatgatgatgatgatgatgatgatgatgaagatgaagaagatggagaagaagagaatcagaagcgatattatcttagacagagaaaagctactgtttactatcaggctccattggaaaaacctcgtcaccagagaaagcccaacatattttatagtggcccagcttctcctgcaagaccaagataccgattatcttccgcaggaccaagaagtccttactgtaaacgaatgaacaggcgaaggcatgcaatccacagtagtgactcgacttcatcttcctcctctgaag

SEQ ID NO: 15899 - DNA, 424 bp, Homo sapiens
  misc_feature 92, 131, 319: n = A,T,C or G
caaggagttcctctttaaacacccgaagcgcacggccaccctcagcatgaggaacacgagcgtcatgaagaaagggggcatattctctgcanaatttctgaaagttttccttccatctctgctgctctctnatttgctggccatcggattggggtaggtgatgtgactgtgtgactcctgtcatggcatgtcgtggggcgattctgggttgcagtgatttattcgtaacctgtttcctgaagtccagatcatcagttacagcttggtgcattttcacaaacacccacgtagtcactgttcaggtccaaaaaaccaccancctgcagcccccaaaggccccagcacaggcgccctgtggtgctgctgtctggcctgacgagtctgcctgttgctcactgaatataaacggagtcaaagcagggct

SEQ ID NO: 15900 - DNA, 413 bp, Homo sapiens
  misc_feature 315: n = A,T,C or G
accctgggccggcaggcagtgggacacccacgggggcccaagcctcttgaggtcggtccgcacagaacagcgtggcggcagaattacaaaacattctcagagagactgcaaaggacacttagctcttccggaatgaaagcacgcaacgcagcataaaaagcatcgaaaccccaaacagcagagtgttaaaggcaattgcttccaggtagtgacgtagtagaaccgccggggccaaactcaatgtctgatgagcagccaacatgagaacggggccacctccaaacacccagacacctccaactgtcagatcatcgnctgtcaactcagagtaaactcatggagaaattggggcgagcgctaacctcaagatcgggcaacatatggaacccaaagaaagaagcgaaggaggcccc

SEQ ID NO: 15901 - DNA, 404 bp, Homo sapiens
acattcagatcataataattcttaaaatgaattatttcctcaataaacccatttgctacatctggaaatcttgcttccgtttctttcactagtagttcaacgagctcttgatctacctctgcagcttcttgcccccaaatgttttccaaattgggctcttgagattcttgcattggaaaggctggacctggctcttcatcatcacttgctaactgctggtcttcaaactctcctagaggatgggcaggctgaggagaagaggggcctgaaatcccaccttgctggggttccggccttggaaaagcgggccctgggaattcatgctgaaacaacaagcggcccagttctgcttcaggctgccgttcctgaggaacgacctggtttgttatttcacggggctgttg

SEQ ID NO: 15902 - DNA, 452 bp, Homo sapiens
  misc_feature 26, 27, 32, 38, 44, 47, 54, 56, 57, 61, 64, 66: n = A,T,C or G
catggccatagctgtttcctgtgtgnnaaacnacagcnccaccncgngggcgtncnnggtnctntngccataattgacaacaagttagggggacatataacagctgaaatacctcaaatatttgatgctgtttttgaatgcacattgaatatgataaataaggtgtgtaatatttcagttatgtaagggggaaattctgcaggatagccttaattcttgaaagctaaagtatgtctgtggatataacataattttaatgccatggagtttaaatatttaaacttgtatattagggaaatactttcttggttttcaagaacttacttcccaggagtttgaaaccaacctgggcaatatagtgagacttcatctctacaaaaagttcaaaaagtaaccagtcatggtggcatgtgccggtagtcccaactactcgaaaggctgaagtggggggg

SEQ ID NO: 15903 - DNA, 438 bp, Homo sapiens
  misc_feature 419: n = A,T,C or G
tttgcacagcttattaaaaaaatcaaaattgttatcttaatagatatattttttcaaaaactataagggcagttgtgtgctattgatattttttcttcttttgcttaaacagaagccctagccatccatgtattttgcaattgactagatcaagaactgtttatagctttagcaaatggagacagctttgtgaaacttcttcacaagccacttataccctttggcattcttttctttgagcacatggcttcttttgcagtttttccccctttgattcagaagcagagggttcatgggtcttcaaacatgaaaatagagatctcctctgcagtgtagagaccagagctgggcagtgcagggcatggagacctgcaagacacatggccttgaggcctttgcacagacccacctaagataangttggagtgatgttttaat

SEQ ID NO: 15904 - DNA, 224 bp, Homo sapiens
  misc_feature 82, 95: n = A,T,C or G
gcccacaaatgctccagcccacggacgcggaagcgactgcacagctaaagaaccgccccttgctaacgtttgccagactaantacagagcggcgnatgatccagttgagccagcaggccgccgctccgcgagtcacgtgactggaagtagtctgggaaaagcggaagtcgcctgtgggaggaggtggcggtgggcggaactcctagcggacacctcgtggagtc

SEQ ID NO: 15905 - DNA, 394 bp, Homo sapiens
  misc_feature 47, 65, 102, 112, 114, 162, 181, 193, 196, 199, 200, 201,208, 217, 225, 252, 256, 259, 265, 266, 274, 275, 277, 279,293, 294, 297, 312, 315, 335, 336, 339, 343, 344, 345, 346,349, 350, 359, 364, 366, 367, 368, 369, 370, 374, 375: n = A,T,C or G
  misc_feature 377, 379, 380, 381, 382, 383, 384, 386, 390: n = A,T,C or G
cgcaggcagtcaggagggtgctgcccgctggagtctgcaaatgctgncttccaaaagggacctgntgggctctgttctccctggcaacacatctggctgatncagccaccancnagaagcccaaggactgggtaaactggtccacaaggcaacaggggagtnattgtccccggtttttccnagaacaccccanagntcnnncacccanaaaaccacnttccgggntaacttgccccatttaggttggtaagntttnttnggatanntcccggannananaagggaaaatttannggnggggggttggggggnccnctttcccccgcccgttcttnnaancccnnnnggnnacccccccnggccntnnnnngaanntncnnnnnncnaaancctt

SEQ ID NO: 15906 - DNA, 367 bp, Homo sapiens
ccgcggtggctggccgaggtacctctccaggtaagtggataatagtcgccatgcttcatctgtagcactagactccttagtagtgatgacagatgagagctgattggctgctagccaggcccaggcttctgcttgtgctgcctctcctccaaattgcagaataacttgtatcaccactgtgtaatcaacaagctcttgtctcatggagtgcctctgcctaattggcttataaacagttacaagaaggttgatgctgctgaattgcttcgtttatacttaaactatgaccttttagaagaagctgtggatttggtgtcagaatatgtggatgctgtattgggaaaaggacatcaatacttcggaattg

SEQ ID NO: 15907 - DNA, 550 bp, Homo sapiens
acttcccaaacacaacatccatcctctcaccatgccgacacacaaaaaggcatcgcttctgggggccgggctggctgttgaccctcagcggctgcatgggctggcagatgatagtaagaggagtcgtctccccgagcccctggtcctcataaggccgcctctccaatactccatccccaaacgtgagagagttggacgacgatgtatttaagattgaataagaaccatgaaatatccaggtgctgcattcatcagccttggtaatgtaattctcaggcaggagtccagagcagccggtggttaaggacgtgccatagatccaaccctcgctggtgctggtctgctccattggagacatgaagatgaagtccccggggaccagctccagctcatcgtcattttgtggggtataggggtaggatgacctgtaatgtctcatgggtagcaaatcggatattccgagaaaatatggtagccacccagtcacaccctaacttgacgtcaatgttctgggccagttttctttagggtgggtaggtggctggcttgg

SEQ ID NO: 15908 - DNA, 405 bp, Homo sapiens
  misc_feature 213: n = A,T,C or G
actgccagatgcttgtaacaatgacctgcccctatctctagtaagcttctgtaacttgaaagatagattattccaatattttaagatcgcctgtcacttgttactgtggccttgattctctatgcaatatattccttttatggattcagacaccattttaattctcttttgcacctgctatacagggtaaaataacagatgtgttcatcttanatgaaggggtcaaagaggaagtagtggggtggggcttttggagctgatgattggaacctaaatatttacttcaattgcacagattccaatgcaagtcgagagcgatgtggcgctccattctcctgctgcactaaagatccgcagaagatgtcatcaacactcagtgtggctatgatgccaggcaaaaaccca

SEQ ID NO: 15909 - DNA, 688 bp, Homo sapiens
  misc_feature 207, 458, 460, 618: n = A,T,C or G
gatgcccctgttcctttgttgcgggtggttttggtaaggcagagccctctgctgagaatgtagtattgtttttcccctctccctcctgctttctttttggagcttctttgggtcaaagacatggaagttgcttcagatatctgatactgtgaatgtttgaacatatccgtggccttcacctctccagctacccttttacctcatcanaagcagtggctcagctaagtgctccccctagctcccatctcaggagaccaaatctcacagaaaaataggcactttgggccaaaagctctaatggaacatttttagtggtgatttggggaaggaaagttaatgaggtttttaaaataaggttttctagttttgagagtgtgcacttcacacaggggaatggggttacttctgtccgatcctgggcctttctttcatcccaaatgacaaggaatgtggctcananaagggtttttcttttttgacctttcttctctcaacaggaacctgcctgaggacacccttctagagcaaggaattgactttaggagccgttctccccacaagacaccacatgacaaggggtataagccccaccctgctcattcccactcaccaactgangtcttgtcagttttgaagcttgatttgtgggtgggtttggggcttattttccttttttcattttgatttt

SEQ ID NO: 15910 - DNA, 413 bp, Homo sapiens
actgattccctacgatgcagatttgaatcacagagtaattaaaatatggatcaaataaggctggggctcaccaaggctgaaagctgtagccattcaaggcatcatttctgtcatgaaaatataggaccttttcaaaacatgccttcaggaaggtgttctcttttcaaacaaaagtctaatgactgcataactcttcttgaccacatcttacactttctctagacttgcttatttacagctactggaacaaaaagatgaaatgaataaagcacactgattgtcctaagagtcttctgtgactaaaagcacatgagcttctccccaggctgagctttgaccctcccaagcatttccccaaaggccatgacactgcatcagattgctcctggacactttcctcagagttttcaaca

SEQ ID NO: 15911 - DNA, 903 bp, Homo sapiens
  misc_feature 6, 206, 346, 369, 428, 467, 528, 558, 563, 576, 591, 603,631, 642, 644, 653, 671, 675, 678, 679, 686, 690, 700, 706,726, 747, 750, 759, 778, 779, 782, 783, 784, 785, 787, 806,822, 836, 841, 847, 849, 860, 861, 875, 882, 890: n = A,T,C or G
cgcggnggcggccgaggtacacacatgggtatgctctttatgcagagtctcactgttgcccaggctggagtgcagtggcgtgatctcggctcactgcgagctccgcttcccaggttcacgccattctcctgcctcagcctcccgagtagctgggactacaggcgcccaccatcacgcccagctaattttttgtatttttagtaaanacagggtttcaccgtgttagccaggatggtctcaatctcctgacctcatgacccgcctgcctgggcctcccaaagtgttgttgggattacaggcgtgagccactgcgcccggccttttaatgtatattaaatagccttanattgaaagaaactggtcttccanaggttgcttctggggagggaaactggtaggtaggggactgaggaaggtgtcttcattgnatactcctttttgatcatgtgtaaacccctgtgctaganggaaattttggaaatgaagaaaaaccggaaaacccttgagctaaaaaaccaaatttgttcnacttaccaaatggggaaataattttttttntgcanttttaaccccccntttttttggtcttangggtaaaaaggngaaatttaccaactttaaagcaatacancctttgccaantntttttaccnaataatttcattaatttncaanttnngaaaaancccnatcccttttnacttgntttttggggggggttttttntttttgaaaggcaaaaatttnacntttttttgnccccaaacccgggaatgcnnttnnnngntgattttaagttaaatttnaaactccccctttccngggtttaaaaaggnatttntcctgncntcacccctttnnaaaaaacccgggantaaaatngggcaccnccccccccccccc

SEQ ID NO: 15912 - DNA, 740 bp, Homo sapiens
  misc_feature 536, 549, 554, 557, 574, 585, 600, 615, 621, 645, 683, 691,701, 709, 718, 720: n = A,T,C or G
acccagtatgtgcagggagacggaaccccatgtgacagcccactccaccagggttcccaaagaacctggcccagtcataatcattcatcctgacagtggcaataatcacgataaccagtacacttactgcaactgcatgttgtctaaaatagtttttctataggatgtatataaaaactaatccctcttgagctgatttataatgtgtgtatatagccacacataaaaagctagtaatagtagggctctcagaaaatactttccagttgtctaaccttgaatgttattaactcttctatattacaggagatacaactcgtcaacgaatcaaattcagtgatgacagagtatgcaagagtcaccttctcaactgttgtcctcatgatgtcctttctggaactagaatggatcttggagaatgtctgaaagtccatgacctggctttaagagcggattatgaaattgcatccaaagaacaagattttttctttgaacttgatgccatggatcatctgcagtcattcattgcagattgngatcgtaaaacanaagtnggnccagaaaaggattagcngaaactcaagnaagagattatgctgnaataccaccaaagcngaacgngttcttgagttaatgaaaaaattngtaaattggtaccaagggggacactagaactgaaaggnatgtgggnggaatccccnaaaggttntgggtgaantnaaaaaagccccgggcccaaa

SEQ ID NO: 15913 - DNA, 542 bp, Homo sapiens
  misc_feature 502, 516, 518, 525: n = A,T,C or G
actgtaattgcctggtagttatcaaaccttagcgttgttcataacaatcccctggagactttgttaaaagacatagtcctggctctacctccagagattctgatcagtagattggggtggggcccgtagtttgcatttctggaaggtttccagttgatgctgctcttacaggtctgcagaccacactttgagtgacactgatctagacaatgtgaggagtcataaatgatcctttgttctgaggagtgacctctgtagcctggtcgtttctccacaggcacttcctgagggatttccttcctctgctatggaattgggatcgcaggtctggcaggtgggcgaatggcattgtgatcagtgaactatagaatttatcttcatcagccatcttgtaagcaggaaaaggatggagtctgtccagtggataaggtgtttctctcactttttatgtaacaactgagtaatgacaacaaagtttacctaccactccttaggatataangcccaataaggcanantttttgntttttcctttttttcct

SEQ ID NO: 15914 - DNA, 309 bp, Homo sapiens
cgagcaagaccagggcaatgccccggaccttcaccacgaatccctctccaccttccgtgcccaacatcatcgtctcttacgcggtccggcgtcgaaacaaacgtggtcgctgaactgcaagcgaggacccaccgcgactcacctagacacgcgacacagcctttttttaaaataaatttatctatattggttgacaaacaagccaccaaccactgactgcaaaactgcctgatgcagttgggttcctcctggttttcttttgttacaaccacccttgcctgtttacattaattgcaaggagcataacgt

SEQ ID NO: 15915 - DNA, 439 bp, Homo sapiens
  misc_feature 116, 151, 257: n = A,T,C or G
attggagctccccgcggtggcggccgaggtacctggtcgtgtccctcagtaacgggaccatccacatctttcgggtccgttctccggacagttaaaggggctaggactagggtganagggagtggggagggagagggcaggaaggaggcanagctgtccgtgggaggtggaggccgaggacattttcctgaagggcaggggttggcaacttttcaacatggagtgccaaactgctaacccgtcttctagtgtgtganaatagggaccaaggtggtggcgtgaccttaactctcaaaagcaaaggaggcaggtgggtggagggggatgctgggaattcatctgcctcttgctttttgtgggtggctgctgccaccaccgccgctgctatatagtttaggtttctgaggtttgtgagcctgtcctgctttgcattcttcaa

SEQ ID NO: 15916 - DNA, 420 bp, Homo sapiens
acaaccagactgctgaatttgaaatcatgttacaaaatcaaagacatttatttatatcaacattacctagaaaatgtaagaaaaaaaagtatcattcacagaagtagggaaaactacaaagggtattaggaaatttgccaagattactcaaagccaatgtgttgaaaaaaaagttaaatagaaggcatttcatgctcctaaatggatgacattacaaagctgtcaagtcccctcaaattgaatctataagctgggtgtggtggctcatgcctgtaatcccagcactttgggaggccaaggaggcatgatcgcttgaacccaggagttcacgacccacctgggcaacatagtgagactctgtaccctgctgctccggacgctctgagggctggagcaatgcccctccatgcgtgtaaacat

SEQ ID NO: 15917 - DNA, 568 bp, Homo sapiens
  misc_feature 443, 549: n = A,T,C or G
gtcctgggagcttgacgcgctgggagcttgagaggtcagtaggagggtccttgcccccggcctgggactccggcagttgcgtttctacccgtgcttcagggtctagcccagccgaatccgcgtcgggctgtaactcgagtgccaggtttctgtatacatagccttcaggactgcttttggtggaaagagatagcaggtggtgctaattcactgtgttggtgggaactctggctacactgaaagattcttactttgacccccaggctggagtgcagtggcacgatcttggttcaccacaatctcgtctcgaaggctcaggtgattctctcacctcagccgcctgagtagctggaaccacagtttcagctgtgagttcaacatggaggcaaatcagtgccccctggttgtggaaccatcttacccagacctggtcatcaatgtangagaagtgactcttggagaagaaaacagaaaaaagctgcagaaaattcagagagaccaagagaaggagagagttatgccgggctgcatgtgctttattaaactcangaggaggagtgattcgaat

SEQ ID NO: 15918 - DNA, 288 bp, Homo sapiens
  misc_feature 60: n = A,T,C or G
tgccacagctgtacagccatttgttgtagaaacgcagccattctgtgagcgcaccaaagnacaaacaccactaatgcagaagagcacatgccaaaagacagaacccatcgcaaattcaaccgatccccaacgatgccactgatgaataggcccacagcataggagaagaggaaaatggtatccagtgtgccgaggaaaagagtcgccttctctgcactggggaacaaatggttgctgctccagatctccacaggcagctcaactgacgtgttaaaagcacttggggtc

SEQ ID NO: 15919 - DNA, 396 bp, Homo sapiens
  misc_feature 43: n = A,T,C or G
ctaattggagctccccgcggtggcggccgaggtcgttgagcancccgcgagggcggaagtgggagctgcgaccgcgctccctgtgaggtgggcaagcggcgaaatggcgccctccgggagtcttgcagttcccctggcagtcctggtgctgttgctttggggtgctccctggacgcacgggtcgagcggccgcccgggcaggtacaaggtcaatctcacttcgagtgaccacaatccggaccagggtggagtcatctgtgccagcacctttcatagcatagtagagcctctcagcaaagaaggcagggcggttcagggcacactgcaagatggtcttcaaaccactttctacatatccggaaaactcacggctcacactgcttaacaagtctcgat

SEQ ID NO: 15920 - DNA, 313 bp, Homo sapiens
ctggactctggggcctgcggcggctccagcctcaactcagagggcaacagtggtagtggtgacagtagcagctatgacgcaccagctggcaactccttcctagaggactgcgaactctcccggcagatcggggcgcagcttaagctgctgcctatgaatgatcagatacgggagctacagaccatcatccgggacaagacagccagtagaggtgacttcatgttttctgcggatcgtttgatcagacttgttgtggaagagggattgaatcagctgccatataaagaatgcatggtgaccactccaacagggt

SEQ ID NO: 15921 - DNA, 206 bp, Homo sapiens
  misc_feature 132, 156, 198, 203: n = A,T,C or G
gtaatacgactcctatagggcgaattggagctccccgcggtggcggccgaggtacatgggcaatgctggacgtaaagaaagaagcgatgcactcaattctgcaatagataaaatgaccaagaagaccagggnacttttgccggttaggaaccaaangggcccttttccccggccaaaaaaaaggcccctttggggttncccanttt

SEQ ID NO: 15922 - DNA, 615 bp, Homo sapiens
  misc_feature 519, 528, 546, 548, 576, 602: n = A,T,C or G
accgatgaccattgatgaagttggtccccagagccaggcctggtgttctgtggatgtagatagacttgatcgaggcagccgagcacagtgaggcgcgtgggccgtgaagctggacgggctctgttgcagttcaggctctgcgtttcctccctgggaaactgtgggcaggcacagaacttcagttttctcctatttaaaatgagaaaagcctgaggatggacagcagcttaggagcggtgaggattaccttagttgctgtgtacacaggaaaatggtagtcaaaagaattttttggcagctgcttcttgctgagacctatacatgatataaccaatgaataatacagtttgcaccacaacaaatataatgaagtggaccgtagacaaacatgatggaaatggtggtagttctgggcatttcggcttttcatttgatggcatatttcgcttgcactaaagttatctattgtccctcttttactatgtgcagggtgctcttttgatgtcaatgaaagtgctntgttggctnaataaacccctccaccanancccaggggtgcttgcatttccacttganccagtcctgaccggttttcactcatnggaatttttttca

SEQ ID NO: 15923 - DNA, 427 bp, Homo sapiens
  misc_feature 17, 48, 66, 71, 254, 278, 279, 325, 336, 365: n = A,T,C or G
ccgcggtggcggccgangtactttcatccataaagggcctgcagctgnttcactgatccttgcagntcatncatcaccaactccatacagtcaaagactttgctctggttctgtaatattttctggtagtcaggttttgtattaagaacttcattctgagaagacccaagatatgtcataggttccaccttgacctcagtaattttggcctcagttgatcctctggacaatatctctttagcctcctgctggtngtgaagcaagagctgatcccaagnntgacgttctaaagaaaactttgttatgtattccttcatctcagccnccagatgcttncaaagaaaaatctgatgcttttccatttngaatcttcaaaacatttttgtaagagttccatcagtttccagtccgtctgcaaaatgtttca

SEQ ID NO: 15924 - DNA, 412 bp, Homo sapiens
acttcccaaacacaacatccatcctctcaccatgccgacacacaaaaaggcatcgcttctgggggccgggctggctgttgaccctcagcggctgcatgggctggcagatgatagtaagaggagtcgtctccccgagcccctggtcctcataaggccgcctctccaatactccatccccaaacgtgagagagttggatgacgatgtatttaagattgaataagaaccatgaaatatccaggtgctgcattcatcagccttggtaatgtaattctcaggcaggagtccagagcagcccggtggttaaggacgtgccatagatccgaccctcgctggtgctggtctgctccattggagacatgaagatgaagtccccggggaccagctccagctcatcgtcattttgtggggtat

SEQ ID NO: 15925 - DNA, 424 bp, Homo sapiens
ggagctccccgcggtggcggccgaggtacatgcagcggatccggtcatcgtccttctcatccaggaccgagctgacactgctcatgctgctgatgctgcctcggcgggagccatggacactgttgggtgactggctggggctggtgtgggtgctcagggactccttgctggcactggtgagcttgtttgccaagggaaggctgatgagctccatacacttcttgcacataatagacccgcagaggcggcagtggtggcggcggttccggatgctgaacttattcccacagtctggacagaaagggacatcctggtcgttgacccaaggcaccacagacttttctattgctcgaatctttgcagactcaatatttgttctgccaaatgcagtgagctgattattagtttattgacttccacaaca

SEQ ID NO: 15926 - DNA, 300 bp, Homo sapiens
  misc_feature 148, 149, 162, 179, 219, 230, 250, 300: n = A,T,C or G
gcggagccgggcggaacgctagcggtgttggcgcggagtggaccccggctgcggcccctgggtgtttccacaccggtagccagctgtgccctgaggtggaagaggaccggccacccaggaattttccaacaatggcgccaccatcggnnccggagtcccagngatgctctgtgccatanagcccccataacttcactactacgtgatagtaaatccccnacaaaaaccancagcgccttgcaagcccacnccaccccaagcatcccaggactcttctgaaacgactccgggctaccagan

SEQ ID NO: 15927 - DNA, 529 bp, Homo sapiens
ggagctccaccgcggtggctggccggaggtaccgccaccgggcagcaactccctcaggtgatgagcgtcaggtgccaactgcgagttacacaacacgacctctccagacagttgggaaacaaggaaggaagcacttacagcgtgaggcgggcagggctagagtccccagggggcagttagcaagacagtttggttctggacagaacagacagagaaagaaaagaaaagcaagaaggttggaaagtgttttttaaacaggagaacaataaaggtttaaagtcagcaagcccggaggtagaggaccatccctctcgctcaggggtagccaccaggagagacttgcgggctctcagatctagcacattcactccaaggcaggtgtggggaagtggccaggcactaggcacacaggcctgccctctgccatctgcccagagagaagaaggaaactccatggaggagtcacagacctccctctagtttctatgcttccgagtcaccctttaaccatttaacatttcaaacagca

SEQ ID NO: 15928 - DNA, 729 bp, Homo sapiens
  misc_feature 613, 642, 671: n = A,T,C or G
ccgtttcgactcctatagggcgaattggagctccccgcggtggcggccgaggtacaattctcccagtgatttctaggaaagaataaagaggagaggagaggtagacatcagaatgtagagaggcaatactgtgtaaaaatgaaaaacaaaaaaaaaactttatttctattttcccaggctgcacaaatctggctttgatgaagaaactcagaagatcctgatgtctgtggaagaaaaaattccccatctgaccatttcacatggaccttggattgacgaggaatacaagatcaggggtgtgctcctctgatggggaacaccctgaagtagtcgtctcacaaaggctttccttggccacagtgggaccttcacctggcacctctatcctgtaattgcacatcatggcagcagggctgtgatttcagaggtacatcagagagcaacgcgagaaggattctgtcatgtcggccaatgggaagccagatcctgacactgttccggactcgtagccagcctgtttagccagccctgcgcataaatacactctgcgttattggctgtgctctcctcaatgggacatgtggaagaacttggggtcggggagtgtgtttgncacttggttttcactagtaatgatattgncagggattaggggccacttggaggatgcnagaaggaattcccattttcagatgtcaagtcacccggctttcgtccttagttttttcc

SEQ ID NO: 15929 - DNA, 524 bp, Homo sapiens
  misc_feature 469: n = A,T,C or G
cattataccagcagaatggaccctttgtcacctaaatggctatatttgcaactgcagtataaatgtaaggtcttgtagcagcttcagataattaacattcgtaagtggagaggtggaaaatgcaaatgataatggtcaaaatatgagcctgcacctgtagttcaggccagtattccagctcccccactgcaatgcacatctgcgcttcttcattcaccagcatccctttctctaacaactgggatcacgctggagctgccaatcatgaaaccccgcctccctgcccaaaggcgtgtgcacgtgacccaagctgggccaatcagggtcctcttaagagattgacggacactgaggaaagaggcctctctcttctgggatcctgacccagagggaccaccatagcatggaccgtttctttggctgtgcagaggcttgcctgacgccaaccccagagaaaaacagaactganagatgagatgaaaatactgcatgagccctcgatctagcccacctaaagccgaaac

SEQ ID NO: 15930 - DNA, 414 bp, Homo sapiens
  misc_feature 127, 136, 156, 171, 192, 198, 215, 222, 231, 243, 251, 260,262, 263, 270, 272, 275, 276, 284, 285, 286, 291, 295, 296,297, 298, 300, 303, 304, 310, 313, 314, 320, 322, 324, 332,343, 362, 365, 370, 382, 399, 404, 406: n = A,T,C or G
ttaaacatgtgtcactgggcaggcggtgcctctaatactggtgatgctagaggtgatgtttttggtaaacaggcggggtaagatttgccgagttccttttactttttttaacctttcccttatgagncatgcctgntgttggggttggacaggtgnaggggtaataaatgnacttggtttgggttgatttgnaagaanatttggggcttggttanttgggcnaagtccaantggtttaattcntgaccccnaggctttantnncggaagnanaanngtttcaannngtaanctannnncntanncttaanttnntttttntntngggggganaaaaattgggncccaatttgggtggggaanggngggtnaaattttttatnttggggaatttttttanggggngngggggggg

SEQ ID NO: 15931 - DNA, 461 bp, Homo sapiens
  misc_feature 334, 371, 419, 453: n = A,T,C or G
gtggttaagttggtgacatggctcagaagtttatttctttaaatttttaagttttttttctttttagtcttcagaaaggcaacagtagtcttttaacgtcactgttaaaagtgtaagactcttttaccccctgagagtcccctttccctttcttgcgtcctttcctctttattcttttttttttttttttctttactgagacggagtctcactctgtcgcccaggctggagtgcagtggcgcgatctcggctcactgcaaactccgcctcccgggttcaccctttctctttattcttatcccggtcagactcgccccctcctccaagatatctntctgttttattttatttgattttagttctctttgggngatcgctccttccctcttgaacggatccctccccgcctccatcctggntctgtgggagagaccagccttctggtgctgcagncagggaat

SEQ ID NO: 15932 - DNA, 461 bp, Homo sapiens
actcctatagggcgaattggagctccccgcggtggcggccggggaggttcacaataaaggtgctaagaaagagaatgtaagacaggaaaataattaaatattcttaccgagtgtcttcaataggccgtgtttaagaggcgtcttacactccctgttgccagtggctggaacacaatggatcacacaggggcgatagacaccgaggatgaagtgggacctttagcccatcttgctccaagtcctcagagtgaagctgtggctcatgaattccaggaactctccttgcagtccagtcaaaacttaccccctctgaacgaaaggaaaaatgtgctccagctgaggcttgcaacaaaggaggacgaagagaacaactagtggaccagggcatcatgccacctttgaagagcccagcggcattccatgaacagataaaaagcttggaacgagccagaactgaaaac

SEQ ID NO: 15933 - DNA, 543 bp, Homo sapiens
  misc_feature 16, 20, 353, 396, 405, 423, 433, 437, 442, 485, 491, 493,496, 503, 514, 519, 535, 536: n = A,T,C or G
agggactggatgccgnacantcactccgtcatcctgattgatgattttgagtctcctcagaagctggcagagtttattgactttctggacaagaatgatgaggagtatatgaaatacctggcatacaagcaacctgggggcatcaccaaccaatttcttctggatagtctgaagcatcgggagtggggagtgaatgatcctttgctgcctaactacctcaacggcttcgagtgtttcgtctgtgactacgaactggctcggctggatgcccaagaaagcccacgcggcctctcccggggacagccccgtctttgagccccacattgcccagccctcacacatggactgcccantgcccacacctggcttttggcaatgtgggaagaaattcctganaatggacanttgggaaaaagaaggttnggggcttgcnaagnattanttgggcaaaggggtcttggaaccaagggggggaaagcttcttnactggncnttnaatcccnccaaccaattngaaancaagaagccagaaacnnaaatttt

SEQ ID NO: 15934 - DNA, 435 bp, Homo sapiens
gaattggagctccccgcggtggcggccgaggtactgttgccatgcttctttcagagtaaggtgagggttttttcaatacagtcagcaaagtggtcaaacatatgcttgattatgttcaaatgcttcagttataccctgacccaagggctgaagaaagctagggccttcctgagggagaaacacagtatcaacattagaatgaacaaagaataatgaatctgggtgattgggacctctgtccacagttagcaacattctgatttccagattttttttgttaaatgacttcggatttgatggataaaaaaattgtaaaactaatccaaaaagtggcagtggtgattctgggtgtgattacaagaaaacaggaaggcgtttatctctaaaagacaagtggggtgttagagtctttgtaaagcagcagtggttttatca

SEQ ID NO: 15935 - DNA, 488 bp, Homo sapiens
  misc_feature 1, 2, 18, 28, 29, 32, 38, 40, 46, 50, 59, 66, 70: n = A,T,C or G
nntagctgtttcctgtgnggaaaagaanngcnacaccncnggggcngccnaggtacctnagcttantcangccgtgtcccccaggctcagggtggcctctctgctgacaccctgtccctatcttgccggcagggggcatgtgtccgtttcgccacatcagtggtgagaagacagttgtgtgcaaacactggctgcgtggcctatgcaagaaaggggaccagtgtgagttcctgcatgagtatgacatgaccaagatgcccgagtgctacttctactccaagttcggtaaggcgcctggagccctggaggctctgctgagaaccagggtgcagaggggtccgctggctgctcagtgcccacactgtctctgcctgcttttcccatctttctattctcagaggagaactctggcagaacctgccagcctcagccagcttttaggggacaagtgtggctattttctgctcatctctttttttttttttttt

SEQ ID NO: 15936 - DNA, 707 bp, Homo sapiens
  misc_feature 21, 84, 137, 247, 291, 296, 300, 320, 321, 322, 358, 361,378, 388, 389, 401, 431, 439, 440, 442, 443, 444, 449, 451,486, 501, 520, 532, 535, 537, 541, 555, 558, 568, 580, 594,595, 598, 602, 607, 608, 610, 612, 621, 623, 629, 636: n = A,T,C or G
  misc_feature 644, 662, 684, 689, 696: n = A,T,C or G
cccacagcgggcgagccgaanaagggtgggtggggcaccacctcacccaggaagtgcaaggggttggggacctccgtcgcctanccaagggaagccctgaggaactgtgccttgaggaacggtgcactccagcccanatactactattttccagtctttgcaacccacagaccaggagattctctcgggtgcctacaccaccagggccctgcgtttcaagcacaaaactgggtggccatttgagcanacacctagctagctgcagggtttttttttcataccccactggcncctgnaacnccagtgaaacaaaatcattnnntcccctggaaagggggcttgaagtgaaaaacccaantantgttatcttaccaaatntcacccccanngaagcccaacangctaaaatccactggcttgaaattttttgntgccagcnnannnatttntnaaatttcaaacctgggaatccttggaactttggtnggggggaaggggggnattccacccatttactttnaagctttgaatntangnccanttttttccccttanaantgtttaaaanaaaagcttggcnaggaaaatttttannacntggngccannangnccaaccccnantttttntcaaaanccctattntacccaaaacctgccctnttttaaatttccttcctccctngggcnggggggnttttttttaaa

SEQ ID NO: 15937 - DNA, 375 bp, Homo sapiens
  misc_feature 6: n = A,T,C or G
cgcggnggcggccgcccgggcaggtcggcactgcgtagacgcggggagttcggtatcagtttacacgttgccttcagtaaaatccgccagaggtccacccattttgccttttccccttccttgccctgggagaagtcctcccttcactgggagagaacttctctcccagggcggtgcgacccggagctccagcgcccgagtctccacttcgtttgctgaaacttgctttctaccagctaagaaccatgctgcgagtgattgtggaatctgccagcaatatccctaaaacgaaatttggcaagcccggatcctattgtttctgtcatttttaagggtaagaaaaagttttcttctttttctgaagtcctgttttgg

SEQ ID NO: 15938 - DNA, 548 bp, Homo sapiens
acttgtttgatcggcgcgaaaaggagtccgagctcggggaccggcctctgcaggtcggggagcgctcggactacgcgggatttcgcgcgtgtgtgtgtcagacacttggcatttcacctgaagaaaaatttgttattacaacaacaagtaggaaagaaattacctgtgataattttgatgaaactgttaaagatggagtcaccttatacctgctacagtcggtcaatcagttactactgacagctacgaaagaacgaattgacttcttacctcactatgacacactggttaaaagtggcatgtatgaatattatgccagtgaaggacaaaatcctttgccatttgctcttgcggaattaattgacaattcattgtctgctacttctcgtaacattggggttagaagaatacagatcaaattgctttttgatgaaacacaaggaaaacctgctgttgcagtgatagataatggaagaggaatgacctctaaacagcttaacaactgggccgtgtataggttgtcaaaattcacaaggcaaggtgacttt

SEQ ID NO: 15939 - DNA, 519 bp, Homo sapiens
cgcgtaatacgactacttagggcgaattggagctccccgcggtggcggccgaggtactaaacctttttttttttttgagacagagtctcgctctgttgtccaggctggagtgcagtggcagtctcagctcactgcaacctccatctccaggttcaagcaattctcctggctcagcctcccgagtagctgggattacaggcgcctgccaccacgcccagctaattttttgtatttttagtagagacggggtttcaccatgttggccaggctggtcttgaactcctgatctcatgatttgcccacctcagcctcccaaagtgctgggattacaggcgtgagccaccgcgcccggcccagttactaaaccttcttactttcaagttttgttttttagactacaccccatctttataaatcacttgaatacatgaaaagacttcatgtttaacatctttaattcaaatgtaaaagttcaatacaagccatttatagggcttgagatttgttggtcttttaaaa

SEQ ID NO: 15940 - DNA, 256 bp, Homo sapiens
  misc_feature 66, 71, 92, 101, 153, 170, 181, 187, 201, 234: n = A,T,C or G
tggagctccccgcggtggcggccgaggtgcccagccaagatgaatgcttgtaacactgacctgccnttatntgtattaagcttctgtaactngaaagatanattattccaatattttaagatcgcctgtcacttgttactgtggccttgattntctatgcaatatattcnttttatggatncagacnccattttaattctntttctgcacctgctatacagggtaaaataacanatgtgttcatcttaaatgaagg

SEQ ID NO: 15941 - DNA, 462 bp, Homo sapiens
  misc_feature 3, 18, 40, 53, 77, 103, 127, 128, 177, 184, 209, 220, 230,242, 245, 251, 280, 281, 282, 307, 314, 315, 317, 331, 332,342, 343, 344, 353, 356, 357, 360, 362, 364, 365, 369, 386,388, 401, 427, 444: n = A,T,C or G
gtnccgggccccccctcnagagtacttctataattagttnaggcgggtggatnaccttaggttaggagttcaaaacnagcctgggcaacatggtgaaacccantctctactaaaaatgcaaaaattnnctgggtgtggtggcaggtgcctataatcccacctactcgggaggctgangcggganaatcgctcgaacccgggaggtgcangttgcagtganccgatatcgnaccactgccctncancctgancgacagagtgagacttcaaccccccaagnnngaataaaatggaacctgtcccctgnccccccnngngggggaaaccaatnnacgaattagnnntcattttanccnnccncntnntganttgttttaaaaaacagntnataattgatgccnaattaaagcactgtgtacccattaanatatggcattattgaanaaataaagtacatttgaa

SEQ ID NO: 15942 - DNA, 397 bp, Homo sapiens
  misc_feature 164, 209, 215, 255, 264, 317, 389: n = A,T,C or G
tccacccgcggtggcggccgaggtacatgaagggcaggtccacgttgtagttggctgggccatcgatgatggtaaggaacagctcgaaggtgctgaacagggccatggggtagtcgtagaagtggcctagctcctcggggtcctctgtctggaagatgatatanaaggctgctccacccaagggggtgagggttaccatggcaaccatncagacnaccagcccaccccgggctctgcgtgcatgtccatcctggncccttcatntcaatatcaccagctctgcagtgctccaaactttgggtttttacggtccctanttttgtatgagcctcatcttgatcctaagagccacctctccctaacactcccgatttttctcacctctggangacgtccc

SEQ ID NO: 15943 - DNA, 530 bp, Homo sapiens
  misc_feature 1, 9, 19, 28, 30, 38, 40, 48, 297: n = A,T,C or G
ncggcccgncccggccggntccaagaancntaagtttnantgtgtggnacgtgggtggccagaacaagatccggcccctgtggcgccactacttccagaacacacaaggcctgatcttcgtggtggacagcaatgacagagagcgtgtgaacgaggcccgtgaggagctcatgaggatgctggccgaggacgagctccgggatgctgtcctcctggtgttcgccaacaagcaggacctccccaacgccatgaatgcggccgaggtacgactgccagcaggttacccgtgcaggcatnaagcggatgcgggctcagctccctcatgtcaaagtccacgcctactttgctcccgtcaccccaccgacagcagtggcaggaagtggacagcgactgtgcaggtgctgtgtcattctctgacagcagctgcctgggcccaaggggtgatgaggcatcctttcctctagaagacctgagttcttcctgaccgactccaccatcacccaatcttgttgattctccattggggaaaa

SEQ ID NO: 15944 - DNA, 445 bp, Homo sapiens
  misc_feature 22, 31, 36, 37, 42, 47, 51, 53, 56, 61, 68, 69, 71, 176,232, 275: n = A,T,C or G
ggtctagctgtttcctgtgtgnaaaacaacngcccnnctcgngggcntacntnttncctgngacaaanngnactgaacaggccactgtgaccatggtgtcatcagaggacatcgagatcctggagcatgcaggcgagctggtcatcgcctcgccggagggccagctggaggtgcanacggtcatcgtctagcatgaggtctgcggggtcctggccgggcagggacagggcanaggactctgagcgccccacccatgcctgcctggcctggtaganaagatggcacaggatggaggcgccccaagacggacagtgtaccacaaaaacaatcacttggtggagttcaaatcacacagagagaagatttagtaaattctcaaagttgcaaactggacccacctggagtcccaccgggactggacagcccccactggattatactggat

SEQ ID NO: 15945 - DNA, 170 bp, Homo sapiens
  misc_feature 132: n = A,T,C or G
actaaaagtttgttttattttatcaaacattaagcttttttaagaaaataattgggcagtgaaataaatgtatcttcttgttaaaaaaaaaaaaaaaaaaaaaaccccagccgccccactgagtttgccttntatccgggatatccgggaacctaccagcctatggccag

SEQ ID NO: 15946 - DNA, 229 bp, Homo sapiens
  misc_feature 192: n = A,T,C or G
ggcgcaggaagaggaagatgttagagattacaatttgactgaagaacagaaggcgatcaaggccaagtatccgccagtcaataggaagtcaagcaggcattttatgggaagctttctaaactccaactgagttccaccagctttaattattcctctagctctcccacctttcccaaaggccttgctggaagngtggcgcagctgagccacaaagcaaactttggtgcga

SEQ ID NO: 15947 - DNA, 557 bp, Homo sapiens
  misc_feature 59, 215, 249, 254, 256, 258, 259, 260, 263, 264, 275, 282,284, 285, 286, 295, 312, 318, 319, 320, 323, 331, 335, 340,341, 342, 345, 346, 347, 351, 352, 355, 357, 365, 366, 384,389, 410, 440, 445, 451, 462, 470, 473, 484, 498, 510: n = A,T,C or G
  misc_feature 516, 547: n = A,T,C or G
agtacttctagaattaattaaggcgggcagatcacctgaggtcaggagttcaagaccancctggccaacatggtgaaaccccatctgtactaaaaatacaaaaattagctgggcatggtggtgcatgcctgtaattccagctactcgggaggctgaggcaggagaattgcttgaacccgggagacggaggttgcagtgacccgagatcatgccantgcactccagcctgggtgacagagtgagactctntcccnancnnnaannaaaaaaaaaanaaaaaangnnnccccccccngggggggacccccattnccccannnggngaggggtntacnccccnnnttnnngccnnttntnaaaaaaannagacaggtgtgagcccantggangaggcacggggcagggaccanccactgttgctggcacactggtgcacgcancaccntggcanatggacctganaagaaaancangagggacagcncagtgggagccaanaaaggggcttancatggncgggcacggtgactcacacctttcatcccancactttttgg

SEQ ID NO: 15948 - DNA, 536 bp, Homo sapiens
  misc_feature 511: n = A,T,C or G
accacatccccaccaggcttcatgcttcactgctagatgcagggggctagaagggtctgatgaatcaggagctgaactagaaccttcaagaaaagaaaaggcaagggggtggctctgtgccccgccaggagaggaaagaagaatgtgtgtggattgtccacagtgaggccagaaacgatgagatggtgttaggcagaaaagaagggagagggcttcccatgagaatctggctgggcatgggagggatacagggctcagttatcaaggcacctttgccatagtggggtgccagctacattgggtgggatgcccaggggctgtccctacctaagcactttcttgtctacaggaagtcttggtgcttttcaagttcagcataaggggttccatatgtgaagtggggattcacacttagaaaatctatcctggtcttcacctgaaacactcatctactgctgggtggcaggaacaagtatacaaaaccaggggccttgcctgggcagttcctaanggacattggcagggctgacctggga

SEQ ID NO: 15949 - DNA, 435 bp, Homo sapiens
aggcaggaaggtgggtcagagacttggggatcatggcaagcagaagcagtgaggaagcaggagtgccaaggagatggaagcaacaaggcaaaggaaagacgtgtagagcaaaggaaaataagggaaattttagtaagatcggcaagcatctatactaaatttccttatagccgaggactttttttttttcaactcagctgaacatctacagactccagctgctgagtctcagaggccatcctagatctagttccgggtcaagggtcctggctgtctgctgctttctgttcttgtgtattatgtctttctgtctcccttccgccccgcatgtatcctgacgaccagaaacgccctctacttgagataactggagctggactctgcctcctgcaacgcaaagaacacagcacgcaaaaagaaagtgaaagacaatcc

SEQ ID NO: 15950 - DNA, 593 bp, Homo sapiens
  misc_feature 333, 355, 356, 370, 408, 413, 414, 421, 422, 437, 439, 440,441, 445, 470, 471, 475, 492, 493, 497, 504, 512, 520, 534,537, 543, 544, 583, 590: n = A,T,C or G
acttcaggatagcaaatatctatctgctattaaatggtaaatgaaccaagtgtttttttttgttttttttttgagacagagtctcactgttgcccaggctggagtgcagtggtgcaatctcggctcactgcaagctctgcttcccaggttcacgccattctcctggctcagcctcccaagtagctgggactacaggcacccgccacagtgcctggctaattttttgtatttttagtagagacagggtttcaccatgtgagccaggatggtctcaatctcctgaccttgtgaaccacccgtctcggcctcccaaagtgctgggattacaggtgngagccaccacgcctggcccatnnaccaagtgtttttnaggaaaaaaaactattttttttaattcatcagaatttntactnncctttgnnggatattaaccatangnnnggtnatttattgaaatctagaattttttnntacnttattttttaataaatnncctngcccccntcaatttnttttggantggaagtggaaaanaanaaatcnntggtttggttttttaaataggtggtccaatttttttggnaaaaaanaaa

SEQ ID NO: 15951 - DNA, 425 bp, Homo sapiens
gattggagctccccgcggtggcggccgaggtcgcctggcctgcagcgctcccacccccggcggcggcacgatgccctttgacttcaggaggtttgacatctacaggaaggtgcccaaggaccctttaaaccgcagccaacgtactttggctgctttcgcactactatttataactttaatggtagtaggtgtagcagattgcactgatgctggaataatttgcacaggttgatcaattgtaactatttcattcatctgttgttcttgacttgccaatacatattttcggagaagttccagatgactccagagaatttctccccgaggaacccgctgaaaaaaatcttcttggttgagactacataattctctccccgaaatgttgagtgtggtgaggtctatatcggtcatgctgaattccttca

SEQ ID NO: 15952 - DNA, 595 bp, Homo sapiens
  misc_feature 65, 539, 574: n = A,T,C or G
actccaccgcggtggcggccgagtacagcaggcggttgggaccctctgcttgctcttcagcaaanagctcaaaggccagacgagttagctcttccaggctcctgcccccatccagagctgctagtgcaagggccacatctcggaagtccaccaaacccttggtatctgattatttctcccttgttcctcctcatgatgataacattgctcttcaatgcactggatgcctgattaaaaaatgaatcttcagtggatctcaggggatggccatctaacaacagctgtgagaacatccactgaggactccaaactgtgagtgactgatacggccactaggaacatgtcagcctggagggaagcctgggttctgctctgctctttgttccagctcctttacctgctggaagtagccaaaggcaccagccaccgtctgaggatcagagagctgtagctgcctggcaaactcttcctggctgatcattcgactccggcctggctctgccccagcgtccacatagccagcggacagcccagccttncgaagcacttttcccagttcccagagctgtggttncaacgccaccttcagccggcc

SEQ ID NO: 15953 - DNA, 403 bp, Homo sapiens
  misc_feature 270, 369: n = A,T,C or G
acaaatcctctgaagcctttgcagttccagtcccaagattacactcatatacttgcaaatgtgcaaaataaactccatacaagtattgtcactggtgcaactacattcactctaattttctttcttgctacctctttagcaagagcacgtgaaaatccaactaatcctcctttactggcactgtaaacggactggccagagttgtcttttaagccaacaatgcttcctacattaacaatagaccctccctgttgttgaatcatagtcctnatggcaggctttacaggtcagcatggaacccaagaggttagtatgaagcttgagataccatatcttcagtttttgttcttactaaaagaccatccctgntaataccagctgcatttaccaagaaatttactcg

SEQ ID NO: 15954 - DNA, 518 bp, Homo sapiens
gtaatacgactacttagggcgaattggagctccccgcggtggcggccgaggtacctgcatcaacccctctaactggtgtgatggcgtgtcacactgccccggcggggaggacgagaatcggtgtgttcgcctctacggaccaaacttcatccttcaggtgtaccatgcggagaccatcaagaatgtgcgcacagccacggaaagctttgcttctgaccccatcctctaccggcccgttgctgtggctctagacactaaaggacctgagatccgaactgggctcatcaagggcagcggcactgcagaggtggagctgaagaagggagccactctcaaaatcacgctggataacgcctacatggaaaagtgtgacgagaacatcctgtggctggactacaagaacatctgcaaggtggtggaagtgggcagcaagatctacgtggatgatgggcttatttctctccaggtgaagcagaaaggtgccgacttcctggtgacggaggtggaaaatggtggct

SEQ ID NO: 15955 - DNA, 266 bp, Homo sapiens
acttcgatttttgcacacagtggtatttaccgtgtcccaggcagcctggcctgggaccacatgggtctgagggagggatgggacctcaggccaccttgaaggattttctcttgggtcctttcctggcttgtgtctgaatcttgggtggggtgggctgcggggagcagttaggtgcctctgcctttagactggctacccagagcatttccccagggaaaggggctgtgctgggagatgctggctgggtgggggaccagtgtggcggt

SEQ ID NO: 15956 - DNA, 225 bp, Homo sapiens
cgcccgggcaggactgaggccagggacagagcgcctgtcagagccgtgtcccctgcctgccgcatgactggcgggtacaagcttttttttttttttttttttttttttaaggggtggctttgtctttattagtcaacatttgcatctaggaaaagtttcacatgattaaatcaagagatgcaatacactcaggcttttcatgaaattgacatcattattacaaat

SEQ ID NO: 15957 - DNA, 547 bp, Homo sapiens
  misc_feature 25, 30, 37, 38, 40, 43, 49, 51, 54, 59, 60, 62, 64, 65, 70,71, 77, 80, 82, 83, 84, 450, 477, 525, 532: n = A,T,C or G
ttttttttttttttttttttttttnttttnttttttnncnttnttgttntnttnttttnngntnnggccnncttttnggntnnngtttaacctccacctcctgtttcaagcgattctcaggcctcagcttcccaagtagttgggattacaggcgcctgccaccacacctggctaattttgtatttttagtagagatggggtttctccatgttggtcaggctggtctcaaactcccgacctcaagtgatctgcccgccttggcctcccaaagtgctgggattacaggcgtgagccacccgcacccggcagagttttataatgaaaaattaactaatattctagtatgaagtgaggaggatactgaacaggatgtggctaaaagccaacctgggacaagccatggggtggcttggtttcttcactccagtgttgtccctacccatttcgcancatttgattttaggaggctctgggacnaaaaagagaagccaaaagaagcagtttttcccagtttaactcactctngcaaaantcaaggaaaaaaaaa

SEQ ID NO: 15958 - DNA, 533 bp, Homo sapiens
  misc_feature 60, 64, 418, 463, 464, 471: n = A,T,C or G
ggccgaggtaccataaaaaaatgggcatgtgctgtatttgggacatgcggacacacccanaccnacccacaatctctcccctcctcatgtttactagactgaaaagccaccctgtatcctatcattaaaaaacaaaacaaaacaaaacaaaacagtgcttttagtcaagcagcacaacacaaggacagatcatctgtgattaacagaagcgaacgccttaaaatgatgggagagagacaaattaactaggtactattagccatggtcaaccccaccgtgttcttcgacattgcccgtcgacggccgagcccttgggccgcgtctcctttgagctgtttgcagacaaggtcccaaagacagcagaaaatttttcgtgctctggagcactggaggaggaaagggattttgggttataagnggttccctgctttcacaggaattattccagggttttatgtgtcannggtgggngactttttacaccgccataatgggcacttggtggcaagtccattcttattggggggaggaaa

SEQ ID NO: 15959 - DNA, 116 bp, Homo sapiens
  misc_feature 11, 29, 33, 53, 92: n = A,T,C or G
ggagctccacncgcggtggcggccgcccngggnaggtacaacatgcaccaganttcatagacacctgcacacaaccgcactatgcatggtgntcgctgcttgtagggtgctgggac

SEQ ID NO: 15960 - DNA, 205 bp, Homo sapiens
  misc_feature 97, 104, 118, 119, 147, 165, 169, 170, 177, 194, 204: n = A,T,C or G
taatttgccgtttgccgctcactgcccgctttccagttcgtggaaaaccttgttcgtgccagcctgcaattaaatgaaatcgggccaacgccgccgngggtagnaggccggttttgcnnttatttgggccgcctctttccgcttttnctttgcttcaactggacntccnnttgctgnccttcggggttccgttncgggcttgcng

SEQ ID NO: 15961 - DNA, 420 bp, Homo sapiens
accgaggtcgcacgcgtgagacttctccgccgcagacgccgccgcgatgcgctacgtcgcctcctacctgctggctgccctagggggcaactcctcccccagcgccaaggacatcaagaagatcttggacagcgtgggtatcgaggcggacgacgaccggctcaacaaggttatcagtgagctgaatggaaaaaacattgaagacgtcattgcccagggtattggcaagcttgccagtgtactcttccgatgtttgtgtcacacaacactgatgtgacttttatatgctttttctcagatctggttcctaagagttttggggggcggggctgtcaccacgtgcagtatctcaagatattcaggtggccagaagagcttgtcagcaagaggaggacagaattctcccagcgttaacacaaa

SEQ ID NO: 15962 - DNA, 331 bp, Homo sapiens
actgctcagtttcactcacaggaaacttgtgacttgtgtattatcgtcattgaggatgtttcactcatgtctgtcattttataagcatatcattaaaaagcttctaaaaagctatttagccaccttgcccggcctccagcacactttctaaaatctgattcaatgggtatgataattaagtaacattgaaatatgtccaatcataagggatggggccagcatattcttcaaagcagatagaagcctggattccttaggaagggatttggccaaagagactccagacagttggggaggaggaggagatgctgtggaaccactggtcttaaca

SEQ ID NO: 15963 - DNA, 429 bp, Homo sapiens
  misc_feature 149, 184, 207: n = A,T,C or G
acctgtattatgtggaaaggtcacaaggccagagacccagcacctagatgtgcaaatggggagaagaagcagggaagaaacgctggcttgcttttggctagggccaaataatctggcacattgaccaatccctgcctgtcttctggaanaaggtgcatttcaaaagcactttaaagaacttcanaaaccttaggaagttcagtgcanagaggctgtgacagaggtaaggtggagagattaccgtgttataaagaactttgggatatttttcaaaattaacctgaccattcttttgaaaccagagtccttaacaagcattgagatatatttctccatgaaggcttaacagtgaaaattggagattttggtttggcaacagtaaagtcacgctggagtggttctcagcaggttgaacaacctactggctct

SEQ ID NO: 15964 - DNA, 466 bp, Homo sapiens
  misc_feature 20, 21, 22, 27, 31, 36, 42, 43, 46, 48, 51, 52, 57, 59, 60,62, 64, 65, 66, 67, 75, 87, 97, 98, 99, 100, 106, 115, 117,307: n = A,T,C or G
ggtctagctgtttcctgtgnnnaaaanaacngccanaactcnnggncntanntgttncnngntnnnnaaaaaaancctgacccgtangggctcagcnnnngggacntcaaccatnancccagccacatccctaatccactaagctctcaggcaacatttgcaccatgtgacccaccatcaggcataggcgataggtctagtggagatcacctgacccaaaggtagccaatgggaaagttgagttatctggcgaactgagccaatcagattctctcctggaggtgccactgggagtgtggacccacanacagcggggaaagaatctgagccaatgtgggaggagaggagcaggcaggaaggtgggtcagagacttggggatcatggcaagcagaagcagtgaggaagcaggagtgccaaggagatggaagcaacaaggcaaaggaaagacgtgtagagcaaaggaaa

SEQ ID NO: 15965 - DNA, 421 bp, Homo sapiens
actcctcattgggggaccggcgctgcagcacggacgcggtgccctccgtgatgatgtaaaagtcgtccccaggctctccctggaccacaattttctctccatcttcaaactggacgggctccagcgcatccgccacggtcagacgctcccacttctccagggactctaggatggagaccttgctgaggaactcctcgtacctgctggggtcatcgggagacttgaagtccaggtcatacttcccagacctgaagaactcggaggccgctacgtccatgccgatgaccaccttatcagtgtagccagctttcccaatagcagtcttcagcaagctccaggtcttctttattctccaggatgttgggagcaaacccgccttcatcccccacattggtggcatctttcccatatttctccttga

SEQ ID NO: 15966 - DNA, 413 bp, Homo sapiens
ccgcggtggcggccgaggtacaacttatagaaaaggtaaaggaaaccccaacatgcatgcactgccttggtgaccagggaagtcaccccacggctatggggaaattagcccgaggcttagctttcattatcactgtctcccagggtgtgcttgtcaaagagatattccgccaagccagattcgggcgctcccatcttgcgcaagttggtcacgtgactggaatgcttgaaccaaacgtagtgtctcatccactgatctacccacaggaagatcattcagagtaatttgtcttaggattcctttgtcatcaataatgaagagacctctaagagtgtggcctgagtcctctaggtatacaccatagtcctttgagatctgatgggtcaaatctgaaagaagtggaatccttattg

SEQ ID NO: 15967 - DNA, 526 bp, Homo sapiens
gactcctatagggcgaattggagctccccgcggtggcggccgaggtactggcccagtcccgccgtcctgccctgccgtgaagtgtgagcagctttctcagcacttcctgcagagaagtctggcaggggtgtgaattctctcttcccttcagggagagaataaaagccgccctcattctaggggagaatataatgtttacagcacctttcaaagtcatgaaccggagtttgactatttgaaaagtctagaaattgaggaaaaaattaataaaattaggtggttgccacaacagaatgctgctcattttctactgtctacaaatgataaaactataaaattatggaaaataagtgaacgggataaaagagcagaaggttataacctgaaagacgaagatggaagacttcgagacccatttaggatcacggcgctacggatgacctgagaattaatttatggcacttagaaatcacagatagaagctttaacatcgtggacatcaagcctgctaacatggaggagctga

SEQ ID NO: 15968 - DNA, 415 bp, Homo sapiens
  misc_feature 259, 266, 291, 294, 321, 326, 374, 383, 387, 391, 393, 398,401, 403: n = A,T,C or G
ctgattggagctccccgcggtggcggccgaggtacactgcaggtgacaacacagtctcaacccagccatcccccatcccacaccagctgcagcaacattctctacactctcacataaaaagggttatctggggccaggcacggtggctcatgcctgtaatcccagcagtttgagaggccaaggtgggcggatcacaaggtcaagagatcaagaccaaacacggtgaaaccccgttgccacaaggaaaaaaaaaaattanccgggcntggtgtcacatgcctgtagtcccanctnctagggaggctgaggcaggaaaatcanttcanccgggaggcaaaggttgcagtgagccaaaatcgccccactgcactgcntcctgggcnacanagcnanactcntgntnaaaaaaaaaaaa

SEQ ID NO: 15969 - DNA, 382 bp, Homo sapiens
  misc_feature 15, 169, 186, 212, 241, 269, 292, 296, 304, 312, 325, 359,367: n = A,T,C or G
tccaggggtaaatcntggatactggctttctggtcctggggcgcaagtcctgccctgctcagaactaaaatcctgagcgattgaggtctgtgtgttatgtcctaaggtgtttttgtctgcagtttgagagcatgtctttctcctggtaaaagggaattatatccataantcattacttgccccccnggctggaaactggaacaccgacattntcctgtgggccgaaataaaaaggggagtncgaggttagatccggtttctgggcaacnggccgctctataacctaagtggnatcnccccggtncctggccncggaaatttccgnattttcaaggcttaattcggattacccgggctgnaccttcgnagggggggggggccc

SEQ ID NO: 15970 - DNA, 447 bp, Homo sapiens
  misc_feature 22, 27, 31, 34, 39, 41, 47, 48, 51, 52, 53, 55, 57, 58, 60,66, 76, 115, 164, 276: n = A,T,C or G
ggtctagctgtttcctgtgtgnaaaanaacngcnccccncnggggcnnccnnntngnntntgagtnaatctttggntgtttgtgatgttgccgaagatttagtggaaaagctganaaagtttcgttttcgcaaagaaacgaacaacgctgctattataatgaanattgacaaggataaacgcctggtggtacgtcaggaggcaggaacctgccagttctccttggtgcaaaaatctgaccctcggctgccctgcaaagggggagggcctgacccanaatggggctcagccaacacccctgttcctggggctcctgctccccactccagctaaactcaactgatcatccatctgctgactgctcactgctgctgccacttccagggaaaccactagcagctgccaatgtattctgaacaaataaattaatgctatagctgaaaaaaaa

SEQ ID NO: 15971 - DNA, 480 bp, Homo sapiens
acatcaccaagctgcagcaggagagaggccagatgcaggaggaggcccggcggctgcgggaggagatcgaggagctcaatgccaccatcatgtgagcttctgggccttggggctccaaccaggcaccccatcccgatgcagggcctgcctcagaggtggtgggaccctgtggcctcatcactggtcagtgcctctttgctgcagtagttctgctctttgtcaacctccttccacagacctctcttctctgtgcctggctgtggcccggcactgggccagccctgccatcttttgtcccagggtccttattggccactggctgctccacagctcccacggctcctgtcatttcagctcctgccagcagctgctccctgccacgggagtccccgttacccggcgccagtttgatcacatgaaagacatgtttgacgaatacgtgaaaacccggaccttgcagaattggaagttctggatttt

SEQ ID NO: 15972 - DNA, 423 bp, Homo sapiens
accatgcggacatctacgacaaagtgtcgggcgacatgcagaagcaaggctgcgactgtgagtgtctgggcggcgggcgcatctcccaccagagtcaggacaagaagattcacgtgtacagcctctctcctggttgctttcatgggctagcattgagtgtcagaggcttttcttggtgcatggtgcaagctgttggtggatctaccattctggggtctggaagactgtggctgtcttctcacagctctactcggtggtcccccagtagggactctgtgtgggggcttcaaccccacatttcctttttgcactgccctagcagaggttctccatgagggccctccaagtttgctcatgcagcaaacttttgcctgggaatccaggcatttctatacatcttctgaaatctaggcggaggttccc

SEQ ID NO: 15973 - DNA, 382 bp, Homo sapiens
  misc_feature 295: n = A,T,C or G
acaagatggtggcctggtcatggagttggcagggagtggccggggctgagctggtgagacaaagagctcttgccagtctcctgctctggagggctggttcccttccccagaggaggcaccggtggaggacgtgccaggggcccgggcctaacgtcctgctcagcctctgcactcagccccaggtcgggccctggcaggtgctgggatgacccacggaaggcacttggctggggcctgcaggccccctggaggatgcggtccgtggctcagtagatttggggggaccagggaaganggaacccaaggaagagggaaccaaggagctgagccctggtgggtggcccatcctagggtgggcttggctgtggcattggcaggcctg

SEQ ID NO: 15974 - DNA, 418 bp, Homo sapiens
  misc_feature 313, 314, 324, 325, 329, 330, 340, 343, 344, 345, 351, 352,353, 354, 355, 364, 365, 377, 380, 383, 384, 385, 386, 387,391: n = A,T,C or G
gctccccgcggtggcggccgaggtactatgagcgggccctgagactggctgctgactttgagaactctgtgagacaaggtccttaggcacccagatatcagccactttcacatttcatttcattttatgctaacatttactaatcatcttttctgcttactgttttcagaaacattataattcactgtaatgatgtaattcttgaataataaatctgacaaaatattaaaaaaaaaaaaaaaaaaaaaaaaaaaaaaaaaaaaaaaaaaaaaaaaaaaaaaaaaaaaaaaaaaaaaaaaaaaaaaaaaaaaanngttttttttnncccnngggggggggnttnnnaaaaannnnnccccccccnngggggaaaaaanaanaannnnntttntcccccccccccccggggggggggggc

SEQ ID NO: 15975 - DNA, 670 bp, Homo sapiens
  misc_feature 7, 20, 44, 65, 106, 240, 413, 471, 551, 560, 567, 602, 606,612, 613, 662: n = A,T,C or G
ttaatgnatcgagtcatttnctaaaggggaatatggaaccccancctgcgtggaaggcatctcanataatgccttttcagtgagggtgttgatctaaatcttttanaaatcatttggtgttagccatcaacggttgaaatttgtaatgtgggatacatctcaatttccttatctacaaattgctactacaaagaaaatttacatgtgttctctctagttttcaacttaaactgctccccngcagggaaacaaaaggtcatttgccctcgctgtagttggagatttgcactcatgatttccaggtgtttctgaattctttgaagctttttctgctgaaggacaagtggtgcacgttcagcagtttccttagaaccattgccaattgaaagaaccttgttcatcctgagagtcancggaaaccctgtcattaatgagaggaactggaaagttgccttctatactgtgtaacanaacctgagctgtatattttgtcatgcagttgtgcttggtgtgtatataaatctgacatactgtcatttaagggaaaagtntaaaggtanaaaaatntttggttagggtgaaaaataactttgggaaataanaacncttggnnggtttcctcctctgattttgggtcatggttggcaattttaagttttttngcttttca

SEQ ID NO: 15976 - DNA, 423 bp, Homo sapiens
  misc_feature 126, 132, 281, 282, 283, 284, 285, 286, 287, 288, 289, 290,291, 292, 293, 294, 295, 296, 297, 298, 299, 300, 301, 302,303, 304: n = A,T,C or G
ctgattggagctccccgcggtggcggccgaggtacggttttcagcaccacaaggaaactccgaaggtagtaaggatgaccggttgtttgaccaggaccattgcagcttgacccctgctccaaaggnaaaacnctgtgagggatatcattgtttaagcaactgtcatcctgcagaggagcctcttggatgttactccatgcagaagcatcatctgcagaactatgagattttgcctctgaatctgacagctgtattttagcttctgaagcaacagtcatttnnnnnnnnnnnnnnnnnnnnnnnnacggcttatagtcattgtatttacatctgatggagtagcagagggtggggcatgccagtttcctgagctaaaaggaaatatatgcaatgctttctgcaaatggtaaggaaaaaattgtt

SEQ ID NO: 15977 - DNA, 354 bp, Homo sapiens
  misc_feature 16, 18, 23, 31, 32, 34, 38, 39, 42, 44, 46, 48, 53, 57, 59,61, 66, 71, 76, 83, 85, 93, 95, 109, 127, 144, 153, 160,170, 177, 187, 223, 305, 308: n = A,T,C or G
tagctgtttcctgtgngnaaaanaacggccnnanctcnnggncntncntgttncttntntnaaaancaagnccacncatcagntntgttgccnantcatcactatgctnatacctgcaagacagaantactgttggaaacagcnctcgaattncaaaatngaaaaaacancaaagcncataaaacanactggaaggtgacacaccaaaatgtttatagcagtnttattgaatggtgcattataaataaatatttttcttctttatacttttcggcattttcttttctttctttttttattttttnganatggagtcttgctctgttgccaggctggagtgcagtggtgtgatct

SEQ ID NO: 15978 - DNA, 305 bp, Homo sapiens
cggcggaccccagtgtctttatccctcttttgcacagtcagcttctgcagctctcccgggctagcatggcagcgtggaagagttggacggccctgcggctctgcgccacaggcattgcttcagagtttggagttcgaggttatccaacaattaagctattaaaaggggacttggcatataattatagaggaccacgaacaaaagatgatattattgagtttgctcacagagtatctggggctctaattcggccacttccaagtcaacaaatgtttgaacatatgcagaagagacaccgtgtattt

SEQ ID NO: 15979 - DNA, 691 bp, Homo sapiens
  misc_feature 404, 519, 533, 627, 652, 678, 683: n = A,T,C or G
gcgggttcgggatgttctatgccgtgaggaggggccgcaagactggggtctttctgacctggaatgagtgcagagcacaggtggaccggtttcctgctgccagatttaagaagtttgccacagaggatgaggcctgggcctttgtcaggaaatctgcaagcccggaagtttcagaagggcatgaaaatcaacatggacaagaatcggaggcgaaagccagcaagcgactccgtgagccactggatggagatggacatgaaagcgcagagcccgtatgcaaagcaccatgaagcccgagccgtggagcccggcgcctccagttagcagagacaccgttttcctacatggggagacttcgttcgtcgtctacactgatggcttgctgctccagtaatgggccgtangaaggcccgccgaggcagggaatcggcgtttactgggggggcccgggccatcctttaaatggtaggccattaagacttccttgggccggcaggacaaacccaaaaggaagcgggnaaatttatggccangccttgcaaaagcccatttgaaaccaaagccaaaaggacttcaaaaaaccattcaaataaaaacctgggtttcttgttattccaagacaagttnttgttttaccgaattaaaatgggtntttaaacttaaccttgggtttcaaanggttngggaaaga

SEQ ID NO: 15980 - DNA, 361 bp, Homo sapiens
  misc_feature 326: n = A,T,C or G
acctctctctcctcggccctcgtaagctgtccgcggtctgtttggcccgaacggcggcggaggcgctgatcatggcgacattcatctcggtgcagctgaaaaagacctcagaggtggacctggccaagccgctggtgaagttcatccagcagacttacccaagcggcggggaagagcaggcccagtacttttggatcatatatatgtagatgtgcaccttcatccatcaaatatttgctaatatatatactagaagattctcttgtatcaccagtgtcctttttgaatgcaaatcccaaaatagctatcttcttatcagttactgnattaaacagactatctatgatccgggaagcaaacc

SEQ ID NO: 15981 - DNA, 406 bp, Homo sapiens
ttgtagccttccctggcgtgcgtgccccgtgactccttccgcgcctctgctccgtagatggtctgcagcgcacacagcatcaggttctgcagctccagggtctccaccaggtccgtgttccagaccattcctcaggttttcttctgccatctgtgacagcttcttgatctgacctcaggtggatggctgtgtttgacgggtgttgctcgtgacagttggggtcctcctcagcatcagtcttgacatggctgcaactgggggggtcctcgggatcctcccggaatctcttcctcagcattcgctcatgataaggtttcaggtgtcttgatggttcagtcctggagaaacataagcataacctctaccccaagttattattttacctatttcccaactttctgttatc

SEQ ID NO: 15982 - DNA, 437 bp, Homo sapiens
actgggaagaaatctggcatcgagttcaattccgccaataactgggcaagcatggctttgttctccttgatgttcatggtccttttcagcaaagcatctgaactctcctggctctcatcccgagagtcatcctcagactcagaggtagaatcttccctttgtatcacctgtctacagtctttctttctttcaagaattgtttttttctcattctgtaagcgtgcgctagaaaacaactgctcggaagaactgtttttatctggtttgttggccagcttcttggtggggaactgaaaggctactcgaagaccaatactacttcttctagacctgcttcttctaggggtagccttatcttcttcttcatcttcctcttcctcgctcaccaaagatgctttgccatcatcactcaaatctgactccacgaccattacttc

SEQ ID NO: 15983 - DNA, 496 bp, Homo sapiens
  misc_feature 98, 191, 289, 349, 374, 417, 420, 421, 424, 451, 452, 453: n = A,T,C or G
actgcggtctgtggtaatttacatgggaatgggatgagatctagtagttttagatccaacgcaattctgggaagggttggtaataaaccaaaactcantctatgcagtatttaaaaaataattgagagttgtgacaacttcgattcttttcaggaggtgctgtcttaagatagaagaaagggatcaagctnttatcttagaaagcacagacacgtttagctcagggtagttgcaaattcaatgctaagttggctgctccatgaaatctaaggggcccgggtaaaggggnaagaggcccagggatttcttccttgtcttggacactttcggggactaggcattcctggcnaggtcctttacaagttattaatacnaaaaaccatccaagataaaatttctaatcaccgactgtgttanttnnctncccccaaaaattaatttttccttcttnnnaagtaaaaattcagggaaaaggggggcctgagtttcctgaaaa

SEQ ID NO: 15984 - DNA, 114 bp, Homo sapiens
  misc_feature 66, 68, 73, 98: n = A,T,C or G
attggagctccccgcggtggcggccgaggtaccgagaacagatatacgaaacattgggttctcctngnaccanctgctttgcacttccaaagtcacanagttttaatacagcag

SEQ ID NO: 15985 - DNA, 387 bp, Homo sapiens
  misc_feature 198, 216, 237, 257, 272, 304, 313, 318, 368, 373, 375: n = A,T,C or G
ggtggtgaaaccccatctaccaaaaatataaaaaattagctgggtgtggtggtgcacgcctgtaatcccagctacttgagaggctgaggcaggagaatcacttgaactcgggaggtggaagttgcagtgagctgagatcgtgccactgcacgatccgcctgagcgacagaatgagattccatctcaaaaaaaaaagtncccatctgcctttctctngcctcctacattgcccccacnattgccccaagatccacggngaaccacggcctctnttgctgttgagcaggaccccctctgccacccntagagcctnttggngggcccaaaggtgccccctttgtgaatagccagctctaccttttggaggnggggncncccctccccctt

SEQ ID NO: 15986 - DNA, 636 bp, Homo sapiens
  misc_feature 301, 317, 382, 384, 385, 405, 475, 477, 542, 543, 548, 562,566, 567, 568, 573, 583, 589, 596, 598, 606: n = A,T,C or G
actgacaaccacctggtgctggtggacctgcggcccaagggcctggatggagctcgggctgagcgggtgctagagcttgtatccatcactgccaacaagaacacctgtcctggagaccgaagtgccatcacaccgggcggcctgcggcttggggccccagccttaacttctcgacagttccgtgaggatgacttccggagagttgtggactttatagatgaaggggtcaacattggcttagaggtgaagagcaagactgccaagctccaggatttcaaatccttcctgcttaaggactcanaaacaagtcaagcgtntggccaacctcaggcaacgggtggagcattttgccaagggccttccccatgcctggttttgaatnanncattgaaaggcaccttgggnaaattgaagggccccaccaagactcaaaaaggttactcttcctttccccccttacccttggggcccagtngnaaaataagaaaaagccttttctaattttttttggtgccgggggagggggaaagaacccttttcannttatnggggcaaggagccnaggnnnttaantcttcccttncccaanaaatttntnaacttganaaaaaaactttttcttttttcccctttttt

SEQ ID NO: 15987 - DNA, 407 bp, Homo sapiens
acatcttataaattcataaaaaccttcttttttccatcttaggcttcaaattcttcataacgtgtttcaataggtaacctgtatcaattcttggtaaccctaggcagttgtcagccaaatagccttaaatttgcatgctaaaagaaagaactcaggtgaaaatcaaatagcaaaatatacatcataagatatggtgagagaaagtctggtgtgctgaagagaaattaaaactgacttaattgccaattaaacatgaaattatagaaattataaaggccttctaaataaacacacacacacacacacacacacacacaaagattctatagctcttactttagagatgtaggcatgagataaatacaaattcaccagcttgcaaataaataacctgttggatacaaaca

SEQ ID NO: 15988 - DNA, 366 bp, Homo sapiens
  misc_feature 11, 43, 49, 50, 54, 58, 63, 339, 343, 354: n = A,T,C or G
cgcgtaatacnacgactatagggcgaattggagctcaccgacnactatnnggcnaatngcagntacaatcttaacccaaaaagtgtgtgtgtttgtgtgtgtgtgtgtgtgtgtgttttgtttttgacagagacatgtaggagacaggtggaaaatttgaggctgatgaaccaaagagaatttcgagtttttagtacctgattgtggtgaccgacgggcaccccctggagggctacaaggaaccctgtggggggctggaggatgctgtgaacgaggccaagcacctgggcgtaaaagtcttctcggtggccatcacacccgaccacctggagccgcgtntgancatcatcgccncggaccacacgt

SEQ ID NO: 15989 - DNA, 256 bp, Homo sapiens
  misc_feature 137, 197, 254: n = A,T,C or G
acaccgactacggcggactaatcttcaactcctacatacttcccccattattcctagaaccaggcgacctgcgactccttgacgttgacaatcgagtagtacagtccggcccggtggggaggagggagggaaggcangcacacgaagacacaggtatgtcgggaagtgcacacaaaccgttgtctttcctttttggntaaagaagaaaaactttgtaatcaatatcctgctcataagtaaaagtggaaaagaanaa

SEQ ID NO: 15990 - DNA, 432 bp, Homo sapiens
tcgactcctatagggcgaattggagctccccgcggtggcggccgaggtaccatttgggtcaggattttgtcatttagatccgtatttttcctatatttttatctggttgttccgtcagttactgagagagcagtattaattcaccagctataattttggattgtcaatttcctgcttttgttctgttgtttttgattcacatactttgaggctctgtgtgtgtgtgtgtagtttgtgtgcactttgaggcacaatttataattgtaacatcatcctctctgattcttttatttttattaaattaccctgtttatttctggtgatatattttgttctgaagcctctttcatctagtgttaacatctctgttgaagctttttatgattaagtgtctggatagcatatttttatgtttaatctgcatagcatatt

SEQ ID NO: 15991 - DNA, 451 bp, Homo sapiens
  misc_feature 9, 14, 20, 29, 31, 181, 288, 342, 393, 424: n = A,T,C or G
atacgactncactntagggncgaattggnanctccaccgcggtggcggccgagtacaagcttttttttttttttttttttttttttttttgagaatggagtctggctctgtcgcccaggctggagtgcagtggcaccatctcggctcattgcaatctctgcctcccgagcccaagtgattntcctacctcagcctcccaagtagctgggattacaggtgtgagccactgtgccaggccctgattcttttttttattaaaacataggctgggcacggtggctcatgcanattaaattttacattcatgtgtgattaaaatctcccctcatgagtttaggttgnaaaatccatgagagtagggactatgtttgactgtaatcagcaagatctttntaatgccttccctatgcctggcacacagtanatgttcaataaatatttactgactgaa

SEQ ID NO: 15992 - DNA, 419 bp, Homo sapiens
ccgcggtggcggcccgaggtacatgaagcagccccttttggaagcatgtccatgcaggtccacatagtaagcaacgccactctctttgggggggatggtatcaggggctgactcttcaagccccgcagactgttgtggcataatccacacactgttgagcttctgttctgctggctctgtttgtttccaggcttcagcgttatgcctgtcagctgagtgcccacactgagcttcattttggagattgttggctttctccaggtcagaaacaggagcatcaggagggagacaggaactgggctggtgctcagaggaactctgggagttcagacgagagtgcacatggtggtagagaagcacagctttggccccatagatggccgggtgcaggacggcatcaggcttcaggtacctgcccg

SEQ ID NO: 15993 - DNA, 459 bp, Homo sapiens
attggagctccccgcggtggcggccgaggtacggctcgctgggtctctacgtggccgagcagtttggggaagagaacgtgaacacctacttcgtgctgtccagctggtgggccaaggccctgtttgtcttctgcggcctcctcacgtgctgctactgctgctgctgtctgtgctgctgcttcaactgctgctgcgggaagtgtaagcccaaggcgcctgaaggcgaggagacggagttctacgtgtcccccgaggatctggaggcacagctgcagtctgacgagagggaggccacagacacgccgatcgtcatacagccggcatccgcaccgaagaccacccagctcacagccgactcccaccccagctaccacactgacgggttcaactaaatccaggaggagctgtggtcagaggaggagccggcgcctggccacgccaaccttagaatcatgaact

SEQ ID NO: 15994 - DNA, 344 bp, Homo sapiens
  misc_feature 338: n = A,T,C or G
actccagcctgggcaacagagcgagaccttgcttaaaatcagtgttgaaaaattttagaagctaaataggtaaaaaagcaggaaggtgcagacctccactagtgctgctgctttatccatctggtcctgtgaaggctcaccctgaagctatgggatggctgcttttgtttcatttttctcacttgtgatttctgagtccttttaacaatgatgaggcatggttggggatgtggaagatgagtaggatggtggtgctacagctggaggccacaggagaggtgcaagctgggctcagtttgtgtggctgccccacccactgtgttacgccacaaaggcanccctgg

SEQ ID NO: 15995 - DNA, 650 bp, Homo sapiens
  misc_feature 209, 237, 465, 604, 618: n = A,T,C or G
attggagctccaccgcggtggccgagcggccgcccgggcaggtggagggggaagatggctcaccgggacccgttctgctaggaagaaggggagcaggtggtgctgctactcgggaggaagcagagcagcctccgtcgctgtcgctgagagcctcacgagtcgaggtcctgcaggtggagctccggcagccgccctggttgaaggtttanaacagatgtggaaaaatgtttacttcanagaaaggggttgtggaggaatggttgtcagagtttaagacattaccagaaacatctttaccaaattatgccacaaatttgaaagacaagagttctttagtttcatctctctataaagttatccaggagccacaaagtgagttgctagaacctgtctgtcaccagctctttgaattctatcgcagtggagaggagcagttgcttcaatttacgctgcaatttctcccanaactaatttggtgctaccttgcagtctcagccagcagaaatgtgcatagcagtggatgcattgaaagctcttcttctaggggtttacaatttggaaatagtttgacaaacagggacataccaaagtattgagttttacnattccatctttatncaaaccatctgtattccattgaacctttcaac

SEQ ID NO: 15996 - DNA, 428 bp, Homo sapiens
acacatcccatctgggcggtggcttcactcctgagtctgcaaaatcccaggaaacttgggtcttgctgcccatccttcctcagcacagggaacccggaagcccgttgcactgacagaggctcacaccctctgggttttttgtttttttttaaacttcatttctcttccaacccattgtgttcctctgccctcattctttacctttgttgtaagaactttagctccagggaactgaggcagaggccctgtttgtggtctgtgttgacagccacccaccctctcccacctcatgctcctgcacctgcaccaccaaggttgatgccggattcgaagccaggaaggcccagtccctcctctgctctcctcaaagacgcaaaacattttccaacaagagctgtcacagtggcagcaaagcaggggccacccgt

SEQ ID NO: 15997 - DNA, 503 bp, Homo sapiens
aatacgactcctatagggcgaattggagctccccgcggtggcggccgaggtacttgaaatgttgctggttaaaagtttttctgctttgctcattcctttgacagcattaatttgtgaacatttatattcagttcagctgtatttatggcacaagatctcatttccaaaatggcactaattttccttaagtgtaacagcactctatttttagcagtaattatatttttaaaggttaatttgtagaacaaatgttttaactatactttttttctactctatactccccagttacaatatttacaaagggctgaagtctatataaaaaaatgatctttggctgggcatggtggctcatgcctgtaatcccagcagagaaaaaaggatgaaaaaaaagacaaaggaggggaaagaggagcagcagtgaaaatttgtaataaaaactcttcttaatttataggtaagttttggcatttttaaatccaacgccccctcccaccccctaa

SEQ ID NO: 15998 - DNA, 611 bp, Homo sapiens
  misc_feature 600: n = A,T,C or G
acatgtggccttttggattcccaagaatatgtggaagttttaaaagcctttattctccaaaatatcttactttccagcttttcctcccaggctttttggtgtgtctattgtttgccttagctattattctttgcccccgatggcagaggctaataaacttgcctttacaaatttttgacaaatgcctgtagtcacctttcttcctcaggagatttccaagttaggggaactaaaataagcctccataattctttgaaaagaaggtccacggccaggcacagtggctcatgaccggccagctactgtcttttctttgacccttcctttccagtttttgaagataaagcaggaaataatcttctctgaagatacttgataaaaattcccaaaacaacaaaacacatgcttccacttcactgataaaaaatttaccgcagtttggcacctaagagtatgacaacagcaacaaaaagtaatttcaaagagttaagatttcttcagcaaaatagatgattcacatcttcaagtcctttttgaaatcagttaatattattctttccccatttccatctgaatgactgcagcaataggtttttttgnttttttttttt

SEQ ID NO: 15999 - DNA, 60 bp, Homo sapiens
  misc_feature 20, 22, 27, 34, 35, 38, 40, 43, 49, 50: n = A,T,C or G
ggtctagctgtttcctgtgngnaaaanaacagcnncancncgngggcgnncgttttacat

SEQ ID NO: 16000 - DNA, 727 bp, Homo sapiens
  misc_feature 344, 476, 482, 495, 501, 507, 520, 524, 533, 537, 564, 568,570, 574, 577, 580, 601, 636, 641, 660, 668, 684: n = A,T,C or G
atccgcgagatcgagctcaagaaccggcacggcctcgtgcccttcgccttcgtgcgcttcgaggacccccgagatgcagaggatgctatttatggaagaaatggttatgattatggccagtgtcggcttcgtgtggagttccccaggacttatggaggtcggggtgggtggccccgtggtgggaggaatgggcctcctacaagaagatctgatttccgagttcttgtttcaggacttcctccgtcaggcagctggcaggacctgaaggatcacatgcgagaagctggggatgtctgttatgctgatgtgcaaaaggatggagtggggatggtcgagtatctcanaaaaagaagacatggaatatgccctgcgtaaactggatgacaccaaattccgctcttatgagggtggaaacttctacatccgagtttatcctgagagaaacaccagctttggcttctcacggtcttcggtcntgggtnaaagggggccccngacttnttccantacccaaaagcangggnttcccccanactnacttttttttcctttttcaaggccctnactngnaaanaanggnggaatgggggaaatttttttnttttatttttttaagggttaacctggagcctggcntttgngctccaaaaaatcttacantttccaanattggagggattttantgggtctttaaggaaaatttttttaaatttttttttttttttt

SEQ ID NO: 16001 - DNA, 447 bp, Homo sapiens
  misc_feature 376: n = A,T,C or G
tggagctccccgcggtggcggccgaggtcttcttcctcctgcccgtagtagccatggcggccatgagtttgttgcggcgggtttcggttactgcggtggcagctctgtctggccggccccttggcactcgcctcggatttgggggcttcctcactcgtggctttccgaaggctgctgctcctgttcgacacagtggagaccatgggaaaagactatttgtcatcagaccttctagattctatgacaggcgttttttgaagttattggtaagtttaaattttttgttgaattaaagtctttgcatgtaacagggaaaaaaattttgcctctttagaaaacatctttcattttatgaaatattttattttgtaaattnatatttctttctgtagaagatactgagactgtaaagtctgatttgttattgaatttctctttaaattaagt

SEQ ID NO: 16002 - DNA, 354 bp, Homo sapiens
  misc_feature 120: n = A,T,C or G
gagctccccgcggtggcggccgaggtacatcccttgctaggtgagaagggggtcagagaggtcaggcacagacagagaagggaacgcaggctcctggccactagcctctctcaagacagnggtttcaactttgtgttaagcgaactcatttaatattttgggcctaatagaagttatttgtattttctctcctcttttttccctcctctctctcactcaccctccccccactcccaccaaaaagtaccctgtgcagggagcggctagaagacacccacttcgtccagtgcccctcggtgcccggacacaagttctgctttccctgctcccgggagttcatcaaggcgcggggcc

SEQ ID NO: 16003 - DNA, 370 bp, Homo sapiens
  misc_feature 206, 345: n = A,T,C or G
acccggcctccttctggttcgaggtccccagctccgcctacgtgttcctcattgtcatcaatctcttcatcggcatcaccgccaccgtggccaccttcctgctacagctcttcgagcacgacaaggacctgaaggttgtcaacagttacctgaaaagctgcttcctcattttccccaactacaacctgggccacgggctcatgganatggcctacaacgagtacgcaggccaggggtcttgaagacccttgagtcaaacctgggtgtcaggcctggagttggtttgaccatggacacctccaatcggcccacggctggggtaacagtgttagcacggcttgaccntttcccttttccttttccttgtatg

SEQ ID NO: 16004 - DNA, 442 bp, Homo sapiens
ggctccagcctggaggagctcagggtggccggcattcacaagaaggtggcccggaccatcggcatttctgtggatccgaggaggcggaacaagtccacggagtccctgcagaccaacgtgcagcggctgaaggagtaccacaaagggacccaaattcagcggtctgtgcctacaaacttcattaataactgcttgcagattggcagctatctggtcacttgacatatccaatgttgctattttggtctggagaaagttctccctttcttcatctaccttaatttcatgtccatttttaaataattcaagcattttggggatgtcacggccaatggaatttcgagaaagctttggatattttttattcagtttcttccttaatcgattaagttcaggcattatttctggaacagctacgtaaaaagtctgcaacaatttcatc

SEQ ID NO: 16005 - DNA, 408 bp, Homo sapiens
  misc_feature 33, 37, 38, 49, 50, 52, 57, 59, 78, 79, 80, 81, 82, 83, 85,87, 92, 93, 106, 107, 108, 111, 112, 117, 118, 142, 145,147, 148, 150, 152, 154, 158, 160, 169, 170, 171, 187, 191,192, 199, 204, 238, 246, 270, 271, 282, 286, 291, 321: n = A,T,C or G
  misc_feature 322, 323, 325: n = A,T,C or G
cgcggtggcggccgaggtcaagctttttttttntttnntttttttttanngnttttntnttcttttttgaaagttttnnnnnncntntttgnntggtttttttttnnnctnnttttnnctattagattcattttgcctaacncanannananangcanantatcaaccnnngggagcatcataaaangaannttccaantgganaggagtaggaagcagccatatgatagtattgacnctggacanaattcgatgtctttcgtttccaanngggcaggaggngggnacccncctttccctaaatgttggcattggaaaatnnncntctttatattactctttcccagcctaccgttccctaaatccattggataaatttaaaaaaatttttttaaagcccccccttaa

SEQ ID NO: 16006 - DNA, 126 bp, Homo sapiens
  misc_feature 27, 28, 31, 34, 37, 38, 43, 59, 60, 99, 115: n = A,T,C or G
ccgcggtggcggccgaggtacaagctnnttntanctnnccgcngtggcggccgcccggnnaggttggttttcaggtttattcaagattaatgcatttanaccattcctttttcanacttaccctta

SEQ ID NO: 16007 - DNA, 245 bp, Homo sapiens
  misc_feature 149, 156, 162, 163, 166, 167, 168, 169, 170, 171, 172, 173,174, 176, 177, 179, 190, 224, 232: n = A,T,C or G
ccgcggtggcggcccgcccgggcaggtaccaggcagctgggccccgcaggacaggccgcagcgggtggccggttctgttctgatagatttacagtatcaaactggaaaagaaagattgttacgaaaaatctgtagataaactgtgaatnccaaaanaaaaannaannnnnnnnnannancttgtactttnttgtcaaacaaaaccaatggctctgggtttgganaacacagnggctggttttaaa

SEQ ID NO: 16008 - DNA, 413 bp, Homo sapiens
  misc_feature 23, 24, 26, 27, 30, 32, 43, 44, 145, 151, 230, 238, 246,247, 250, 254, 257, 262, 271, 272, 327, 334, 357, 360: n = A,T,C or G
tagctgtttcctgtgtggcaaannanngcncnccgcgggggcnnccgtcctgcctggtacccaaggaagaaataaatttggaatagtcccctcccctccagggctgagatccaaaacatgttggaggagttgtggacatgaccanaccccnggacggtagaggtctaatgagctgctgcaggctaaagctggcaatgggtgctttggaactcactggtcaattgtctcantgagagangtgtggannaantccncantgganccactgatnnttgacacggtgagtgccactagaagtccccatatatgccactggcagccacacanaatcacnaatagacacacactggaactaanaanagaaagcccttcctcttgtagtatcctctgaaggccctctactgacaaaacgt

SEQ ID NO: 16009 - DNA, 449 bp, Homo sapiens
  misc_feature 31, 34, 36, 39, 41, 46, 47, 53, 59, 62, 65, 68, 74, 77, 79,81, 90, 94, 95, 101, 104, 105, 107, 118, 119, 124, 125,126, 127, 130, 132, 134, 139, 140, 141, 143, 144, 147, 148,150, 157, 162, 164, 166, 168, 169, 171, 174, 175, 182: n = A,T,C or G
  misc_feature 183: n = A,T,C or G
tgattggagctccccgcggtggcggcccgcnctngnacntncgganncccccntctgcnagnctntgncgtctngcncntnaataccttngacnncaaagnggnncncctgacccgtnnttatnnnnctnantntgagnnntnnttnngnacttggngaaancntngnngnaanntgtttcnnggtaatggtaggctttctggagaaaatgatatttaagccaagaactcttagaagttagctaagagagagatgggaaaatgagacgacattgctggagtagataaaactgcatgttaaaggcaggaaggtggggaaaaaaagttcagtaaagctggaatggggaaatgtagtcagggactgaattttaaaggactttatcaacctcagtaaagagtttggaccctatgttgagggtggctgaaaacatattcatagtgtcatgaaca

SEQ ID NO: 16010 - DNA, 521 bp, Homo sapiens
actcggagacaggtccagggctagggcacacagtgggccaggtgttcccggggaaagccaggcggcacaagctgcttagccctgtttgactgtgctctcagtgcccaggtgcagagggcatctgaggtctgagaatggggattcctgctaccagggctccatctcctgggggaggggtggaggcaactcgagtgaacacagcagaatgaacagtaagactcctgcccacacccctacctcctcggctctcaaattcatgtggacacacctagtttgggggatggtcccagactctgccatcccggcaatgaggacacatgaggccactggatgacagccctgcccaccctccagaagcccgggtctgccacacctagcacctgcagccaccaccttgatgggctcacagaagagaaatggagatgcttagaggtatgggaactgcttgcattcataaagttctctgactacagaactgggccaagggccctggtcctagaattctgctgtctcttaaagaa

SEQ ID NO: 16011 - DNA, 416 bp, Homo sapiens
  misc_feature 2, 5, 43, 87, 94, 96, 119, 179, 185, 202, 215, 225, 298,304, 309, 311, 317, 339, 350, 353, 356, 364, 380: n = A,T,C or G
cnagngtactggtcctactattataagaatgtttgcttcatangaacaggcactgactgtatcatctctgaacacaatggaatgaanctggcantnacaaaagaaaaattggaacattnacaaatgtgtggaaattaacagatttctaaacaatcaaggggtcaaagaagaaatcacangggaanttagaaaatactttganatgaatgaaaacnaaaacacaanataccaaaactgagagtgtgtgatgacaacagtgtgcagagggaaattcatagctgcaaatgtccatattaanaaacangacantnactatntgaggtgatgggtgttaattanctcagctgtancantcntttcatantgtatatcaaaacatnccactgtatactttatacttttttataaaaataaat

SEQ ID NO: 16012 - DNA, 266 bp, Homo sapiens
  misc_feature 147, 150, 157, 158, 175, 220: n = A,T,C or G
cgaggtactggatgatgtcctgagtaagggggatgagcttgaggaggtggagcatggtgctgatagtaaggatggtgtggaggttgttccattcctgggtaagggggcattccttgccaaggtggtggcatagctcccttctgaatnctnctaaacnnataccatcaattccacngccagggctcctgcaatcacggccagtcctggacgactcacagtncactgctggtccaaggtccggtctctggttgaatctcctggggcca

SEQ ID NO: 16013 - DNA, 411 bp, Homo sapiens
  misc_feature 275, 313, 353, 367, 388: n = A,T,C or G
gccccgctgaatttaagcatattagtcagcggaggagaagaaactaaccaggattccctcagtaacggcgagtgaacagggaagagcccagcgccgaatccccgccccgcggcggggcgcgggacatgtggcgtacatttgaaagcctctaaagaacaactgaagcccaaattcatataaaagttgcgtttaagttgtattaaaaatagatatataagaaaaaattctttcacttgatgtttgttagaccagaaagtgtgtgtgttctgtagctnagttcccagacagctttttaggtagtggaggaggtggnttcatgtggcacttgggcatttatattcccttgggagggnaggctgtggccttntggagcaggtggcttgttaangaacgctagcagggcatggcacc

SEQ ID NO: 16014 - DNA, 450 bp, Homo sapiens
cgcccgggcaggtacagtcgcgcgatctcagctcattgcaacctcctcctcctgggctcaagtggttctcctgcctcagcctcccaagtagctgggattacaggcgcctgccactgtgcctgactaacttttgtatttttagtagagacaggtttcaccatgttggccaggctggtcttgaactcctgacctcaggtgatccacctgcctcagcctcccaaagtgctgggattacaggggtgagtcaccacgccctgctgatcacaataaaatttctttcacatgattcaccgtccacaaacctcctacaaccttcttatattccatcaagttttttatttatcctatctataccttccctctttctcattttggggcaacctgtcattctacgttagggtgaaaattactctttttttccttaacaaagacacatatttcatacctcat

SEQ ID NO: 16015 - DNA, 429 bp, Homo sapiens
acccaagtcggggacttgaagttggacggaggaagacaatcaactggtgcagtgagtttgaaagagatcattggtctggaaggtgtggagctgggtgctgatgggaagactgtttcctatacccaatttctgttacccacaaatgcctttggagcccggagaaataccatagactccacctcctctttctcccagttccgtaacctgagccaccgcagcctctccataggccgggcaagcggcacccaggggagcctcgacacaggtagtgacctgggagactttatggactatgacccaaatctcttggatgacccccagtggccttgtggcaaacacaaacgcgttctgatcttcccttcctacatgacaacagtgattgactacgtgaagccctcggatctcaagaaggacatgaacgagaccttc

SEQ ID NO: 16016 - DNA, 470 bp, Homo sapiens
  misc_feature 7: n = A,T,C or G
caccgcngtggcggcccgcccgggcaggtactcgcggcagggcccggcgcgccggcggagagccatctgttgaatcgggccggaaggtggagatccggagggcctcgggcaaagaagccctgcagaacatcaacgaccagagcgatcgtcttctgatcaaaggaggtaaaattgttaatgatgaccagtcgttctatgcagacatatacatggaagatgggttgatcaagcaaataggagaaaatctgattgtgccaggaggagtgaagaccatcgaggcccactcccggatggtgatccccggaggaattgacgtccacactcgtttccagatgcctgatcagggaatgacgtctgctgatgatttcttccaaggaaccaaggcggccctggctgggggaaccactatgatcattgaccacgttgttcctgagcctgggacaagcctgctcgctgcctttgaccagtgg

SEQ ID NO: 16017 - DNA, 438 bp, Homo sapiens
  misc_feature 387: n = A,T,C or G
gcggtggcggccgaggtacatacttgtaaacacggatttttctgggttttggtttgctttttccttttgtccccctgcccctgttctagcttgttcttcttggtttgctttcaacctgcttgatggatgtctgcagagtgctctctaagagtccacctcagtgcctcgtgtactcagtggtcatgggaaggagcgaaggaaccatccttggttctcccagcttggttgtgtagcaatccctcagcattgtttttctcagcttcttggcaaaaattaaaacaacaacaacaacaacaacaacaacaaacagaaggataaactggcttgcctgtggaccctccccggctctggggccagtcgagagccattgagggacccagcactcanagacacaacacacatgtgtagctgcttctggctgagtgtgtttcctgtcac

SEQ ID NO: 16018 - DNA, 268 bp, Homo sapiens
ccgcggtggcggccgaggtggcttgttctattttccttctcaaagagtcagggtcaacattttcttttgcacatcccaggacttccctactcttatcatccactccaataaaaagatagcctcctccagtgtttgcaaatgcagggacgtattctggaattgtcctttttacatattcttggaagtgttttgtagagaactgtttaaactctactaactgagactcaggaaaaggcaggatttcaccatattcaagatagtctttttg

SEQ ID NO: 16019 - DNA, 148 bp, Homo sapiens
  misc_feature 24, 47, 94, 126, 135, 145: n = A,T,C or G
actgcaagacctcttgaacacttnccagaggataggatatttaagtnatgcccttggcgttgcctatggcacctttcccttctgaaagtctggntcctgcccagtgacccttggccttgtgagccnagatgcttnccctgcatanagg

SEQ ID NO: 16020 - DNA, 407 bp, Homo sapiens
  misc_feature 216: n = A,T,C or G
acttgcagatggcccgtaagaaggctcgagagtcctatgtggagacagaactgatattcgcactggctaaaacaaaccgccttgcagagttagaagaatttatcaatggaccaaataatgctcatatccaacaagttggtgaccgttgttatgatgaaaaaatgtatgatgctgctaagttgttgtacacccagcactttgcgacctgcggcccancaggcgcggaggatggcggggaggaagccagcagcccctgtgtttactgtcgtcagaaaggtcttgtgttttggttttggggtttttgttttgtttgtgttttgtttggcttgtttgttttttaaggggaaaaaagtttgtaattatttcatccaaatctcccgttatatatctgtgaataataagagatt

SEQ ID NO: 16021 - DNA, 379 bp, Homo sapiens
  misc_feature 348, 352, 361, 362, 364, 368, 375, 378: n = A,T,C or G
acttgtggaagatggccacgaggaggccaatggcctgatccagggggcatgccatggctgagggctgggcttggagcggtagggaggcggccaaatgcgacgcgagacagaggacaaagacccctcacgatgaatgctcttcagccagcttatcagcttttgccacagcttcttcaatgggtcccaccatatagaaggcctgttctgggagatggtcatattcacctgccaaaatctgctggaatcctttgatggtctccttcaggggtactttttaatggaaacaacttgccaaaaaatttgtcacagaattttgagacccattaaaaaagttaaatgagaaaaaanaaanaaataaaanntnaatnaataaanaanc

SEQ ID NO: 16022 - DNA, 250 bp, Homo sapiens
  misc_feature 61, 113, 165, 176, 214, 248: n = A,T,C or G
acacgtatgaataatagcacaaaataatgaaaaacaaacaaaaaacaaaacaaaaaaaccncaatctcccaaattaatgactatttacaaattccgaacctatttctactcantaattatttagacagatgtttttcttgctaactatcactatttgatcataantcctgattctncgtttttgaggattatgactgtttcacgtaactatttnttttcaatagttttcatagttgtcatacacaaanaa

SEQ ID NO: 16023 - DNA, 323 bp, Homo sapiens
  misc_feature 263: n = A,T,C or G
actaagcaaatgcaaggttataatttagctaatagtagtttacagacaattctgatgattatgatttcatttggtttaactaagctgtaccgctcacattcctcgtgccagtgctgccacttcagctccagctctgtcagtgtctgggtgttcccaggactaagaatgggcattgtcctcatcaggtcccccatgattcggcatatgcctgcagaggcggggctggcatcggcttccttggagagcatctgtcgggcctcatncagccggccctgcagcaccaagatggtcaccaagttccagaagctgcatgtttgcttgga

SEQ ID NO: 16024 - DNA, 438 bp, Homo sapiens
tgattggagctccccgcggtggcggcccgaggtacctattctcttatttgaatctaatggttcattaatatatactcccacaattgaaattaatagtagtcaccacagcgcaatggagaagagattacaagagatgaaggagaaaagggaaaatctttcccccacctcttcccaaatgattcagcagtctcatgataatccaagtaactctctgtgtgaagcacctttgaacatttcacgtgatactttgtgttcagatgaatactttgctggtggcttacactcatcttttgatgatctttgtggaaactcaggatgtggaaatcaggaaaggaagttggaaggatccattaatgacattaaaagtgatgtgtgtatttcttcacttgtattgaaagcaaataatattcattcatcaccatctttcactcacctcga

SEQ ID NO: 16025 - DNA, 415 bp, Homo sapiens
  misc_feature 404: n = A,T,C or G
acttttttttaataatgaagagattttttgtgcagtattaaaggaagacatttttcttctctagtcaattaaccgtatccacttgtctagtgtttggcggaatgaagtttctataagtcatgccacttttcttataattgttttaaaaaattatacctttcctttctctagttcttgcaacgatagcttttgcttttcttctcctcccgatgtgccagtatttaacaagaccctgctcacctcagaacaagatttcctttggttgctgtggacgtttcactgctgctgagttgctggcattctctctgtctgcatgctcgtcctcatctgggttctcactggccattggcttctcatggatgcactggccatgggcctctgtgtcgccatgatcgcctttgtcncgcctgccgag

SEQ ID NO: 16026 - DNA, 697 bp, Homo sapiens
  misc_feature 408, 467, 512, 560, 578, 590, 592, 600, 608, 615, 621, 622,633, 636, 644, 660, 669, 673, 681, 682, 685: n = A,T,C or G
cttgatgccaaaatgactttatacaacgattgtatttgtgacttttaaaaataattattttattgtgtaattgatttataaataacaaaattttttttacaacttatttctgagttgtgcgtttgttttgagggaaggagtgagagaaggcaggcaacagcttcacccctctaaaagtggacactcacaccaaactctgtgacaacggtttttcatttaaaaatgtttcagaggccgggcacagtggcacacgtgtgtaatcccagcactttgggaggccaaggtgggtggatcacccgaggtcaggagttcaagaccagcctggccaacatggcaagagcctgtctctattaaaaatacgaaaattagctgggcgtggtggcagacgcctgtaatcccagctactcnggaggctgaggcaggagaatcgcgtgaacccgggaggtggaaggttccgtgagcccaanattgcgccattgcacttccaacctgggccaacaggagcgaaactncgtctcaaaaaaaaaaaaaaaaagtttaaaaattttttttttccccgnttttggggggggggaccngttttttaaggnanaccgggcntttttaanaaatttngggggnntttttgggganggnttttaaanaaaatccccccaccancggggttcntttnggggttgnnatnccccccccccct

SEQ ID NO: 16027 - DNA, 625 bp, Homo sapiens
  misc_feature 1: n = A,T,C or G
nggtacagaaacaactcagcgtttgccttgtttgagcacagtttgaacatttggcagtgcctgagtggttgaagtttggccattgggattgaccaagatgtagctgttgtttgaggtgcatacactcaagttaggttttcattcttgtttacctattaaggtaggttgcaggtcatccacaaggactcataaatataattatggagtccttctcaggacatacttagttcactttaacaatgccttccctttggttattttctcaattttgagagactggccaaaacttcagtcactggtgtcactattacccttgcaaatgtacagaggtctctggaaagattggcagacctgctaggaaagatccagaaagcattgggagaatatctggaaagagagcggtcatctttccccaggttctattttgtgggtgatgaagatttgcttgaaatcattggaaacagcaagaatgtcgctaaattacagaaacacttcaagaagatgtttgctggagtttcgagcatcatcctgacgaggataactctgttgttttgggtatttcatctcgggaaggagaggagggttatgtttaaaactcctgtgtcaattactgaacatcccaaaa

SEQ ID NO: 16028 - DNA, 350 bp, Homo sapiens
  misc_feature 329, 347: n = A,T,C or G
accccatcgactgcgtcaagacccggatgcagagtctacagcccgacccagctgcccgctatcgcaatgtgttggaggccctctggaggattataagaacggagggcctatggaggcccatgagggggctgaacgtcacagcaacaggcgcagggcctgcccacgccctttattttgcctgctacgaaaagttaaaaaagacattgagtgatgtaatccaccctgggggcaatagccatattgccaatggtattgagccttcctgtgctggttcccccactttcccaactctttgggctttgcttgctgtcagtgctttccagtctcancatggtttggagctgaanctt

SEQ ID NO: 16029 - DNA, 226 bp, Homo sapiens
cacctgttggcccgtcaaaatgcatactccttctgtgaccagccaacaggtgacatatttgtatgcattttgacgggcctgggcttcaatggctttgaagaaaagggcaaggcaaagtgggatgcctgtgccaacatgaaggtgtggctctttgaaacaaacccccgcttcactggcaccattgcctcattcaacatcaacaccaacgcctgggtggcccgctaca

SEQ ID NO: 16030 - DNA, 402 bp, Homo sapiens
ccgcggtggcggccgaggtaccagcagtctcagttctccagttttttccaaataaatattggcccccgaggagtccgtgaaggacctgatgcacacggtcaggtgccgggcaggcgagaaggtgttgggccgcaggttaacgatgagagcacctgttgggtacaacacgcctccatgtttcagcatctacgtcatgggcttggttctggagtggattaaaaacaatggaggtgccgcggccatggagaagcttagctccatcaaatctcaaacaatttatgagattattgataattctcaaggattctacgtttgtccagtggagccccaaaatagaagcaagatgaatattccattccgcattggcaatgccaaaggagatgatgctttagaaaaaagatt

SEQ ID NO: 16031 - DNA, 454 bp, Homo sapiens
  misc_feature 18, 24, 26, 66, 69, 336: n = A,T,C or G
attggagctccccgcggnggcggncnaggtactctctttcagtaaggagatttccaagattctganaanttcctgcctcaggccttgctcctctgtgttgctttgggccacctggggctgcaccccctgccctttctctgccccatccctaccctagccttgctctcagccaccttgatagtcactgggctccctgtgacttctgaccctgacacccctcccttggactctgcctgggctggagtctagggctggggctacatttggcttctgtggaagcagctggcttcactgctcaggtgattatcctgaaccatccaggccaaataagcgccngctatgcccctgtattggattgccacacggctcacattgcatgcaagtttgctgagctgaaggaaaagattgatcgccgttctggtaaaaagctggaagatggccctaaattcttgaa

SEQ ID NO: 16032 - DNA, 191 bp, Homo sapiens
  misc_feature 3, 4, 70, 82, 111, 112, 130, 134, 143, 156, 161, 178: n = A,T,C or G
gcnnattggagctccccgcggtggcggccgaggtacccattcctgccgttgcttcctatcctgggcttgnaagaatcctggnagaaaggccaaagtgggtttgtggagtcnncactgcgggaccagcacnaaanctgcttgtntgctttggcgganctganctgtgtatgggatccangaggctggggtga

SEQ ID NO: 16033 - DNA, 462 bp, Homo sapiens
  misc_feature 20, 28, 34, 35, 40, 41, 50, 66, 67, 68, 69, 74, 101, 103,109, 111, 112, 114, 118, 119, 120, 126, 130, 137, 150, 154,157, 158, 162, 166: n = A,T,C or G
tccccgcggtggcggccgcnctggcagntactannccttnnaaatgcccnaggcagacacaccccnnnncaganccctatttggacctaagggtggccatntnaacagntnntnccannntcagtnaagntgaaacncgaaacttgaccncacncannggcnatcnctgccttgaggggtgcagaccgcagaattttcacagcaggggctcttggaactctggaaacccccttcttaaatttgggaggaggagtatgcctttggtgtccccctcccaaggggcaattctgaaccccatctttggcaggcatacatatttcactgtttccaaagctatctactctgccaaacaacacccagtcctattccaaactctcaacgattctatcttgttcctgtttttctatgtatttatggttgccgtttgtgtctgatttgattttactgttttttccctgattt

SEQ ID NO: 16034 - DNA, 347 bp, Homo sapiens
  misc_feature 31, 43, 48, 52, 54, 62, 64, 66, 67, 71, 72, 93, 99, 104,108, 150, 165, 168, 171, 229, 257, 276, 303, 309, 314, 326,337: n = A,T,C or G
gtcatagctgtttcctgtgtgtaaaacaacngccccacctcgngggcntacntntttcctgntncnnaaannatgcccagctcatccgtccantccctnttgancacnttgacgcaaatctcgccattggcgcccacgttcgggtggaanatcttggtcaggaantanccnttgggtggggaggcagggaagtccttccccaccaggagtttcatgcggaacagacctncagcatatggggtcccctcagggccctngatggtgacctggaggtcngtgaggtcctcctctttgggaaagacnttgatncctcnggtgggtctgcntcagtgtcatnacctccttgt

SEQ ID NO: 16035 - DNA, 148 bp, Homo sapiens
  misc_feature 114: n = A,T,C or G
agaactagtgggatccccccggcctgcaaggaaattcgatattcaaagcttaatccgaatacccgtccgaaccctcgaagggggggggggcccccggtaccccaagcttttttngtttccccttttaagtggagggggtttaaattgg

SEQ ID NO: 16036 - DNA, 358 bp, Homo sapiens
ccgcggtggcggcccgaggtacttgaacaaggaaagagacggctgtgccataaacaaggaatcacaggaaaactcagaagtgcccgcccttctttcttgctagtttcgtggtatgttctgctttgcttgtctgttttggtggacacacagtggtgccaattcgtatttcctaaaagagccacattggctgcttgtaaagagacctctcatttgaacagtgttggcaagatcgattgttctggttctagacagaaccccatggctcccaccacctggacaggcttaaggcatatgggggtatctaatgtgtttacagaagccaaggcaaaagaaaagcttgcgagctatgaatttgctt

SEQ ID NO: 16037 - DNA, 410 bp, Homo sapiens
acaactcccgagccttggattctgataactggacatttttcaagagtggtgcaggcatgtcatctttaccgatgaaactcatgacaagaacatgacttcttagcattattggttctggacatggtatctctgctgtgtttagcctgattaagttcctcatttctttttctgcccaagttttcaccattttcctagggtttcctttacaatagccatgacgaaatatatttatcccgatctttgaacaccaaaatagaagttttataaattttgattgctctgctctctccatttgctgtgctagcatggtatacattagcttcttttcctgtgctaatgcagccatttatctctgttatgattcctctagtcaacatcttgaataaaatcattcttgttctgggatccaa

SEQ ID NO: 16038 - DNA, 855 bp, Homo sapiens
  misc_feature 365, 448, 481, 504, 551, 594, 618, 630, 669, 686, 689, 699,708, 713, 749, 756, 760, 783, 784, 786, 787, 789, 791, 804,805, 806, 807, 811, 816, 817, 818, 820, 821, 824, 827, 830,831, 838, 839, 840, 842, 848, 852: n = A,T,C or G
gctccaccgcggtggcggccgggtgcagtggctcacgcctgtaatcccagcactttgggaggccgaggtgggcagatcacgaggtcaggagatcgagaccatcctggctaacacagtgaaaccccgtctctactaaaaatacaaaaaaattagcccggcatggtggcgggcgcctgtagtcccaactactcaggaggctgaggcaggagaatggtgtgaacccgggaggtggagcttgcagtgagccgagatcgcgccactgcactccagcctgggtgacagagcgagactccgtctcaaaaaaaaaaaaaaaaagctctacctcctgcttgactggcaacacaagatgtcttgtgcagcaagtntaaaggacaaaaacccaaacatataacacttcccagtggggctttcatcagtccccaaccggacagtgccccctagaccatanaccccacagagcattacactgaagcacaggatnccagatccgggttttcccaaacnttgttttttgtcgcccaactcacttgtttttggttttttaaaaaacnttgaaatcaaaacccgaattggggaattttttttttttttttngggagttggggggccaaatcttanattaaggggggnacaaatttgggccccaaaaaatttaccccaatttttggngcttattgccttccacnaantaaaaaaaanttttccttnaaaanattgggggggccttggccaacctttttggttttttntaaaaangggntccccccaaaggaaaaaaaaaanngnntntnaaaacattaaaannnnaaanccccnnngnnggnggngtnnttttttnnntnaaattncccnggg

SEQ ID NO: 16039 - DNA, 462 bp, Homo sapiens
gattggagctccccgcggtggcggccgaggtgcgttgcgcagaaggcggcggcggtggtggcttgtggtgcggcctcaccatacaggaacagggcagacgttagcgtgagtgatcactctcaatcccggggacccggtggccttagtctttcaggtggaacggtgtgcgacatgggaaagaaaaccaagcggacagctgacagttcttcttcagaggatgaggaggagtatgttgtggagaaggtgctagacaggcgcgtggttaagggacaagtggaatatctactgaagtggaaacctttgccagaaatacatataccttgtatattaaatctgagtctcagatttaatcatcgaagcgtagctgggttaagaaacagtctgatcgtaaggatgttgtcgattctgacccatggatgaccacaagaaaaagatatttatttctgcctggataattgagaa

SEQ ID NO: 16040 - DNA, 348 bp, Homo sapiens
  misc_feature 31, 33, 36, 41, 59, 60, 61, 65, 66, 69, 81, 83, 84, 193,196, 221, 239, 331: n = A,T,C or G
ggtacccatcttttgttccctttagacaggntnaanctgcncgcttggcgtaatcatgnnnatanntgnatcctggccaantnnaattatgtggaaggtgattataaagaagctctgaacatttacgcccgggtgggcctggacgatctgccactgacagctgtcccgccctacaggctgcgggtgatcgcanaancctacgctaccaaaggactttgttnggagaagctgcctatttnttcttctaccagtaatctccatgtggaccgggaacaggatgtcatcacctgttatgagaaagcaggggacatcgcactcctgtatctccaanagatagaaagggtaata

SEQ ID NO: 16041 - DNA, 626 bp, Homo sapiens
  misc_feature 11, 20, 21, 22, 25, 39, 44, 47, 49, 51, 59, 60, 522: n = A,T,C or G
gtttcctgtgnggaaaagannngcnccaccgcgggggcngccgnccngncnggtacacnnatgaataatagcacaaaataatgaaaaacaaacaaaaaacaaaacaaaaaaaccccaatctcccaaattaatgactatttacaaattccgaacctatttctactcagtaattatttagacagatgttttccttgttactatcactatttgatcataattcctgattctccgtttttgaggattatgactgtatcacgtaactatttcttttcaatagttttcatagttgtcatacacaaagaaaggctcattcctctaataaaccacaatctagttagctgtcaccctgcagccgaacagtttccagttcttgcctgtaatatacagagcagcctcaaatgtctgtatgcaaatattttttctcttacattattttcccagaatgtattccccaaagtgagacaactgattcttataatcatttttgtcattcttgcaaagtctagccaaattattctccangatcatttttatagtgccaggagtctatttctccgcaagatttctcacccatttatttaacatttatttttgaccactgcaagtggatttaattatttatttat

SEQ ID NO: 16042 - DNA, 385 bp, Homo sapiens
cgaattggagctccccgcggtggcggccgaggtacttcagcgttgggagccaggtgtcgtgccggacgtgccaggagcagcggctgcagggcgaggtggtagcctttgactaccaatccaaaatgctggctttaaaatgtccctcttccagtggaaagcccaaccatgcagacatcttgctcataaacttacagtatgtttcagaagtggaaataattaatgaccgaacagaaacccctcctcccctagcttcactcaatgttagtaagcattaaagactgtaaatggcaagaaaaaacatcgtagtcatggaagaagttgttattacacccccatatcaagtggaaaactgtaaaggcaaagaggggagtgcactgagccatgt

SEQ ID NO: 16043 - DNA, 492 bp, Homo sapiens
acccaagtcggggacttgaagttggacggaggaagacaatcaactggtgcagtgagtttgaaagagatcattggtctggaaggtgtggagctgggtgctgatgggaagactgtttcctatacccaatttctgttacccacaaatgcctttggagcccggagaaataccatagactccacctcctctttctcccagttccgtaacctgagccaccgcagcctctccataggccgggcaagcggcacccaggggagcctcgacacaggtagtgacctgggagactttatggactatgacccaaatctcttggatgacccccagtggccttgtggcaaacacaaacgcgttctgatcttcccttcctacatgacaacagtgattgactacgtgaagccctcggatctcaagaaggacatgaacgagaccttcaaggagaagtttcctcacattaagctgacactcagcaaaattaggagtctgaaacgagagatg

SEQ ID NO: 16044 - DNA, 543 bp, Homo sapiens
  misc_feature 425, 492, 497, 506: n = A,T,C or G
acttcattaacaagtcaacgccgtttctgtccagtgactgcacagcctgctcaatctcactgctcttgaagtttgtgagcactttcagcaccacgccctgggctcgctccttcacagcttgattcttggtgttgacgggagagttccgcaaggctgcatggaatgcccgaagcatgtcccctgtgcatcaccaccagttaaggatagctaggctcaagcacatccatgccgtcatgaacaagctcacttcagaaacagctcaggaacagagtcagatgggatctcatccataccacccaccttccacggcttccaggggggcagagacggtttacagcctgcacagggaggctgcagggcacctctgccaaccatgcaaaccctcctttcaactccctctctaccttccacgtcaaagcaactgncctggaggggtaacttgatgtaaaattggattgtgctcacttgcacctgcttggtgctgagcactgnatctnccctactgnatcctcacagcacccgtgtgagacaggagcccagggg

SEQ ID NO: 16045 - DNA, 292 bp, Homo sapiens
  misc_feature 46, 52, 141, 157, 170, 173, 238, 266: n = A,T,C or G
ccgcggtggcggccgaggtactgcgatatccacatatttttgaganaaattnccaagccaggcgaatgtggattggaataaagacataggcagtgtataccaccatagcaataatggttagtaagatggtgttaaacatanatcgctcccagggctntaaaacagcacancanctaatgatttggtattgatagtagagccaggagaaatattccttcacacgcctcaaatccatggntggctccttcaagctgcagtaagtttgncccaagaaagtccaggtctggttctt

SEQ ID NO: 16046 - DNA, 470 bp, Homo sapiens
attggagctccccgcggtggcggccggcagccggcagctttgcagcggtgtgttctaggtcagtggcttcaaagactccagttggattcattggactgggcaacatggggaatccaatggcaaaaaatctcatgaaacatggctatccacttattatttatgatgtgttccctgatgcctgcaaagagcttcaagatgcaggtgaacaggtagtatcttccccagcagatgttgctgaaaaagctgacagaattattacaatgctgcccaccagtatcaatgcaatagaagcttattccggagcaaatgggattctaaaaaaagtgaagaagggctcattattaatagattccagcactattgatcctgcagtttcaaaagaattggccaaagaagttgagaaaatgggagcagttttcatggatgcccctgtttctggtggtgtaggagctgcacgatctgggaacctc

SEQ ID NO: 16047 - DNA, 265 bp, Homo sapiens
acataaaggatgcttaagggaacatgcggacatggattactgtggactcactgctggctgcacaccccctggccagccatgcggcctccgtgggttctgaacatgttgatggtgccaacctcctgggccgaagtggaaatggaatgagttctagggcatctgtctcttagatcatgttaatgtttgctgtgttttttctgtattgctctgttagagtaataagaaacgtgatggtgtttctggcctcaggtgcggattgatgagt

SEQ ID NO: 16048 - DNA, 556 bp, Homo sapiens
  misc_feature 367, 395, 397, 420, 458, 465, 487, 509, 513, 523: n = A,T,C or G
cgcccgggcaggtacaaaccagccaacccaccacccaggccaccatccacctgccctgatcacccagggcagggtatcggacaactcaggacagcccctgtgccccagagcctgctgaaatggcgcaaccagccactctttaccctaccttatcccacagaaaacacaaggaagccgcttgctcgtggtctacctcctgggcaccattggtgcgtccccatgtggcccctgtggcatgccccctcctctggggaagctgtgagtataacaagtcatcttcctttctttcttttttcttttctttcctttttttttttttgagatgtagtcttactctagcctgggcgacagtgagactccacctcanaaaaaaaaaaaaaaaaaaaaaaaaaaananaaaaaagtcacgctgggcccctntttacagggggacacacaggcttagtttagtatatgtntaaccanattttgcatgtcaagcatttgnccttttcctggcttatgttttnttgnagaaattatntaaaccctatcaaatccactactagggaaattt

SEQ ID NO: 16049 - DNA, 551 bp, Homo sapiens
  misc_feature 380, 440, 450, 482, 488, 507, 530, 539, 545: n = A,T,C or G
ctacgtcagcactttaatgggagtccctgggaggaccatgggagtgatgttcacgcctctgacagtgaaatacgcgtactgtgtgcagcagctcaaggaatttgatgggaagagcctggtctcagttaccaaggagggtctggagctgcctgaggatgaggaggagaagaagaagatggaagagagcaaggcaaagtttgagaacctctgcaagctcatgaaagaaatcttagataagaaggttgagaaggtgacaatctccaatagacttgtgtcttcaccttgctgcattgtgaccagcacctacggctggacagccaatatggagccggatcatgaaaagcccaggcactttcggggacaacttcaccatgggcttntatgatgggcccaaaagcaccttggagatcaacccttgaccacccccattgtgggagacncttccggcanaaaggcttgaggcccgacaagaaatgataaanggcagntttaaggaccctggtgggngctgctttgtttttgaaaacccnccctgcctntttttntgggct

SEQ ID NO: 16050 - DNA, 348 bp, Homo sapiens
  misc_feature 89, 140: n = A,T,C or G
caggcattcggaagttgcctgccagtgtagccaggtaaggccgtatgcctgggaacttcttgctcacttctgtggcctctgtgcccccnaagttgcggaaggcacccaggcccatgataccatgggggtggtatccaaanatatagttcctggtggtcagcaggttgtgtgtcttcaccagctggatgggaaagtagtctcgaaagtagcgccacacagcccagtttcggacccactgtgacctcctgccacctttcttgggtgtgttccagtcaaacaccagccaagtgaagtagagcacagcgatgagccagcaatcagtgcagaatatgtacctgcccgggcggc

SEQ ID NO: 16051 - DNA, 706 bp, Homo sapiens
  misc_feature 300, 495, 553, 583, 621, 665, 690: n = A,T,C or G
tggagctccccgcggtggcggccgaggtagctgtgctacgtcgccctggacttcgagcaggagatggccaccgccgcatcctcctcttctctggagaagagctacgagctgcccgatggccaggtcatcaccattggcaatgagcggttccggtgtccggaggcgctgttccagccttccttcctgggtatggaatcttgcggcatccacgagaccaccttcaactccatcatgaagtgtgacgtggacatccgcaaagacctgtacggctgaggtcagtccccatccagagtctctcanagctggagagggcccggctgcaggaagtggctttttatcagttgcaacaggactgtgacctgagctgtcagatcaccattcccaaagatggacaaaagagaaagaaatctttaagaaagaaactggattcactaggaaaggagaaaaacaaagacaaagaattcatcccaccaggccatttggaatgcccttatnccaagtcattgcgaatgacaagggcctataaactcaagcaggacttgcagaagggacnaacagaaagatcatctgactttgtggcttnccttcttccattttggaaattaaaagaccaaaaccaangaacttttcaaccagtaacttatttttttaacttaaccttcaanaaacccccgaatggagttcaacgtnccccaaacacccccgg

SEQ ID NO: 16052 - DNA, 412 bp, Homo sapiens
acctgctactttttaaacaatttcaactgcagctctctttcactaagtaagatgggtaaagcatgccatttctgttttcttgagatttttactttttagaaacacacatgcttccactgccatctgacacttctccacacgctttcatcttgtaaacctgaattctatttcgagtactattctaacattgcgctttataagggatgatatttctaccacctcactcatatttttagctgaaatgattttcctggtatgtctgttattttgtggaaaaagaaatattgtgtaaaatgggtgctgccaaaattccaggccattttgcagggactctgaagtgacctttagtagtaatagtcttatgtgcagtaactataatggtaaagaatgttaaataataaaatttaacatt

SEQ ID NO: 16053 - DNA, 476 bp, Homo sapiens
  misc_feature 247, 333, 340, 400, 429: n = A,T,C or G
acttgaaacacctcctttgcatttctccatttgtgccattcactagtggaaataaattgtattataccatgatctactggctttttaaaactgtattaaatatgcacatttttggtatagctattatcatttgtatgtatatattgtatatacatatgagtgtctgtatgtgtgtatagatggattaaccagccccagttccgggctgtcttgggggaagtgaaactgtgtgagaaagatggcccantttgatgctaaaaagtttgcagagacccaacctaaaaagggacacaccaccgggaaaggagaagggtttcactggggaaggggaancagaaanccccagggcttgaagccggaaagggagggaggaaaaaagggcggggtggccccctgcttncttgaaggaggaaaatggatggaatgtgnagccagggcgcttggcctgcttgagcccccaaaggcccaaagggacc

SEQ ID NO: 16054 - DNA, 474 bp, Homo sapiens
  misc_feature 305, 432: n = A,T,C or G
acctgccagccgtctcactgggccggatgatcttcaccacctgcccacgctttatcccaaagtagcgcgccacagggtcccccgcctggatcctgggcagctggttctctcggagcttatatcgggccagcagctctgtcacctcctccttggtcatgacgacgtgctcagggactagctcgtgctccgtgatgttgatgagcagctcctgctgtagaaactgctccaggatgtacatttacaaagatgcgttcaaatagtgctctaagagttttgttcagtggctcactttggctaaaatgcanaaatgcatgctgtcagcgttggtatttcacattcaatggagcttgaatgttcaggacctcttcccatttgaagctataatttatttggaccaaggaagccctgaaatgaattcaacaattaatattnatcgcacttcttctgtggaaggactttgtgaaagaatttggt

SEQ ID NO: 16055 - DNA, 318 bp, Homo sapiens
  misc_feature 114, 120, 176, 186, 213, 221, 234, 236, 247, 254, 259, 262,308, 314: n = A,T,C or G
acttgcttgtaagcatgaggagggggttttgatgtgggttgggtttttatgtacccgggaatgcccgttaactaaaagctttgcagcaaataagtaagaggctgctcctgttanagcggnttgactagctggtccactccgggcctcagtctggggggctggcgggcaggttgcancctctccgtnatcagccagccttggattccattgganctcttatnctggccctcattntngaagctaacanaaacttnctgtngtnactcttggcgtatgctacctgggaggaaacgcactatttgtgtttngaattngccc

SEQ ID NO: 16056 - DNA, 337 bp, Homo sapiens
actgaagattttttatttcattggtagttcttttccttttgaaaggtgactttggcatatcagccacagggatcatttgttctcctggacgaacccacatgatgggaccatcatcactatcttttcgactctgtaattttagactagatagcgtcccccatggcagtgtaccacgcacaggagccgtcacttctcttgatgcaggcgaagaacttggcctggtgcccgttgatgttcttctctgtgacccagtccatccagaggcactcgtccggggaggagatgtagcacgggatcatggggcagcgcgtgatcttgcactcgcagcccatctggt

SEQ ID NO: 16057 - DNA, 450 bp, Homo sapiens
  misc_feature 366: n = A,T,C or G
ccccgcggtggcggccgaggtactgacatggctgatacggttctcgtgctctggcttgaccagcactgccaccttgatattccacagtgattgcatggcaatctgggtagagagtgcatggtcaccactgccctgctgcacccactgcctgcatttccccctgcactataaatagacttttgtgtccatcacagggtaggaaggcttgccacccctcttcctgacggactggagagaaatggttcctctcgtggcatgaaggactcaggtcagatctcccaaaggatatgctcagggaccagagaaaaagccagtgaagctgtgctcccagggttgcccatgaagtcaagtaaggctagtttggangtggtgtgtgaggacagggtcctggacaagatgaccccccctcaccgggcggtaatccagatccgtaagctccttgaggccccc

SEQ ID NO: 16058 - DNA, 497 bp, Homo sapiens
  misc_feature 408, 472: n = A,T,C or G
acccagtatgtgcagggagacggaaccccatgtgacagcccactccaccagggttcccaaagaacctggcccagtcataatcattcatcctgacagtggcaataatcacgataaccagtacacttactgcaactgcatgttgtctaaaatagtttttctataggatgtatataaaaactaatccctcttgagctgatttataatgtgtgtatatagccacacataaaaagctagtaatagtagggctctcagaaaatactttccagttgtctaaccttgaatgttattaactcttctatattacaggagatacaactcgtcaaacgaatcaaatttcagtgatgacagagtatgcaagagtcaccttctcaactgttggccctcatggatgtcctttctggaactagnaatggatcttggagaatgtctgaaagtccatgacctggcttttaaagcgggtttattgaaattngcttccaaagaacaagatttttttt

SEQ ID NO: 16059 - DNA, 553 bp, Homo sapiens
acttgtatccacctctatgatctcaaaccttcccatggaaaatgtctcagcttatccccaagcagctgtttccccaccacagatggatgcctgtacagttctccttagcaagtgataagttgtgtatgggttctaaaggagggaaaatcacagaaaaatgttgtcctgttttgaaagtgttttaattagacaaaagcatcaggacaaaccattttaaaaacaacgtcttcaacttgggtgttgagattggcaaaaggggaagcaagggaaaagccaaggaaagataaaatattcagaagaaagtcaaagttatctgcaattacatgttagaacagattttgcaggttaaaaagatgttgcttaaatatattcataagcctgttgtaagattttcacttatgcagtttcagaaaatttagctgcttaacatatgacagaactgtattttaacaaatgacattaaaagtcaggggagctactcagttaattgataaagtagaggcaacgtgggggagccctccccacgtttattgaagatttgtggctcccccag

SEQ ID NO: 16060 - DNA, 464 bp, Homo sapiens
acacagtttccttaggggttgttctaagtattgccatacacataggtaacttatcacagcttactggtgtcaatgttttaccacttccagtgaggtgtagagaccttacctccatttagatctctgtatcccctccagttttaaaatacaattatcttaagtatttcttccacatgcactgaccagcaccatcagatgtcattataacttctgcatcaccatttctttcatatgatgaaagaagctcatgagataaagaatagtctagtatgtttacttctatttttactcatcctgttctccctgctctgaaaatctcagctttgggcttttaccattttctttctggtggagaagttcctttagctattctttaagggtagatctactagaaacaagttctcttagttttcctgcagccatgctggagacctgcatgccttaaagtcatcagtggctgagcc

SEQ ID NO: 16061 - DNA, 403 bp, Homo sapiens
gcatccagtcgtcccagaaggcctttggccacttgggctccagctcagcccagagctcggccaacagcagccagcccaggccagggaaaaagtcggtgcggtagagcagctcaggcctgctggcgtccaccatctgctccttgccgttgtcattccaggccgagacgcaccacagggaggggtcggccttcagcagcggataggtggcccgaaagtacgcagacccagtagctgacctgctggacaaatggggggccttccgggcccggctgtttcgagagtcctgcgtcttccaccgggggaactacgtgaaggacctgagccggttgggtcgagacctgcggcgggtgctcatcctggacaattcacctgcctcctatgtcttccatccagacaatgctgt

SEQ ID NO: 16062 - DNA, 436 bp, Homo sapiens
  misc_feature 205, 361, 366, 415: n = A,T,C or G
tggagctccccgcggtggcggccgaggttctaaacagatggatttactgcaggaattctatgaaacaacactggaagctttgaaagatgctaagaatgatagactgtggtttaagacaaacacaaagcttggaaaattatatttagaacgagaggaatatggaaagcttcaaaaaattttacgccagttacatcagtcgtgccanactgatgatggagaagatgatctgaaaaaaggtacaacaggcagcaagccatgtatttaccatggcgagggtcacatttcaccatctggttggctggctcaaagcaagcattggtgatctctgctacagaaagctgttcatggtaggctttctcancaganatgacaggggcatatgtggccaaagggaagtggatgcgggggtagggcnccaggttggtctggaattctg

SEQ ID NO: 16063 - DNA, 322 bp, Homo sapiens
ccgcggtggcggcccgcccgggcaggtactcctgtcatggagtgcccaccatcgaatggacatattcatccaattggggaacgcagaagatcgtggagtggaaaccagggactcaggccaacatctctcaaagccacaaggacagagtctgcacctttgacaacggctccatccagctcttcagcgtgggagtgaggggttccggctactatgtcatcaccgtgacggagcgcctggggagcagccagtttggcaccatcgtgctgcacgtctctgagatcctctatgaagacctgcactttgtcgctgtcatccttgcttt

SEQ ID NO: 16064 - DNA, 941 bp, Homo sapiens
  misc_feature 4, 39, 74, 126, 154, 155, 228, 234, 289, 297, 384, 387, 537,550, 614, 639, 651, 665, 674, 705, 756, 917, 922: n = A,T,C or G
gtcngggttggggccggggccccggcccccgggggccanggggttaccaaggttggggggttctttcttaaaangggtggggggaacccttggccccccccgggggggccccttgccccatttgcnacccgtttgttggttggaaaaaaccaannccggttggaaaaaaaagggtggttccccggggttaaaaggggtggaacccccttgggggttttaccccccaanggcccnaaggggcttcggggttggtttttgggttttccaaagaaaaaaggcccaagaaaanaaagttanttgttaaattttggaattttttaaaaaaaagtttttcttggttttaaaaaaaataatttttgggcttatttgttttttaaagaaacntanttgaaaagggggaaaattggaaacctttttgccttttcttcttggggaataaaagaaaaaaagttccacccattaaccatttttggtttcccaagccttcccaaaaggttttttggttttccgggccccccttcggccccacccaaaagnttgggggatttgnttaagcccggtttttggggcccccttttttgttggttggccccttttgggccttgggggtgggnacctttctttgggggtttttttttngggggggaaagncctttccggggaanttattttgntttcccccccaaaaaaaaaaaagccccaaangggccctttttaaattggggggcccaaaccttttttctttgggtttaaggncctttccccccctttttgggcctttaacccccccttttttcccccttttttttgggttgggtttccctttaaagaaaatttaaaaaagtttgggaacccttgggaacccaatttgggccctttttttttttccttttttttgggggtttcccttcccaaanggggnaaaaaaaaaggtttggggg

SEQ ID NO: 16065 - DNA, 843 bp, Homo sapiens
  misc_feature 74, 117, 134, 136, 139, 141, 142, 143, 147, 150, 156, 161,163, 167, 169, 173, 174, 181, 192, 198, 225, 227, 228, 238,239, 246, 248, 261, 290, 294, 295, 302, 307, 309, 321, 322,331, 334, 349, 351, 357, 363, 381, 388, 390, 396, 422: n = A,T,C or G
  misc_feature 423, 425, 426, 427, 429, 430, 435, 439, 446, 458, 459, 471,472, 479, 492, 494, 499, 500, 502, 518, 521, 523, 533, 538,539, 541, 559, 569, 570, 574, 593, 599, 603, 608, 613, 617,650, 655, 657, 662, 672, 674, 676, 680, 684, 690, 693: n = A,T,C or G
  misc_feature 695, 700, 704, 714, 722, 724, 725, 726, 730, 731, 737, 738,740, 741, 742, 748, 749, 751, 753, 764, 765, 766, 768, 770,771, 773, 776, 778, 780, 781, 788, 793, 799, 801, 807, 808,809, 810, 811, 814, 815, 816, 818, 821, 824, 828, 831: n = A,T,C or G
  misc_feature 841: n = A,T,C or G
acaagcttttttttttttttttttttttttttttttcttttttttttttttttttttttttttttttttttttntttttttttttttttttttttttttttttttttttttttattnttttttttttttttttntnttnannntaanaantacttnttttntnattntntaannggggggnaaaaaaaaaanaaaaanaaaaaaaaaaacgcaagctaaaaaacnannaaaaaggggnnaagaaantnataaaaaaaaaangggttataaacggtgaaagaaaaaaaacnaatnnggggggnggaantnaagtatatcccnnaaaaaacanaanggaaaaaaaattagnancttggngccttnaaaaaaaaagttcgctanattggangncccccnacggggggaaaaaaaaaaaaaaaaanntnnncnnacttnggcnaaagggnaaaaaatctttnngggggggggggnnaaaaaancaaaaaaataaananggggnngnaaaaaaaaaaaaaacnatngnttaaaaaatntaaannanaaaaaaaaaaaaaatttnttttttgtgnngggnggaaaaaaaaaaaaaaaanaaaacntttnatatntgtgngtgnggggaaaaaaaaaaaaaaaaaaaaaaaaaaaancgtgngnggggnggaaaaaaananancacncacncacccnccntntgtangganaaaaaaaaanaaaaaaanannntacnncacacnnannnaggggnnananaaaaaaaaaannncncnntnttnananngaaaaanaaacncccccncnacaggnnnnnaannngngancanatanaantaaaaaaaanaa

SEQ ID NO: 16066 - DNA, 441 bp, Homo sapiens
ctccccgcggtggcggccgaggtacagatggaactctgcaaacctccacagacttctccaaattctggaaaactctctcccagtagcaatggctgtatgaatacacttcatatcagcagcacaaacactgtcggggaagtgatcgaggccctgctcaaaaagtttctcgtgactgagagccctgccaagtttgcactttataagcgttgtcacagggaagaccaagtctacgcctgcaagctctcagaccgggaacatccactctacctgcgtttggtagcagggcccagaacagacacacttagttttgttcttcgtgaacatgaaattggagagtgggaagccttcagccttccagaactacagaatttcttgcgcatcttggacaaggaagaagatgaacagctgcagaacctgaagaggcgctacacagcctacagg

SEQ ID NO: 16067 - DNA, 394 bp, Homo sapiens
  misc_feature 316: n = A,T,C or G
ccgggcaggtactgagcccctaccctctggctgcctctttgagtctgatttttgaggccccttctctccaccctatgtgtgcatctgtaatttaaaattgcctttttatctttttctctgctgttcatctgtcttaagtcagtttcattctgaggccagccacagaacctagaagggtagaggcaactttcttcttttcctgccactgcggcagcatatccccacgggcagacacagacgtggaaatgcaggaagatggagcagcagcaggaaagggactggacagccctgggcacccacctgccactcggctaanctctgctcctccctggcctgcagattccctgtcctggtgatctgctcccgaaggtacaagggcggcaagggggctggt

SEQ ID NO: 16068 - DNA, 292 bp, Homo sapiens
  misc_feature 289: n = A,T,C or G
actaagcccagccaaggaactacaccttctcgctgaaggaggcgcctccggcttcccattggcagagctgaacggcggcgtgagtgctccggtgctttggggccatgattaggtaaataagagtggcttgaacatggcactgtgatatggtgatgggggatgtgggaaccacaccggctgctaagtgatcaacaggtggtggcatgaatagcctggacacgctggacaaaggttatgtcttatgaagtcaaatggtcaatttcctgatgctcatgtgcctttgggcttnccc

SEQ ID NO: 16069 - DNA, 294 bp, Homo sapiens
  misc_feature 263, 290: n = A,T,C or G
accctggcattgccgacaggatgcagaaggagatcactgccctggcacccagcacaatgaagatcaagatcattgctcctcctgagcgcaagtacgaccatcttccagctgttttccggcaaagatcaacctctgctgatcaggaggaatgccttccttatcttggatctttgccttgacattctcgatggtgtcactgggctccacctcgagggtgatggtcttaccagtcagggtcttcacgaagatctgcatcccacctntgagacggagcaccaggtgcagggtanactc

SEQ ID NO: 16070 - DNA, 450 bp, Homo sapiens
  misc_feature 22: n = A,T,C or G
gcgaattggagctccccgcggnggcggccgaggtactaagtttcagggttctcttcagcaatcattaattaatacttcagccattaattcagatgcaaataattttcttttttcttttttttgagatggagtttcactcttgttgcccaggctggagtgcaatggcgtgatctcagctcaccgcaacctccgcctcccaggttcaagcgattctcctgcctcagcccccctagtagctgggattacaggcatgcgccaccacactcagctaattttgtatttttagtagagacggggtttctccgtgttggtcaggctggtctcgaactcctgacctcaggtgatccgcctgcctcggcctcccaaagtgctgggattacaggcatgagccaccacacccagccagatgcaaataattttcttagaaaattatttcaaaagttattttag

SEQ ID NO: 16071 - DNA, 643 bp, Homo sapiens
  misc_feature 71, 85, 86, 88, 92, 95, 121, 126, 131, 134, 144, 149, 158,161, 162, 176, 178, 182, 191, 200, 208, 210, 218, 222, 224,237, 244, 250, 251, 254, 257, 263, 267, 280, 284, 287, 291,294, 296, 302, 304, 307, 321, 325, 333, 349, 354, 361: n = A,T,C or G
  misc_feature 371, 380, 388, 392, 401, 402, 413, 423, 430, 447, 475, 481,483, 484, 486, 504, 507, 509, 533, 540, 542, 543, 545, 551,563, 567, 573, 580, 581, 588, 593, 596, 597, 599, 617, 623,624, 632, 633: n = A,T,C or G
ccgaggtaccattaaatctccaatacttaggacactctctggcttaatgtttgttgaacaaaaaaaaaacnttactttatcgttnngnggtnccntttctccacctgtaaataataaaagngcctnccccncanagctaaaaanattanactttttancanncaaaaaatgcttancncggngcaggcccncaggaggcnctcctatnantattagtngctntnctgcttacaattntttgaanttcgannatnatncttttntttncccacccaaaaangtanaancaanttntnctttcncnagnggtaaactgagaanccantaaaatgnggccatgggaatttcnctaantaaactnatgaacagtnttttttaantccaaaanctcnactactganngctgaattaancggattgaancagaagnaaatcttttcccttttntcaaagctgccctgcctttgcctttggngggacncnncncctaattttttttaagcnganantcaaaaagacaaatttttttcccnatgggcntnncnattctnggccaaaaaccntccngcctcnagggggnnccttgcntcccnggnntnaaagggatttggaaaatnccccgnngggaaaannaacccccccc

SEQ ID NO: 16072 - DNA, 384 bp, Homo sapiens
acgagctcttgtcattgacatggcaagctgatggcgtgcggtggctgcggggtatcagggccgggagccctttgggaggaagggaggcgttagaggagctgccttcggaggctcagggagtccctttggagctggttgtttccttggccctgcagcgcactgctcggggctcccaaggaggttgtgtgtatggttcttaattcatcaggacaaagacccccagcatgtgtgtacttatttcaacaattcttagagatgctagctagtgttgaagctaaaaatagctttatttatgctgaattgtgatttttttatgccaaattttttttagttctaatcattgatgatagcttggaaataaataattatgccatggcatttgac

SEQ ID NO: 16073 - DNA, 500 bp, Homo sapiens
  misc_feature 104, 250, 251, 273, 281, 285, 372, 497: n = A,T,C or G
actccaccgcggtggcggccgagtactttttttttttttttttttttttttgcagagtcatactctgtcacccaggctggagtgcagtggtgcaatctcagctnactgcaacctctgcctcctgggttcaagcaattctcgtgcctcagccttccgaggtagctgggattacaggcatgtggcaccatgcccggctactttttgtaatttcagtagagactggttttcaccatgttggccaggctggtcnnaaactcccggcctcaagccatntgcctgtntcancctcccaaagtgctgggattacaggcgtgagccactgcaccgttttttactgtcatttgagttggcaaatattcatccactgaaggngggggttggttttaataagtaaacaggtaaataagtaaataagctgggcaatacatatgagagtgtagaaaagcataaatactactcatattttacttgtggctgcaccatgattgcagaccctntgt

SEQ ID NO: 16074 - DNA, 220 bp, Homo sapiens
  misc_feature 91, 135, 192: n = A,T,C or G
atcaaggattgttcctaaaaagaactgtggtaatccttgttgaatagcaagtttggacagtatacggtagggaaatctcaagaatactatnaacaaataaaatgatggggtgagccctatgaagcgtgtgttctnctgtgggcagtggcagagttacccttcacccctgagtcctgatttctcagcctcttnatgtgactgtctccttggctcctgggaa

SEQ ID NO: 16075 - DNA, 418 bp, Homo sapiens
ggccatctatctggagtcaaaggacaaccagaaactgagctgcgtgatcagttctgtaggagccaatgagatctgggtgaggaagacaagtgacagcaccaagatgaggatctacctgggccagcttcagcgcgggctcttcgtgatccgccggcgctcagctgcttgactttctacagtgctcttctcttgaccctttttctggagtgggttttatttttgttttgtttcgttttctccttaatagaaaaatgttaacttactgggaatagctactcagccttggaaatggagagcactgcagtgaattctttagggcacttttgtggccggatgcttccaactttgtcagtcttttctgcctcaacttcttccagacatcagtcaccatgagactgttttactttcaggcgtattg

SEQ ID NO: 16076 - DNA, 375 bp, Homo sapiens
actttcctttttaaaagaagttcaacttttgctattcttatgccccataacttttaatttgcacaagatcagccatgcccactcactgaattctattatattacccacacctctggaaattcacaaagtctgaattcagatctatgcataaggacgacgtgtccgtcagcacctcaggggccaggaactccggggtcccacagaatgtgctggtccggtccccatagcccatcccctccttgcagaggccaaagtctgcgatcttgacgtaacccttcggtgtccaggagcaaattgtccaacttcaggtccctgtagacgatcttgtgttcgtgaagaaactgtaggcccagcaccacgcaggcggaataaaag

SEQ ID NO: 16077 - DNA, 561 bp, Homo sapiens
acatgtgagtgtggggctggggtgccctgagagagaaaaaggggacccatctgtcagggcagctggggtgccccacccccaccctgggactagggagcagagtagaaaccctctctggagggtcccagggctaactgggagccagccctcccttcgaggtagaccatcggggagggaaccgagaagtagctcccatggtggcagtggcttcctcagtggtacttctgctgttccaagttctccaactgtttcagaactttgcactgaatcatagccagggcatattcttggcgagtttctctttcagttgatttttctaaaaagttacgaaatgctgcaagaatgattcttgttactttctctttgacagactcctgaaggatatcagacagaactggaatgatattatagcgccgcaggtgttcacacatttgaggactgaatgccaggagccatattgaaaaaatcatttgatactggagctgaaagccacacttgttactcaacactcccattatgcaatttaccccatctgcttccacccaagcaaagcggtacctc

SEQ ID NO: 16078 - DNA, 468 bp, Homo sapiens
accctggtaagcagttggtggccgcccctgctggtcccttccccaacttcccaacctctccccaacctgggccgagggggagcagggtcgtagctgtggggcgaggggaggccaggccctaaagatgaacaggtgagaagcctccaaacaagatgggatgagggcatggggcacgtggtgccgaggtctctccagcctgagtgtaccgtgaacaggaagctattcgcctttgcctaaaacacttcagacaacacaactatacagaagcttttgagtcactgcaaaagaaaaccaagattgcactggaacatcccatgttaacagatattcatgacaagctggtgttgaagggtgattttgatgcttgcgaagagttgattgaaaaggctgtaaatgatggcttgttcaatcagtatattagtcaacaggaatataagccacgatggagtcaaattatttcccaaaagt

SEQ ID NO: 16079 - DNA, 594 bp, Homo sapiens
  misc_feature 510, 555: n = A,T,C or G
acaatactgttgcgtgctccccgctctggccggtctttgttctttggaggcaagggagcacccctgcaaaggggggatccccgactttgggatatccccctcgccacccgcagacccaccttccaagagctacagcgtgtgctccataagctgaccactttgcatgtctatgaagaagaccctcgggaagcagtcagactgcactcacctcagacacactggaaaacagtaagagaggagagaaagaagcctactgaggaagaaataagaaagatctgcagggatgaaaaggaagcgctggggcagaatgaggaatctcccaaacagggtttgattactatctggcaactgtcagatctgagtttctgtcctaaaaatgcactggcaaattccctactctcataactgacccatttccttatttaaacacacacccacagtgtctatcttagcaattactgagacatgtttagtgacctttccaaatctattatctcttttggtatggangtttccccagagctaaaaaaaatctttgtgtggaagcaaatgccntggatgttgtttgcatggatctcacataagtttatcttt

SEQ ID NO: 16080 - DNA, 340 bp, Homo sapiens
acacagactggtatgtttccttcttgcgggtggtcatggcgttgcgcaggtgtatggcgagctggcggatgtagaggaaggcgtgctggtaggccacacccggctccagggccagcagctccgtcaaggtccactgcatgaaactgatgaaagggagggcaccaggcgaggtgaacttgcagttccccacatacgtgatgtacaagaaatagctctactacgggtaactgatttaacaatttcccaaacaccctttccactacccaagcccgtggccctcagagagaaccgggatggattgccatctgggttcagaggcaatatgaggaggttgggggga

SEQ ID NO: 16081 - DNA, 183 bp, Homo sapiens
  misc_feature 177: n = A,T,C or G
acccagcacggcgccggcacgcctcccacgccagcttccccatgacaagcccctgccttctccctaggaatttgaagtggttgctttggacgggaatgcggccccttgcccatgactagtttcggataataaagtcactttctttcaaaaaaaaaaaaaaaaaaaaaaaaaaaaaangcttgt

SEQ ID NO: 16082 - DNA, 413 bp, Homo sapiens
  misc_feature 9, 199: n = A,T,C or G
caccgcggnggcggccgaggtacctgaggagtcgcactctatcccagagttggagcacttgctgcccatgaacttccagagtaggccagcggccagcgcagctcccacgaggaaggtccccagggtcaaggtgatgcacagtgctttcttagtctttgaggtgcacactgtcccggatggggatttgggctgcgtgcanacgacggggttggaagcctgcgtcaggaccctcggggcgtactggctcactcagagaagacgtccttcaactatgccatgaaggaggctgctgcagcggctttgaagaaaaaaggatgggaggtggtggagtcggacctctatgccatgaacttcaatcccatcatttccagaaaggacatcacaggtaaactgaaggaccctgcgaactttca

SEQ ID NO: 16083 - DNA, 266 bp, Homo sapiens
  misc_feature 75, 118, 119, 123, 124, 126, 129, 130, 138, 140, 145, 148,152, 153, 158, 160, 163, 165, 166, 170, 175, 183, 185, 190,198, 200, 201, 204, 210, 211, 216, 223: n = A,T,C or G
acaagtttttttttttttttttttttttttttttttttttttttttttttttttttttttttttttttttttttnttttttttttttttttttttttttttttatttttttttttttnnaaannanatnntttttttntnttttntanggtnnaaaananccntnnaaanggctncactttancnggacnggggattngnncanacccannggatnccatagnttgatggttttatctcgagatccaaagacaatctgccggttgt

SEQ ID NO: 16084 - DNA, 443 bp, Homo sapiens
  misc_feature 5, 12, 17, 26, 345: n = A,T,C or G
gaatnggagctncccgnggtggcggncgaggtgctgctttcacggctgctttctccgtcctcccctgttactaccttgggctgtttcagcgggcgctcgcgttggtcttcgacccactttgcgtttgttcacgtgtgctcccgacacctagtgatgatgcgggtgtgctggttggtgagacaggacagccggcaccagcgaatcagacttccacatttggaagcagttgtgattgggcgtggcccagagaccaagatcactgataagaaatgttctcgacagcaagagtttgaggaagaggcaaagaaccctgcctggaaacacacaggaagagaaagagatcangcaacagtgattctatagaaagggatgctgctcaggaagctgaggctgggacagggctggaacctgggagcaactctggccaatgctctgtgccccta

SEQ ID NO: 16085 - DNA, 453 bp, Homo sapiens
cgcccgggcaggtacattttaaaaacatagaagattggaaaattggaaaaatccccatcaaaaatagtaaataacttaaaaatagcaacattttgggtatgttaccttccaatattgttttctgtgtaatttttttggtctcattttgccggagttgtaatgtatatgtagttttgtatcatgatccttttttatttttttgagacaaggtctcgctctattgcccaggctggagtacttctgaatcatacagatgctccggggatggagatggactctgaggaagtctgaccagaccctgatgctggcctctgtagggataagtggttttggagttgtagcggtggggagtggtgaggaacctttgccattgggaatggatttgaccctccagacaccatcactactcagcactccctctgcactcagaaagtcttggagataagggttctt

SEQ ID NO: 16086 - DNA, 415 bp, Homo sapiens
  misc_feature 335: n = A,T,C or G
cacctcgctgctccagcctctggggcgcattccaaccttccagcctgcgacctgcggagaaaaaaaattacttattttcttgccccatacataccttgaggcgagcaaaaaaattaaattttaaccatgagggaaatcgtgcacatccaggctggtcagtgtggcaaccagatcggtgccaagttctgggaggtgatcagtgatgaacatggcatcgaccccaccggcacctaccacggggacagcgacctgcagctggaccgcatctctgtgtactgggctgccctcccacgtgtgggtaaaccctgcagctgctacatgtcttcacagcccangaattcaaggcccaggtggcagcaggaagaaacagtggaaaagcaaggggaagagaaaagagaaaaaggagggggaaagt

SEQ ID NO: 16087 - DNA, 308 bp, Homo sapiens
  misc_feature 199, 253, 292: n = A,T,C or G
acaaggcgtgcaaggcccgcaactctgggcacctgaacgggccacgagggacgctcctggagcaaacattctggcctcagcccatggctcctgcgctccagagctgtgggagagagtattattttccagccccaggtgtgtggtcagtgtcacagcggccacgggacatacagaggcaccttcctcagctctgatccanaggaaaatgtcatttcctcaggaaaacaccacctggtttctaggaccacaaagntccctctgtcaggggctctcggagccaccccatgtcctnttctttacagaaatta

SEQ ID NO: 16088 - DNA, 538 bp, Homo sapiens
acttaagcagtaagcgtatttaggtaaaagcagttgaattatgttaaatgttgccctttgccacgttaaattgaacactgttttggatgcatgttgaaagacatgtttttatttttttgtaaaacaatataggagctgtgtctactattaaaagtgaaacattttggcatgtttgttaattctagtttcatttaataacctgtaaggcacgtaagtttaagctacataaactgtgggggcctgggcagccacactgcacgcaggctgggccgactgaggggctcagaggccaggctctgaggcccacgcagggcctagggtgggaagatggcaggtgggggcggcgacctgagcaccaggaggctgaatgaatgtatttcaccagtagcaaatgagatgaaccatcttcctgcacacagccacgatttgcaaaggatgttcacggaagaccagggtgtagatgacaggctgctctatgacattgtattcaagcacttcaaaagaaataaggtggagatttcaaatgcaataaaaaaaa

SEQ ID NO: 16089 - DNA, 412 bp, Homo sapiens
  misc_feature 404: n = A,T,C or G
acctgcatcacctcctttagacttatgttataggcatacctgtggggagactggggtgacaccagggccttcactggcctttcagcaggcttagaactatgactttgatagacattggagaggaatctggatggaacaatatggaaggggagggtttaggaaggagaaagtctatgctgaggctagaacttaataatgctctccttgctccaaatactactggtctttccatttgggatgtcgaaggaataggttcctatttggagacaaaacacttacgagaaagcctctaccttcccgggatcaccccgaggagaacagggaggggctgctcttacttgagagagttgatttccaggacgagattgtcacaagaaatgttctcctctttgccccgttgtagngttcctaa

SEQ ID NO: 16090 - DNA, 465 bp, Homo sapiens
ccgcggtggcggccgaggtacctttgttcctgaatatcaagtaatagggctcatctctgtgactgcttgcgacaagcacatagggcaactcattaccaactgctcattataaatgctgagctcttgagttcctgaggagggggtgggaatcttaggatttgttgccagatttgaaagtcactggaacttgcatattttcattttaatcctaagtgttattacgcaccagttggggttcacccttcatccctcacatttaattgtctgatatagaatagtgttgtgtccactgccccgctagacggctttcttaggggaattttcttctggttgtttcacaagacagattctgtccttgtcacccgggacagaaaactcagtcttttcaccctcattcagatgaagggactcaggacaggctctgtgacttacagggacccaatcaattcacaatgagaaattacc

SEQ ID NO: 16091 - DNA, 432 bp, Homo sapiens
  misc_feature 331: n = A,T,C or G
acaggcttgtggcggcctccagggtgtcccggctgtcttctgtgccaagctcttctctcctcagccgcgccaggacggtgcccccctccagcctgagagacacaagcagtgggtcttccaggacaagcttcatcatcgtctcatgctggtcaattaactcggcgacttcctgggctgttcttggggttctgtgggtgttcagggagcagaatgaattctgtaggaaaatgatggcttcttcacagtttgcagcgaagtgttccagcctctgacggaagcagatccagtcaccatggctgtagggaaaggagccgtcgaggtctgcggtcanctggcagctgtcaacaaatttgtgcacggccttcagggagctcacgacctcacactgaattattgcatccttgtcaggcctaaatgcagattctttatcta

SEQ ID NO: 16092 - DNA, 668 bp, Homo sapiens
  misc_feature 405, 456, 507, 508, 532, 551, 553, 559, 566, 582, 619, 620,624, 648, 653: n = A,T,C or G
acatgaggacctggagggttcatcccgagggccggtgtcggagaagcttccgcctgaagccactaaaacctctgagaactgcctgtcaccatcagctcagcttcctctaggtcaaagctttgtgcaaagccactttcaagcacaatatagatcttccttgacttgtccccactgcctgaaacagagcaacacctttgatcctttcctgtgtgtgtccctacctatcccttggcgccagacgaggttcttgagtgtcaccttggtcttcccctctaagagccagcggttcctgcgggttggcctggccgtgccgatcctcagcacagtggcagccctgaggaagatggttgcagaggaaggaggcgtccctgcagatgaggtgatcttggttgaactgtatcccantgggatccaagcggtctttcttttgatgaaaaaggacctgaaatccatcgncagaggggagataaatgggggatgccttttcaagttccttccttaacccanncaagggggactctttttaagcttnatccacttggggttttggncngccttnccttacncctggggaagccccgngaaggggccaagccgaatttttcccttttttttttcnnaagnggagaagcaaagggggcttatccntcttnttgtaaacttggggg

SEQ ID NO: 16093 - DNA, 423 bp, Homo sapiens
  misc_feature 396, 414: n = A,T,C or G
ccccgcggtggcggccgaggtaaaccatcgagacggagggccagagagtcacggcggggtctgctgggagccagccattgaaggtgctggagcagagagagatatggtattggagctgatccctatgatgaaagatctggacccttgtgtagatgttccgtgaagcaggaggttttcgtaacaccccagggcctgtaaggtttggtgtttccctttcaagatgccactttcagactttattctggctctgaaggacaatccctactttggggctggatttgggctggtgggtgtgggcacagccctggccctggcccggaagggtgtccaactgggcctggtggcattccggcgccattacatgatcacactggaagtccctgctcgagacagganctatgcctggttgcttanctggctcac

SEQ ID NO: 16094 - DNA, 412 bp, Homo sapiens
  misc_feature 170, 379: n = A,T,C or G
ccgcggtggcggccgaggtccggaaggatgcatggcccggggtctcctgcacctgagggtgggcgggaggcggccccgcgggttgtgttactggaaaaaggggtctcgatccagaccccaagagagggttcttgggtctacttcagggaagaattggaggcgagtcacanagcgcagtgaaggaagcaagtttattggaatctactccgttagagagtgcaagtcctcagactgcaggaggaggaactcccgtccttcggtagtgtcactacttagaggcaactgtgaggagctgtgattaatcgtggaatgtgctgatgtgcccactaaagagctttgcccttggagtccaggctggagtgcaatgatgaaatctcanctgactgcaacttctgcctcccgggttcaagtg

SEQ ID NO: 16095 - DNA, 725 bp, Homo sapiens
  misc_feature 18, 20, 28, 29, 34, 38, 40, 41, 44, 46, 48, 52, 55, 57, 61,63, 74, 77, 79, 80, 90, 91, 93, 100, 103, 116, 119, 124,125, 134, 156, 159, 180, 188, 220, 223, 224, 232, 236, 238,241, 246, 248, 251, 253, 254, 262, 266, 269, 277, 278: n = A,T,C or G
  misc_feature 294, 297, 298, 303, 312, 319, 377, 404, 439, 440, 446, 460,495, 496, 510, 528, 545, 588, 604, 613, 653, 666, 667, 671,682, 683, 686, 691, 697, 706: n = A,T,C or G
catagctgtttcctgtgngnaaaagaanngccanaacncnnggncntncttnttncntgtngnaaaaaaaacanccncnncctcttcctnntngggctanacngttacatgaaccnccnctctnnggaacatcntgggctgtcatgggccatcatnacnatcccaggcaatgctaccagnatccccanctttgacctgctgcaaccgccttgccccttcnggnngaacaaantgtncnacnttccngncananntgaatctnaccnggnaagggganncccaagaattttgctnctnngaatntggagatancatctgnggacaagtggagccaggtagaggaaaagggtttgggcgttgctaggctgaaagggaanccacaccactggccttcccttccccanggcccccaagggtgtctcatgctacaagaaaagcnntagacnggccccagggcttntggctagaacccgaaacaaaaggacttgaaaggcnnggtggcctgaaaanccatcttgtgacctgttnacaccgccccttggttnccagccttcccctaccccaagggtcttttgcacaaggggaccnttttaacaacaatttnttttggaanttggttttaaaaaaaacctgggtggttttggggggactcnaataaaacccttnnttgnctttttttaannaantaaangctttntttattcangggcttaaaaaaaaaaaaa

SEQ ID NO: 16096 - DNA, 228 bp, Homo sapiens
agtacttctagaattaattaagggggaaaagccaaaaataagtaaattagaaagaaaaatagagtagaaattgcaaataactctaaaggatctttggaagaccaataaaatgtataagccaatttattctaagcttgattagggagaacaaagagaaacaaaattaggaaatagaaaggattacaggtgtgagtcacccacctgggccaaaaaaaaaaaaaaaaaaaa

SEQ ID NO: 16097 - DNA, 383 bp, Homo sapiens
  misc_feature 152, 172, 193, 216, 221, 223, 228, 230, 240, 244, 246, 252,269, 274, 296, 302, 310, 320, 322, 325, 327, 328, 339, 348,349, 352, 359, 361, 367, 368, 371, 380: n = A,T,C or G
ttttttttttttttttttttttttactaaacatttaaaatatatttctaaacagaatgggccgactcagtcacagtaactgttgatctccatagtagagcaacccacaaagacagaactgatttttttcccataatcaggggttgaaaaaanataccaactttgttttctgnaaccaaaacccacaattttcntgccagttttaaaatggtttcanctggntnatttngnccttggttanaaantnttgttnagttttttttttttttnttttnaaaaaaaaaaatttaaaaaaanttttcntagaaccncttaaatccntnaantnncgggaatgggngaatttccnnggncccaaangnacgccnnaantttaccccnaaa

SEQ ID NO: 16098 - DNA, 565 bp, Homo sapiens
  misc_feature 249, 398, 415, 505, 520, 525, 535: n = A,T,C or G
acagaggcccactgagcaggatgtgatgcacagttccacgggacagaggggcatgggtggtggtgtccctaggggagttccgctgttctcaggtggctaccaggcctgggggggccatacagggtcaccgaggcaatgtggttgttctgcatgacctcaaagatcattcgctgaagaccaaagcagaatgtggaaccaaatgggttggtgttgtttggggaggaagacctgtgcaggacaacaggcttntccacagggtggcccaggagctcctggatgttgtcccacttgctgtaggtcgtgcatgtttctgtctgaccatctgcgttttctttctttatggctaagtgggatcttgaactcacagcgatgataaatgttgaaattataatgcccanggtaaattggtgtgtanaacaaacttcttcactttgtgtgtattcgcatcaaaagaggatgtccactccaagagtgaaatagttaaaaaaagtagtcattacacttngatggaacttgtttnttganggggaaaggnagaatgaaattttcatcttgtctttctgaa

SEQ ID NO: 16099 - DNA, 432 bp, Homo sapiens
  misc_feature 402, 417: n = A,T,C or G
gaagattcaacccgatcttgtccaacttctcccgcaaggaccggcctccatttttcgatttggctcttctgagaacacctcccagtaacgaggcatttaagcattcaggtggggacagtcgcctctgtacctggtcattggtgacctgctcttctcagctctctggaccttcctgtggtttgttggtttctgcttcctcaccaaccagtgggcagtcaccaacccgaaggacgtgctggtgggggccgactctgtgagggcagccatcaccttcagcttcttttccatcttctcctggggtgtgctggcctccctggcctaccacgctacaaaggctggcgtggacgacttcatccagaattacgttgaccccactccggaccccaacactgcctacgcctnctacccaggtgcatntgtggacaactacca

SEQ ID NO: 16100 - DNA, 375 bp, Homo sapiens
  misc_feature 323: n = A,T,C or G
caagccgcagcctggaggagctgctgctcgacgccaaccagctgcgcgagctgcccaagccttttttccggctgctgaacttgcgcaagctgggcctgagcgacaacgagatccagcggttgcctcccgaggtggccaacttcatgcagctggtggagctggacgtgtcccggaacgatatccctgagatcccggagagcatcaagttctgcaaggctctggagatcgcggacttcagcgggaaccccctctccaggctccctgatggcttcactcagctgcgcagcctggctcacctggccctgaatgatgtgtcttttcangcactgcccggggacgtgggcaacctcccaacctggtgaccctggagctccg

SEQ ID NO: 16101 - DNA, 550 bp, Homo sapiens
  misc_feature 405, 406, 413, 420, 434, 439, 446, 461, 468, 482, 506, 509,521: n = A,T,C or G
accgggcgcgggcagagcgcggcggcgcggaaatgggagtcttgctatgttgcctaggctggtcttgaattcctggcgtcaagcgatcctccggtcttggtctcccaaagtgctgggattactggcgtgagctacctcatttggccaaattttaaataagaaatgctaacgtttactgttactgctgtgtgctatgcactttgctaagcagctttaaactgtggagttttcttttcatttaaacatcacaacaattaagtgagtagagacggggttttgccatgttgacctggctggtctcgaactcctgaacgcaagtgatccgcctgcctcaacctcccaaggtgctgggattacaggcacgagccactgtgcctggccttaactggtgctttttataaaggnntgttccnaaaaaanaggcctttaaaaantttgnttttttnaccctgaactgtaangggactnaggctttaagaggnggttttgttaccacaaaaacagtntcntagtggaagacnacaagaaaaagaggggggaaagggttcgg

SEQ ID NO: 16102 - DNA, 146 bp, Homo sapiens
  misc_feature 33, 38, 63, 81, 122: n = A,T,C or G
ggcgaattggactccaccgcggtggcggccgangtacnaaggctgagagggcgctggaccttnctgggaagtctctgcagntgtcatcggggaagatttggaaggcgatgctggattccgtntctggagtggatccatggaggtct

SEQ ID NO: 16103 - DNA, 262 bp, Homo sapiens
acacacaccagagtgacgtgtggtcttttgggatcctgctatgggagatcttcaccctcgggggctccccgtatcctggcatcccggtggaggagctgttctcgctgctgcgggagggacatcggatggaccgacccccacactgccccccagagctgtacttgggttcaaaagaattcaactttgggaccacacactttgcattcaaactggaagtctcattctctggaattagactgtttcattgaaaaagaatggtgtc

SEQ ID NO: 16104 - DNA, 590 bp, Homo sapiens
  misc_feature 527, 575: n = A,T,C or G
actccaccgcggtggcggccgagtacagttggcccaaaatgaagagcaggcagtagtagaggattaagggcaaagtgccttgttgttaggcctgtcatgaagatgtggggtgagatctgtcttgggcaacaactgatattaagctgaggtctgcagtctcaacttgccactagcttaatgtgcctcccatggggcacagctactgaaagctgatgctgcccaagcatttagggagataattatgccacttggaccacactggtgcgactctaaccccagggctggggccagaatgaggtaaaggaggcaccacgggggtaaacccaaggaagcactctcttggcacctgcaagcaagcaccaacttaaatgtatgccccaggtgcctcatttgtctcaccctagccctggccctgctaatccggggcacaccccttttaggataacacggactaatttggacactttccccaaaccgtagcccagttagacatgatggtggaaaaggtctaactaaagacattgcangggagatgggcgcggtggctcacgcctgtaatcccagcactctgggangcccggggcgggcgg

SEQ ID NO: 16105 - DNA, 588 bp, Homo sapiens
  misc_feature 68: n = A,T,C or G
actccaccgcggtggcggccgagtaccagctacaagtatgaggtggcactggctgggccagccctggnagttgcacaactgcatggcgaaactgttggcccaccccctgcagcggccttgccagagccatgcttcctacagcctgctggaggaggaggatgaagccattgaggttgaggccactgtctgaaccatccctgtactgctaatccaagagctaatgtgtatgaaagggcacatgaagtggcctaaggaagatgggtttaaatccatctctctccctcactctgcatatagaccaggggtcaacaaactacccctgtagtttggctcaggggccaaatccagcctactccctattgctatgaatattgtccgtggctgctttttcactgcagaagcagatcaaatgaggcccataaagctgtaaatatttactatctggtcctttacagaaaaattacggcaatccctgatcaaacctagatgtaagtccctctctttgtggagcagatctctgtgagaacagaagacacagggcagcacccttactctgcatgattttaatacacagcagtggtcgtgatc

SEQ ID NO: 16106 - DNA, 207 bp, Homo sapiens
  misc_feature 31, 46, 51, 53, 115, 128, 170, 174: n = A,T,C or G
ccgcggtggcggccgccgtccacgtggctcngactccgatcgcacnacagnangccctctgttcgccattgtcagcagaacggagccgcccgggatgcaggaggagagcctgcanggctcctgggtanaactgcacttcagcaataatgggaacgggggcagcgttccancctnggtttctatttataatggagacatggaaaaaat

SEQ ID NO: 16107 - DNA, 161 bp, Homo sapiens
acatgaattatattgcaaaacagctgttaatagaaagcagcaaaatctagctgatctgtgtatttcacttctttacagtattttctgatttactcttttgttgccattgcacagattttttttctttaacctctcttacttccagagatttgatccttttt

SEQ ID NO: 16108 - DNA, 362 bp, Homo sapiens
  misc_feature 227, 248, 251, 328, 336, 348, 350: n = A,T,C or G
acttctcctggccagctgtgtcccagatctcaagcttcagagaggtggcacccacatccaccacctttgtgaagaacgcacctgaaacagggaggcccagagggcttactcagaggacgaggttgccacatgcggctcaggtgggaccacggcaagccgcaggcacagcaatgggctcagagggacagctggccatgcattcttcccacgccccgcatggcccaggnaggttgagccaacagttcttnttnggaagattggagccctttcacattccgagcaaaggtggttgggcaattgcacttgtttcattttaaagatttttctncccttttngcttttcaaagntnttattgatttta

SEQ ID NO: 16109 - DNA, 500 bp, Homo sapiens
cccttctgtcccctagtaagcccagttgctgtatctgaacagtttgagctctttttgtaatatactctaaacctgttatttctgtgctaataaacgagatgcagaacactggtgccgccacagtggccaagttgcgacactgcccacggcccctccctctgatgcagattcagggcttctcttcgatcatgttgggttttgattctgtttttccttgactgcaaaaccctctttcctctcctcttttgggacaagagccctggttttctacgctgcccttggccaccacactgcctacggcccctccctctgatgcagattcagggcttctcttcgatcatgttgggttttgattctgtttttccttgactgcaaaaccctctttcctctcctcttttgggacaagagccctggttttctacgctgcccttggccaccacactgcctgccccacgagctgggaggcaggttttgaccgtttgatgtttatatcatatcaa

SEQ ID NO: 16110 - DNA, 546 bp, Homo sapiens
  misc_feature 531: n = A,T,C or G
ccaccgcggtggcggcccgaggtactgttgcagccctctaacaatacactactgatcatggggttaaggacctcggccttcttgttgctcccaacagtggttaaagaattcgtaaacttctttgataaggaggccacttcattgcacattgcagtagttaattttattagaacttttgcttggtcctgagctggtttttcctcttcttgtccatgaagaattaattctgctactttatgaagctgctcaatacagcgcgctgttacctccgccagactttcaatggacgacatgtatacttcctctatggtcttagttttcttttcctcctttttgtcttcttgagggtcttgagatttctcttccttttcttccttctttgtttcttcttcggacacttttgccacatctactgacaccacggtttgatcctcttccacccagtcatgagccctcttcatggccttattgagtttgtcaggtgtggcccgccacatgtaattcaaagagaagctctgtaagcatgcgaanaaaattcttctccct

SEQ ID NO: 16111 - DNA, 747 bp, Homo sapiens
  misc_feature 43, 44, 46, 153, 202, 215, 216, 218, 219, 226, 228, 229,232, 235, 242, 244, 254, 256, 264, 266, 278, 279, 282, 291,426, 444, 476, 482, 488, 506, 508, 534, 547, 564, 573, 575,590, 603, 611, 612, 613, 625, 636, 643, 654, 657, 661: n = A,T,C or G
  misc_feature 666, 668, 670, 671, 680, 682, 683, 689, 700, 704, 712, 713,724: n = A,T,C or G
agtacttctagaattaattaaggcggggggatcaaaacataanngntttaattctacagctgtaggagctttgtattgctgaactttcatctggaaaagtttcacagtgacatttttaaaagagaatttttttatctgccgaattctaccagngtaaccttttttctaaataaacaatagttttcccaagccctaaaaaaanaaaaaaaaaaaanngnnccccccncnnggnggnccccaantnccccctttangnggtttttnanccccccccaaannggncgatttaanacaaaaatagtcttcagttttataaaacactatgttacactgtagagctacacaactccttacagtgtcgtagctaggggcttaaaaataagccagttttggctgggcgtggtggcttcacgcctgtaatcccancattttgggaggcttgangtgggcggatcacctgaggtcaggaattccanaccaancctgancaacattggagaaacccngntctctactaaaaaatacaaaaattanatggggtgtgggnggggcccatggcctgtnatccccaancntaccttggggaggcntcaaggtgggggnaaaaatcnnnttgggaaccccnaaggaaaaacnggaaggnttggtgggtgnaancccnaaaancncnnccaatttgnanntccaanccctgggggcnaacnaagaaccnnaaaacttttgntcaaaaaaaaaaaaaaaaaaaaa

SEQ ID NO: 16112 - DNA, 309 bp, Homo sapiens
ggccgcttctgtgtggtgtggggagacgctggtcctccccgtcctcccatagcgcttattgcctcaccctcaccccctaggggccggatccaaaggcgctgcactccccaagccttggggcatcagccaggaaggtttcctacctcctaattcaggggcaggactcctcttttccccccacggggaaaagaggcagaaacttaggggtttccctcctttcttagggtcagacgctcttagggtccacttcttcaggggcggaagcctctcctacccttcccataggggcacaggcctttaccccactgt

SEQ ID NO: 16113 - DNA, 640 bp, Homo sapiens
ggcggccgaggtaccaatatttgtgtgtagctacgcaccttaataagaccatagctaattagatgaggaacggtagacccaattcaaccatacaggcatcgaccatatcagcatacaggcatccctctcccaccgtttccttcttgtccccactccaaagccttctccattttatttgtattaattttctattgctgcatactaaattactgcaagcattagcggcgtaaaataagaatgatttattttcttgcagtgtccacagatcagaagttcaggcctggattctctgggtcttcttctcagggcctcacaggctgaaattaggctgggtttctttctggaggttctggggaagaacttcctctcaagtttcctcaggttgtcagctgagttcagttccttgtgactgtaggactgagatctctgttttcttgctggctgtcagccaggggcctctcgctgctcctagaggcctcccatgttcccctgcatgcttcctccagccagcagaggaggatcgccctgcatggaaaccctcctgcacttcacatctctccagggaagtcctcagtccctccaagggaactcacgttcactaggtcaagctcatcagataatctgtctatcttaaaattgg

SEQ ID NO: 16114 - DNA, 386 bp, Homo sapiens
  misc_feature 273, 276, 301, 366, 384: n = A,T,C or G
acctgctgcaggagcagctaaagatcatcaagaaggagctgggcctggagaaggacgacaaggatgccatcgaggagaagttccgggagcgcctgaaggagctcgtggtccccaagcacgtcatggatgttgtggacgaggagctgagcaagctgggcctgctggacaaccactcctcggagttcaatgtcacccgcaactacctagactggctcacgtccatcccttggggcaagttttttttttttttttttttttttttttttttttttnttnggggttctgctagcctttatttganaaaatttacacaaaaatccccaatccaacatttacaagtgaatctgtataaatcccatatgcctntttcccaaacaaaccaanaa

SEQ ID NO: 16115 - DNA, 473 bp, Homo sapiens
  misc_feature 297, 436, 447, 451, 465: n = A,T,C or G
acagccgctgctcgtcaggaggccgcttgaggatgccctcgacgatgcgcttcagttcgaacaccgtgctggactccttggcgtccgtgaagatggtggtcttgtggcgccggatcatgaggaacacgtccatcgcggctgcacaatattacgagaaaaaccctaaaaaatttataaaatgaatgatattacactatcaaataaaaagacaagtcattttgttttcatgagatttcaaggttgatttgagtcagcttcccccggaactgcacggtgtcctgtgtggggagggcccanccgtgctgccagtgctggggggcagggcttacactccttatctagcagaagtgcacagagaactctggacttgagtaacaaagtcataaggaaggagattttaaaatgggctccatgaaatgcagctcatctagttcanggctgggccanaaanaccggggagtggantgcccaat

SEQ ID NO: 16116 - DNA, 159 bp, Homo sapiens
  misc_feature 6, 21: n = A,T,C or G
cattcncttcactggcaaatntagcttcactggcaaatcatctctggacatagcattaagcctactcccagactgagagctcttgatgggaccagagattgaatagcctaccctatagcacaagatttctaccttgggattgggttagagctggctggc

SEQ ID NO: 16117 - DNA, 414 bp, Homo sapiens
  misc_feature 352: n = A,T,C or G
caccgcgggggcggccgaggtacttattcttcccacgtttcctggattacaggtaaatcatttgacctgacttgggtatgggagggggattaattggtggggataagacccttatctttgtggggttactgatctgataaaaagacattattctcacaccccagtggtgcccacactaacccaactctgcccttctctcctttcccctaaggccaggccatggagataggcagcgcagccctgactatactggtagaatgctgggatgggcacctgacaccccctgaggttgcatccctggctgacagggcatcacgggcaagagactccaatatggtgagggcggcagcanagctggccctgagctgctgcctcacgcccatgcattgaaccctaatgagatccagcgggccc

SEQ ID NO: 16118 - DNA, 575 bp, Homo sapiens
  misc_feature 491, 526, 530, 535: n = A,T,C or G
acctgtgacaggagagtgtcctgatgtgcttgggagaaaggccgtatgggggccagggatggaagagacagtgtgtggccacagaaattcctgtccatccaccaccagtgctgctccctgtgtgggctctagggcgagtggccccgaaccttggcccagtgctttgtcccaggccagagtcttggcaatgccacatgctggcagctttctcactgagaaggtcctagcttacccctgtgtgctggccttggattcagccccgagagaggggagagaccattcctcctgtggagtgggttccttatcaccaagacccggccactctcaagaactggcgttccactgtaaaatccaggtgccttacgtgtggctcttgtcccttatgcttgcaaggggggaaaagctgcattgccattgttcccaccttccttcactggcaagaaaggatgccaggggctgttagccactgtcttcctcacctttctgttttnttcattgtgggcttccctcaaaatggggaattttngcantgttncctggtccaaagcggtaaaccaaacaaatttccccttttt

SEQ ID NO: 16119 - DNA, 416 bp, Homo sapiens
  misc_feature 56, 159, 171, 172, 173, 174, 177, 178, 179, 181, 183, 186,197, 201, 202, 213, 214, 215, 216, 218, 222, 225, 235, 236,238, 244, 249, 250, 251, 254, 256, 257, 261, 263, 264, 265,266, 267, 270, 271, 272, 273, 277, 282, 284, 293, 301: n = A,T,C or G
  misc_feature 310, 320, 321, 322, 333, 335, 337, 338, 374, 375, 377, 379,380, 382, 387, 398, 404: n = A,T,C or G
ccgcggtggcggccgaggtacaagcttttttttttttttttttttttttttttttncttttttttttttttttttttttttttttttttttttttttttttttttttttttttttttttttttttttttttttttttttttttttttttttttttttgnaaaaaaaaaaannnnttnnntntnccnaaaaaaaaaanggcnnaaaaaaaaaannnncngganaanaaaaaaaaanntnccccgnaaaannnccngnncccngnnnnnggnnnncccncccgngnaaaaaattnaaaaaaanccccccccntttttggggnnngggcaaaaaangncnntggggggggaaaaaaaaaaaaccccccccctttttnntntnngngtttnaaaaaaaaccncccctntgaaaaaaaaaa

SEQ ID NO: 16120 - DNA, 448 bp, Homo sapiens
aggagctccccgcggtggcggccgaggtacgcggagctgcgcgccaagagcacgccgagcggcttcacgctggacgacgtcatccagacaggcgtggacaacccgggccacccgtacattctggttactggtggtgttatatcaggaattggaaaaggaatcattgccagcagtgtgggcacaatactcaagtcatgtggtttacatgtaacttcaatcaaatttgacccctacattaacattgatgcaggaacattctctccttatgagcatggtgaggtttttgtgctggatgatggtggggaagtagaccttgacctgggtaactatgagcggttccttgacatccgcctcaccaaggacaataatctgaccactggaaagatataccagtatgtcattaacaaggaacggaaaggagattacttggggaaaactgtccaagttg

SEQ ID NO: 16121 - DNA, 769 bp, Homo sapiens
  misc_feature 5, 24, 272, 447, 568, 615, 642, 675, 677, 678, 679, 680,685, 702, 703, 708, 713, 715, 731, 732, 735, 738, 740, 741,748, 751, 755, 757, 758: n = A,T,C or G
gttgnagctccaccgcggtgcgcnggccgatcctcaggatgcagagaagtcatgtagacccaccagccccaccttggggggaggcgtgccagcctgtgtcaggtgtgcttgtgtattgctgtgctgtcatggggccctctccttgagagccgcctctctgttcttcctgtagtatattcccctttgaaccaccctttcctgtctgaattctactttgcctcctttctcttcctcctctttgcatggtttgtgtgtatagacagtggaacctngaggatgggatctgctcagcctatcttcggggcaatttgctgagcttcagggatgggctatttaatgtgggataagcccaggtgccaagggggagggaggggcagggctgggaacaagagcggaggaatgcccatggccctttattcctttcttccctcggtccaccgaacaggnaagaggctgaggccatgcttgggcaggggtcttggatgcccactttccatgccagcagcatttcaattggcttcaaaaacccatccttccttttccctttttcgccccttggtttccccanaattcccccttccgtcccttcccccaaggggccggggaaccttgaangaagcttgggaaaagaaaaagcaagtncagttacccttcggcccgcttcttaaaaacctnannnnggaantccccccggggccttgnnagggnaattncnattttcaaaagccttnntcngantnnccggccnaancctngnngggggggggcc

SEQ ID NO: 16122 - DNA, 359 bp, Homo sapiens
acctaggagagttatggctgcctctgctgagtcatgcaggttgtcagggaagtgggggaaagctggcagtcacaggcctcacccagctcccacacaaacccaagggccggtcttactcccaccgtgttcccccacaactgccccgagtctgtttccaggcagagggtgagactggcttgaaaatttgccccaaggctgtgcccctcccagcggcgaaagaaaagggctgtagttcttcccccacctgtgaagtctgcatgctggattcgtgcagttgcccaagttctggccaggaggcttctcaccctgtttaaattgttacgaaagttcgactagagaattcttctccctgtggagtt

SEQ ID NO: 16123 - DNA, 327 bp, Homo sapiens
  misc_feature 249, 325: n = A,T,C or G
acacattacatagttcagcagttcacagctttttggtctcaggatccttttgcacttgtaaagaaatcatcaaagaccccagagagcttttgtttatgtggattatattcattgacatttaccattctaaaaattaatattgaagaaaataatatttaagataacaagtgaattacatgttaatataaatagcatttttatacaaagtaattatattttctaaaaattcagtaagtaaagtgacactgnttttatacttttacaaatctctttaatgtctgtcttaatagaagacaactggattttcggtgtcttccttctttcngc

SEQ ID NO: 16124 - DNA, 415 bp, Homo sapiens
gccgaggtgactgcagagcggctcgcgagagtctccctctgttgccaggctggagtgcagtggcgcgatctcggctcactgcaacctccgcctcctgagttcaagtgattctcctgcctcagcctcacaagtagctgggactacagttctgtgatatgagcaacaatggaccagaagattttatctctagcagcagaaaaaacagcagacaaactgcaagaatttcttcaaaccctgagagaagttgactaatctccttcagaatcaagcagtgaaaggaaaagttgctggagcactcctgagagccatcttcaaaggttccccctgctctgaggaagctggaacacttaggagacgtgggatcagcaatatgtaatccaactcacctccatgttcaaggatgtccctctgactg

SEQ ID NO: 16125 - DNA, 687 bp, Homo sapiens
  misc_feature 277, 325, 330, 407, 415, 432, 460, 496, 509, 575, 592, 607,611, 618, 632, 639, 641, 651, 652, 653, 658, 660, 672: n = A,T,C or G
actggtgaaacagttttaataccctaacatacacagtaatgattcattcttgtttaaaacaagaggtgatttcgacttgggattgggatttttattttttgagatggagttttgttcttgttgcccaggctggagtgcaatggcacaatcctggctcactgcaacctccgcctcctgggttcaagcaattctcctgcctcagcctcctgagtagatgatgggattacaggcatgcaccaccacgcccaggtaattttgtatttttagtagaagatgngggtttctccatgttgggtaaggctgggtctcgaactcccagaccctnaggtngatcccgcctgtctcggcctcccaaagtgctgggaattacaggcgtgaagcccgcccgtgccttggcctttgacttngagattcngaagccaattttattcncaactggattgtgccctctacttttagntaaaggttctggcttacaagagcccctcttcccatnctctgatggttcnaatttttaatataccagcaaatccaaacctccttaaaaagggaccaaaagaaaaatcttgggaaanttgggggttaggccatngaagcccccaccagncttnttattangccccacaacttanttgccantngtttccttgnnnagaantnaaaaaaaggcangctcctttccccttt

SEQ ID NO: 16126 - DNA, 460 bp, Homo sapiens
  misc_feature 460: n = A,T,C or G
actggacaaggagtcaaaaaacttgatttcaggtcctagctctagcacttacagctgtgtgatcttgggcaagtcacttaacctctctttgcctcaatttcctcatcttgaaatgaggataataatacctgctgtacttgagccgcatctgcagtccatgggcctgagactgcacctgacgcagctctgcctctttccgttttgccttcatctgctctttcagctcctctgtcaagcgctccttcttctctttcaacttgtctactgctttctcatcccagcgccgtgccttggccttcaggtcactggccccaccagagatcactcctgacttctggaatagggttccatccagtgccactgtcttgtggcgctggtggctccaaaggcaatgcggcggcatattccacgttgtcacagacaagggcattgccacaagcaaactgcagggcctttttgn

SEQ ID NO: 16127 - DNA, 437 bp, Homo sapiens
actggtgtaagcccctgtgtttccaaaagttaagttgctcaccaaatgcaacagagcctgttccaaagaaactgcccctgcattttttccaatcaggtagatactatgttgaactcctttgattttgagacagggtctcctgtcacccaggctggagtgcagtgatacaatcacggctcaccacagcctccacttcctggcctccagccattgccccgcctcagcctcctgcatagctgggaccacaggcatgcagcactatgcctggccaatttttgtattttgggtagagacagggtttcgccatgttgcccaggctggtctcgaacgcctgcctaagcctcccaaagtgctgggattacaggcgtgaaccaccccgcccagccccatgttgaactcttaactgccaagcagagaaaaaaaaatccttaccatac

SEQ ID NO: 16128 - DNA, 500 bp, Homo sapiens
actaggattatagccatgagccactgtgcctggctagttaaagtggttaattttatgttatgtgaattttacatcagtaataaaaaagaagccggaagaaaaccagacatcaaagatgttagaaaaagggatatatttacaaaccaaaaagtctccaaattcccactggaaggaggtagcaagtatgagcaggtctctttagaagcccgtcctcattcctatagaaaccccaagtacacaccagttctcaccagcggggttaagtcaagactttttcagctcatccctggcaagccccagcctacccctggcttctacaggaaaatttgcactaaactctcttctccagcggcagctaatgcagtccttctactccaaggctatgcaggaagccggaagcacaagcatgattttttcaacaggtccatacagcacaaactccatatcttcccaaagtccattacaaccaaagcccagatgtcaatggcattggcccatcc

SEQ ID NO: 16129 - DNA, 191 bp, Homo sapiens
acgaatgcgatcactgtgggaaggccttcagcataggctccaacctgaatgtgcacaggcggatccacaccggggagaagccctacgaatgccttgtctgcgggaaagccttcagcgaccactcatccctcaggagccacgtgaaaactcaccggggagagaagctctttgtgtcatccgtgtggaaaagg

SEQ ID NO: 16130 - DNA, 584 bp, Homo sapiens
  misc_feature 4, 21, 22, 24, 26, 31, 37, 91, 261, 297, 407, 457, 500, 554,582: n = A,T,C or G
atanggcgaattggagcttcnncngnggggncggccnaggtccaggtttaaggtgcaggaatgaagatggggcagactgggccccagcatntgaggccccacccccatgccagagagctccagtccagagccttgaagtgtggtcaagcacatgtgagctatcttggatgtccaggaatatctaagtgtgcttgcccccgtaaggaaggcactggaattccttgcccagcagctgggcctaaagaagaaagaggcttgagngaagccaaggccctaagaaacggcccagcaccggtnggctaaaccagagcccattgcggattgttaccttgcccggggccggcccgcttcttaggaaactaggtgggatccccccgggcctgcagggaaattcggatattcaaagnctttatccgatacccgtcgaccctcgagggggggggccccgggtaccccnagcctttttggttccctttttaagtggaggggtttaattgcgncgcttttgggccgttaatcattggttccaataggcctgtttttcctggtgttgnaaaaatttggttttattcccgctttcanca

SEQ ID NO: 16131 - DNA, 441 bp, Homo sapiens
  misc_feature 247: n = A,T,C or G
accaggttgccgggaagtccacccttgagagctcacaagtcagcaccacccgctctgaggttgtgaaggtcaacgacaccttgtcctgggggctcaggatgtgcaccgggctctcttggattgtgagggcagctgagtcctgcacgccggggcagctgaagccgaccagggcaccgctgtcctggtgcttgacggcatgcaggatgagtctgtgctgcagacccttctgctctatacggtcgcccanaaacaatcctttcaacttctgaacatttggtttggaacacttatttgatgaatattcagttaaacatttggatacaagctcttgccagaaggtcagatctctgccatttatcttggaatgtttctgaagacattctattccttctgttaactctacacacttctgtgcttggatctctaatgcaatgataggca

SEQ ID NO: 16132 - DNA, 340 bp, Homo sapiens
caccgcggtggcggccgaggtcaagcagacagcaaaggctgagggcctgggagatggataccgacttgtgatcaacgatgggaagctgggtgcacaatctgtgtatcatctgcacattcatgtacaagtagtggataccaattagtcagttcatgtcttgctccctgaaggaagattttgaagtaaaagaaaccctctcaagcaagcaacatacatccctggcctgtctgccagtttgtttggtttttgccggggaaggagatagaaggaagaagaagggaatggaacagggggaataggacaatctggttgaaactggttctattcctttttttttttt

SEQ ID NO: 16133 - DNA, 235 bp, Homo sapiens
accttccctattgaacccttctttaggcttgctcactctttttgatgggtgtctttccaaagctggctggggacctccctgattgagagacatggggccagttctgttgctgtggctacacgggaataataaagcagaacaccttaaaaaaaaaaacaagcgaaaccaaagtgacgtgggtccataggattggggatgggtggtggggtctgactgccttgtcccaagagttggg

SEQ ID NO: 16134 - DNA, 800 bp, Homo sapiens
  misc_feature 4, 527, 550, 566, 596, 621, 626, 651, 674, 677, 680, 701,703, 715, 729, 756, 758, 777, 787, 788: n = A,T,C or G
gccnagggtacttcatgaagcagaccattgggaattcctgtggcacaatcggacttattcacgcagtggccaataatcaagacaaactgggatttgaggatggatcagttctgaaacagtttctttctgaaacagagaaaatgtcccctgaagacagagcaaaatgctttgaaaagaatgaggccatacaggcagcccatgatgccgtggcacaggaaggccaatgtcgggtagatgacaaggtgaatttccattttattctgtttaacaacgtggatggccacctctatgaacttggatggacgaaatgcctttttccggtgaaccatggccgccagttcaagaggacaccctgctggaaggaccgctgccaaggtctgcagagaattcacccgagcgtgagcaaggagaagtcccgctttctctgccgtgggctctcttgcaaggcaagccctaattgctctggggggaggggactttggcttgattttccccctctttccctttcaaaccatggaaaaatatantaccccccccccatgccaagtcntaaaaatggctttcangttcccaggttttgttggtcctggaaaggnaccccccggacccggcattgggccnctcanaccaccaagtccacaccaaccaagnaacttacccgttcccattcccgntcnttnattgaattggttttaaaatcngnaaaaagccacanaccaacttaccttntttaaaaaaccttttttttaatggccntnaggtaaaaaaggggctgangccattggcnnaaaaaaaaaaaa

SEQ ID NO: 16135 - DNA, 536 bp, Homo sapiens
  misc_feature 239, 258, 266, 305, 340, 347, 354, 365, 366, 374, 405, 515: n = A,T,C or G
gaacggcagcaatggtcaacctggctttcacctttctctgcttcagtatctctctctgtttgctgcagttgtcacaggagtccaccttcaaactcagctgactgttggtcaaagggaactccggatgtgactcctgttacatgaaaatggaagaggtcagagttgtccaagagggaggccagccacatccaggcagggcccccatggtcagaaccctgctagagccatcaaggtcccanatgagtctggaagtgttanttgcaaanatatgcatttacttctctggctacaaaaaggaatggaantgcacaaagcatagcacagtgaataaaaaaaggcnatgaccnttagacngaccaatggtnngtgcttgnatggcctacctttatgcccagccatgtgtcntgcaccctgcccgagagaaaggctgaaggggatgctaaggggagataaagcaaaggtgaaggacgaaccacagagaagatccgcgaggttgtctgctaaacctggctctncaaagccagaacccaagccta

SEQ ID NO: 16136 - DNA, 461 bp, Homo sapiens
  misc_feature 402: n = A,T,C or G
acagccccactacggaggaggacccgggccccgccagaggcccccggagcggcctcgctgcctactttttcatgggccggctcccattgctccggcgcgttctcaagggcttgcagctgttgctgtctctgctggccttcatctgtgaagaagttgtatcacaatgtacgaggaatgacctctagggcctgggcaacagccctgtatggccattgttccacaccagtcatggccttggatttttctgtcaaggcatgggccacagccatctcggaggccccaccccctggcaccagctgagggtccaggagaacattgcgacacacttgcatggcatcctggaggttgcgttctacttccgagagaatctctttgctagccccccggaggagaatggtgcangccttggggtctttgcagtcaagtgatgaaagtaaaagtattcatctccaattttcttg

SEQ ID NO: 16137 - DNA, 623 bp, Homo sapiens
  misc_feature 22, 556, 611, 621: n = A,T,C or G
actccaccgcggtggcggccgngtaccgtaagttttcttccacatattttgggaaaaaactaaaaaaagaaaaaggacttcctttttgtggacatctacagatgttagggttgccagaagcaaatcccaggaatgagatcagtattttcattgcatcttaaatgtataaccttcctgtgggagttcagtttgtctgtggttaagtgggtgtgcttaatcattctcgaaattgtgatcagatgaaataaaaaaaaaaatcttgatgcaataacagtggttttgccacttctggttgtttgcgatggatctgtcccatgtcagtctggggttttattcagcttgtgttgctaccagcagttcacaggtaaagcagaaattctctttaaccagcaagtttctgcttttttaaggttacttttagaataaatcatcagggaaacagagaggatgctttgctttgggttgtagtcaaaaactgattaaataatttaatgtctctggcacacactaaaaaccatacacttcagttgtgatctcagtggcatatttatttggntagggttcgttacatttattattacagatgttcagttgaccaagtagttcagtgntttctttccntt

SEQ ID NO: 16138 - DNA, 249 bp, Homo sapiens
ggtggcggccgcccgggcaggtacatgaaggcgcggcccttccccgacggcctggccgaggacatcgataaaggcgaggtgtccgcccgtcaggagctcaagcagcgggcgcgctacctggccgagaagtactgatgatctgtggtcataagaacttcaataccgttgcacatagtaaacacttcactgttactgaatcctaaactaaaactactatgtggtaacatggatcgatttagggaaagatgt

SEQ ID NO: 16139 - DNA, 298 bp, Homo sapiens
acaccgactacggcggactaatcttcaactcctacatacttcccccattattcctagaaccaggcgacctgcgactccttgacgttgacaatcgagtagtaccacttggcacgaacattctcgaaggaggccgggctcaccagagagaagcagatcagaaagacgtcagtttgggggtaggagagtggccgcagccgatcgtagtcctcctgacccgctgtgtcccacagccccaagttgactggtttcccgtccaccatcacgttggcagagtagttgtcaaaaacggtggggatgt

SEQ ID NO: 16140 - DNA, 218 bp, Homo sapiens
  misc_feature 177: n = A,T,C or G
gctcgacgcgccgatggaaggcgcgatcttcgtcgagaccatccctttcaccgagacgcgcggctatgtgcgcaacgtcatggccaatgccaccaactatgcctcgatcttcgagggcaagccgcaatcgctgaaggcgcgcctgggcacaatcagcccgcgcccgggcagcgcttnggtcctggactgagccggggaggatgagcgtgagcgtgcgg

SEQ ID NO: 16141 - DNA, 173 bp, Homo sapiens
accttccacatagattcacaagctgccctgcagtggccttggcttcaggaaaggagcattcagacgcttccgtcagcctcccaggatggcagcccctgacccggcccacggacgcggtgacctttgacgacgtggctgtggacttcacccaggaggaatggactttactggac

SEQ ID NO: 16142 - DNA, 170 bp, Homo sapiens
  misc_feature 3, 4, 6, 59, 62, 74, 105, 111, 122, 125, 133, 143, 150, 155: n = A,T,C or G
agnncnaaacctgggaggtaacaagaaataccgtgccctgaggttggacgtggggaatntancctggggctcanagtgttgtacaagttctcttgggaatctacncatggnaaaaataccanctncttccatntttacagccntgtcagngctgngctcttcaaagcctt

SEQ ID NO: 16143 - DNA, 453 bp, Homo sapiens
accacaggtggaattcctcaaaggcaaacttcatggctctttctaggcactctgacagcatctcatactggcctcttcttccaagagcaatggtgagtaagtcatagaccacagatgcactctgcagactgatgaggcggtcactcttgtgttcaggtatcctgctcagcacagcgtcccggttggccattgattcactaatcagcaataacaacagggcttcttccgtattttcttgaggacaaaaaatgttctctcctgagtagacacgggctctccgagtgagagtgtaggtttttgtgtttgctcctttgcggagaggatcgtccagaggtgactggcacggtggatcctccagagggttccagtagctctgctcacacataccccgcaacaagatctctgccagctgcctggctattgtcattcgcaggttttgagttgttcttgttt

SEQ ID NO: 16144 - DNA, 421 bp, Homo sapiens
  misc_feature 2, 3, 4, 8, 20, 24, 27, 29, 31, 36, 38, 39, 40, 51, 55, 56,65, 71, 77, 80, 87, 93, 96, 100, 101, 103, 110, 113, 114,123, 129, 137, 141, 142, 263: n = A,T,C or G
cnnntatngtatcccctggnctangcnantnagatntnnngctaattgatnccgnntacctggangggggncccggntcncatcttntgtaanctntatnnanggtaaantanncgcttggcntaatcntggtcatnactnntatctgaccagcttcctactttggagtcagtggagaattataccctgaccataaatgatgaccagtgtttactcctctctgagactgtctggggagctctccgaggtctggagacttttanccagcttgtttggaaatctgctgagggcacattctttatcaacaagactgagattgaggactttccccgctttcctcaccggggcttgctgttggatacatctcgccattacctgccactctctagcatcctggacactctggatgtcatggcgtacc

SEQ ID NO: 16145 - DNA, 448 bp, Homo sapiens
  misc_feature 2, 89, 127, 128, 138, 140, 141, 143, 147, 155, 158: n = A,T,C or G
cngcccgaggtacgccttctcccctaggaattctcttccacagcacctgaaagagtttttgggccatcctcatcataacacacttctgngggggctcctttccattgtcggatgagaatgatgtttnngacaagctangnntnattncataatantcntagagcggcaagcagaatcctggtgacagctgcagcctcgggaccccgcctgggcaggggccccaaagctaggctctgagaaggaaacacactcggctgggcacagtgacgtactctggacacatgttagcaatcgtagctcggtcaagcaatggacaactgggctactccaggcccgaagaactcgacaaatttgcccactaccccaacctggcggaggtgcttggtaatggtgagcacgatgtcagtggatgttaccagagggtggggcttccccatcaacctgcccg

SEQ ID NO: 16146 - DNA, 272 bp, Homo sapiens
cgagggcccccagggacccccaggacaccaaggaccgcctgggccggacgaatgcgagattttggacatcatcatgaaaatgtgctcttgctgtgaatgcaagtgcggccccatcgacctcctgttcgtgctggacagctcagagagcattggcctgcagaacttcgagattgccaaggacttcgtcgtcaaggtcatcgaccggctgagccgggacgagctggtcaagttccgagccagggcaagtccgtacctcggccgctctagaacta

SEQ ID NO: 16147 - DNA, 476 bp, Homo sapiens
  misc_feature 472: n = A,T,C or G
gagggatactccccctttccaccatgggcaagaagggcaaagttggcaagagccgacgagacaagttttatcacttggcgaaggagacgggttaccgttcccgatctgctttcaagctgatccagctcaatcgccgctttcagttcctgcagaaagcccgagccttgctggacctgtgtgctgcgccagggggatggctgcaggtagctgccaagtttatgcctgtatccagccttattgtgggagtggacctggttccaatcaagcctctccccaatgtggtgactctccagcaggacatcacaacagaacgttgtaggcaggccctgaggaaggagctgaagacctggaaggttgatgttgtgctcaatgatggggcccccaacgttggggctagctgggtccatgatgcttactcacaagcccatttgacactgatggctctacgtttggcttgtgactttttggcccntggt

SEQ ID NO: 16148 - DNA, 161 bp, Homo sapiens
  misc_feature 20, 111, 122, 141, 145: n = A,T,C or G
gatcaattagtgctggtggntactctctcctgcgtgttttgagcaagtagggagctgaggctaggcaggccctgggagtctgtgctgtggggctgtgagatggggcgcccnggggtccgcanccttgggaaagaccgaaanatgnaagcagggcgggccag

SEQ ID NO: 16149 - DNA, 349 bp, Homo sapiens
acgactacaggcatataccatcatgcttgggtaatttttttgttttgttttttgtagagatgggatctcactatgttgcccaggaggtctcaaactcctggtctcaagcaattctcccaccttggcctctcaaagggctgggattataggtatgagccaccttacctagcctgaataattttttcaaagaatagaatttataagtaaggctgggaattatatggaaaaactcccacgtttttatctgatgccacaaggagtcagagaaacagctgctaatgtgtgctcacaggtctcctgaagttgcaggagtatcagcctcccagcaacactttgagattcaaacctt

SEQ ID NO: 16150 - DNA, 422 bp, Homo sapiens
  misc_feature 37, 107, 337: n = A,T,C or G
actgcatcgcttggaggattcctgatttgtggtgaanactttgtgttaattttgtcatacagatctagtaatgtgtgaagatgctgatcctggaaaacactgtgtanaaaatctaggtccttttcactgcagtctgtaagcgcatgaatctcttccaggctgtccagcacctgtgagactgctcctgaggaggtagggtcttcggagaaatctggtaactcttcagggggatccccatagaatgagttgaatttgtgacttgacacagcggctagtacatctgtgcgaggtccggcactctgttctcatccagtaagtggtcgagccctttctgcanaattgctgttaaatgttctcctaatagctgtttctccacacaagcaatcagtggtttctgtgtgctgtggtccaagtaagtgatt

SEQ ID NO: 16151 - DNA, 408 bp, Homo sapiens
  misc_feature 285: n = A,T,C or G
accacctggaacgccacaagcgtgcgcacagtggtgaaaagccttaccagtgtgaacggtgtcatcagtgtttttctcggacagatcgattactcagacacaaacggatgtgccaagggtgccagtccaagacttccgacgggcagttttctctataggcgcaaggggccccgggtggtgggagtgatcagaagagcctgccgaagagcacaccccctctggtctgatggtcccaccaccgccccatgtgaacctgtcccactcctggaggagtggacccagganaccagaagagtgcatcaggggacatgtggccccagaacctcagctctgaacaacccaagactggtcccaagttggctaacagctgctcaagaaacaaaggaatctggggtcttctgacatgcc

SEQ ID NO: 16152 - DNA, 415 bp, Homo sapiens
ccgcggtggcggccgaggtactcgttggagcgttcgtagcaggcacgcactccttcatcctcccacagagcctcggcatgctcatagaattcgggagggaagtcaaagtcaggcacgttcatcacactcaggatgtagtccactctgaactggttctcggggttggccagctccacggggggcaccaggttgctcatggcggaggctctgaacctcttcaagagcatctggaacaacagatggctgcgcaccatctctgtgatcctgttcctcaacaagcaagatctgctcgctgagaaagtccttgctgggaaatcgaagattgaggactactttccagaatttgctcgctacactactcctgaggatgctactcccgagcccggagaggacccacgcgtgacccgggccaagt

SEQ ID NO: 16153 - DNA, 231 bp, Homo sapiens
  misc_feature 17, 22, 24, 55, 64, 103, 113, 125, 132, 142, 146, 193, 195,206, 220, 222, 226, 228, 231: n = A,T,C or G
accccagccccatgcanatggnancccaggggcgggggtggggggtcgcaccagnccttttgtnctcatgttggcagagatatctactctgaagcctttgtangggcctgggnacctggacctancacccancacctttctntganctgagtggctggagcggtcaataaagccacatgtgcctgtgaaaaananaaaaaaaaaanaaaaaaaaaaaaantnatgntngtn

SEQ ID NO: 16154 - DNA, 511 bp, Homo sapiens
  misc_feature 76, 84: n = A,T,C or G
agctccacacgcggtggcggccgaggtacccacacggtttaagcaaactaaaagaacactgacactttctcagagnaacagggnatgggaactttctatctgcccattagtatctaccccaagctacgaagacttccattcctcttattaagcattcagcaactacatttagtgcctactatgccagtgatgcaagaatggataagacagtccctacactcaaggataacgcctctagtaggtgagagacaaaccgattaattctgcataagggataagtgctgtatgcgggaagcaatccaatgagggctctgaggatggcaaaggaagggttcctggaggatttacatttaactggtgccttgaaaggtgtgtagaagttggcaagatcaaaagggagtagagtccaggtggagaagagaaaagagcagggcaggctggatggcatggctcacacctgtaatcccagcactttgggaggccatggagggaggattgaggccaggagttt

SEQ ID NO: 16155 - DNA, 517 bp, Homo sapiens
  misc_feature 30, 33, 46, 63: n = A,T,C or G
accaaatcaatatttgcatgcatatatagnagnaaaaaagtctagnaaggatacactaaaagnacttaatattatctctagactaagaatatacaagacgattcatatcatctctctagaagggaaaattaaatgtgatttcttatttttctcttttgcttattgctattacctaaaacgggttgctaaacgacagtctgaaggccacatctggcccattgcttacttttgcaaataaagttttactggaacatggccacacacgtttgtttacgtattcctatagctgctttcaggctacaacggcagagtcaaataactgtgacagagaccataaggcccacaggtggaaaatatttgccatctggccttttatagaaaaagctggctgactcctgatataaaatgatcatatatacattagacatgtatttaaaatatacttcagctgtgctccaaaggaaatatttatcttccaaatccaaatttcagcaaaattcattcattcattcatcta

SEQ ID NO: 16156 - DNA, 492 bp, Homo sapiens
  misc_feature 9: n = A,T,C or G
caccgcggnggcggccgaggtacgaagtcctcgtcgccgacgtgcaccttgatgaagtagtttgtccccgcgaccacctggctcttgaatgacacggccttaaacacagggaacttcttgttttctttctcttcaagctgggacctcacctggtcggcgatgtgctgggtctcggcggtggccggctgcgtggcggagggcgccccgcacccaatttccagtcttcagaacagcatgaacacctttggaatctacattcactgctaatatttctgttttttcaggtatacaaagctttttaggagtcctttggaaacagtcgggaaccttcggtgctccaccagttttgacaacctgcaattcatcaattctaagtaacctacaatcctgcaggagagaagaagggtcagcatctggaccagagctgttctgacagttagtattactggaggttcctggaaattttacagcaacataggcaccatctacttt

SEQ ID NO: 16157 - DNA, 234 bp, Homo sapiens
  misc_feature 167, 180, 223: n = A,T,C or G
actgcagcgcgtcgagcggctgtccaatcgagtcgtgcgtgtgttgggctgtaacccgggtcccatgaccctccaaggcaccaacacctacctagtggggaccggccccaggagaatcctcattgacacttggggaaccagcaatttcccagaaatacatacagctngtttaaaagcagngcttctaaactggaatttaacacagccaattccaaggaaattngtagtgacttc

SEQ ID NO: 16158 - DNA, 595 bp, Homo sapiens
  misc_feature 104, 105, 106, 107, 111, 112, 116, 119, 123, 124, 125, 126,127, 134, 135, 140, 147, 155, 156, 159, 161, 162, 163, 164,165, 169, 170, 171, 172, 173, 174, 175, 181, 184, 195, 199,200, 214, 226, 234, 240, 243, 252, 258, 259, 263, 264: n = A,T,C or G
  misc_feature 277, 278, 299, 306, 310, 316, 317, 318, 319, 320, 335, 346,347, 348, 355, 356, 357, 358, 361, 362, 368, 375, 378, 385,389, 393, 394, 395, 397, 398, 405, 406, 409, 412, 414, 428,431, 445, 449, 452, 463, 465, 471, 479, 480, 505, 507: n = A,T,C or G
  misc_feature 515, 516, 519, 520, 521, 545, 549, 550, 554, 555, 558, 572,581, 582, 595: n = A,T,C or G
acaagctttttttttttttttttttttttttttttttttttttttttttttttttttttttttttttttttttttttttttttttttttttttttttttttttnnnncccnncccnccntttnnnnnaaaaaannaaaanggggaancccccccnnttncnnnnnaacnnnnnnnaaaaantanaccaaaaaaancccnncccccccccccctnaaaaaaaaaggncccccccngggggnaanaaatcaaanaaaaannttannccccccccacccnnggggggggccccccccccccnttttttntccntttaannnnnggaaaaacccccccngggcaaaaaannnaaaaaannnnttnncggggnaaaaatnaanccccccnaaantccnnncnnaaaaccnnccnggnanaaaaaaattaaaanccnggggccccaaaaanggcnccncccccaaaaantnggggancccccccnncccccttttaaaaaaaaaaaaaccnangccccccnnttnnnaaaaaaaaaaaccccccccccccngggnnaaanncgntttttaaaaaaaanggccctttnncccttttaaaaan

SEQ ID NO: 16159 - DNA, 389 bp, Homo sapiens
gtaatacgactcactataggggcgaattggagctccccgcggtggcggccgaggtcgatctgctgctcgtctcaggctcgtagttcgccttcaacatgccggaaccagcgaagtccgctcccgcgcccaagaagggctcgaagaaagccgtgactaaggcgcagaagaaggacggcaagaagcgcaagcgcagccgcaaggagagctactccgtatacgtgtactcatagcaggtagcttcatcaagggtagttttcaatgcattttctgttgggtaaaaaactttcccctcaaaaatctgatgacaggcttctgctaacagtgaagcattggacagagctgccctcagaaaacgtttattctcccataactcagtattgtaaacaaat

SEQ ID NO: 16160 - DNA, 466 bp, Homo sapiens
  misc_feature 1, 11, 27, 28, 36, 37, 38, 41, 56, 59, 60, 67, 71, 74, 78,79, 178, 213, 216, 228, 258, 344, 354, 358, 381, 400, 421: n = A,T,C or G
nttcctggtcntagctgtttcctgtgnngaaaagannngcnccaccgcgggggctnccnnggttctnggtngtnttgnnaagaaaagttgaatactgttttgttttcatctcaaggggttccctgggtcttgaactactttaataataactaaaaaaccacttctgattttccttcantgatgtgcttttggtgaaagaattaatgaactccnctncaaagaaagttntaagtcaaggcctcaccaattcctacaggnttagtattgtgtctcaattctcaaaactaacttttaaaaagcttaaacttaacctaaaggattttaaatgaaaatataaactagantgaacaaacntganaaatatttctttgaatcacgganctagcacctttgagttttncaaaaaagcacgtctccccantgtgttcactgtgatgtggtgtaaaagatccacatttaacatact

SEQ ID NO: 16161 - DNA, 342 bp, Homo sapiens
acttgggacagttacaggcatgctgctattgccatgatcttcgggaagctgaagtgatgagcagcagtgtgtgattctgaggacacagagggctggggtctaggagctatctcaggtgggctcagtcagtgccatcctcccttttggtgcctccctagaagtgctgagaagatgcaaaaccaaaagcttttactccaacattgcttagccaagctaagcacatgcattccctatgattcagcaattctgctcctagcatgtatcccagagaattgtcccatgggtccataggggcatataagaatgggccattgcacaaaggttcctggttggggtaggggg

SEQ ID NO: 16162 - DNA, 416 bp, Homo sapiens
actgcatgttacatattcttctttaaaattttgtaataaacattgacagtgtttggtaggcacagggaaacaggataacgtagagtcattacagaagaaaaaaacttattgctaacattgcagtattccttttatcagaattaggtgagtattgattgtaaaagctctatcaactcttgctcttatttgatgactttgagacttttttactcttgctataaaaagaaggctactttctttccctaatatatttctaccaatgcgaataattcaggaaacaatgagagaaaagtaattcacacttaatgtgttgttacttaagagatttgccggataaaataaaatcaaattaaatcattgaaaaggcaggcttagacccccttaaaaacaccgttagttgcctaccataatttgag

SEQ ID NO: 16163 - DNA, 387 bp, Homo sapiens
  misc_feature 8, 71, 74, 80, 126, 158, 165, 166, 169, 195, 199, 227, 237,249, 252, 259, 272, 301, 304, 313, 314, 315, 319, 324, 330,333, 350, 355, 361: n = A,T,C or G
aaaaaaanggggggggccccgggaaaaatatttggggggggaaaaaaacccttttccccccaaaacccccnggncccggngggttttgggggggccccgggggggccccccccggggccccccccncggggggggggccccccaaaggggggtttttnaaaaccnnttngggggggaaaaaaaaaaaaatttttngggnttttttttttgggggggggggggggggnaaaaaaaaangcccctttttcnccnaaaaaangggggtttttttntccccccccccaaacccaaaaaaaaaaanagnttttttctnnntttnggggncccccnccntttggggtttttttttnggggncccccncctttttgggggcccccggaaaaaaa

SEQ ID NO: 16164 - DNA, 180 bp, Homo sapiens
  misc_feature 78: n = A,T,C or G
tcccgccccccttgacgagcatccacaaaaatcgacgcttcaagtcagaggttggcggaaacccgacagggactatanaaggataccaggccgtttccccctggaagcttcccttcgttgcgctcttccttgtttccgacccttgccgctttacccggatacctgtcccgcccttttctt

SEQ ID NO: 16165 - DNA, 122 bp, Homo sapiens
actccaccgcggtggcggccgagtactgaagtatttattgataaagtgatgtgatatttgagacttgcatcaaaggaacccagtggagggtggggcataggtgaggtttaggtgaaataaga

SEQ ID NO: 16166 - DNA, 552 bp, Homo sapiens
agcctcgttgcggccatcgccctgccggaccgcgcctcaggctcccccagccggaagaattaacctcgagtctgcacgcttttaagaacaaggcctttaaaaaatccaaagtgtgtggagtttgcaaacaaattattgacggtcaaggtatttcatgccgagcctgcaagtattcctgccacaagaaatgtgaagccaaggtggtgattccctgcggtgtgcaagtccgactggaacaggctccagggagttccacgctgtccagttctctctgccgtgataaacctctgtggcccgtcatcctgagtcccaccatggaggagggccatgggctggacctcacttacatcacggagcgcatcatcgctgtgtccttccctgccggctgctctgaggagtcctacctgcacaacctacaggaggtcacgcgcatgctcaagtccaagcacggggacaactacctggtattaaacctttcagaaaagagatatgaccttacgaagcttaacccaaagatcatggatgtgggctggccagagctccacgcaccgc

SEQ ID NO: 16167 - DNA, 540 bp, Homo sapiens
  misc_feature 384: n = A,T,C or G
acgtctgtgagagggtgtgttccgggtagaggtggagagctacgctgaagaggacgcctcctgcctgctgcggctatgtcatcgcctgaggcctcgtcccatcttccgtgaggtcataccactgggtccagcctttggcaagttcttcagatgccggagcaaccaatactttgccaaggagccctttgtctttggacaggaagccgccactgttcttcacggcaacgtcgagcgttctcctctgcacttctggtaaccgaaacactgaaatcaaagctttgatcaaacactgggatttaatgttttctttgacacgtgtgttttcctccttcctgaccgcctcttgtctggtaataaatacatgccgggacatagggggtcagnagcccgtcttcagagaaggcaatgaggtttcttgcaggcatgcacgaccaccgataagcttgtttctcttgcgagctgtgccgggatggtcaagctggatctgccccagtgggagactgtcccaagggtcggacctccggcccgctctagaactag

SEQ ID NO: 16168 - DNA, 420 bp, Homo sapiens
accatccacacctatggcctctatgtgaacttcaagaactttgtctgcaacatcggggaagatgcagagttgtttatggccctctacgacccagaccagtccacttttatcagtgagaactatctaattcgttggggcagtaacgggatgcccaaggaaatagagaagctcaataacctccaagcagtgtttacagaccttagcagcatggacctcatccggccccgcgtcagccttgtgtgccagattgtccgcgtgggccatatggagctgaaggaaggcaagaagcacacctgtggactccgaagaccttttggagtggcagtgatggatattactgatatcatacatgggaaggtggatgatgaagaaaagcagcattttattccctttcagcaaattgcgatggaaacctacatc

SEQ ID NO: 16169 - DNA, 116 bp, Homo sapiens
  misc_feature 65, 82, 88: n = A,T,C or G
acggtgatgatgatgatgatgatgatgatgatgaagatgaagaagatggagaagaagagaatcanaagcgatattatcttanacaganaaaagctactgtttactatcaggctcca

SEQ ID NO: 16170 - DNA, 361 bp, Homo sapiens
  misc_feature 255, 257, 258, 271, 283, 324, 334, 335, 347: n = A,T,C or G
acctgtggagcgaaggagaggttgtcatctgggcccctgtttcaccagtcaaaacctatggagcagtcagaagcccgaagcatccaagcccagtggccaggaagcttctgaaataaacggcactgggttgggaaggatgagaaagccaagacaggtgggccaggttctccgaacatggggcaacagtgacctgggcaaaagcctgggaactgagccgggttgataaggcccacaatttacttgccacccaccctntnnagtattttacacngggggcagaccnttaaggccagtggggaaccttgaggaactggaagggccgtngtgggcaaannccgggaatgggntttttttaaaaaaa

SEQ ID NO: 16171 - DNA, 636 bp, Homo sapiens
  misc_feature 472, 608: n = A,T,C or G
gctccccgcggtggcggccgccgggcaggtactatatatcctcaatatgcatgtctgcccatcacatcaaatgttctgtcaacaagatgtttggtaatttttttttaaaaaggttggaaaattaattatagaaggttctatactgtttttttaattaagaaactaaatctagcaggctaaaggttaattgtagtgattttttttcacatagatatctttctatgacctagttagttactgcaattcagaattagttcacattgcataaagaattacttgttgtaagcaaaatgctgaaactaccaaaccagtggatgaagaccactaagaactttgcacataatcatacaatcttttgaaaatattttgcaaatatgtgtttagacaataagatggactagagttcgacaaaatgatttctttatttaaattttgtataagtattttcttcgacactttcaaattatattgngttcttgatatatgctgtatatttatttgttagtgcatgtgtttttaatttacatgaaaacatgagttaggagaaattacaggttgaaagatgaaatgcctgtatgtgctctgaagaaatggtaattccagattgngcagggggaaacaaatctattttggttg

SEQ ID NO: 16172 - DNA, 421 bp, Homo sapiens
  misc_feature 328, 413: n = A,T,C or G
acatctatgattcagcttttcatcctgacactggtgagaagatgattttgataggaagaatgtcagtccaggttcccatgaacatgaccatcacaggttgtatgatgacgttttacaggactacgccggctgtgctgttctggcagtggattaaccagtccttcaatgccgtcgtcaattacaccaacagaagtggagatgcacccctcactgtcaatgagttgggaacagcttacgtttctgcaacaactggtgccgtagcaacagctctaggactcaatgcattgaccaagcatgtctcaccactgataggacgttttgttccctntgctgccgtagctgctgctaattgcattaatattccattaatgaggcaaagggaactcaaaattggcattcccgtcacggatganaatgggaa

SEQ ID NO: 16173 - DNA, 386 bp, Homo sapiens
  misc_feature 326, 330: n = A,T,C or G
ccgcggtggcggcccgaggtacaccgaacaaagagacagggtcatttgtaacctgatgcgtccaccctactgctgtgtccggtttccattggctggaacgggacctcatattctgtatttgtcctgattgggaagcaacttaaaactttttaaaagaggcgaaggcagaagagaacaaaggaaggagaaagtaacttgtggaatggtgagaaaggcatgaggcgaattctcagccatgacaaggctgaaggccagcaggaacaggctctagcgaaatgggtgctgtgtccccttcctgcatgtggcagaaagttgcaaaaggactntttnttgatccctgaggcagatggactgggagcccctctgaccaaccttctttttttttt

SEQ ID NO: 16174 - DNA, 342 bp, Homo sapiens
  misc_feature 17, 18, 102, 104, 106, 116, 118, 119, 129, 134, 146, 147,152, 154, 162, 167, 186, 188, 221, 224, 234, 237, 245, 313,321, 324: n = A,T,C or G
tattggggcgaattggnnactccaccgcggtggccgaccggccgcccgggcaggtaaaaaaaaaaaaaaaaaaaaaaaaaaaaaaaaaaaaaaaaagcttgnananattgaaaatngnncctagatggnaaaanaactggaagaannaaatntngagttcanaactnatgaaaatgctgtggcagntntgtcaaaaaaacaaaagcaaatttgcaacacanatntgtagaactnttnttgaattntacagcaggagcaagcggtggtgcttacggtagccaaatgctaggaggcatgggtttgtgtaaatatnactttagngtntttttttttaagctaacc

SEQ ID NO: 16175 - DNA, 447 bp, Homo sapiens
  misc_feature 7: n = A,T,C or G
ccgggcnggtacttgtcaaacacctttctcaaatgagacacacttcgtgttccaaagatggtgataaacttttcttcatctgtcccccatttaagttctccagcctgaaataaagcctgagcatcttgttcaacttgagcttcatcaattccagcatcagggtctctgttagcctgaaggagaaccaccaacatccgctggtagtacatctggggccactctctgggcactggcgtggcgacaaatctggtgcggcgcctctgtgagcgagagacgcctccagatgcccttatattggaatctccattcactaatatccgcgaagaagctaagagccatccattttcagtgatatatcgatacttccctgggtttgactggttcttccttgatcctattacaagtagtggaattaaatttgcaaatgatgaaaacgtgaagcacatc

SEQ ID NO: 16176 - DNA, 329 bp, Homo sapiens
actggtcttcaaaggtggagttttgaggaatgtcaagaggatcccagggctgtgtcagggtcatctttgagcactgcttggtggcttggtcaatctgaaacatcactccatccttatacagcaaaatatattcaaataatctcctgcaggggatcagcgccttcctctcgtccagcacccgcacgcgctggttgagcccgtcgtaggagagcagggcgcggctgttgcgcccgctactttgctggttaaatttgcccacagaaccctctaaatccccttgtaaatttaactgttagtccaaagaggaacagctcttttggacactagga

SEQ ID NO: 16177 - DNA, 574 bp, Homo sapiens
acagaaataaaattcaaaagatactaaactgggagtcaggacacctgagtcttaccctcagctctctgatgcgactttaagcaaagtcgcttgctctttctggacctcagtttccttgtttgtaaaaacagaaatgatttctaagatcactcagaattgtaaaattctatgaacacttatgaagtctattgagcttgcgtcactgttcactccaatgagtggggataagttgtaagcagaaaaatatcattacttcacatcttttcgttcactatcaacacttaaaaacaaacagccttaataaaaatcaagtccactttgttttctctcttaaacagacaaatcataacgaacagagtccagtgagtccctctgtcgcaacaagttcaggatcactcaagcaggtaaccgcacacaacgcacaatgatgaagagcataaacacaagccataagtatatttttatgtcgctttttcttaggttattgatgcatttccagaatctcttcatttctttgcaataactgaaaaccccagaagaaagacaccatttacattaagaatgtgatcaatgt

SEQ ID NO: 16178 - DNA, 445 bp, Homo sapiens
  misc_feature 207, 342, 376: n = A,T,C or G
accagtagagtggggtgttgttgaagagatacccaaaaatgtggaagcaactttggaactgggtaagaggaagaggttggaacaatttggagggctcagaagaagagagaaaaatgtgggaaagtttggaacttcttagaaacttgttgaatggctttgacaaaaatgctgatagtgatatgaacagtaaggtccaagttgaggcantcgcagatggagttgaggaatttattgggaactggagcaacagtgaccattgtaatgttttagcaaagggattggtggcattttgcccctgccctacagatttctggaattttgaacttgagggagatgatttanggtatccggcagaagaaatttctaagcagcaaancattcaagaggtgacttgggtgttgttaaaggcattcagttttaaaagggaaacagaacataaaggctt

SEQ ID NO: 16179 - DNA, 343 bp, Homo sapiens
cgcccgggcaggtactaacttccaatgggatggtgaggctttggggaggtatatattattagattttgaggatggagccctgatgacgagataagtgcccttctaagaaaagacatgaggcaggtgatctctccaccacgtggatacagcaaggagatggccatctgcaaacaggaagagacatggaatctgccagtgccttgatcttggacttagcttccagaacagtgagaaataaatgttgttcaagccactcagtccgtggtagttacagtagcacgaactagctgagatagaaatgagattcataaagacaatgttaacttcttttcttttttttttt

SEQ ID NO: 16180 - DNA, 397 bp, Homo sapiens
  misc_feature 373: n = A,T,C or G
accttggttcagtccagtaaggtgggacaacccttaagtgggggcttcctggttgtagtagataagagacaaaaggttgcattcttttgagttcttgatcagccttccactgaacacacaatttagtctggctcagtgagtctgcatttttacagaagcgataggggaaaggaagcaatcagctatgcaggtgagcctcagggggatgactgtgaatagaatgggaggcagctttgccctaagcagttcccagcttgactttttcctttagcttggtgattgtggagtctcaagatttgttttcttttcacaatctgaaattcaaagttccctgggtatcctgtattttcatttgcacactttggcgccctantcccagagtcctggagcggcatac

SEQ ID NO: 16181 - DNA, 326 bp, Homo sapiens
  misc_feature 38, 94, 127, 165, 203, 265, 283, 316: n = A,T,C or G
actaacttccaatgggatggtgaggctttggggaggtntatattattagattttgaggatggagccctgatgacgagataagtgcccttctaanaaaagacatgaggcaggtgatctctccaccacntggatacagcaaggagatggccatctgcaaacaggaanagacatggaatctgccagtgccttgatcttggacttancttccagaacagtgagaaataaatgttgttcaagccactcagtccgtggtagttacatgtancacgaactagctgagatngaaatgagattcataaagacaatggttaacttnttttcttttt

SEQ ID NO: 16182 - DNA, 246 bp, Homo sapiens
  misc_feature 116, 245: n = A,T,C or G
ccgctccctgcagtccaccggccaggtgttcctgggtatctacctcatctgtgtggcctactcactgcagcacagcaaggaggaccggctggcgtatcaaggccaggacaccccanaggtgctaatggacatagggctaaggcaagaggtgaccctggagctgcagggggacgggtctgtgtccaatctgacagtgtgtgtggcagcctacactgctgctggggatggaccctggagcctcccant

SEQ ID NO: 16183 - DNA, 506 bp, Homo sapiens
  misc_feature 502: n = A,T,C or G
acttcaatctggcctctcacattattcctgatatcacacctgacccccatgactgtatctctctgatccacctgatattcaccccatttccccatatttccttctttcctgttcctcaccctgatcacgcttgatttattgatggcagttccaccaggcctaatcgccacacaccagcaaagtcaggctatgctatagtactgtctctcctgtgtttgagagctcaagtagggctctcctgggactcagggggagctaattaccttgaaaaaggcatatagcacccataccatgtttctgtttcttggctgggtttgggtttaggtttttggtttgtttcttgcagtgccatgctgaccttaggccattgttgctggggtctcctcagccagaaaccagcctgcttggagccaaggctcctgtgaggtgcctgaaagtgcccccacagctaggagacctaaagcctcttccttttcttcccattgtgttgactgggtttttncagg

SEQ ID NO: 16184 - DNA, 372 bp, Homo sapiens
  misc_feature 1, 18, 114, 162, 184, 274, 283, 292, 297, 298, 302, 340: n = A,T,C or G
naccgcggtggcggccgnccgggctggtactatacttcacaacaatcctaatcctaataccaactatctccctaattgaaaacaaaatactcaaatgggccataaaaaaaaacnaccagcgggagatcattgctcggcacggccccgtctcggcttgttcanagcacacctctcgaaccacctnttccacagactctgtggtggtggtggtggtggtggcaatgctggtggttctctctgtggcttcttcgtagggttcctcagcctcttcctntacctcatnaccatcctnatcgnnctcntcatcatcggcttcttcttcttccacctcagccacttnttcctcctctgctacttctactactttgtctt

SEQ ID NO: 16185 - DNA, 327 bp, Homo sapiens
  misc_feature 25, 29, 32, 38, 40, 42, 45, 50, 51, 52, 55, 58, 59, 67, 68,69, 71, 72, 75, 99, 102, 107, 109, 113, 114, 116, 143, 147,148, 156, 162, 171, 182, 186, 192, 193, 203, 205, 233, 289,324: n = A,T,C or G
ccgcggtggcggccgaggtaccagntttnttntataangngnatnttttnnntcnttnntttatttnnncnnttnatgtttacatttttgattggttanttnttttntnattnntnataacattcgcccaacctttaaagaantaannaatgagtncaccangatggcccnagacccaccanggtntgtggnnataaagagananagtgggcctggaatagcccctgggccanagccccatggtctgacaaacaagaagctagaggaagtatatctggagccagaactngacctagacctagacttggaagcagaggaggacancct

SEQ ID NO: 16186 - DNA, 382 bp, Homo sapiens
  misc_feature 283, 284, 289, 291, 330, 352, 362: n = A,T,C or G
aggcaggtggtgaccccgctcatggtggccgacaccaggtggttgaggtccccgtaggtgggggtggtcagcttcagggtgcggaagcagatgtcatacagggcctcgttatcaatggagtaggtttcatctgtgttttccaccagctggtggaccgagagggtggcgttgtagggctccaccaccgtgtctgacaccctttgggtgagggcatgacgctgaagggtgttcatgatgcgggtcctggggtacttgccccgggccgggccgctctaaaaactanntggantncccccgggcctgcaaggaatttcgattatcaaagcttantcaaatacccgtccaaccttcnaagggggggnccccgggaccccaaactttt

SEQ ID NO: 16187 - DNA, 314 bp, Homo sapiens
  misc_feature 127: n = A,T,C or G
acatccggcttcctttccagaagaaccatgtcgccaggcaagccaaaggacttggcttggtaagtgaggtaaccaccatatgaagaaaccttgtcccccaggtaggaggtgggtgcgacccaggacncgctgtggatggttgcgggcagctcctggagatccgccaccatactgttgctgcctgggttgaaagagacagggatgtccactctgtctgctgtctccaggtgccagcccagcaaatccacaaacttagtccttcgcttatgtgagctgtgacattgattatttactccaaaacagaaacagctggt

SEQ ID NO: 16188 - DNA, 415 bp, Homo sapiens
actagctatgaccaaccgaaacttgtcacccaagtctacagggtaaatttgaatgtttacatctaagattggatccatcttgaaagattcactctcacaatgcagtcgagacactcggtcaaacttcttgccctccgggtcaatatccttcacatcgaaaatatcctcaaacaggatgcacgccatcgcgagggggccacgagagcagcagaaggggtgagagcgcgaccacagttgggagtacatccagaacttcaaaatactacaagcaggttttaagagaatgggtgttgacaaaataattcctgtggacaaattagtaaaaggaaagtttcaggacaattttgaattcgttcagtggttcaagaagtttttcgatgcaaactatgatggaaaagactatgaccctgtggct

SEQ ID NO: 16189 - DNA, 493 bp, Homo sapiens
accgtttattgtcgttacacaaatgaacccagcctctggcttgggcaccgtcccacggaccagcagatgagcatggtcagccgacccctttccccacccccgagtcatgtgcagtcatacactccaggcagaaagtcgcagtatcgaataccggacacaggttcccttggcttggtggtgcatctctgatccacagactggcccacctctcggagtggccaacggagtcgctgaaacgttgtcaaataagcaagtaagtgcaggagcccacggaccagcagatgagcatggtcagccgacccctttccccacccccgagtcatgtgcagtcatacactccaggcagaaagtcgcagtatcgaataccggacacaggttcccttggcttggtggtgcatctctgatccacagactggcccacctctcggagtggccaacggagtcgctgaaacgttgtcaaataagcaagtaagtgcaggagccctgggctggg

SEQ ID NO: 16190 - DNA, 463 bp, Homo sapiens
acttcttcgtttactgtaactcaaatctaacccagcatttctcaatcttgcactatggtcattttggacctggtagttcttcgtcgtggggactctcctgcatattacaggatgtttggcagcactagatgccaaagtcacccactccagtggtgacaatcaaaaatgcctccagacattaccaaaattgcccccagttgagaaccactgatgtcatccaagaggacgaggtccatttaagaaacgtacaggggctggggcatatgcccccagcagcgaggacggcagtcccgagagtgattttcagaaaataaaaaaaaggaccccaggggcaggcgttggtgcccctccccaccccaagacacaccaaatttcaagactttatatataatatatctctgtgccccaaggggaggagagggacacctggcggcatcctggaggggggcccaggcagccccaa

SEQ ID NO: 16191 - DNA, 336 bp, Homo sapiens
  misc_feature 259, 322: n = A,T,C or G
actctgatccacaaagctcttttataaaccaggtttgaggttgtgtgtgtgtgtgtgtgtgtgtgtgtgtgtgtgtgtgtgtggtcagctctgggttaaatggaaagaccacggtcgtggaagaggcagctctgagtccagattcttctgtgatcttgggcaaattccctcactttctgctaggactacaagaacagaatacctcagagactgggcgtcttctgcagcagaaacaccctctcactgtcctggaggccanaaagccgagacaaaggtgtgggcaccgttggtctctcccgaggactctctccttggttcgcanatggcggcttcccc

SEQ ID NO: 16192 - DNA, 483 bp, Homo sapiens
  misc_feature 481: n = A,T,C or G
tcagctctcgaggggcctctgttatgagagcactgattccattcacactggctctgcccctgtgacctcatcacctcccacaggccctgccttcagttaccgtcacctgagggctgaggattttgacaggaatttgggaggacataaacattcaggccttagcaaatgtgttttattttccaactatcatcaattttaaaaaatcagaatcgtgcttggtgtaatcacattatatagaattacatgttcaaagttatatatgttttttggaaatcacattctaattggttggttggttggtttatttatttatttatttttgaggcagagtctcgctctgtggcccaggctggagtgcagtgacatgaacatagctcactctaggcccaacctcctgggctcaagcgatcctcccacctcagtctcctgagttgttgggatgttgggactgcaggtgtgccccaccacgcccagctaattntt

SEQ ID NO: 16193 - DNA, 229 bp, Homo sapiens
tacaaggaccgctctgctttgtaagcaggaaccgcagtcccctgaggagggtgtgtgaagactcgctcatttgagttctttgaaatgggtcccttggtcctgctgtcacattgccttgagctaacggatcatgttcccatcataggccggtccttggggcattgggcaggtgggggctttgtgcctctgtggctgctgctgtctgttctctaacaggcagaactgaggg

SEQ ID NO: 16194 - DNA, 354 bp, Homo sapiens
cgcccgggcaggtactgattggtccattttacagagtgctgattggtgcatttacaatcctttagctagacacagagcgctgactggtgtgtttttacagagtgctgattggtgcatttataatcctttagctagacagaaaagttctccaagtccccactcgacccaggaagtccagctggcttcacctctcacaagcaacgttatgtttctcatcttctaacagagcgttctgtgaaggtctgagatgctcctacatttctagtctcatggaatctcgtcttttttcaatcgtaggtaaaagtgtcagaagcctaaaggtgagccagtggaaaagcctgaagacccctgcaa

SEQ ID NO: 16195 - DNA, 422 bp, Homo sapiens
  misc_feature 20, 27, 30, 49, 88, 97, 109, 123, 135, 138, 165, 169, 177,183, 188, 200, 201, 213, 216, 218, 264, 272, 273, 288, 308,309, 355, 376, 379, 397: n = A,T,C or G
ctccactctggctgggcggnaaagcangancagcactgctgggctgganacggcgggagccgctgctctccggctgagggaatcaganacagctccntccctagtggancgcaggggaggcanaagtcatgacangcnaggtgggttctgaggttcacctagaantcantgacccanacgtcntttcncaagaggaagcnnatagtccttcanatngnggacagggcagctatgaaacaattggacccttgagtgaaggagatncacatgannagatatttgtacgtnataatttgaaaaacaggaanngttctacaagacagtgattccgaaacagaggacacaaatgcctctncagagaaaactacctatgacngtnccgaggaggaaaataaanagaatttatatgctgggaaaaaaaa

SEQ ID NO: 16196 - DNA, 442 bp, Homo sapiens
  misc_feature 36, 37, 40, 42, 45, 47, 48, 55, 62, 63, 65, 68, 70, 73, 75,79, 82, 97, 104, 109, 118, 119, 124, 127, 136, 142, 144,146, 155, 159, 163, 166, 169, 175, 176, 179, 181, 182, 186: n = A,T,C or G
ctgattggagctccccgcggtggcggccgatgtacnnatnanacntnncgcaggnctgttgnnanatnanccnancccncanagatcacctgaactnaaatggngatgncggaggacnncactnctnccgaattanatgccngntncatagcccncttngccnccncangaggcnnctnannctgngaagtagcctatctatggaagagacttttgtttgtgtttaattagggctatgagagatttcaggtgagaagttaaacctgagacagagagcaagtaagctgtcccttttaactgtttttctttggtctttagtcacccagttgcacactggcattttcttgctgcaagcttttttaaatttctgaactcaaggcagtggcagaagatgtcagtcacctctgataactggaaaaatgggtctcttgggccctggcac

SEQ ID NO: 16197 - DNA, 318 bp, Homo sapiens
  misc_feature 1, 2, 32, 34, 39, 45, 49, 51, 53, 55, 57, 58, 60, 61, 62,63, 65, 75, 76, 77, 78, 83, 84, 88, 112, 118, 120, 153,157, 165, 223: n = A,T,C or G
nnattggagctccccgcggtggcggccgaggnanaagcntcatgntttntnangntnntnnnntntggatttttnnnntgctnncttncaaaatgggaccttggttgggttnttgttntncctggcaacacatctggctgttccagccaccancganagcccaanactggtaactgtccacaggcaacagggagtcatgtcgcggttctccaggagcacccanagtctgcaccacagacacgtccaggtaactggccataggctggtaggttcccggatatcccggatagaaggcaaactcagtggggcggctggggt

SEQ ID NO: 16198 - DNA, 339 bp, Homo sapiens
  misc_feature 95, 171: n = A,T,C or G
cgcccagctcgcccagcgtccgccgcgcctcggccaaggcttcaacggaccacaccaaaatgccatctcaaatggaacacgccatggaaaccatngatgtttacatttcacaaattcgctggggataaaggctacttaacaaaggaggacctgagagtacatatccataanaatggctaaaattaaaaaggctgaaaatagcacatgttggtgaggatataaagcacttggaagtcttatacttgtaggaatgaaaaatggtattgctcctttgaaaatctaacagtttcttaaaggttaaacataacacaaatcagatagacagtcattccattccta

SEQ ID NO: 16199 - DNA, 334 bp, Homo sapiens
  misc_feature 321: n = A,T,C or G
agtacttctagaattaattaaggcgggtatcagaaatacacgtggataaagaataatcactcatcatcttaccataacagtatgagagtctttctttttaccccttgcaggcttataaaagcattaagacatgagagaaaaaaaattgaggaataagaaaagtacaagtgataggacttagaaaagaaaaacaggccgggtgcggtggctcacgcctgtaatcccagcactttgggaggccaaggtgggtggatcacgaggtcaggagatcgagaccatcctggctaacatggtgaaaccccgtctctactaaaaattccnaaaaaaaaaaaaa

SEQ ID NO: 16200 - DNA, 381 bp, Homo sapiens
  misc_feature 365, 366, 367, 368: n = A,T,C or G
agtacttctagaattaattaaggcgggggccaaaacaggaaaagaacaaccttgcagaagatggtgttgttgcagaaagcagagaaaacgtgtttttagaagaaagttacagttttccttgcagagagaagttatttcatatccaaaataataataacatttatgaaagaggagcaattagagaacaagaaagagctattgagtattacaaattaaatactggaatttaaaaaatgttgaagttgtatctctgaaaagtagagtaaaaaagatggagttaaaaagcaggagagaaaagaaatatgaaaaattaaaatgtgatctaaaaaattcaacattgctattatagtagatgcagaaacccnnnnaaaaaaaaaaaaa

SEQ ID NO: 16201 - DNA, 458 bp, Homo sapiens
agtacttctagaattaattaaggcgggatgtcattgacattcgcagaatactcaacagagaatacacattctctttaagtccccatgaaatatatatcaagataagctgtatcttgggccataaaggaagtcttagcaaatttaaagaattcaaatcatacagagtatgttctccaatcacaatggaatcaaattagatattaataacaaagataacagaaaaacctccaaatatgaaacctgaacaacatacttctaatactcatgagtcaaaaaggaagtttcaagggaaatttaaaaatacatggaactgaatgaagaaaaaatacaccatataagaactcaagggacatagctaaagcagtattaagaggaaaatttatagcactaaaaatgcatattttagaaaagaggacaagtctcaaaaaccctaagctctcatctcacaaatgtagaaa

SEQ ID NO: 16202 - DNA, 380 bp, Homo sapiens
agtacttctagaattaattaaggcgggctactcgagtggctgaggcataagaatcacttgaacccaggaggccgaggttgcagtgagctgagatcccatcactgcactccagcctgggtgacagagtgagactccatctcaaaaaaaaaagataataaaaataataattttttttataaaatactaactgtattttgaaattagaagaaaaagcaaaaaatgaacagtaccagactattttatgattaagagtcaataaatggtagaaacaagaacaaatattagaaactttcatggaagacagcatttgcatcctaaggatgtcacaggatttggactactgccgggcagatgttacaggttgggaagcagaatgcaca

SEQ ID NO: 16203 - DNA, 430 bp, Homo sapiens
agtacttctagaattaattaaggcgggcggatcacgaggtcaggagatcgagaccatactggctaacacggtgaaaccctgtctctactaaaaaatacaaaaaattagccgggcgtggcagtgggtgcctgtagtcccagctactcgggaggctgaggcaggagaatggtatgaacccaggaggcggaggttgcagtgagctgaggtcgcgccactgcactccagcctgggagacagagcgagacgccgtctcaaaaaaaaaaaaaaaagacgtaatgccctgggaaaggactgtaaagaagacaattaaaaatcaacaagtgcccagctgtttataatagcctacaaagtgattcaaagacaatttgttaccttacctctctaccattacaaagtgaccaaaattaaatgcaaccatccttttaacagg

SEQ ID NO: 16204 - DNA, 421 bp, Homo sapiens
  misc_feature 28, 29, 31, 32, 33, 43, 44, 46, 48, 50, 51, 52, 53, 58, 59,60, 61, 63, 66, 72, 73, 91, 100, 106, 109, 120, 136, 137,138, 139, 144, 153, 154, 162, 165, 166, 167, 168, 170, 172,174, 175, 177, 180, 194, 202, 221, 226, 232, 269, 270: n = A,T,C or G
  misc_feature 275, 277, 288, 296, 297, 309, 316, 330: n = A,T,C or G
agtacttctagaattaattaaggcgggnncnnnaaataggctnngnantnnnnagggnnnncnttntatganngagggacaagaatctggngacacctgnacgagnctntggtacacccntggatgcctgtcagannnntcctngctggatgnntaaaacanggnnnncntntnntnatngcctggacactacntgctgganattcaccacatcctgtacntgccnaagagnaaacacgtaaaaatcgcataaatgtttttacattccnnaaaantngggggaccggncgcactgnntcacgcctgttntcccccnctttgggaggccgntgtgggtggatcactcacttgaagtcaggagttcgagaccagcccgggccaacatggtgaaagcccgtctctactaaaaaaaaaaaaaaaa

SEQ ID NO: 16205 - DNA, 488 bp, Homo sapiens
agtacttctagaattaattaaggcggggggagccgacagagaacttctgggccagagtacctggtcacttcgccagacctgtctgaatgccaggacttatcctgtcaataatgcctgagcagagaaaagagctctggccttagatgactgggctgggggaatgtagagaatgggatcaagcatcaaagtgctcttgggagactaaggggctgtcctctgataccacccccaacccttgtccctgtgaagctgaatgggaacaaagaaaagatcctcaaatcagtcaggagatctgggcaaggcagaaaataacttctaagatctttggttctaacattctacgttacaattacattctactctacatttacaatttgcatgatatagaactgctgagtctactacattgaaagtagtgcctggtaacccccactgctggaaaattaggaccaaaaaacagagcagagggagccaagtaaaagaccaca

SEQ ID NO: 16206 - DNA, 425 bp, Homo sapiens
  misc_feature 413: n = A,T,C or G
agtacttctagaattaattaaggctggtctcgaactcctggtctcaagagatccacccgccttgaactcccaaagtgcttggattacaggcgtgagccaccgtgcttggccttgaatgattatccttatcactaaattttgcacacttcttagttatttctttgaaatacattccaatgaatagaaattcctaatcaaaaggtacgcactttttgaagacatttggttcatatttccaaattgccatccatatattttctcctaattaacactcccaccaatggtgtatctgagagtagaattccacattccgtctctaacaatgcatattataatcctctctttagtctttgccaatttggtagattaaaaatggtacttgttctgaattgcatttctttccatttactcangttttttttttt

SEQ ID NO: 16207 - DNA, 433 bp, Homo sapiens
aaagctgggtccgggccccccctcgagagtacttctagaattaattaaggcgggaggaagttagcactgagaggagagagtttattgagataaaaagataaagacaatcctggtacttcttctcttatgaaattcagatcctttccccacttttaaatgggatgattggtttctctgctgttgagttgtttgagctccttgtatatatactgggtatcagcccctttttgaatgaggagtttgcacatatcttcttccatttaacgggttgtctcttcgctctgttgattgtttcctttgctgggcagtagctgttgagtgtgatataagtcccatttgctcaacatcactaatcaggaaagtgcaaatcaaaaccacagtgagatagcatctcaccccagttagcatggctattatcaaaaagacaaaaaat

SEQ ID NO: 16208 - DNA, 281 bp, Homo sapiens
agtacttctagaattaattaaggcgggagaaaggataaattgaaacaaaaattccaagtgataattctaaatacttatttccttttccgcacaccccctctttcccttccaaaagctttcctcaggtgtggaatagactaaaggatagatggggccgggcgcggtggctcatgcctgtaattccagcactttgggaggccgaggtgggcagattacgaggtcaagagatcgagaccatcctggccaacatggtgaaaccccatctctactaaaaatacaaa

SEQ ID NO: 16209 - DNA, 429 bp, Homo sapiens
agtacttctagaattaattaaggcgggtggatgacttaaggccaggagtttgaggctagcctggccaacagtgaaaccccatctctattaaaaatacaaaaactagccaggtgtggtggcagacttctatctggcaaatttctattaatttctcaaggccaggttcaaacatcacttcctctgagggagctttcctctctctcaatctatctgctgaacttgtctttcaaactaaattgtgggcagctgtcccactccaatcagttctagcactggcttaaatctctgctttcaccaaaagctttaaaaaataaaaataggccgggcgcggtggcttggcctgtaaccccagcactttgggaggccgaggcgggcagatcagctgaagtcaggagtttgagaccagcctaaccaacatggagaaacccg

SEQ ID NO: 16210 - DNA, 243 bp, Homo sapiens
  misc_feature 243: n = A,T,C or G
agtacttctagaattaattaaggcgggggaaagggttaaagaaagttatcgtgcaaaaaatgaaaggaattaaaaataaaagattagaatgtgatgctaaaaaaaaagacatcaactgaaaataaacggatgcaaaaaaaagttttctatcaataaaaacaagaaagaacaggaatagctatagttgtaacagccaaaatagattttaatatgaaaaaaaaaaaaaaaaaaaaaaaaaaaaan

SEQ ID NO: 16211 - DNA, 386 bp, Homo sapiens
agtacttctagaattaattaaggcgggagtgggcatagagtccgagtccacaccattagctaccatatacacattgcctcatccaagggccaaatggagcagggtgcctccacactgaaagattagcaccactggtagggcgcggtggctcacacctgtaatctcattactttgggaggccaaggcaggtggatcacgaagtcaggagatcaagaccatcctggccaacatggtgaaacctcatctctactaaaaatacaaaaattagctgggcgtggtggcatgcgcctgtagtcccagctactcaggagactgaagcaggagaatcgcttgaacccgaggcggaggttgcagtgagctgagattctgctcactgtactccagcc

SEQ ID NO: 16212 - DNA, 425 bp, Homo sapiens
  misc_feature 28, 30, 35, 40, 41, 42, 43, 44, 49, 50, 51, 52, 62, 64, 65,72, 73, 77, 90, 91, 93, 94, 97, 101, 102, 103, 105, 116,119, 123, 130, 138, 155, 158, 160, 178, 195, 273, 298, 304,316, 320, 321, 322, 324, 330, 331, 332, 333, 334, 335: n = A,T,C or G
  misc_feature 337, 342, 344, 345, 361, 366, 367, 368, 375, 377, 379, 380,387, 392, 402, 403, 407, 409, 422, 423: n = A,T,C or G
agtacttctagaattaattaaggcgggngnggagngaaannnnnggatnnnnagcactcagngnngttttcnngagncaatcacatgctnnanngtnagtnnncngacagaacgcngtnaatnccacatnttttatantcagagggcaacaaatnaantnggcatggtggtgcaggcntgtctgccagctactcntgaggctgggacaggagaatcgcttgaacccaggaggcggaggttgcagtgagccgagatcgtgccattgcactctancctgggcaacaggagcaaaactcantctcangaaaatgaaaanttannnanaaaaannnnnntnaaatngnnccccccccgggggggnaaaannnttccccntntnnggggggnaaaancccccccccnngggngntttttaaaaaaanntt

SEQ ID NO: 16213 - DNA, 507 bp, Homo sapiens
  misc_feature 418: n = A,T,C or G
agtacttctagaattaattaaggcgggaggatcacttgagcccaggagtttgaaaccagcatgggcaacagagtgagatctgtctttacaaacaagtcaaaacatttttaaaaagaaagatgtaattctttgctcaaacccaagccactataattttaaaaaacattccaaatggaaaacattcattgatttattaaaaataaagactaggctttccccccacccccaatatgatatattctgttcatttcattaaggaatgatggccatgcttgtgctctccctttagtctaaatcagaatcaagcaactgtctctttaaaaaccccatgatattcttctgagtttagccctattttgaaacggtcccttgacaacctttatttattactgtacttggactttaggagacagattangaaggagacttggtagcaaagaaaaattagttaataactttggagcaaattctagtcaccgaaatcccagtgactagcctaatataatt

SEQ ID NO: 16214 - DNA, 416 bp, Homo sapiens
agtacttctagaattaattaaggcggggggaaaaggaattagagaaggtagtctagagacagtgagaagacttacctgaaaaacaaggcttgcttcctgtaaatcattatttaccaggagactgcgcaggaagagaggaaacaacatgagcaaaggcatggcttcagttctcatttgtgtgtaaattaacaccacatggaaatgattgctgatgatgatgttcattctatcactttgtgacttagtgttctctttataaaatcctttacaacatcattgctggcattgctgttcgtctttcatatttccttagcccaaataagaactgataacagtatattgcaagtcctaccacatttttaaggatacatagccatcacatttcaaggaatctatcttatagaaatagcagcatg

SEQ ID NO: 16215 - DNA, 328 bp, Homo sapiens
agtacttctagaattaattaaggcggggctaacccttagcgttattgtgagaatacatgagctaatgcatgtaaaatgactatctgcttaaaaatagaaaaaatcatataatggtggttattaatgaaatgttagctattttccctgctatagctcatgtattacctaatggttttacataaaacatattaccataagattagaaaaaacttttttaaaatttttgtacagtttgtaatgtgcaattattaaaaatgttttcagcagtgcaaatgaactccttagggaacactactgtgtattacaaacatattaaaaataaaatgat

SEQ ID NO: 16216 - DNA, 433 bp, Homo sapiens
  misc_feature 44, 224, 253, 272: n = A,T,C or G
agtacttctagaattaattaaggcgggagtaaacacttgagctnaggagtttaagaccagcctgggcaacttagcgagaccccgtttctacaaaaaaaatttaaaattagctaggcatggtggcacacacctgtggtcccagctacccaggaggctgaggcaggaggatcgcttaagcccagaaggtggagactgcagtgagccataatcacactattgcactncagcctgggtgacagtgagaccctgtctnaagaaaaataaaaacacanaaagaccttttgatgtgcgtattcactgctaaaggttcaatattaaagtattgcaaatcctttaatcttcagcaatccctttctctgcattttcaaaacactggcatctgttacaaagtattaaaagcacaaagcgcacggtcagaattgggattcaaacc

SEQ ID NO: 16217 - DNA, 266 bp, Homo sapiens
  misc_feature 134, 168, 212, 220, 243, 254: n = A,T,C or G
agtacttctagaattaattaaggcggggtaagttttaaatctaagtttgacttcaaagcctcgttcttaactgtaagccaatactgtctcattttcatgctgttccatgcaatcaaccctcccactgtggcctnctaaagtgctggaattacagcttgaaccaccatncccatccttggtctttaactggatattgttgatgctgactatanagtatcangcacggtggaaagttaattggantggtgatctcnaaaaaggatatt

SEQ ID NO: 16218 - DNA, 416 bp, Homo sapiens
  misc_feature 31, 37, 39, 42, 48, 55, 74, 77, 80, 87, 97, 123, 126, 132,134, 140, 142, 151, 160, 168, 177, 180, 187, 192, 198, 202,213, 217, 228, 238, 240, 242, 245, 247, 251, 255, 280, 282,284, 328, 342, 353, 360, 362, 386: n = A,T,C or G
agtacttctagaattaattaagggcggggantaagangncangatccngttgatnggaacaattcaatttgctnacnttnaacattncaccttaatntggaatttaccattggggaaatcatnatnatttananaaaatncngtttttatnttaaaagcnaaaacccnaaacagacnttnaaaagcnttacnaatgtnttgntaaaaatcggnttgnatttattgatngtaaaatacntnanatntncctnaagnaaaccattcattttcttttcaaatntntnaattaatctgggagtggctaacatcttccactattcagtctttnaacccatgaacatnttaaaccctgntttttananctctttttgtgtctttcaacaaanttttaagtcttgccataggttttattaaat

SEQ ID NO: 16219 - DNA, 571 bp, Homo sapiens
agtacttctagaattaattaaggcgggagttctgaacattatttaaactcgatgttaacatgctgtagataataacatatccacagaacagaagctaggtcttccattggccataacatatgcctctaaatgccctcccccctaccaaagtagcatccagaggtatgtgctattacttgagagatcattctgcaatttaaaatttaaactcgacaaattattaataccataaacatttcagtgtcaaacactgaagatgcaatgataacacccggctatcctgctcaggtagctcacaatctgaagggtagatggtggtgggagcagagcagttaacagataaaatgaaaagtagtaagtggagctcttatttgttgctggtgggaatgcaaaatggtacagccacttcagaagacagtttggaagtttctggcaaaactaagtatactcttaccataagatccagcaagcatgctccttggtatttatccaaaggagccgaaaacttacatccacacaaaaacttccactcagacatttccagtagctttgttcataactgccaaaacat

SEQ ID NO: 16220 - DNA, 275 bp, Homo sapiens
agtacttctagaattaattaaggcgggaactgaaaaaagaaatgaaggtatgcttacatgggaagtattttaacacaacaggtaatttttgagtgctcattatgtccaaacactgatgagcacttagatcaaagatattattcttgtcaacaagaaacttacttagggtctagctgttgaaaagataacaggaaatttagagtctagctgttgaaaaaggaaaataagataattcatgaataattaatgagggaaaaaaaaaaaaaaaaaaaaaa

SEQ ID NO: 16221 - DNA, 434 bp, Homo sapiens
agtacttctagaattaattaaggcggggggcaggggcagagagtagtataaggaaaaagaaattagtgattcctaattgtcttaatggatggctatcataaagctactattattaatgcaacaaattattttaaaacttaaaacacttatttcaaagtcaatgatgggacaaacaggtgtaaaattacctagagcaaaaattcatccttctcatcatgtaattaacattcttggtgcttatgatgatttcaatcttcgtctactgtctttaaatgtggaaatatttatgcaagaaagccctgagaggctgggtgcggtggctcacacctgtaatcctatcacttagggaggccaaggccagcacatcccctgaggtcaggagttcgagaccagcctggccaacatggggaaaccccatctctactaaaaataca

SEQ ID NO: 16222 - DNA, 460 bp, Homo sapiens
aaagctgggtccgggccccccctcgagagtacttctagaattaattaaggcgggggaagtctatacaagaatattaaggccctgtgcgtgagcatgtctatagttaaagacttaatgagaaagcatcaaattgtggtgcaaacagctgaaagtagaagtaaatcagaacgtaataagatgcaactttggaggagctcaaagcaacagatacgtttttatccaaaaaggagtaaaacaaaaaaatcgtcaacggcagttccttcagataatcaacagatgattcatttgaaaaccataattaactaggttgtttgtaaaataacttttttcaatttatactttttaatgtttattaaattacttttctctatagatatgcagataagatgttttaaatgtgtaagtggtataaatgtcccatgtgtcttttattctagagcataagaaaagatgggaagct

SEQ ID NO: 16223 - DNA, 405 bp, Homo sapiens
agtacttctagaattaattaaggggggagaagaaaaaaatcataaagattaaatactgaagcatcactgatactaaaatatgtttcccaccatacaaatgatgttgctttaaatgtcacctaaaactatgcataccatggaatattctgcttataaaaatttcctcctttccatgaagcgtatgctctatctcaacttgttaactacatttcttgttgaggtttagtgaaaaatatttttaactgacaaaatttattaggattccagaaagcagaccaccaaaggtaaaatctcatctggaaacagtctaaaagaaaaaccatttattcaagaaataaaaacaaaaacaaaacagaaaggggagccaagcacactaaagcattaatttcataaagtcaaaaatat

SEQ ID NO: 16224 - DNA, 391 bp, Homo sapiens
  misc_feature 308, 365, 369: n = A,T,C or G
agtacttctagaattaattaaggcgggagattctacatataagccatgtttagatgataaaaatattgataattgtaaacaagtgtatattaataaatttaaaatattcttaggatttcccaaaatagagttagcatattgtacttttccaacagcctatgaatcctgactttaaaatttgctaatcatatggtaaaataatttaatcctctttttctcttactcatcaaagcacataaataaatagcattttattcacaaaacacattacaaattataacatattgaactaaggctaaatgaagcanttatttagtgaccgacatcaggacacttcattggtcaggaaacaaggagcataaatntcanccatgttaaattgtaatttgaa

SEQ ID NO: 16225 - DNA, 347 bp, Homo sapiens
ctcgagagtacttctagaattaattaaggcgagatcctgccattgtactccagcctgggtgacagagtgagactctgtctcaaaaacaaacaaaaacaaaagataaactgttctacacatacaacacacaaacttagaatgatgaatttccagtaggattttgaagttagaggagaaaattaaagaaatagtctttagaactgccagcccttatgtttctccaattgatggcattgagtaatagagcaagatcccagcattagtcattgtgtgtctgtaacatatgtacaacagttaatatattggatatttaactgtagctcacaagagggaagatttataatttg

SEQ ID NO: 16226 - DNA, 381 bp, Homo sapiens
  misc_feature 102, 300, 364: n = A,T,C or G
agtacttctagaattaattaagggggaaacttaaaaatatctatatatttgtaatacaaaatacagaaaataaactcttttggtaggtaataatagaaagtncagtaatttttaaaccagtgcactcctaaattatcagtggatcaaagaaagaaattacaagataaatttaatacttaagattaatgaaaacaaaaacttaacataccaaaactcatgaaatgcagctaaagctgtgcttggaggaaaatttatagcttataaacatctatattaaaaaaaatatatatcgaatcagtnatttaaccttctaccttaagaaattagaaaaagaagagtcaactcaacccaaagcaagtaaaanaaaaaaaaaaaaaaaaa

SEQ ID NO: 16227 - DNA, 418 bp, Homo sapiens
  misc_feature 397: n = A,T,C or G
agtacttctagaattaattaaggtgggaaaaggaactgtaggttaattagtttaggaaataaatggattaaataaacttaaaagagattctttactggagggcttctaagaaagcctttaatattcttatgatcctgatttaatatcctggtatatctgtgcatcttgaagacagagacaggataagcagtattcccccaactgttgtgtcgagggagccctttttacagtgagcatttcatggaaccactgtggtttcaaaaaaaccacctcctcaaaacgcactttgggagatgattctattcaagaaatatctgggagtccatgatacagctggagatggaattcgcctttcattctgtcagtggtgagtgaggacctgacctgcatgcgtcangccctgggcaagggctttgct

SEQ ID NO: 16228 - DNA, 302 bp, Homo sapiens
  misc_feature 33, 40, 44, 52, 88, 99, 101, 124, 130, 132, 133, 142, 171,203, 205: n = A,T,C or G
agtacttctagaattaattaaggcgggctgacnaaggccncttntaaacccnacttaaacaaatggctccttaaaaataagagataanaaaataaattnangctgggcgtgatccacctgcctnggcctncnnaagcgctangattacaagcgtgagccaccgcgcctggncaatgctgctgattttgatcatcctacctatntntatctttgaatccagatcattctctcctaacttttgccctaaaaacacctttaaaaatttaccttgagcaaccaaagccatgtactggtgatgtttg

SEQ ID NO: 16229 - DNA, 443 bp, Homo sapiens
agtacttctagaattaattaaggcggggcttcccgggatcagccgggaacaaccgactcccgggcgaaggaaacttttatctgggaggagagaagaagaaatgagatcaggcggtttagagcaggaggatttcaggtctttgggctccctcctgacgttgatccttgggctgtggggcttttccttacctctgttacaagacagagctgcctaccttcccagatcagcatgccaattatcttaataatgtttcctcccaaaggcaattagaagagactccctttcaaaaatctgatggctgttgaaagttaatgaacactttaccaggagatcttacttcctggttcctttgctgctcccctaagccgtttcctctggtgggtgacggccagagatatcggtttgtgggttgatgaaactccctcccccgcctttgtacacct

SEQ ID NO: 16230 - DNA, 265 bp, Homo sapiens
agtacttctagaattaattaaggcgggagagaagagagggatggtcacagagcaatggaagaatagagcctattagcagacctattcatatatgaaaagttaaggtatgacaagaggcgctcttacaaattaatgaggagaaaatgacccattcaggaaattgtactgggacaattggtaatccaaatggcaaaaagaaaataagatcctgccttatgccatacacaaaaatcagtttcaggtgcattaatgacctaaacgcata

SEQ ID NO: 16231 - DNA, 473 bp, Homo sapiens
  misc_feature 199, 450: n = A,T,C or G
agtacttctagaattaattaaggcgggtggtggggatacattacagaaaagttatattcaaaactttttaaaaaatgataaaaaaaaaatgctaggaaaaaaagccactgaaccaaatgtagaaagagaaagttgaaccaatggctacactataaatttaacctaacacttttatgtgttctcacttatagatctttanaattcttacttacaaaggagaataaagagaatcttggtttttgtactgtttgcagtgcagaggtgccaccaatcataactgacaaatagttccattttaaggccttaaacattgctaaatacctctgcaagaacttgttctgttgccctttcgaaggataaacaccagtaaagaccagtttgagttggaaagaggactttctgttagagagtaaagaacatttcatttctatggatacagcagctcctcanaagtgattgtatctgttgaaaac

SEQ ID NO: 16232 - DNA, 354 bp, Homo sapiens
  misc_feature 91, 100, 186, 191, 211, 285, 289: n = A,T,C or G
ttcttacgtctgaagaataaagcacctttgaaatacaggagggatttagaattattactccactaacctaatctgctttaaaaagttaagngactaccangtgtttataaacaatcacgctttggggttacaaaattccccaacaaactttttttttggccttgctctaagtgggtttatttccancattntattctccatactttctcanagaaaggctagcaacctcacctttatgcaaactgacttgccaactatgtttctgaaatagcttcaacataaacnccanttaagactgatctaaaattcaaatcttaaaaggaacatttgctttcacaaagctagccttaaaaa

SEQ ID NO: 16233 - DNA, 386 bp, Homo sapiens
  misc_feature 1, 143, 287, 321, 343: n = A,T,C or G
nggttccgggccccccctcgagagtacttctagaattaattaaggcgggagatagaaattaaacaagtgtcctataaacaagataatctcagatactaaaaagtactatgaaaaagaaaacaaactaaggtgatgagatgaanagtgactgagtggtgcttgggggctacttcagatagacatcaaaaaaggcttttctgaggatgtaacatttgcgctaaaatctaaatgacatgattgaaccaacgataggaacatctgggctgggggtggtggctcatgcctgnaatcccagcaatttgagaggctgaggcaaggtangaggattgcttgagctgaagangttgaggcactggtgagccatgattgcaccactgcactccagc

SEQ ID NO: 16234 - DNA, 457 bp, Homo sapiens
  misc_feature 35, 40, 82, 85, 109, 120, 122, 143, 161, 170, 208, 225, 240: n = A,T,C or G
agtacttctagaattaattaaggggggcggaggtnacagnaagccgagatcacaccactgcactacagcctgggcgacaganccngactccatctcaaaaaaaaagaanagaaattgaananaaataggccgggcatggaggntcacacctgtaatcctancaccttggnaggccgaagtggtaaacattcaaatcattctacatggncttttcttcataaactnccctctaatctggcntttcaacatggatgggttctctcttctaggcaatattataggttccaacctaaaatgatttttccaaaggagtctacccctcatagttcactttttctgtttcattttactcataaaataaatgattgctaaatttcacttctaaatatatttgatatgggagatcccaaaacacagtttgtttctttactagttagtagttgatgattctggtaaa

SEQ ID NO: 16235 - DNA, 188 bp, Homo sapiens
  misc_feature 28, 41, 52, 53, 62, 73, 104, 109, 112, 148: n = A,T,C or G
agtcttctagaattaattaaggcgggcngggagagaggggnaactacatgcnnaaaaaatantttttattttntgctagagccgttcatcaccaccccacgcanaattncanctgcttacgtcgaacaaatacaacaagtttatcctnaagtttatatgcagcaacaaaggtctatgaatttgggctc

SEQ ID NO: 16236 - DNA, 315 bp, Homo sapiens
agtacttctagaattaattaaggcgggcattaaacttagctgtgctagaaatagttgtcaatagtatgggtagacatttctgaagtctgctctttgaatgttgtgtaagaattaaataataaagtttaaaaagagatagtgtcatttttaccctattaatgttgtctgtctagataacatttgattgaatgttttgttgtgcagtaaatcctgaactttattactttaattctgttttgtatttggatttctgtggagattgtactactaacattctttcaccaggtcagtgattctaaactcttaaattgggac

SEQ ID NO: 16237 - DNA, 534 bp, Homo sapiens
agtacttctagaattaattaaggcggggttctcataaaatcttatattaggccctgtgtagcctggcagtatctgcagaaagataagaatatgttttaatatgacatttgtgatatttaaatgttatatacacaatatacaactttctttgaaaagttttattgcccaattttttcctttacagtttttccttacagtcgattttagatttgtagcttttcagaataattttactttcttatcatagcctatcattgcctctaacattaaaaaaagtgttcttatgagattaacctttttcatgcctcatgttataattttattatttacagttctgagattgcagtgcatgcatttatcttgaaagtagggcaggtgagctgaacagcttttgaaacttgaagagaatcgcttgaacccgggaggcagaggttgcagttagccaaggttgcagtgagccaagattgtccattgcactccagcctgggtgacaagagtgaaactccatctcaaaaaattaaaatgaaaaagtaa

SEQ ID NO: 16238 - DNA, 400 bp, Homo sapiens
  misc_feature 388: n = A,T,C or G
agtacttctagaattaattaaggcgggaccattattagaattcagctatctttattcccaacctagtgtgttttccataataatgtaccttttaactatgtcaaagatagcaaatacagttcatctgtgtcaactttaatcagttgatagtggctgtctagcacattgtgaatggggtcaatcagaaagaatgtcattagatcaattagctattactttatattacctaaacttagtataatttaaaatttgataatgagtttattcagtttataaagagttctgtttttggcatggcctagtagctccattgcacaattccttctgcagaaaactactataacctatgaacaaaataggaaaaataactacccgaagcactggagancaaacaaaagca

SEQ ID NO: 16239 - DNA, 225 bp, Homo sapiens
  misc_feature 106, 158: n = A,T,C or G
agtacttctagaattaattaaggcgggggatacatgaagttgggatcatggtggagtcaatatctaatactttatataatctatgtttttgcttttataaaacttntcaaaaacagtgataagcaggtctttcttatattttagtataaaaagatttncttacctctgatgaggaaggtcgacttggattgagtgacatattcactaatgtctgaatgggataat

SEQ ID NO: 16240 - DNA, 453 bp, Homo sapiens
  misc_feature 23, 29, 31, 36, 38, 39, 41, 44, 47, 48, 51, 53, 54, 57, 59,60, 63, 65, 67, 68, 70, 73, 75, 76, 79, 81, 85, 95, 96,99, 103, 104, 105, 113, 115, 117, 119, 122, 124, 125, 128,132, 134, 136, 142, 145, 148, 149, 153, 154, 155, 157, 158: n = A,T,C or G
  misc_feature 159, 160, 161, 172, 174, 175, 176, 178, 179, 182, 183, 184,188, 195, 201, 207, 208, 209, 215, 218, 220, 221, 223, 235,237, 242, 243, 246, 248: n = A,T,C or G
agtacttctagaattaattaagncggggncnaactntnncngtnagnnggntnntananncantncnntnagngnnacngngggnaaagtctaannaanagcnnncattaccngngngnacnanngcncccntntntaacgnaangcnntcannngnnnnnggtatacctgnannngnngannngganatattanttttanatgtcnnnatacanatnanncnaaaaagactgtnanaatanntantnttgatgagaagagttggaaaatatgctcaccatggctcaagaaaccatgtaacataataatgcagccaatctcgacctacaacacaagctgtaagttaaggtaccctcgagaacactactctttcctcttccattccttcaggtgttataaaagcaagcctaagttaaagttctatttcctaagagggaaaagaattgcttttca

SEQ ID NO: 16241 - DNA, 709 bp, Homo sapiens
  misc_feature 29, 30, 31, 32, 35, 38, 39, 44, 45, 59, 61, 62, 66, 71, 78,80, 81, 84, 88, 97, 108, 111, 113, 114, 116, 118, 124, 127,128, 134, 135, 140, 142, 147, 153, 155, 159, 160, 168, 171,172, 173, 175, 178, 181, 182, 185, 190, 191, 195, 198: n = A,T,C or G
  misc_feature 203, 204, 209, 210, 212, 213, 217, 218, 220, 223, 224, 225,226, 231, 247, 297, 617, 627, 628, 664, 685: n = A,T,C or G
agtacttctagaattaattaaggcggggnnnnaanaanncaaanntaaaatcaccattntnntttnaactncaattgncnnganctcntttcaaccntataaaatacnaangnntntnacaccnccnngattgnnctaananctganggcttntnttcnntaatctanagnnntnatnagnnaantgttnnatanatnatgtnntgcannannactnntnatnnnnggatngccttaatagagtctntgttcttaactgatcaaagggatagaactattaattgaaataattatttnaatttttctttcattctttctgtattctaaaacgacattgattatgtcttttttacagttaaatcaagtagaatttctgattgagtagcaaaatccaaaataattcatgtttaaatacaaattttaggaataatatccctaggaaagtcaatagtgcatcaaagtggaatggcttaactggatgatgttaaatatttgtggtcataattaagcttttagaagccattaagtgtgtcttttcaataacaaatattagataaacatagatttactaaaaattctttcttctaaagaaaatataatttattattattactggntgacatttannctttatgtgataatcaatatgtaaagaaatcttcanaaattaaactattggattatnttccccaaccccttctaaatttat

SEQ ID NO: 16242 - DNA, 413 bp, Homo sapiens
  misc_feature 213: n = A,T,C or G
agtacttctagaattaattaaggcgggaggatcacttgagattgggagttcaagaccagcctgaccaacatggtgaaaccccatctttactaaaagtagaaaaattagttgggtgtcatggtgcacacctgtaatcccagatactcgggaggctgaggcaggagaatcatttgaatctgggaggcagaggctgcaggaggctgcagtgagcanaaatcccactactacactctaatgtgggtgacccagcaagattccgtctaaaaaaaaggaaaaaaaacaattagcagtggagagtggggaagtaacttttggttgggtggtcaggataagtctgaggagaaaccatctaagctaacaccagaattgcaagaagtcactggagagaacatgtgcaggaagaaccttctagg

SEQ ID NO: 16243 - DNA, 405 bp, Homo sapiens
agtacttctagaattaattaaggcgggactgtaaataacctgagatgagccaatggggcagctgctttctctttccatttatttctccccaggtcagcagacctaacaagagccccatattcgtgtgtttgtacttattttctaggcaaaatataaatgaacaattaaaagagagggtggcagctgggtgcggtggctcacacctgtaatcccagtattttgggaggccgagctgggcagataacttgacagcaggagttcgagaccagcctgggaaacatggcaaatccccgtctctactaaaaatacaaaaaattagccgggcatggtggtgcacacctgtagtcccagctgctgtggagctgaggcaggagaatcacttgaacccaggaggcagaggttgca

SEQ ID NO: 16244 - DNA, 422 bp, Homo sapiens
agtacttctagaattaattaaggcgggtcaatgaacaagtgtccaagccaaagacttagtactcagggtaagtgtccacataggctggtgcagctggttttccctctctactttcctttttcttctcccaatttacagcacaaaccaagctaaaatgctagctcaacttctctcttttcacttcaaaacaacccagctcaccagccgggcatggtggcagtagctcacgcttgtaatcccagcactttggcaggccaaggcgggtggatcacctgaggtcaggaggttgagaccatcctggccaacatggtgaaaccccgtctctactaaaaatacaaaaattagctggatgtggtggcacacacctgtagtcccagctagtcaagaggctgaggccagagaatcgcttgaacctgggaggt

SEQ ID NO: 16245 - DNA, 345 bp, Homo sapiens
  misc_feature 206, 277: n = A,T,C or G
agtacttctagaattaattaaggcgggcagtgtactgggactcttggaaacggttgaaagtccagctcaactccactctgtggcggcagctgctgtctgatctccagcgggtaccctggacaccacaagcattccctctacctgattcaaatccaaccaaattatcaatgaggctctggtgcctccagctcctcagatttgacaanatgcttggtccatttctgaaagcattctcttcacaccagcgatgagagaagcgaagaatttttaacccaantgctttgaacctcaataaaaatgatacagggggtgaatagaaaagaacaatataatccttccacttgg

SEQ ID NO: 16246 - DNA, 214 bp, Homo sapiens
  misc_feature 86, 160, 182: n = A,T,C or G
agtacttctagaattaattaaggcgggtaggtcttggttttttaatttgtaaacatcaatagacttgtttaaatgctattgtgaanagaaagagagagattgaagatactgcataaagaaggaataattgattgagaaggtaacaaaacatgtgacccangtggaaaacttggctttagaangaaggaaagatagtacttttgttgtgatagga

SEQ ID NO: 16247 - DNA, 708 bp, Homo sapiens
  misc_feature 550, 581, 611, 647, 655, 697, 701: n = A,T,C or G
agtacttctagaattaattaaggcggggtagaaaaataactttgtatactagaaatggtcttcttaggaaaccaacaaaacccaagacatatgttaaaatagttttgatggcatccaaattaaggatttcagttcaacaaaggaacatacacaaagttctctcaacaaagaatatcaaatttaatagataatggaaagactaagagatgatgtttgcaatgtctaaaactgataagggactaatatttaaaatatatttaaagaatacctgctaatcaacaaaagtaaacagaaaaaaaaatcaaaagaaaaaaataggcaaagaagatgttaggcaatttacagaaaaagaaccctaaatagctatttaaatatgaagtagattgaatgctactggtggatatgtaaaaatgtgcagccattctggaaagcatgctttatttgctaggaaattaagtatgtacatgatttgccctttgatgccacaatattattcccaatatatttgccagaaaaatgcttaaactggcctgaataggaaatgtttgangatataaactgtgaagctgtttgtgttatanggaactgatggcaacttgggcccccctttngaaattgatatatgaagtgggggggggtgtccattnattggggnattgatgtttgttgaccaatgtggttaaattttaaaaccgtntggngttttta

SEQ ID NO: 16248 - DNA, 682 bp, Homo sapiens
  misc_feature 29, 36, 55, 61, 65, 67, 70, 76, 93, 94, 95, 102, 107, 124,131, 144, 146, 147, 148, 156, 157, 158, 166, 168, 172, 176,185, 186, 187, 189, 200, 210, 211, 219, 220, 243, 245, 246,255, 308, 316, 322, 330, 374, 376, 448, 572, 575, 588: n = A,T,C or G
  misc_feature 620, 626, 648: n = A,T,C or G
agtacttctagaattaattaaggcggggngggaatncatgccaagtggtaagtgnatttantctntnaantacagnagtgtcctactggaaannnctaacantggtntcataaaaagttacttnttgtctngacaaaggcaatntnnntcaccttnnncgctggcnanattntgtntaaattatnnntnttgggttctangttgtaaaannctttttanntgaagctttattgactgaatagncnnctatattcntttcctgtccttaacataactatattgccctgttccacacatggtgtgattgnagaacatnaacctntggttaancgaaaatatgtgtatcacattaaacactgtgtgtcctttactgncngatgcatgttttccggtgaatggtaacagttttcatcatagatttcctctgcaactaaactgcaccctttanttaaataaatacttgccatttttgtagaataggccacagaactccaatttctttaaaaaacctatagtaggtcttggagattctcgaataagccactgactgaccttacaggtgaaaaactcantancttcctaaccacnacaaattgttcccaattgaaaaaaacacctgnaaaaanaaagttaatgggcttttacctnaaccaaacatacttggaaagaattaaaaataaaa

SEQ ID NO: 16249 - DNA, 462 bp, Homo sapiens
agtacttctagaattaattaaggcgggaaataagttttaaaataagattaattttaataatagttttaataaccacaacaacaacccctccccccaccaaaccattattaactatcaacttattacttctataactctagcctagtctgcaagtcccaataaaataaaaggatgtgacaagcccgggcaacacagcaagaccttgtctctacaaaattttttttaacaattagccaggcatggtagcatgcacatatagttccagctaggagaatcacttgagcctgcaagtgaatgaggctgcagtgagccatgactgcaccactgtactccaccctgggtaacagagcaggaccctgtctctattaaaaacaaaaaaaaacaacaaaacaaaaacacagggtatttccttgctaaggcaaaagcctaaaaaaatacttgaccttaaaatagtggtataaa

SEQ ID NO: 16250 - DNA, 147 bp, Homo sapiens
agtacttctagaattaattaaggcgggaagtggagagagggaagcctgaccccaaggcccatggcactgcccacctgatggtctggatcacgcctcctggcttagctattttctgtcccctttcctagaacatccacaccaggggga

SEQ ID NO: 16251 - DNA, 452 bp, Homo sapiens
  misc_feature 424, 435: n = A,T,C or G
agtacttctagaattaattaaggcgggagagcctgggagaattggagtcaagatcttaaagatgcaataatatcccttagtcccaggaactaatagcctatgcctattgtggagttctcctttatatcaaacaatccagctgaggcagtattactgcctgttgacttcaacccaggagtacaataaccatttaggaacttagaaatgtttacatcagagagcttaggatttaaacaaagctttataatgtgcttcctttctcactaataatttccacttttttcattatatgggttttctctaaattcttctatttaaaatgccatggttacaaccaggcttgttattgcaatatgatatgtgggcaagttctggattccagatcctgttagcatcttttaagcaggatcttggcataaccagnttatgtcccanaaaaaaaaaaaaaaaaa

SEQ ID NO: 16252 - DNA, 290 bp, Homo sapiens
  misc_feature 238, 242: n = A,T,C or G
agtacttctagaattaattaaggcgggaatgtcaactattgaccaggttcttgctgagagagctacagatactggggtgattcagactgatacagtcgctccctacaccagtaaatctcccagtctgatggtgaaggcagatatcaaacgaatcgttaaaaatgtattgaatgttcctaataatggcctgactcagagtcacatgggtagtgataggggactgtgccatcttttctgnttgntgtcatgggtgcctggcatataataccatatcaagtaaatgttttttt

SEQ ID NO: 16253 - DNA, 500 bp, Homo sapiens
  misc_feature 42, 45, 50, 53, 59, 75, 102, 108, 112, 133, 140, 183, 186,197, 200, 203, 214, 233, 255, 262, 264, 270, 313: n = A,T,C or G
agtacttctagaattaattaaggcgggaggattacccgaggncangagtncangaccancctgaccaacatggcnaaatcccatctctactaaaaatacaanaattanccangcacggtggcaagcacctgtnatcccanctactcaggaggctgaggcaggagaatcacttgaacctggganacngaggctgcaanganctnagatcgtgccnctgcaccctatcctgggcnacacagggggactctgtctcanaaataantnaataantaatatgcctttttaaaaaatgggccatctataccagctaaanaagaatgtaagactcatactatcttcattactgatttatttctttggtctggaagcctgtcaatttttgccagttgaatattcagcaataaatagtcatcaagcataatgtttgaataaaaatgttattcttcaaaccaaaataaattcaagatgatttgagatccaaatgcaaataaatgtaacta

SEQ ID NO: 16254 - DNA, 773 bp, Homo sapiens
  misc_feature 400, 572, 620, 622, 686, 740: n = A,T,C or G
agtacttctagaatttattaagacggggtttcactatatgttggccaggctggtctcgaactcctgacctcaagtgatctgcccacctcggcctcccaaagtgctgggattacagccatgagccactgcgcctggccgaaagaaatatttattgattgcctactaggcaccatcattagcagctgagaatcctgtggtaaaagaataaaaagcagacaagaatctatgcccttgcaaaggttacagtctgctaagacaaacaataagctaattaagtaaaatagtatgttagagagtagtatgagagaaaaaaaccaggaaaaggacaataaaagatattatggtacgatgtcaatatttttagataagatctcaataaaggctaagaaaatgactcttnaccactcctacccacatatctatatactgtaaaccagtaccctgcatttcaatatataagattttttttagttacataaataaaacacccaaactttatgtatgtcaattcctgtacagcaaatatttctaacaaaatagggtttttaaaagaaaaaattggaactggtttntcaaatttccatattaaaccgcttatggcattttctcattcaactttngnccttaaatattggggattaactgcatttttagggcctggccagaaaaggttcaacacttcaaanaaccagcttttgttaaaagcattgttaaaaacaaacagccaatttcaaaaaggnggacttccccaaaaaaaaaaaaaaaaaggaaaa

SEQ ID NO: 16255 - DNA, 194 bp, Homo sapiens
  misc_feature 119, 161, 170: n = A,T,C or G
agtacttctagaattaattaaggcgggaggtttattactgaatcatgagatctgttttaatatactgaggggcttatatttccagagtgattagatataaaattactgggtagggtaanaaaacagttaagtattaacttcagggagaaaaaaaaagctgncccagaatngaaaataaatcacagcatattcca

SEQ ID NO: 16256 - DNA, 296 bp, Homo sapiens
  misc_feature 279: n = A,T,C or G
agtacttctagaattaattaaggcggggaccatctgtgttcaactttctgatgactttcacaagctctgcattttatctcccagctctgttgtaaggtattgtcagtgccttgcagaaaagaatcagattccttccaagtgacatagacagcaagttttggagagctaaggacaaacagggccgcagctcagctcagttggcttgcttctcccacaccagcattccctgcgcagcccaagttctcagatacttctgagatcttagtcaacaaagcttanaaaaaaaaaaaaaaaaa

SEQ ID NO: 16257 - DNA, 433 bp, Homo sapiens
agtacttctagaattaattaaggcgggagaaaggattgcattgcatataccagttaatagattaatatcaatacaatatgaaaaaaatctaataatttgatagagcaatagaaaaataggcagataatttgaatgagtaatttacagagagcaaaaataactggccagccgtgtatgaaaagtcttaactatataaggaaatgcagatttaagtaacaatatggcattatgctatatcccttggacaggcaaaatattaaaagtatgataattccaattgctgacaaggatagagaaagagtagtttcatgtcttgctggtagaaatgtgaattactacactctttttggaaaataatcaggcaacagctaataaaatttaaattcttctcctggaactaaaattagcttaagtaatgataccgtgtacaaaa

SEQ ID NO: 16258 - DNA, 221 bp, Homo sapiens
  misc_feature 98, 179, 207: n = A,T,C or G
agtacttctagaattaattaaggcgggcaagcatcacaaaccatgcaagtcctgtgatgacctccaaagctccccaggtgggcggctctgcagtacancggggtctggttccacccaacccaggggtttccaaaagataatttcctattccccaaatctgacactgctgagtgcctcancccttaccacgctactcctacctatctncccttttatactaa

SEQ ID NO: 16259 - DNA, 366 bp, Homo sapiens
agtacttctagaattaattaaggcggggtagcatataaacatgcagcattttctgaggtgtatttgttggacccttaagatttttacttctcttcagtaggtggatccttttctccagatcagtcacattttgttccttaaggccagttatgctctagttttaatctggaatgaacttgtgttcttgtttgagacacctcttcctagtgggtgcgtcattatgggagattgtatctatctatataatcttctgtaatttagcatagagaagaaaactgggtgatgagttgccagctaatttatataaatgagatatgggaaaagatctaaccccttcctaaatcccccaccaaaaaaaaaaaaaaa

SEQ ID NO: 16260 - DNA, 301 bp, Homo sapiens
  misc_feature 288, 289: n = A,T,C or G
agtacttctagaattaattaaggcgggagcctgagggcagtcggtggataggaaaagagaaggagaaaagtgtcatcctagattgtgctttacttctactgattttctgtggattgttctttttctccctctctcattttccagtgtatacagaacagtacattttaatgtcgaggaagacagaacgacgttatcaaaagacacagttcttgagaagtttctactccaagtcaacataacagttcagcacctataatccaactcttataatttagtagatgaacaaannaaaaaaaaaaaa

SEQ ID NO: 16261 - DNA, 448 bp, Homo sapiens
  misc_feature 433: n = A,T,C or G
agtacttctagaattaattaaggcggggctgtttgagtcagagatgttcagttatttccatgaccttctattgagcctgttctttttccaaataacacttattataccagagcagagagactcctggaattttctataaagcaagtgtcttgtatttaatttacttttaccatttgcttccattataatttgagagttgtttttcaatggcaagtaaatacagctcccacaaaaggaacgtcatcttcaagaggcctgacaatctgttttcaaaatgtgtgaatgccaggtacatttaattccttgatatattacaagaacgtgcctaatactgttatggttagggattgaatacatatgaatgtgaaacacctacataggaagcactcaataagtgttagtgtgagaaaaaactactagacaaactgctctncttttgttggcagat

SEQ ID NO: 16262 - DNA, 441 bp, Homo sapiens
  misc_feature 319: n = A,T,C or G
agtacttctagaattaattaaggcgggggatggtacagaaggttgtgatatttggactgaagcaggagcaaggggaaggcttgaaagaaactatggcaggatacaggaaaaagaaaaaggactgaaccagaacagcatgtgtcagtggagctgtttctgaggcaggaggaaaatctggtaggtatgaggggaaaaggaagggaataactgagaatcactcctgggtctctagctctacacataacatggtgactgtcttaacttaaagaaggctggggtccgggtgcggtggctcatgcctgtaatcccagctactcangaggctgaggcaggagaatcgcttgaacctgggagacagcggttgcgatgagccaagatggtgccactgcactccaccctgggcagcaagagtgaaactccatcttcaaaagaaaaaagaaa

SEQ ID NO: 16263 - DNA, 420 bp, Homo sapiens
  misc_feature 393: n = A,T,C or G
agtacttctagaattaattaaacacagtttatacctttatcgctgcacttggcaagttttgggaagttaaagactggtggtactgctactcggaagttatctgtagaaaacagccttaagtcttttccaaacaaaatatcattttaaaatgaagttgggtcaaaattcaaataaaactccctctaaaatgaagtgtgcaatatccactcttaatgtgtgttgtatcgtgtagtcaaaagactcttaatgattgcctgggaggttggtacagaagggatttttatttttaacagtctctaaaacacaccttttaatactcattctttttggaattctaagttaatttctattcttcatcactggtgcttttaaaaaaaaaatcacaaatttcanaattaagtgtctgagggatttatttcc

SEQ ID NO: 16264 - DNA, 447 bp, Homo sapiens
  misc_feature 323: n = A,T,C or G
agtacttctagaattaattaaggcgggagagaaatggaactctgagatctctgcaggtaggagagagaccagggagtaaccctgggttccagcttaaaatcaaagagggaggacaaggacgttgatatgtcctcctgtgcctttttcaaatggaggcattggcatgatgaaaccctgttagtttccttcaggaaaaactagccaactgctgagagaagaaaagctctgctgccaactattttattccctctgaaaagataaacaggaggaagcagataagcctgaataacctgcttcagagaacaaacaaaaatgaaatgaanaatgcaaaggagagaggggactgagtaagacagatgaaggaaagagagaatgattagcaagaccttaaccaaaaataaagagttctgggtgtgggcaggggtcattacaaaatgaagtcagaag

SEQ ID NO: 16265 - DNA, 403 bp, Homo sapiens
  misc_feature 35, 48, 54, 57, 65, 69, 78, 88, 94, 96, 97, 98, 114, 128,139, 145, 179, 183, 185, 186, 187, 197, 199, 203, 208, 212,213, 214, 223, 224, 234, 242, 245, 251, 259, 263, 273, 274,276, 279, 280, 281, 282, 283, 287, 288, 290, 292, 293: n = A,T,C or G
  misc_feature 298, 301: n = A,T,C or G
agtacttctagaattaattaaggcgggcacagtancacactcccatantactanctncacaggancctnaggtgggangatggcttgnacccancnnntggtggtttcactganctatgatcatgccnctgcactccangctggncaatagggcgagactctgtctcggaataaacctnaaangnnnaacttgcagngngccnccacngggnnngtgcactcnntcctgtcaanagatcganatncccccncccaaagnccantatttaatannanatnnnnnaatnnantnnaatanatnaaattaaaaagtgataaactggacatcatcaaaattaggaaaatttgttcattgaaaaacattaaagagggagaaagacaagcccagattaagagaaaatca

SEQ ID NO: 16266 - DNA, 407 bp, Homo sapiens
  misc_feature 29, 34, 49, 51, 54, 62, 71, 101, 103, 111, 182, 263, 317,366, 368, 386, 391: n = A,T,C or G
agtacttctagaattaattaaggcggganagganagcacttcctgagtncnganaaacacangagcttcanaggaaacagtgcttcaagactgtagtatantntgtccctnctcattgatttaactaagtggatactgaaaaaatatcacagaggcattgatcttggtgcagaaaccacctntccctgactaggggaaaataagctagcaagcagtgtgtcaggaagacccctcttgaaagcaaaacagaattcatactacanctagctttcacaaagctgttagcagtttatggtgttcaactataaataaatatnccaccaaaagcataaggtgttactcttaagaaaatggcatgtttatcanantaaaaagctctataaaanaccanttaaacaaaaaaaaaa

SEQ ID NO: 16267 - DNA, 447 bp, Homo sapiens
  misc_feature 30, 41, 43, 44, 47, 53, 54, 60, 69, 88, 89, 92, 96, 97, 103,104, 119, 129, 136, 138, 140, 147, 151, 159, 188, 195, 200,217: n = A,T,C or G
agtacttctagaattaattaaggcgggggnggggctggggntnnganggtatnnatgaangtccgcacnatctgtctatcttaacttnncanaaanntcacannttgggagcgcatggnggcttacacntgtaatncnanctcctcncgangctaaggngggaggatggcttgacccctgatggtggncaatgancccanattgagccactgtactncaacctgggcaacacagggagacccttgtctccaaaaaaaattaaaacaaataaaaataaaaataaatacaagctgaagaacttactgatgatatgatgtctgtgatttgccttaaaatactggactgaggaaaaataaggggggttacagatgtcacaaaataggcctcgtgctgataaccctggaagctggttgatggcaactgaggttcattattctactatgcttt

SEQ ID NO: 16268 - DNA, 241 bp, Homo sapiens
  misc_feature 241: n = A,T,C or G
agtacttctagaattaattaaggcgggctcccactaacctcatttccactagttctgccttggagcttgggctttcttgttctgattcttacttgatttttgtttttgctgcttctctggaataaccttccctcatcaccaggattagaagtattattttccctctcacattgagaaggtggagaaaaaccacaggaaaaactaagtctccaaaaaaaaaaaaaaaaaaaaaaaaaaaaan

SEQ ID NO: 16269 - DNA, 407 bp, Homo sapiens
agtacttctagaattaattaaggcgggggtatgtaagtgcttaagactgaaattgtaggatctaaggttagtatgtacttaactctgtaagaaaatattcatgtcttacctcacatctctagggaatgaaagattttagatcagaatggtagggtagaggaaaatccattggggaaattgttcctttggtatttacttaatctgaacattttttaaatgcaattgtaactattgatgaaatgtgaatattgattgaaaaaagacgttgatgttaaataagactttacaagcttgtaaaagaaaatatagttacagaaggaaaacaagtttttaaaaacagctttattgtgatataatttatataccatagaattcacccatctaaagcgctcaattcagtgaatttt

SEQ ID NO: 16270 - DNA, 430 bp, Homo sapiens
  misc_feature 152, 244: n = A,T,C or G
agtacttctagaattaattaaagcgggggtattctcttcctcctttacatcatttccttccatttaaatcttgctccatgtgccacagaaatttctacaagagtcgaggacacggagttcagtaacaatctctagcacaagtttcgcattgncctgctttctgtcttcccccacagctaaggccctcagctctgtgaccttccggatgatttatctggctgaatctttgttcctggttacctgngcacatgaaatcgtctttcttcctgttcatttggtactacagggtgctaaaggcatgaattcaaagctccttcaatctgtgtttatatctgggcattagcagtgggttttgaagtactggtcatttcaggtgatatttttgtgtactatttcaagatcatttacagctgaccttgcagccttgtgg

SEQ ID NO: 16271 - DNA, 433 bp, Homo sapiens
agtacttctagaattaattaaggcgggagactattacctgagattactattggaggaagatgagaatgaagaaagtggatcaattaagagatcgtatgaatttttcaatgagctttatcatcgcttcttgctcaccccaaaagtaaacatgaagtgtttatgtttacaagcccttgctattgtttatggcagatgtcacgaagaaataggaccttttacagataccagatatatcattggaatgttagagaggtgcacagataaacttgaacgagataggttgattctcttccttaacaagttgatccttaataagaaaaatgttaaggatctcatggattcaaatggaataagaatccttgtggacttgcttacccttgcacatctccatgtaagccgagctacagtaccactgcaaagcaatgtaattgaa

SEQ ID NO: 16272 - DNA, 340 bp, Homo sapiens
  misc_feature 39, 49, 52, 53, 64, 69, 74, 76, 80, 95, 120, 128, 142, 149,151, 156, 172, 174: n = A,T,C or G
agtacttctagaattaattaaggcgggggcttaaggganagcttacaanttnntaatctaacanagaangggtntntttntggggagagggattntgtatgatatttaatagcacctgcnaactttangatatctggggggntctcatnanctaangagggtcctgaccctnanagctatcttttctctaaagattttgtaatgtttaaaatttttttaaattaagataaatatattttaaatcatactgtgaatccaactggtatagcattctgtagagaagatcactggcttaagaggattgttagaaggtggctcacacctgtaatcccagcacttt

SEQ ID NO: 16273 - DNA, 438 bp, Homo sapiens
agtacttctagaattaattaaggcgggggcgggtgctggctcccatcctgccggataacttctccacgcccacgggctctcgcacggactctcaatcggtgcggcacagcccgatcgccccgtcttccccgagtccccaagtcttagcccagaagtactctctggtggccaaacaggaaagtgttgtccgcagggcgagcagaaggcttgccaagaagactgccgaagagccagctgcctctggccgcatcatctgtcacagttacctggagaggctcctgaatgttgaggtgccccagaaagttggttctgagcagaaggaaccccccgaggaggctgagcctgtggcggcagctgagccagaggtccctgagaacaacggaaataactcgtggccccacaatgacacggagattgccaacagcacacccaacccga

SEQ ID NO: 16274 - DNA, 677 bp, Homo sapiens
  misc_feature 582, 603, 629, 664: n = A,T,C or G
agtacttctagaattaattaaggcgggcacttataatcccagctactcgggaggttgaggcaggagaatcgcttgaacctgggaggcagaggttgcggtgagccaagatcacaccactgcactccagcctgggcaacaagagcgaaactctgtctcaaaaacaaaacaaacaaacaaaaaaaacgctataggcctagatgtgatcaccaagggaatttagttatcttatcctgatccacttaaaccccagctttcaaacactcacaaccaaccttagtgctacttcaggaatattttcataaaggctggcagttaaattactaagttccaacttgctttgcacattatctgaagatagaaatgatttacttaatgatgatttggcaattatctgatgttttgctttaataaaaaaaaaccaaatcctttttttcagattagctcctaaaaataaattcaaataaaaactttcaaggatcaaaattaaagatggatttacaaaattgtatcaacactgaactcctcatgggccgggggcggtggctcacgcctataatcccagcactttgggaggccaaggcnggtggatcacgtggtcagganattgaaaccatcctggctaacacggngaaatcctgtctctacttaaaattccaaaaattancttggccttggtg

SEQ ID NO: 16275 - DNA, 150 bp, Homo sapiens
  misc_feature 8, 48, 120: n = A,T,C or G
agtacttntagaattaattaaggcggggcaagtcctttcacagccggntgggatgctcatcaggaggcgtgatggatgactgtcatttggcagcctcgggattaatgatctggaggtcanaggggagaattccacagggaagggtcaccg

SEQ ID NO: 16276 - DNA, 302 bp, Homo sapiens
  misc_feature 42: n = A,T,C or G
gaacaaaagctgggtactcgggccccccctcgagagtacttntagaattaattaaggcgggagaaagttttcatcaaaagagcctagaagaactaatacttaaccaagcattagggtggcaacaggaaacagaagaaaataaatgtcaaataggctggctttttactgtgacaaataatacactgtatttatgaaaatgtatttatgaaaatggtgcccattaccagttcaacagatttaacttgctgcttttaaacagaactcctggctcaagaataagaactacttatacagcccagatc

SEQ ID NO: 16277 - DNA, 431 bp, Homo sapiens
  misc_feature 50, 57: n = A,T,C or G
agtacttctagaattaattaaggcggggaagtgataagtggtaaaatganacatttnctaggggtagaggtacaaagctaaaaaagaaggaaacccagactgaattttacgtttcttatttccaactcctctcgatgtctacctggaaaactttccaatctttaagcattcagctgcagtgaaatatcctctggggaccttctgtgacatcccaagacagagttcatcacccttttttaatagtgtcctgtacttttcttatctttctattgttgcttttaaaacatattttcttgcaattaccttcacatgcactgtgaacaccggcaatttaatgtgtttttgtgcatgtgtatgcatgcacgctgaataagttccttgcatgctaaaaaatgtttcaacctacaaaataaatagtaatgtcattgcct

SEQ ID NO: 16278 - DNA, 232 bp, Homo sapiens
  misc_feature 205, 207: n = A,T,C or G
agtacttctagaattaattaaggcggggccctgtttatatctttcggtatcagttaggaaatactttgatataaaatttggatttatatgtcaatcagcttggcaattgaggttcttttgttgctgatcagaaatcttggctggcagttaaatatgtcctttttataaaaaaaaaaaagaaaaggaaagaaagaaaagaaaaccnanaaaaaaaaaaaaaaaaaaaaaaaaa

SEQ ID NO: 16279 - DNA, 436 bp, Homo sapiens
agtacttctagaattaattaaggcggggctagtctgtcttgtcacattacattcaatcgtcactcaagatcattctacaaatatttatcaatttttttttagtgactttgtacaacacagacactcccgtcattgcccagtggctcttccattctaatgggacgagacagaaagtaaagttgaaaatgtaggatgttaagtggtgatatgtaggtaataagtgctagggagaaaaagcaggaagaggaataaatgaaatcagtttgcttcactagcttctggccctcgacccgaaatgctaacactttgtgtgtgtgagaaatttttattgaacacggggtttaataaatgcaaataccaagatcaggaatttcctatttttgaggagctcattatctaatgccttaaacggctacataaagaaaccattaggata

SEQ ID NO: 16280 - DNA, 408 bp, Homo sapiens
agtacttctagaattaattaagggggaaggtaaaaaaattccgtcatgcccatctcacttgtatatcccttaatattaatacctggttttttcatataatgtaaattgagtcactcagtgtaaagtattttcccagataactaggggttttatgtaatggggttttcaaataaaaaggattccagggatatctttataaaatatactaagtaaatgtccttgcagcttaatttacattccacagtatctaaatttctcttgatgattcggagtaattaattttgagatcagtaatttttggccatgggaataccacgtggagacataaaatggaatacataataatagctggtatatattgagtgtgccaggccctggcttggtattttaagcacattgtttaattta

SEQ ID NO: 16281 - DNA, 561 bp, Homo sapiens
  misc_feature 98, 108, 157, 164, 180, 182, 250, 252, 256, 278, 281, 285,287, 288, 290, 291, 294, 311, 313, 314, 317, 323, 325, 335,340, 341, 342, 348, 355, 365, 397, 447, 452, 454, 470, 479,480, 486, 497, 503, 509, 517, 525, 526, 531, 539: n = A,T,C or G
agtacttctagaattaattaaggcgggtggattacctgaggtcagaagttcaagaccagcctggacaacatggtgaaaccccatctctagtaaaaatncaaaaattanctgggcgtggtggtgggcacctgtaatcccagctacttgggaggctgangcagganaattgcttgaacccananggcagtgagctgagattgtgccattgcactacagcctgggcaacaacagcaaaactccatctcagganancaantaaaaaagaaaaaatgtggcgnggncccncnntnngtngcccccccttactccangnnggnggattnantaagcccccnccatnnnggaccnttttttnataacatggngaaacccctctactaaaaatacaaaaaattanctgggcatggtgggcgggcacctgtagtcccagctacttgggaggcttangcagnanaatcgcttgaacccangaggcggannttgcantgaaccaaganatgggngccagntgcactcnccctgggnngacanaaaaactnttttcttttttaaaaaaaaaaa

SEQ ID NO: 16282 - DNA, 455 bp, Homo sapiens
agtacttctagaattaattaaggcgggataacagaaaagcatattaaattcttgattagaaaaatgacaaaattctttctgaagaagagaaactgcagctgtcacatgtaatacacaaccaagtagtcatggtttagattagtagtgacagaatcacaaagaaatggcaatgaacatatagaaagagaatctcctgatggattagtttggacacagaagataaagggaaagagaatgtaagaacactccaaagtcaaagaagtgggaggatggtgatgccatttttaaaaccataaagctatatatatgaagaaaaaaaaccccaaacaaacaaatggaaaacccataaagcttcctcggatacccaaatcctccttctgcttttattacaaattatgcatcaatcatctgactcagtttctaggtcgccacattttcttgaatttcttcctatg

SEQ ID NO: 16283 - DNA, 473 bp, Homo sapiens
  misc_feature 471: n = A,T,C or G
agtacttctagaattaattaaggcggggctgcacagtgtgagcctcaggacttgtattttccatcatacctagtcaggaggcaaaattcctgctgtcatgttcaacaactaaacaaagtatttgcatccaaggttatttcctttgagggacccaggcacattttgtgttgacttctggccccattgacaggtcccagaaaggactggtgagggccattctttctgagatggttccccttactgctttcctctgtcctgatgtgggaatagggggaagggggtgctatgatccttttatgcctgatatgtgcctggtaaagaattctagaactggccaggcacagtggctcatgcctataaccccagcactttgggagttcagggtgggaggatcacttaaagccaggaagttcaagagtagcctgggcaacacagtgagacgccatctctacagaaaatacaaaaaattanct

SEQ ID NO: 16284 - DNA, 402 bp, Homo sapiens
ctcgagagtacttctagaattaattaaggcgggttattaaagaggaaatttgagccagctgattacaaacacataatcaaagcttctgagcagtcacaaaatgagataaaggtttcagtgttttcacgaaaaactgatatactaattcctgtgagtaaatgagatcttcaagaaagagaatgtaaaaattgaagaacttaggacatgttgttcaatcttagggaatagacatttgaaagaaaaggaaggaacatgaggaatgaagggaacaaatgagaaacatgtgcctgctatcaacttagagttggtgaagcaaattggtaaacattggcgaattttatggggttattgatgacccaaactctaagcttctttgtaaattgggaatttttcaaaataaaa

SEQ ID NO: 16285 - DNA, 388 bp, Homo sapiens
agtacttctagaattaattaaggcggggggaagaaagaagaagcaatctcaaagtgcagataaaaatcagttctaatgggttatcatacgtgtaaaaatagagaaaaatgcatatatacagtaaaaacctatgatatcatttcagatataaagcaatttaccggctccagacccccagaactcatggccaacttcatttgcaggtttgttctggtcatttcactaacctcacagaaatataaccctgaatttttttgtaaactagatttcttggatcccacttatggcaggatttttacatatctatctatctctacatttgcttctatgcacgtggaataggtatggaaagatacataacaatttcaagtatttattgattgggaag

SEQ ID NO: 16286 - DNA, 431 bp, Homo sapiens
  misc_feature 63: n = A,T,C or G
ctcgagagtacttctagaattaattaaggcgggtggaattaacaggactggatcattaattanatatgaaaaaaagagtccaggataatctaattctcagttatctggtttaagcaccaggatgcttgataatgccatttattgatttattgagcataggaatacagggagagaaagagcaagtttggagagaagagagtagaagacagtgttgtgcttttgggtcaggtgtctggggtgtcgtagacgtctgagtagacctgttaaacaggcttctggtcttggctagagatacagatttgggagagttgctagagagggccttaaaagtgacctagtctaacttcttagattttacatgtgaggaagttaaagatttaattgagagaatacattgttcatttttgcaggagacagaataagaattagga

SEQ ID NO: 16287 - DNA, 260 bp, Homo sapiens
  misc_feature 8, 93, 176, 183, 184, 199, 221, 239: n = A,T,C or G
agtacttntagaattaatgaaggcgggctgttatttacaagcctggcagcaaaggcagctgaggggagaatatcctttaactacgtccacctnctgccatgatgctcccacacaaagtcaattaggaaacaatgcatgctttatatataggcaaagccaaaaaaaaaaaggaaaanactgtcnncactactgaccaaancctttttaaaactgcaatgatnggacagctaaactccaanccccaggaagttctaactggg

SEQ ID NO: 16288 - DNA, 277 bp, Homo sapiens
  misc_feature 40, 41, 42, 43, 53, 61, 71, 72, 101, 130, 183: n = A,T,C or G
agtacttctagaattaattaaggcgggcgggggaacaagnnnncttatgaagnaagaaaantgtttttttnntttgtctctgttctattcagacattcatntatttcttaattcttagttgcctattatngatgaactaaattctgtagaaaatatatggagcacataatagggaaatgagtnacataggattgaattaatgagtacacaaaaacttacttaaaaacactctaacccttacaatcacaagggctctggaaaatgctcttgtggttag

SEQ ID NO: 16289 - DNA, 472 bp, Homo sapiens
  misc_feature 105, 107, 108, 423: n = A,T,C or G
agtacttctagaattaattaaggcgggtattgtcttgagacctcagaagagtactctggctacaataggaagcatgtctaaagaaaagactatatgggattcatngnnatgcattgagaagctgttccagcaagccaggaaaagttcagaatggccaaggcaagagtaagagtattagtaatacaagtacagagatttgggcaatagtttcaaggcataattaataagatctggggtttggttatttgaaggtataaagaagaaaaagagccagatttctggcttgaacaaccaggtgaaggggatggcatctttcactgatcggggacatgtgggaggaataacaagattgacagacggaagagtttcaccattggattgataccgtccaataggcagctgttaggagatattggagctcanaagggccatctaagaggaatttaaatgtgggagtttttaaaataatgac

SEQ ID NO: 16290 - DNA, 411 bp, Homo sapiens
agtacttctagaattaattaaggcgggccggcagtaccagttttccataatattaaaataacttattaaaattacaaaaccaatgcataatcattacaattaatttaaaccttacagatatatttaacctagaaaatgaaagcattctataatttcatccttatagagtaaaattcctctacttttttctgtacatgtactaagagcgattttccccttgtttataagaatgtttatattctgcatattatttttacatttttatgtaattcaatgaacatgcctgtcttatttgttttcatgtctcaatataggtgaactatggtttacttaaccaagctcctactgatagacatttgggttgtttccagtttttacccattacaaccaaagtgaaaataaatatcctct

SEQ ID NO: 16291 - DNA, 441 bp, Homo sapiens
agtacttctagaattaattaaggcggggtgatcttactaacatcagtggaaatgggaatgttgtgtatggattattgatatagggattgggtcattgttttgttttgtttctgataatcattttgactacattaagaagacagtgagtgaaatcccagttttcagtattccagaatagtctgtgacttttcaagactgagaagtagttatttgattaggaaaaaaaaattaaaatctcaattgcctatgttttgagacagcttttatcaaattagtttaaaagcatccccaccatctcccaaccattttgtgatattatattgttttaatttccatttgatttcctattttaaaaataatttgtagttcctctccaaccagtctggaatatacttccagagaccccagagcaagctgaatgcattgagggaattctggagg

SEQ ID NO: 16292 - DNA, 422 bp, Homo sapiens
agtacttctagaattaattaaggcgggggcataatcattaaaaatgtcctgtcactaagttctcaatctattcagttgtttaattctcagtccacagacacaggtctgtggctgcacccctaagaattctagtctgactcaaggagtgagacaaagtgtacagggcaggaggagaaagccctggcttccatggccctaatcctttctttttccattcttctttatcatctggtcaaatagagacttttgccctgtaaatcccaagccagcactgtctccttgtcctccatgtttttggtcttactgacctaggcagtttatttccagagaaataatttttggcatattaaaatagctaagagggagagagatggctaacagtcgatgtgggtatacatttcttttcttttctttttttttta

SEQ ID NO: 16293 - DNA, 328 bp, Homo sapiens
agtacttctagaattaattaaggcgggcctgtctcctattttccgtgtatcattctgtctttttttatagtgtcttccaaacagtttgccaaatactgctgtgtgtttcaagtatgattccgtcatgtgccacccactctacactttgcaaagtctaactctgcattagaagtgctacaataggctgggcgcagtggcccatgcctgtaatcccagcactttgggaggctgagacgggcagatcatgaggtcaagagatcaagatcatcctggcaaacacaaaaatacaaaatactctactctccactaaatgctctaaaatcaaaaa

SEQ ID NO: 16294 - DNA, 391 bp, Homo sapiens
  misc_feature 135, 187, 350: n = A,T,C or G
agtacttctagaattaattaaggcggggtggggggttggaaagacgaggtgagccagtctgtaaagttagaaataccaaatggcttatcgggtaatacacagtgtatttaagctgttgttgcttaattgcctcanactactcaaataacatcaacaacatttcttaagtaaaatttaaatattttanatgtaattttaaaaactgatccaaattttttattatacaactcactcatatatttgaaagtcttcactagcatagtagcatcaccttcatctaaatgtcatttaaattactgtccccctttttcctcccaaaaagacaatggatttgtaccaaaacacacacnaaaaaggcaaacaaaacatgataatctgcaaaagttcatgt

SEQ ID NO: 16295 - DNA, 368 bp, Homo sapiens
  misc_feature 28, 30, 38, 39, 48, 49, 52, 54, 55, 57, 63, 78, 82, 87, 106,108, 131, 140, 148, 163, 183, 187, 201, 210, 211, 226, 229,232, 235, 241, 249, 262, 263, 264, 282, 285, 299, 302, 305,307, 311, 314, 318: n = A,T,C or G
agtacttctagaattaattaaggcgggnanggagcttnnaggcaagtnncancnntncgaacngagctgagacaaccncacntgttngcaggggaaagtggctcgncntaaagtatctgggtcacttcccnaaaaagcanaggccatntcacaaaaggctatntatgctaagttaaggagttnattnatttttctttgganaacagggtnntgttatgtggcccangcnaanctntaactnctgggctnaagcaatcttcannntctacctccctaaatgtnganactacaggtgtganccnccntncccnacnagtnaaggagttttaaactttttcctaaaagctatagggagccaataaatgatt

SEQ ID NO: 16296 - DNA, 544 bp, Homo sapiens
agtacttctagaattaattaatatttctttacaaagccaaaggtacaaaaatatcttttgtttgtttttattgtaatcaaaccccatcagaggctctttaataagtgtatctgttttgccttttactttgttgagaataaacatagctttctaaaactctcctgttttgagatacatatcaaacattggcaaaaatatttgttaaaattcaccgtaactattactgtgttcattggtatatatagggatagaaggcacagtgaccctccttggtttttagctttatatttaaaaaattttacttatgacatttaggctttttaagaactcttgtcgaatacacttttcaaaaaataccaaggaacaaaatttatttttttccaaataaccaattgtgtagtatttttaagggaatattaaacaaaatcttatccagcctgaaagcttcattcttgtatgatacacattataatttgttctgtttaagatctatgtatatatttacttagtaatttaatgcatctcctcttgaggaagggtaaaa

SEQ ID NO: 16297 - DNA, 346 bp, Homo sapiens
ccccctcgagagtacttctagaattaattaaggcgggcactagagtgagcagcaggcagcatggacactggctatccattttgtactacatccagaatgtttccctgcatcctgcaagaaatccgagatgattccctgtttactcacgtgaggatttcgccaataatttcccattaactacagtgatattagcatgcctctcttttatacaaccactaaaagattagtaaagattactaaagaaagaaagattacctctaacacaaagtctgaaggcccacactaatactcacatgtaaaatgcttagtacttactagtcacttagtaagtattcaataaatttct

SEQ ID NO: 16298 - DNA, 565 bp, Homo sapiens
agtacttctagaattaattaagcggggcacacaattacattacattagcaatattaccagcacaggagatggcagaaggaaagaaaatactacattttcttcatatcctaattttgctgagtaagcaaacaattgacagtcaaaaacagtaatttttttataaattaaattctaaggaaatatgcttaacaattttataagtaaacaattacaggctctctctctctcctctcaaaatgaaagctactacataacatcaacacccctccccaaccaagcaatattttagactagtgataaacaaacaaatgcacaggaaaattttagctcatttctagaacatttgttaaatgtctacatctgccaggctctaaaatgcaaagcacaacaaaattacacagaaaattaaagtgcacgggggtctcttcattagggacaattatgaataaaggtaagtcattcaagtacatacacatacataaagtatcattttaaaactagaagccaggcacggtggctcacgcctataatccccgcactttgggaagcccaagcgggggggggg

SEQ ID NO: 16299 - DNA, 394 bp, Homo sapiens
  misc_feature 28, 30, 31, 33, 34, 35, 40, 41, 43, 46, 51, 52, 66, 73, 121,125, 127, 128, 129, 130, 132, 133, 140, 154, 155, 162, 165,192, 203, 219, 226, 235, 248, 253, 255, 257, 259, 260, 261,263, 269, 276, 279, 302, 327, 328, 329, 331, 332: n = A,T,C or G
  misc_feature 353, 357, 367: n = A,T,C or G
agtacttctagaattaattaaggcgggngnngnnngaggnnanganatcannaccatcctggccancatggtnaaaccccatctctactaaaaatacaaaaattagaccggcatggtggcntgcncnnnnanntccagcnacttgggaggctgnngcagganaancgctagaaccgaagaggtgggaggttncacatgagctnagatcacgccattgtnctccagnctgttgacntagcgagactccntctcnancnannnanttacantaaaaanccnggaactgctctgaacacaaaaanaacattggatggatagtaagtaaannntnncttatattgctacaaaaaatnttcncaataaatgngacttgaagcgaaaaaaaaaaagcggc

SEQ ID NO: 16300 - DNA, 431 bp, Homo sapiens
  misc_feature 37, 39, 40, 44, 54, 57, 64, 67, 69, 71, 74, 75, 76, 80, 84,87, 89, 90, 94, 96, 103, 109, 119, 123, 128, 141, 146, 148,157, 158, 161, 167, 177, 181, 183, 184, 190, 204, 209, 213,216, 238, 255: n = A,T,C or G
agtacttctagaattaattaaggcgggggagggaacntnntttncaaattgcanccntgtggtnaancntngannntcantctnctnanntatnangccattntttgtngctctaaaanaatntcgcnaaacctcatacantattngnagggcttgnnatntcaatnggtcaattanacanannactacnagaagctgtccgtnaattnaatntcngtttgtgtttatggatcccaanaatatatgcacactctngaaaaacaggactataagtacatgtgagacatttactaatattcaagccgtgcctgctgcttgtcaggatgtgtgggctccttgcaatcatgctgcggccctgacagggcctaatctggctcaaagtggacatgctcagaaataatctacttgatgattctcaaccacagtttggt

SEQ ID NO: 16301 - DNA, 313 bp, Homo sapiens
  misc_feature 8, 42: n = A,T,C or G
gctgaatncccccgaccgttctaatttccactattgacccancttgcctcagagcacctccctgacaaagtggccagttactatgtacttagagattgcaaatcaatgcaaatattagctcatactaggaataattaagaaggtaaatatgctgaaaacatatattccaaaaccaaaatagattttttcgattttaccctcatttttgattatcaccacctttctgccaataattatccgttaacatgaataatttaaaattgaacagatatctgctttggacattacactttcaagaaaaaaaaaaaaaaaa

SEQ ID NO: 16302 - DNA, 399 bp, Homo sapiens
agtacttctagaattaattaaggcgggtggattgcttgagctcaggagttcaagagcagactgggaaacatggcaaaacaccaaaaatacaaaaattagccgggcctggtggcacatgcctgtaatcccaactcggcaggatgagacaggagaattgcttaaacccgggaggtggaggatgcagtgagctgagatctcaccactgcactccagccctccagcctaggcaacagagggagactctgtcaaaagaagaaaaaaaaagccataaaagtaccagaaaaaaatctggaatattttaataatattaaggtggagaaagccttcctgagcatgacttaaaaacccataagctataacataaagagtaataattttggctacattaaaatttaaaac

SEQ ID NO: 16303 - DNA, 585 bp, Homo sapiens
  misc_feature 544, 553, 572, 576: n = A,T,C or G
agtacttctagaattaattaaggcggggccgggcacagtggctcatacctgtaatcccagcaattcgggaggccgaggcgggtgcatcactggagcccaggagttcaagaccagtctggccaacatggcaaaaccccatctccactaaaaatacaaaaattagcccggcgtggtggcagtgcctgtagtcccagctactcaggaggctgaggcaggagaatcactggaacccgagatcgcgccactgcacttcagcctgggcgacagagtgagactctgtctcaaaaaaaacaagcaacaacaacaaccaaaaaaaccccacacaaaacaggtggaatatccataaggatcagaactgaatagagggaatgggaatttccaggaaatgcaattaaagaaaaaagctagaaaacaaatcagttatcaggttcagggaaaacaaaaaggtaatttaaaaattgtaattatgatatacattatacatctcaggagggaaaaaattcctgttgaaaaaaactaaattttttcaaaatttggaattttncttttactnaatttttttacttaaatgnaatnttaatttaa

SEQ ID NO: 16304 - DNA, 457 bp, Homo sapiens
agtacttctagaattaattaagggcgggtcacaaggtcaggagtttgagaccagactggccaatatggtgaaaccccgtctctactaaaaatacaaaaattagccaggcgtggtggtgcgtgcctgtagtcccagctactcgggaggctgaggcagaagaattgcttgaacccgtgaggcagaggctgcagtgaggcgagatcgtgccactgcactctaacctgggcaacagagcgagactctgactctgtctcgaaaaacaaaaaaaagactgagctggaccagagggtttctaggtctcttctccctccaaatatacattctaatacataaaaggatctctgtagagaattttaaaacttttaacagtattttaagtaacagcaagacttagggagtacatgaaaaacaagtatgaccttaaacaactagctaggccctgatacataactatatg

SEQ ID NO: 16305 - DNA, 412 bp, Homo sapiens
  misc_feature 25, 33, 94: n = A,T,C or G
agtacttctagaattaattaaggcngggggggnaccatattgaaaggatactaaagggacctacctaaaatgtctgtaatgtgaaataaataanctgtttaatttttgactcctaaactgactcttttctgccagttttacttaatatatgtgtatttcccacttgtgaggtgattgaaaggaaaccttgaactatgctacagccattcagtaagaaattctctataaagagtggcaaaataattcagattattagaatgttgctgtctttatcaaagtcaaagctaattttgttttatgaagcccgccaaaagaaaatgcttggggaaactctccaggacatcggtctgggcaaagatttattgagtaataccccataagcacagacagccacagcaaaaatggacaaatg

SEQ ID NO: 16306 - DNA, 394 bp, Homo sapiens
agtacttctagaattaattaaggcggggttgaggaatgctggggtggcagctactcaccgtgtgcttcccagggagcatcacctgttcctctgaagccctgcctgggtggcttgagcttggaatcaagctgacccattttgagagagtggattctgagctttttcctagcgtaaggtcgttttgataaaggagtggtcctttggacatccctgttctgccgtcctgatacctctagttgtgggttttatgtgtagcacagggtgaagctttagttctcagaacccacccctgctgtaccctgtgccctcgccctccgctgtgtttgccctgaccctcctgtaccctgcgtcctcgccctctgctgtgctcacccgaccctgctgtaccctgcgc

SEQ ID NO: 16307 - DNA, 412 bp, Homo sapiens
agtacttctagaattaattaaggcgggtcaatgaacaagtgtccaagccaaagacttagtactcagggtaagtgtccacataggctggtgcagctggttttccctctctactttcctttttcttctcccaatttacagcacaaaccaagctaaaatgctagctcaacttctctcttttcacttcaaaacaacccagctcaccagccgggcatggtggcagtagctcacgcttgtaatcccagcactttggcaggccaaggcgggtggatcacctgaggtcaggagttcgagactagcctgagcaacatggcgaaaccccgtctctactagaaatacaaaattagctgagcatggtggtgcatgcctgtaatcccagctacttgggaggctgaggcaggagaattgcttgaac

SEQ ID NO: 16308 - DNA, 320 bp, Homo sapiens
  misc_feature 33, 45, 104, 138, 148, 156, 171, 180, 186, 190, 192, 193,200, 203, 204, 206, 208, 210, 212, 216, 218, 220, 221, 223,225, 228, 229, 231, 236, 237, 245, 254: n = A,T,C or G
agtacttctagaattaattaaggcgggaggatnacctgagcccangaggtcgaggctgtaatgtgccctgattgggccactgcactccagcctgggtgacagancaagaccttatctcaaaaaaactttaccaaaaanaaaaaaaaanaaaaaaanataagggggcccccnctggggggnaccccnattncnncattatntgnntntntnancccncncnntntnccnngntttgnnaaaaccanctaaacaanttcctgtgggccttggagtactccttgataccttccaggccccagtttccccagtttgggtttaag

SEQ ID NO: 16309 - DNA, 607 bp, Homo sapiens
  misc_feature 44, 54, 55, 64, 69, 71, 87, 104, 109, 114, 118, 122, 129,131, 132, 145, 148, 150, 250, 254, 256, 262, 266, 268, 273,275, 276, 278, 286, 295, 297, 299, 300, 303, 313, 318, 319,320, 326, 328, 336, 339, 347, 354, 359, 360, 361, 367: n = A,T,C or G
  misc_feature 374, 380, 383, 390, 391, 398, 400, 410, 416, 419, 423, 429,453, 454, 458, 472, 473, 476, 478, 479, 487, 489, 494, 496,497, 499, 508, 513, 530, 535, 540, 542, 550, 551, 555, 557,559, 565, 569, 573, 582, 586, 588, 590, 596, 604: n = A,T,C or G
agtacttctagaattaattaaggcgggggacccctggggcatgnaggggaccanncgtcccttnccatncntgccctgccaggctgncctcacagcagcgtccncacangggangaanccanggcagcngnngcggctcctggtnccnanctttccttaaaaatgagcccatggatgttgcagtgagccgagatcacgccactgcactccatcctgggtgacagatcgagacttcgtctcacctttttgnagtntntaacanaaantntaaancnngncccccccncgggggggntncnncanggcccccggnaaggnnntaaaantntccccccnaantggggaanttttttnaactnnntttaanttccccnttttgnaanacataanntccagtncnaaaatataancctgtnccntttnaaactngaaaaaaaaatttaatttttaaanntccngggcgggggcccannggntnntgccttgnantcccnanncnttttaaaangcttnaggggggaaagaatttntttgnggccngnaaaattanntaanancngggggnaaanaaangggaaaaantttntntntttttnaaaaaaanttt

SEQ ID NO: 16310 - DNA, 165 bp, Homo sapiens
aatcgtttcttctgccaactcgaattctgtccacagttcctgacacctaaatgggtccaagctacctagctccccctctagcctgcacgctccacccaggaaggacaaggcagaggctctggcgagtacagtatctttttcttttctttctttcttttttttttt

SEQ ID NO: 16311 - DNA, 475 bp, Homo sapiens
  misc_feature 29, 34, 58, 64, 66, 418, 439: n = A,T,C or G
agtacttctagaattaattaaggcggggnggggnatcactcctctcttaatataaaangctatntnacttatgcagggtcttgcagctagttaagtggtaacatagaaattaaaatctaagcttggattccaaataagttttactttcttgagaataaacgtcctaccacagggcatagcatttttgctgtatgacttagacaacttttctgcatgcaaaattccttttgttgattgatgaataaacatcaatgctaaatgtgtttatattaatatagcagcaatggttctcactagctagtgatagagagttggagagtcggtttattctcctgtcattttaatttttatcttatccttcatttccttactagaaaatcaggcacatgccatctttaaaagctgactagaaatgtangtcactggaagcagtactgancctttgcatgtttttttttagtctttttactttgcc

SEQ ID NO: 16312 - DNA, 201 bp, Homo sapiens
agtacttctagaattaattaaggcgggcaagtagaccagacactcgtaatccccgatctctgtcattcaactgctattgcaatgatttaaatcaggactcttgtccctatgggagctagattaattctggatcgccccttattctcaaggaacagcctttcagagtcccaaccaaatgccaaggagtgttaataaggggtc

SEQ ID NO: 16313 - DNA, 292 bp, Homo sapiens
agtacttctagaattaattaaggcggggactaggcaacgggattaggaaataatagtatccagataatttgttaatattttctcagttgtgtaaatgtgtcattatatttactttttgcttcttgtaagagtacatactgagtgaaaaatgttgttttgcattaataatgtgactctgcatttcatgcaacttcatatgttattgcattatggtagatttagtgctttttatattctactctttctgataaaagaaaaatattttataaactgactttcccttataggttat

SEQ ID NO: 16314 - DNA, 432 bp, Homo sapiens
agtacttctagaattaattaaggcgggctgagttcacttgacttctgactcccatccttcccattggtatacgtggtgctacactcataaatttcttaattttccggagtacagctagacaaggcagaagtgaggcactgcttgggaggagtgggggaaaatgaaagagaagtgcttcctggaattccgcattccctattccttaggtcaggattatctactcctttctgagataatgtcttggaccttgtgcaatagttcaatcgtgtgtgtatatatatatatataaatatcccatatatatatatatatatacgtatatacacgtgtatgtatatatatacacgtatacacatatacacacgtatatatatatatgtacaagctcttggggggatggaaatctgggtatttctcatcgtatactctttt

SEQ ID NO: 16315 - DNA, 436 bp, Homo sapiens
agtacttctagaattaattaaggcgggcagattcttttgcttaaacttccttctcttctctcatcctcttgtaataaaatgatgggaattcgttcaacatttttctttaaagtgatcttaaaaatagagatcattgatataatcagttgatgttaaaatgaagctaatctctcttctatttgcttatgatagatagcagctaaagtctatgaagattccagtgatctcatgcataaagcaaacagtgccataatgtgcttactgcaccaaaatcaatgccatatattttttattggtttataaaaatgtataaccaagtaatatagcaaataacatcataattaaagtcagaagaaaggttaataaaatatttaaaatgtgacaagatattatatctctattatgcaaagaacttgtacatattgtgaagaaaagg

SEQ ID NO: 16316 - DNA, 298 bp, Homo sapiens
  misc_feature 114, 132, 136, 147, 181, 241, 261, 263, 266, 278: n = A,T,C or G
gggaccttctggtccttaagaatacggtcaccaattcttgacctaagatatagattgatttctttaaagtcaagttttatcttggtttgggatttataacccttccctctgaanagaaagcagggtccattntatntctgatcgcanatgttcttcatgtgtcagcaacatctgacttctncaaaaggtaggcttctgaatcatacaaaatcaggactaaaaaggctgctcatgatcctcnggtgaaactcgctcatcttntngangacaaaggaaantctgtgtgtaaacatattgg

SEQ ID NO: 16317 - DNA, 444 bp, Homo sapiens
  misc_feature 90: n = A,T,C or G
agtacttctagaattaattaaggcgggagaatggcgtgaacccgggaggcggagcttgcagtgagccgagatcccgccactgcactccancccgggctacagtgcgagactccgtctcaaaaaacaaacaaacaaagtgcgcagcagtgtctggaacgcagtcagggatcaataagtgttagcaattatttccctggttaaccaaaagctgcctatagtttggtatggctgacacatgggaggtaggctagtggtggtgggaaaggctggaactgcggggtgactaggtaagcagtgaccagatcaggactttgcatgtcattaccaagaggatggactttaatcctcctggtcacaatttctgaagccattcctaatgggagacaagtgtgatcttctatctacaggagtgaggctatggcccaagaagccctccaaaaacat

SEQ ID NO: 16318 - DNA, 415 bp, Homo sapiens
agtacttctagaattaattaaggcgggagccaccgcgcctggccccaaaattccttttttaaaccaatattctagtggcgcactattctccaacaattcccacattaaattgttgcatgacccctgtagtaaaaagcattactcagatctgacaaactcagacacccccagtttttacaaatttagtgacaccccctcaaagctaacagcattatcatataattgggaagagttgttcctaagagagaacatgagttccagagatgtataagaactatctatatgtgtaatctgtctggccagttagccccagaaatgccctggacacaaaatctgtccaagctgaaaacaaaatttgccatctctagcacatcattctgattcaggtggtctttactacaggacttttttcgtg

SEQ ID NO: 16319 - DNA, 439 bp, Homo sapiens
  misc_feature 249, 254, 279, 304, 421, 439: n = A,T,C or G
agtacttctagaattaattaaggcgggcataaccttcctactctctctctctcacacacacacacacacacacacactgtctctctctttcatttccatattataatgcaagttattgaagttcttctctttgtcttttattcccctgctcaaacgtttttaatgattttcagaattttgttgcaagttatagattacacattatcatgtggactaccatttaataattactgtcttgcctcttatganacagngaagggtgttcccaagttgtggtanacagggtgtgttcctctttgcttgngatactaccagtactagttttcattggtcctaaggtgcatattttagcattgccgaaatccagaagtgtcttaaaattgctggtgaccaggtgtcagctgtgacgtattatcattgnctgcacctgtgcaacttn

SEQ ID NO: 16320 - DNA, 242 bp, Homo sapiens
agtacttctagaattaattaaggcgggtgaattcacagcaaatgcaaatataaagccacagaactaagggaaattttgactctggactggcagtggggagaagaggacatctaggatactcgtaatgacctttatcttaaaggggtgtaatataaacatttattgagctgcacacataataactgtgcactttggccgggcgcagtgacagagtgagactccgtcgcataaaaaaaaaaaaa

SEQ ID NO: 16321 - DNA, 320 bp, Homo sapiens
  misc_feature 82, 107, 148, 149, 150, 151, 159, 160, 167, 171, 172, 175,176, 179, 180, 181, 182, 183, 184, 185, 186, 192, 206, 207,208, 209, 212, 213, 219, 230, 233, 236, 250, 283, 295, 320: n = A,T,C or G
agtacttctagaattaattaaggcgggggttgcagtgagccgagatggcgccactgtactcaggcctgggcgacagaatganactctgtcttaaaaaaaaaaaaaanaaaaaaaaaaaaaaaaaaaaaaaaaaaaaaaaaaaaaagcnnnncccccccnnggggggncccnnacnnccnnnnnnnngggatnttaacccccccccnnnntgnnaatgtnaaaaaacattnttnctnataagcagggatgnaaaactcgggatgctttccgctataactactanaaaccctaattncagctaacttaaacatgaaaacagn

SEQ ID NO: 16322 - DNA, 440 bp, Homo sapiens
agtacttctagaattaattaaggcggggatggggtgtagatagataccaatcagttactttatcagacttcacatacagtaattttcttttgcagacaggctctatacctacacgtcaagcacgtaaaactgataaaagacaacgagaggccaggcgcagtggctcacgacagtaatcccagtactttgagaggccaaggtgggtggatcacttgaggtcaggagttcgagaccagcctggtcaacatgatgaaaccccatctttactaaaagtacaaaaattagctgggtgtgttgacgtgcacctctaatcccagctactcgggaggctgagacaggagaatcgcttgaacctgggggacagaggttgcagtgaggcaagattgtgccactgcactccagcctgggcaacagagcaagactccgtctcaaaaaaaaaa

SEQ ID NO: 16323 - DNA, 311 bp, Homo sapiens
  misc_feature 50, 143: n = A,T,C or G
agtacttctagaattaattaaggcgggtgaatcacttgagcccaggagtnagagataacttctgatccaatagaaagctctagagcacacagagcaaatatacttcatcagtcgagctgtagtttctctgtaaaaaaacttcnaacgacttccaaagttcaaaaaaaaaatgtaaagacaacagcatgattgctaaagattcatgtggtcaaagactggaagaatgacacagtggaggtgttccctcaggggaattgtgggtgatttctcttaaaaaaaaaatgcctcttattgtgatcccaatcaagtaa

SEQ ID NO: 16324 - DNA, 452 bp, Homo sapiens
agtacttctagaattaattaaggcgggagtaaagcaaaaaacagtatcatgagaaagcagccagtcaaataaagaatatgggatattttatgggatataggttctggattcattaacaaataaatagtataaaaaaagcagcaaagagaggactaataatagaattttttaaatttgagagacaaaacagcaaaatgcaatgcactgaccttgctgagatcctgattcaagcaaaccaagcctgtgatattttcttagaaatctgaataggaattgtaaatgataataagaaattcttaatttgttaagcataaaggtagtttttaaaaaagaccttctcagctaaaagtgatgcatgccgaagtatttaatgatgagattacatgacttctaaacttgcttcttaatattccagcaagaaaaaatgtggatggatgggtgaaggttaatag

SEQ ID NO: 16325 - DNA, 277 bp, Homo sapiens
  misc_feature 50, 59, 77, 95, 190, 200, 205: n = A,T,C or G
agtacttctagaattaattaatgggtaaggacctataaggtgtacaattntaaaatttntcttcaagatcccttgtnaatttttaagttttattntcaatgatgcccagaagaataacttaccaaatattttttatcaaagattatttctgctgtgaatctgacctagctggaacaaacatatagtatanaaaagttttnatttntatattgctattaacataaaatcatgtgtgcacacaactcacaggaaggaggttgaaaggggttaaatattt

SEQ ID NO: 16326 - DNA, 363 bp, Homo sapiens
  misc_feature 335, 342, 343, 345, 346, 348, 349, 355: n = A,T,C or G
agtacttctagaattaattaaggcgggggagatgtgtgttctctgtactgtttttctttttaatacatttgtataagcttgaaaggatttcaaaataagtggtttttaagtatgtgcagtataatcattcctttaaaacaacacattttgtagaaataaacggaaaagctatatataaaaatatttgtaatgcttatctctgagtgtagtgattataagatacaggtaatttaaatttttgtttttaaaattgtgtacattcattatacactgagtataaatattaaaatatcactttattcttaagctaatttgtaacctatattagctaatangggaacnnannannaaaaanaaaaaaaa

SEQ ID NO: 16327 - DNA, 364 bp, Homo sapiens
  misc_feature 32, 347: n = A,T,C or G
agtacttctagaattaattaaggcgggaaatncagaccttaaaaatggaggcatcattatgaatgacctccaggctgtgtgcaaaagaaacattgtccataaatgtctgggacattgttcttattaaaatcaaccccaaacatatacatattgccatctgttaagttcctattttgagagaataattctgtttaggactgaactcaaaaaacataccaatgtatcttgctatcctagcctcccatactattacttaattgcaataaaattgtaccgtcttaaatagaaaataaccaagaaatactaatgttgattcaatattgtctgactctcaggaaatgcaatanaaaaaaaaaaaaaaaaa

SEQ ID NO: 16328 - DNA, 333 bp, Homo sapiens
  misc_feature 6, 18, 45, 46, 49, 70, 71, 76, 130, 143, 179, 293: n = A,T,C or G
tgggtnccgggccccccnttgagagtacttctagagtgaataaannatntcaaataaaaaatataaaatnncatanaatctgatccatgttaatttaaaaataattttaggtgaaaaagcagtatcaaanttcaacttctctnaaatcagcatgaagtaccaattacctaatacaaagntggaacaagacataggcaatattttcagaaaattacacataattcaaagtaaaggcatagaaaattacattttaatatttttcaatttatttgtcatataaatattacgtgagnatgatggtgtttgctcctctttcccttcctctttctgttt

SEQ ID NO: 16329 - DNA, 445 bp, Homo sapiens
agtacttctagaattaattaaggcggggaagcagaaggggagggtgactgtctccaatgcttttattgcagcctccaggtggaatagtgaagtggccaccttaactgcctcctggagtgtgagcagagaggaccaggacaaggctgcaatctgttggccaggcaccaactagcctgtgaggccaaccagggaccgcaggcatcaccaggaacaaggctataaaaaggcctcaaagagtgattacaaaattccacaccaggagaaagactcccagaagtttcccagggctcatacctgctgtgctcattaaagccacagtgttggctgggcgcaggtggctcatgcctgtaatcccagcactttgggaggctgagacaggcggatcatctgaagtcaggagttaaagaccagcctggccaacatggcaaaaccccatctctaccaa

SEQ ID NO: 16330 - DNA, 415 bp, Homo sapiens
  misc_feature 164: n = A,T,C or G
agtacttctagaattaattaactgaaaaatagaaaacataatctatataaacaggctgttatgaagctaagcatccaaatcaaaggaatgataaagtaagcaacgaaacagtcactgaacagaaatatctacccaataaaaatgacatggacggctgggcacantggctcactcctgtaatcccagcactttgggaggccaaggcgggtggatcacctgaggtcaggagttcgagaccagcctgaccaacgtggagaaaccccgtctctactaaaaacacaaaattagccgggcgtggtggtgagcgcctgtaatgccagctacccaggaggctgaggcaggagaatcacttgaacccgggaggcagaggttgcagtgagccgagatcgcgccattgccctccagcctgggcaac

SEQ ID NO: 16331 - DNA, 431 bp, Homo sapiens
  misc_feature 40, 41, 56, 57, 77, 100, 103, 205, 226, 230, 264, 279, 321,331: n = A,T,C or G
agtacttctagaattaattaaggcgggccttctaattggnngacaaagtaataatnntaccaatcttctttctagtntaaagatataaaacaaataattntanatattttatccttttggaatataaaagacagatatagacattataaatcccactcaagtttagaattaacaaatatttcattttgcattttttaggttgctnttgaatactttctgagttcantgantgatattcatcccttgcttaccacataccacccncctcacaaaggtttncaaaagaaatccaattcaggtaaatgataattgatgtggganttatcataancgaaatatcagaaagcagccacacaatatcttatattgccaaacattgataactgtgactaaaagtggaagttctctatttttaaaagtttttaatatta

SEQ ID NO: 16332 - DNA, 269 bp, Homo sapiens
  misc_feature 28, 143, 147, 148, 151, 161, 166, 168, 173, 174, 175, 180,181, 182, 197, 199, 205, 212, 220, 224, 226, 242, 257: n = A,T,C or G
agtacttctagaattaattaaggcgggncatatttgcacctgcaagtcttttgtaccacgtaacttgggtgtaatgtaaacaaaacaagataatttgaagccaacccccataaaaaaaaaaaaaaaaaaaaaaaaacgggggncccnnccngggggggacncaaantnccctnnnagggnnngtttttacccccccntnttgggnggttttnaaaaaaangatnanatcacttaagcctganaggttgaggctgcantaagctataatt

SEQ ID NO: 16333 - DNA, 350 bp, Homo sapiens
  misc_feature 55, 75, 166, 176, 217, 264, 268, 298: n = A,T,C or G
agtacttctagaattaattaaggcgggagctgaatatcatgagtcctaaaaattncagattcactattcacgatnccagagctgtaataaaatatctcacatgattcatcatataaatatcgctattttaactcttctgtgagaccttttctaactattccagcanaagcctcttnttccttctttaaacccctgtaatattatatataattacagnaattattaatattttggttttatatcacttaaaaaattggccattcnccantatactcaaatatatttagatggccacttnttagtattattactattaatagtttctagactgtgataaagagaaattttct

SEQ ID NO: 16334 - DNA, 316 bp, Homo sapiens
  misc_feature 37, 96, 113, 137, 164: n = A,T,C or G
agtacttctagaattaattaaggcgggggggttgtantattgtgaggagacacttaacttatggaagcttcattttgttttcagtaaatggagcancaacaccattcttgtancattactctgaggatagacatcanttaatgtatgtaaggtgccgggctcanagctagtgcatagtacacagtcatcccttttctccctccccatcaatcttccttctcttctttcttccaggtttttttcttttaatttatttttagagacaaggtctcactccagcctgggcaacaagagcgaaactccgtcttaaaaaaac

SEQ ID NO: 16335 - DNA, 451 bp, Homo sapiens
  misc_feature 35, 39, 50, 62, 83, 87, 95, 96, 102, 107, 137, 141, 145,147, 161, 173, 179, 180, 181, 182, 196, 227, 236, 237, 238,267, 269, 287, 294, 433: n = A,T,C or G
agtacttctagaattaattaaggcggggggaaccncttncaacaggtggnactaatcattcngggttatcgaaagttctctgngtanttggattnnaagctnctganttaatctgatagaactttctcatctggttntaanaagngnggttaatggggatntcttgactgtanaatcannnntaaaacaccacatntacttctgacagtaggtaaatgttaccttgngcagaattnnntggccttggtggtagttagtataaattantntgaattaacttgggcatntgtgaantttactatagcataaattaatgaaggcctatgtgaaattttgcaattattttctatattcacctaaaatggcattgcactggaaatatagtatgcttcttttgtgatttctacatatctctgtttttttctcatatcanattctactttacccctca

SEQ ID NO: 16336 - DNA, 442 bp, Homo sapiens
agtacttctagaattaattaaggcgggaatgagccaagcccactcaccaagggaagactacaagaccaattaaaagcattccctttcctctccacatccaaattgggatctaaaagctatgattagtcttgattacttaatattttaaagggagagggacaaaataaatgtaaatctataaatagttccacgtgtagctgattatctgcaaagaccttgccatcaacttactattgcttttgcattttgtggattcaattccaatcagaattgttatcctctcaaacttgcattgtgttgccttgcttggttcaagagacaggagaaacccaaaatactaaaatatcacttatgttatattagcctggaaacctccacacagggttaaacacatcaaaacttaaatatacttttccaatgttaatcttattataggtctgaa

SEQ ID NO: 16337 - DNA, 384 bp, Homo sapiens
agtacttctagaattaattaaggcggggggaacaggaaaaagaggtagattctaaaggtgtttgagatgctctatcacaataaaaacattttttgtttcttgaaattatgcctataacttacctgaaatcatccatactatccttttccttgtaattaatcataaatttatctgaaaaagtcctacctatattaagaagattgaaactagagcaaaggaaaagtctattttcttactctgttaaaacacaaagcaggccaggcatggtggctcacgcctataatcccagcactttgggaggctgaggtgggtggatcaggaggtcaggagtttaagaccaggctggccaagatggtgaaaccccgtctctactaataatacaaa

SEQ ID NO: 16338 - DNA, 446 bp, Homo sapiens
agtacttctagaattaattaaggcgggtggcacaatcactgaaccatataaacatagagaaaacagaagagaaagcagagagcagttgctttagatgtcaggcacacacaggctcaaatcccagataaagtcattctggcacaggcatttagtttcaatttgaaatagatgttcagagaaatattcagccttgccacatcaatatttgtagtgacagagctcagggaactaacaggaaaaaagtgtggttttttaaaatttgattttttgtattgtgggtttgattgccactaatagccagcagatggtatagacatattagggagagaaaattctcataggttttgggccaaaataatcacttatactttaaattgcatcataactttgagaacagcaaaaattcttttcgatgaaatttttcaataataaaaataattttaaag

SEQ ID NO: 16339 - DNA, 234 bp, Homo sapiens
agtacttctagaattaattaaggcgggttattaaagaggaaatttgagccagctgattacaaacacataatcaaagcttctgagcagtcacaaaatgagataaaggtttcagtgttttcacgaaaaactgatatactaattcctgtgagtaaatgagatcttcaagaaagagaatgtaaaaattgaagaacttaggacatgttgttcaatcttagggaatagacaaaaaaaaaa

SEQ ID NO: 16340 - DNA, 506 bp, Homo sapiens
  misc_feature 322, 323, 324, 325, 326, 327, 328, 329, 330, 331, 332, 333,334, 335, 336, 337, 338, 339, 340, 341, 342, 343, 344, 345,346, 347, 348, 349, 350, 351, 352, 353, 354, 355, 356, 357,358, 359, 360, 361, 362, 363, 364, 365, 366, 367, 368: n = A,T,C or G
  misc_feature 369, 370, 371, 372, 373, 374, 375, 376, 377, 378, 379, 380,381, 382, 383, 384, 385, 386, 387, 388, 389, 390, 391, 392,393, 394, 395, 396, 397, 398, 399, 400, 401, 402, 403, 404,405, 406, 407, 408, 409, 410, 411, 412, 413, 414, 415: n = A,T,C or G
  misc_feature 416, 417, 418, 419, 420, 421, 422, 423, 424, 425, 426, 427,428, 429, 430, 431, 432, 433, 434, 435, 436, 437, 438, 439,440, 441, 442, 443, 444, 445, 446, 447, 448, 449, 450, 451,452, 453, 454, 455, 456, 457, 458, 459, 460, 461, 462: n = A,T,C or G
  misc_feature 463, 464: n = A,T,C or G
agtacttctagaattaattaaggcggggtaaatgatgaagattaaaaatatagtcctttccttcaaagattttaagcattaagcctagaagagaaaatgaagtaggatacaaacaactacagtacaatgcaatatataataaatgtcatgagatagaaaatattcttaagttttgaggagagactgaacatgagtaggggaaaataaggaaaaaaataaatatgcaaaatttgaatttggccttgaagtattccagctgacagaatgtagtaaaaatacaggtgaggaaaaatcactaatcatagtatgcctgaaaaaatannnnnnnnnnnnnnnnnnnnnnnnnnnnnnnnnnnnnnnnnnnnnnnnnnnnnnnnnnnnnnnnnnnnnnnnnnnnnnnnnnnnnnnnnnnnnnnnnnnnnnnnnnnnnnnnnnnnnnnnnnnnnnnnnnnnnnnnnnnnnnnttcccagctggcgtaatagccgaaagaaggcccgcacccgat

SEQ ID NO: 16341 - DNA, 332 bp, Homo sapiens
  misc_feature 51, 314, 319, 320, 322, 325, 326: n = A,T,C or G
agtacttctagaattaattaaggcggggaaaggaatagtgtgtagcatcgncttagtggtaagacttaagttgatttagtagcaaatggaagtactagtgaaccacatagatttcagaagtaggagtaaaaggttagaagatgtgtcattttaatcttctctagactttttcttaatttttagaaatgtaagtggactgaacagaggaaaaccaaaacacagctggtcaataataagttaaattaatttgacaaactgcctgctatgcatttcatagcattttaaggactatataagcaatggaaaaaaaaaanaattnnanaannatataa

SEQ ID NO: 16342 - DNA, 365 bp, Homo sapiens
  misc_feature 84, 95, 135, 206: n = A,T,C or G
agtacttctagaattaattaaggcgggggaagtaaaataaccaattgtttcatttgcatgtaacagataggaagaataattaanaaaaacaaacnaacaaaaaacacctgtttgcctagtgtcagttgcacccanataagtttatttttctttcagcatcagaaaagctagatctttttattaaaatccatttatctctagctganatgcatcagtgattctgttaaataaaatttagtgttaatactgttatttgagagacattttagtttgattataaagagatagattcaaatagaactaaaaatggttttggtaaaaaaggaacaggttaattttttcccttctcatttgaccattatttt

SEQ ID NO: 16343 - DNA, 410 bp, Homo sapiens
agtacttctagaattaattaaggcgggggtaggcaagagtctgtgtatagtggagagctctgaatccccatctcccacaggaagtcagttaataatatctaatatcactgaatcaagagaaaatagaacaagcatttatgtagaaaaataaaaaagatgtccagaatgaagggcgaggtggctgcctctggggtaatagaccccgaggatgggagataggaggacaggaggtcactgctcttttcttagatccttgttagctccatttagtgtttttctcctttacttttgtgttttttgtctgtttttgctttgatagacgaaaaaaatagtttcaaaaattcaatgaagaaaataacatcataaactcaaaataggggcaagcctagtcttaaaactgacttggggca

SEQ ID NO: 16344 - DNA, 238 bp, Homo sapiens
  misc_feature 37, 38, 52, 57, 58, 62, 63, 65, 66, 119: n = A,T,C or G
agtacttctagaattaattaaggcgggggaagggtanngttataaggccgancatgnnaggnntnnatacgtaaccgattttgcacgtcataaaatgcttcccactggtgacatctaanctgagacctgaaaggtgagtaggatttggtcaggtgaagaaagagggaaggttgtgacatgtttatggaattgaaaatagttcaggccgggtgtggtagctcatgcctgtaatcccagt

SEQ ID NO: 16345 - DNA, 452 bp, Homo sapiens
  misc_feature 57, 96, 143, 211, 259: n = A,T,C or G
agtacttctagaattaattaaggcgggatgtgaagaagcccgaggtaggcagagcanatggtacaggacttacagatcaatgtaaaagaaattcanaccttcaacttgttgcaatgggatatcactgcagggttttaaagcanaggaatgacatttgtttatgctacagaaagatcaccttagaaaatgatggtctgaggtcaggagttcnagaccaccctggccaacatggtaaaaccctgtctccaccaaaaatacnaaaattagctggacgtggtggcgcgtgcctgcaatcccagctacttgggaggctgaggagagagaatcactttgacctgggaggaagaggttgcagtgagctgagatcacgccaccgcactccagactggacgacaaagcgaaattccatctcaaaaaaattaaattaaattaaattaatttaaaataaataa

SEQ ID NO: 16346 - DNA, 449 bp, Homo sapiens
agtacttctagaattaattaaggggggaaaaagccttgctataaactgtattacaggaatactttcattatgtaaaaacctattttgttttcatgtcattcttagattacatcatagagtggctgcagccatctcacactatattataaataaatcactggcttaatcatagaatgagccagggcctcagatttaaaaggaaaacattagatcatttttaataactgatataactcaaaccagttggcattgaaccacggtgaggtgatctcatcctgaagaagtccaaaaaggacccaaagcaggtcagagctgagcaggtcccagagacacttccatttacagatgaagaggttgctaatggcacctgagtagaattcacccctggactagtcttgccattaaaatcaacacttactttccagtagtgatgcccaataagccttccc

SEQ ID NO: 16347 - DNA, 244 bp, Homo sapiens
  misc_feature 231, 232: n = A,T,C or G
agtacttctagaattaattaaggcgggggaactgagaggaatctctggagtcacttattggaattgcctattcccactgagaaagccgcgtgagaattttccaggggacacaaatatgaggagtcagtttaagatctgattccctgattcctggtcctatttctttgcatcaataatgtgccctcactcctgatacagtggagagcaaagtaaaaacagctaaactattcnnaaaaaaaaaaaa

SEQ ID NO: 16348 - DNA, 391 bp, Homo sapiens
agtacttctagaattaattaaggcgggaacggtggaggaaacccacatattcagataaagcacaaaattgtcaagaaagtagagaatcagacttagtaaaatatggtaacagttcaagggatagatatgctacaacagatactgcaaaaaatagcaataatgaaaaatttattggtgatgaaaaagataagagacctgggtctttagaaacgtgtagaagagaatctaacccaaggcaaaatcaagagttttcttttggcaatttgagagctaaattcttgagaccctctgatgatgaagaactgtcatttcacagcaagggcagaaaatttgaaccacttagttcatcttcagcattggtagctcagggctctttgtgtagtggttttag

SEQ ID NO: 16349 - DNA, 511 bp, Homo sapiens
agtacttctagaattaattaaggcggggttgactaaatctattagttagtgattaacaatttaactagggatgaggagctgatagtaaactctattcttaactagcctgtaaactcttaggagcattaactcaaatccaggagattctctttgcaaaataggattgtggtggctatagatgctaatagcaaacctaaagaagagtgatgattattccattgtgtagtagcaaaacgaagtagcccagctagttatgggaaatatataattgaaaagcccattattaagttcacctactgagggagtttactgtcagttattgcaatcataatcccagtgattgcaaaggttaatgtgccttgcatgactctggcagacagcatggccccaattttgtattatgtgtagtcatagcctgactttctgattacattctacacccagtctctcatctgacctctttagcaatttaatcctagtcttctaagtctttgtttacattaaatgacta

SEQ ID NO: 16350 - DNA, 338 bp, Homo sapiens
  misc_feature 30, 39, 46, 47, 55, 60, 87, 257: n = A,T,C or G
agtacttctagaattaattaaggcgggggngggattcanaagaatnnaaaagatnattgnttccccactgattatacttcctgtgtntcattttcagtttgccaataataacatacaaaaaaggaagaatttgagagtttctcagattaggcaattccttgaagaatctgagaacacagaagctcccctccctactttccatgattgaaatcggtgattcattggtttctttgtgtgggcttttgaaagatcattanaaaccaacctgaagatcatgagattcttgtggacacaggagcaatgagtggcaatacagtgctttctaatccaacctactt

SEQ ID NO: 16351 - DNA, 427 bp, Homo sapiens
agtacttctagaattaattaaggcggggagagagcacattagaaaccactgagaaatacacctttctctattacctgtcgtcttaatcacatagcttcagctgttccttagtaaagataaaactactgaaccttcatggtggagatgaaatgttttatgttctaccttgaattagggaagaactgaataaattaagtatctttccagcttggaatcactgcctccatattacattgttagaaatatatttagtagttagattaaaccttattatattctcaggcaaaaaaaaagtttgttggtaaggaagaaagaaatgtcagcctcattatttcaactaaaagatctagacaattacaggttatgaaactgattcacctaaaggtagaagaatttttaatgtttacttgggagaaaatagtctatc

SEQ ID NO: 16352 - DNA, 442 bp, Homo sapiens
  misc_feature 38, 62: n = A,T,C or G
agtacttctagaattaattaaggcgggaatgagccaancccactcaccaagggaagactacnagaccaattaaaagcattccctttcctctccacatccaaattgggatctaaaagctatgattagtcttgattacttaatattttaaagggagagggacaaaataaatgtaaatctataaatagttccacgtgtagctgattatctgcaaagaccttgccatcaacttactattgcttttgcattttgtggattcaattccaatcagaattgttatcctctcaaacttgcattgtgttgccttgcttggttcaagagacaggagaaacccaaaatactaaaatatcacttatgttatattagcctggaaacctccacacagggttaaacacatcaaaacttaaatatacttttccaatgttaatcttattataggtctgaa

SEQ ID NO: 16353 - DNA, 445 bp, Homo sapiens
  misc_feature 38, 43, 72, 107, 163, 169, 193, 202, 204, 208, 213, 221,224, 230, 268, 273, 276, 277, 278, 279, 280, 285, 294, 305,314, 317, 320, 322, 323, 324, 326, 327, 351, 353, 356, 358,364, 371, 372, 374, 376, 395: n = A,T,C or G
agtacttctagaattaattaaggcgggtggatcatgangtcangagttcgagaccagcctggccaacatagngaaaccccatctctgctaaagatataaaaaattancccggcgtggtggtgcacgcctgtaatcccagctactcgggaggctgaggcagganaattgnttcaacctgggaggtggaggctgnagtgagccnanatcncaccnctgcgttncancctgancgacagggcaagactcagtctcatggtaaaatgaggtnaatantannnnnccttnaaatatggngcccccccccntgggggcancangtnannncnntataacctgttttttccccccccncnctncncctttntttaatnntnanactcctatttttatatcanattctactttggttgctggcatgactttaagctggcagggcaaagggctt

SEQ ID NO: 16354 - DNA, 338 bp, Homo sapiens
  misc_feature 311: n = A,T,C or G
agtacttctagaattaattaaggcgggggacgcagggcattcgtagaacaggggaatttgacctagttcaggcggaagctgaggaaggcttcctgaggaagaaacagttgagagctctctgcgtggtgaatatgcaaccatgaccaaacgaacctctcagctccttccctgtcaaagagcacccactcctagaggtcgtatgatatcatatgagacaatctgtgtaaagcatttgatactgagtagatggatagtaaacactcaatatttgttggctattctgatgtgaattttcattcatttcaccaatnatttatttatttatttatttatttatt

SEQ ID NO: 16355 - DNA, 409 bp, Homo sapiens
agtacttctagaattaattaaggcgggggaagtggaccctctgctcagggcaacggaactatcaaggagggtgagaagagacgtgcccctccatccttagttaaatgagtctggggtgccaagaattttcatgcatgtttattaatctcaataacaatcctgtttttttgccctcaaaatgtgttcaagatatttgtagatgtcatcttcttaatccttgtagtatcctgtttgagtaagtgtcatctgggaagttaagtaagttgtcaagggtcagctcactaggaagtggtgataccagaatatgaaccagtttcccgaagcccagagcctgaagccatgcgaaagccagcagggtgactcctccggctgcaggcgagtgggctgtgtttcacccggtttctccttt

SEQ ID NO: 16356 - DNA, 315 bp, Homo sapiens
  misc_feature 276, 283, 294: n = A,T,C or G
agtacttctagaattaattaaggcggggtagtggaacaagggattaacttcttttctccatttctgtggtttctgtgttacttctagagaaaacaacattttagaatatgcatgtaggcaccgtgcaagagacggtgtcccaccactactgggctggaagggtctggctgcgcatcccacacactgctcctgaatgcagcgattctggcctagcaggatccctgcagcatcccttcactgcagggccaaggctcctcctctcaccctaaaaaaaanaaaatanaaaaataatanaagcggccgcaccgcggtgga

SEQ ID NO: 16357 - DNA, 452 bp, Homo sapiens
  misc_feature 22, 24, 33, 35, 39, 40, 41, 42, 43, 49, 53, 66, 70, 74, 84,95, 110, 111, 113, 115, 118, 122, 127, 129, 130, 131, 132,136, 143, 150, 154, 155, 157, 160, 173, 184, 187, 188, 189,192, 205, 211, 216, 220, 224, 225, 226, 229, 234, 238: n = A,T,C or G
  misc_feature 249, 251, 255, 304, 343: n = A,T,C or G
agtacttctagaattaattaangngggcggctnangagnnnnntaaatnaatnactattctggctnacanggtnaagccccccnatactagaganacaaatttttacacnntntncgntcangggcngnnnnaaantccagantctgcgnatgnntnagncagatagtgggangaacctccggncgnnnagntgggctaaggacntgtatngaccntttncacnnnaanatgtncaantggccaacacncntatngtgaaatgctcaacatcactaattatcagggaagtggaaatcaaaaccncaatgccataccagctcactcctgcaagaatggccatantcaaaaaatcaaaaaataatagatgatggcatggatgcgatgaaaagggaaccattttaaactgttgttggtaatataaactagtataacaactatggaaaaacagtgt

SEQ ID NO: 16358 - DNA, 564 bp, Homo sapiens
  misc_feature 43, 53, 68, 79, 91, 103, 109, 112, 120, 269, 299, 332, 366,368, 411, 446, 467, 485, 524, 550: n = A,T,C or G
ctcgagagtacttctagaattaattaaggcgggacaagtgacntatctacatntaaaagaataaaganaagttggggtngggaaggactanggataaaaagcnatgcanacnctactganaagaaagttcctgtatctattgataccagacagaataaattttgaggcaaaaagcatgagtacattatatgccctcaaaatatataaggaaattttatagagaacaacatggaaactagataaatctgtacttatattcttctctttgnaattgagggagaaaaggacaaaaatcactnaatacatatcaaaagtagaacttctctactaanaaatgtgtgttaatggaccgcatatagaactttntncccggcaactatagaatataccttcttatctaatacatatggnatatttataaaaattgctcatatgctgtgccctanagttagtttcaacgaattttnattattaaaattattcanaacatattatctggccctattttttatgttagaaatctntaccaaaaggtcaataaaaattctgnttgtttaaaattca

SEQ ID NO: 16359 - DNA, 376 bp, Homo sapiens
  misc_feature 32: n = A,T,C or G
agtacttctagaattaattaaggtatacacangtcattcagggtaaaaggtccctgatgaagatcttctgtctttctgcaaaggagtgggagtcaagcaagatgacttacctttctgaaagtgatctgatttaaaataacagcaaaacctgggactctcaaatactaaaagtgtcaggatcatgccaaaggaacaaaggagatggcctctgttctcccttagcatctccagctggtaatgtttggggtgatttgcctttcaaatcataaaagcctaaaattagtatttatacgtgtgtaagtcaaaagtgtaatattttatatttctgtaatccataagatgtggataattgtgttaatttagaatcttgaaataa

SEQ ID NO: 16360 - DNA, 266 bp, Homo sapiens
  misc_feature 1, 3, 5, 7, 10: n = A,T,C or G
ntntntncancaaatagcttgtggaaaggtagtataactagaagtatgtgaatcaatgtattactcttatatgaaagtaaaggcacggttgtccaatgaaccactagtttcccactgatccatcgtagtctggtaattagtgcatgttatggagcattaattagaaaaggtctacatcatatattatccatttatagaggcaacaacattggccctttactggttctgaattgtgagaggcctttgttttgacacttgataacagc

SEQ ID NO: 16361 - DNA, 412 bp, Homo sapiens
agtacttctagaattaattaaggcgggcattatattaaaatataatatagaaaatggtcactgcaaatgatcatattgcattatgatcacaatactgtttttcatggcatttgtcattaaaaattaactgccctccacaacagaagaaaacttaatctcctcctccttccctgtatatctatctgtatctatctagacagacctacctacctatcttccatctgtccgtccacccatccatccatccaacaattgagacagggtcttgttctgtcatccaggctggagtgcagtggcagtcatagctcactgcagtctccaactcctgagctcaagcgatcctcccaccttagcttgtggaactacagaaaggcacacagccaccatgcctggctaattaaaaacaattttt

SEQ ID NO: 16362 - DNA, 436 bp, Homo sapiens
agtacttctagaattaattaaggcgggaagtgtgagccaccgtgcctggccagaaccacttcttattaacccccaaagtggcaacggctcccagttttccatcgctcacacttcccgcatattcggactcccacctttgtcatggtgctaaatgttccatgtgcttttggagctatatccggacggttcgttcggccactctcagtctgttcacaggcagttccattgggtcagaatcagtgtcacttcctggtccttttacatgtctggctgatgtaggatctcctctttatccttctctctcagggttttcttggttatttgcatgtatttgttttttcttttttctttctttttaaatttagtagagagaggactggaggcagtggctcgtgcctataatctcagcactttgggaggctagggcaggtggatc

SEQ ID NO: 16363 - DNA, 357 bp, Homo sapiens
  misc_feature 267, 276, 289, 323: n = A,T,C or G
agtacttctagaattaattaaggcgggaaaggtaagggatcaaaattatgaaatgccatttattcagcattaagaaatttggactttagtctacaggcaatgagaaacagcaatatcaaatacaaaaattagccaggaatggtggcatatgcctgtaatccctgctcgttgggaggctgaggcacgagaattgcttgaatccaggaggcagaggttgcagtgagccaagatttgcagagcaaaactctgtctcaaaaaaaaaagaangaaaaaaanttttgtgggctanagattattactatcctcatgtgacatttataaanaaacaggagtggtcaggcacactggctatttttt

SEQ ID NO: 16364 - DNA, 361 bp, Homo sapiens
  misc_feature 252, 278, 342: n = A,T,C or G
agtacttctagaattaattaaggcgggtctgggaggttggcaagcctatcccctgtgtactgaggcccaaagttaatacaagatcagacagacaaataacaaaaatagatgagtctggctagaagagagttggttttttattgttgtttgacagggggtgggatagcaagaagcgtgggggaatgaagtatgcagcaggctgtagtgtaggtctcaaattttagacattgataatagcatgtacagacgcangaagaacgccattttgaatgaattangaggcaattcgatttgggttaatttttgtgtgctttgatttctttaatgtgtaaactactttcnaaaaaccataaacaacttg

SEQ ID NO: 16365 - DNA, 628 bp, Homo sapiens
  misc_feature 346, 497, 520, 526, 529, 536, 568, 585, 590, 591, 592, 593,594, 595, 596, 597, 598, 599, 600, 601, 602, 603, 604, 605,606, 607, 608, 609, 610, 611, 612, 613, 614, 615, 616, 617,618: n = A,T,C or G
agtacttctagaattaattaaggcggggggcaggggcagagagtagtataaggaaaaagaaattagtgattcctaattgtcttaatggatggctatcataaagctactattattaatgcaacaaattattttaaaacttaaaacacttatttcaaagtcaatgatgggacaaacaggtgtaaaattacctagagcaaaaattcatccttctcatcatgtaattaacattcttggtgcttatgatgatttcaatcttcgtctactgtctttaaatgtggaaatatttatgcaagaaagccctgaaaggctgggtgcggtggctcacacctgtaatcctatcacttanggaggccaaggccagcacatcccctgaggtcaggagttcgagaccagcctggccaacatggggaaaccccatctctactaaaaatacaaaaattagctgggaatggtggtgcgtgactgtaatcccacttcactggaggctgaagcagganaatccttgagccccaaagcggangttgcnatnaatcaanatcatgacactgcactccacatgggtgacagngggaacctcttttctcnaaaannnnnnnnnnnnnnnnnnnnnnnnnnnnncccccccccg

SEQ ID NO: 16366 - DNA, 395 bp, Homo sapiens
  misc_feature 30, 31, 39, 40, 45, 57, 62, 63, 64, 69, 71, 72, 73, 74, 75,79, 80, 86, 90, 92, 97, 100, 106, 110, 118, 120, 126, 137,142, 145, 172, 196, 197, 221, 227, 307, 328: n = A,T,C or G
atactggccgtcgttttcacacaggaaacnnctatgacnntgatnactggccgtccntttcnnnacagnannnnnatannaccttnagcngngaccntcncttgantctnggaagcananggtgtngtgagccaaanttgcnccnttgcactagcctgggtgacagactganactcggtctgaaaaaaagaaaaannaggaacgttcaaaatagagggtanagaatntgagaatatgcacccatttgtgttttttaaacaattgcatacaataaacgggcttacagacgaagaaagtttctgggaanagacccaagaagcccccaganggtagggggataagctgaagaattgttaaagattttatttatttattttttgagacagtgtctccca

SEQ ID NO: 16367 - DNA, 280 bp, Homo sapiens
agtacttctagaattaattaaggcggggggaaaaagaaaggaaaatacttgagttgttaacatatgattttttaaaaattaatgatgctcagttataaaaaatccagtggaaaatatcattaatgtattctgaaacagtttgaaaaagccactctgtgaatcaacctacttttggttttagaatttatttacttatttagaaagaaagaaaacagaaagacaggcaccattctctgtatgttattttcctgaaaggtgttaaggcgaaaaaaaaaaaaaa

SEQ ID NO: 16368 - DNA, 411 bp, Homo sapiens
agtacttctagaattaattaaggcgggggaggataaagctcagaacagtaaatactattttaaacattagaggacaggaaactctgtgttggtaggagcataactggcacaggacttaaggggaattgaaacaagaggtcagaaaaccgaagatagtctattgctgtagttcaatgaacactgttactaaaggaaagctatgaagtttattaagatactgaaaaaaaaggaaagcagtctttacctgaaaatgaaaacccactagcaaaggaaatctttccagggtaacttttcccaagctttctgaaatactgtttgaaagaacaaacaaaaaaatttttaaaaagtaaacaggccaggtacagtggctcacacctgtaatcctagcactttgggaggttgaggcaggag

SEQ ID NO: 16369 - DNA, 445 bp, Homo sapiens
agtacttctagaattaattaaaaaatggggagaaacataatttgagccctttacagtatggttgtatcaaaacacattttattgagagatcaaacttgtaaatgatccaatttgtgattttccatgcctttgagattcaaggctgtaatattgacaatttattctggccaggtggagttgactgcaaaggcgtagggcaaaagcaccattccattatatttgtatgcaaatccaccagcaactattgagggagtgtgtgtgtgtatgtctcagctgaaagactcttgtaagaagtttctttagtgcatttgagggaactgacatctataattcatcaaaacagccatttggaaaatgaataaaacatacccacactacttttgaatcacaggtttcagatctgcttgttagaataaaagttcttattttgaaaagatgtgagtta

SEQ ID NO: 16370 - DNA, 444 bp, Homo sapiens
agtacttctagaattaattaaggcgggtttacatacagatggcaaacttcatttcctttttctcttaatcaacaaggtcatcccaagatcaggcttccttcagtttctgtggtaagtagtgatggacacttacggagttttcagagacttatgcattgggtaacaaggcactgcaagaaaccccagatagcacagcatcatctcacatttacaccacatcacatcaacatcgatgctaggaggtctaaagctgatgccaccttcagagctgcaagtatccaaaagactccactcatgacaccagctcactcctgagtcacatcagcccctttcagagtcacaagccccagaactaaggctatccatatgggttgattatacaatccaaaaagcagctccaaatattagaaacacttatttgtctggcagacacattccctaatt

SEQ ID NO: 16371 - DNA, 359 bp, Homo sapiens
  misc_feature 319, 321, 324, 329, 331, 333, 334, 335, 336, 337, 338, 339,340, 341, 342, 343, 344, 348, 349, 350: n = A,T,C or G
agtacttctagaattaattaaggcgggactccttagtgccactgatacctgggaagactgttgattattcagtgtttcagtcccacctttgtcttgctttaacaggagcactaatttcctttccttttctcctttcccttgtcacaatgattcttttcatttggtctactcctgtcattttttttacctaccacaaagttagtagtccaccaacatatcctttcccttctcagaatggagtcccgcctgccattttatcttgaggaccttaaaaaattaataactctggttgtctaacctagggactggaagatgaccnanaanaaaananannnnnnnnnnnngggnnnccccccccc

SEQ ID NO: 16372 - DNA, 143 bp, Homo sapiens
  misc_feature 43, 48, 50, 53, 54, 59, 64, 66, 77, 119, 123, 141: n = A,T,C or G
agtacttctagaattaattaaggcggggggactgggcagacantagantnagnnactancctgngntacttgatganaccccatttgttggctatcataaagcttctattattaatgcnacanattattgtaaaaacttanta

SEQ ID NO: 16373 - DNA, 400 bp, Homo sapiens
  misc_feature 53, 59, 64, 77, 87, 175, 200, 210, 228, 271, 272, 273, 274,275, 276, 277, 279, 282, 287, 293, 301, 305, 306, 307, 308,310, 315, 317, 322, 323, 326, 334, 342, 347, 348, 350, 355,358, 365, 371, 393: n = A,T,C or G
agtacttctagaattaattaaggcgggcagactgcatgagcccaagagtttgngactancctgngtgacatgatganaccccatttntactaaaaatacaaaaattagctgggcatggtgatgcatgcctgtagtctcagctacttgggaggctgagctgggaggatcacctgancctgggaggtcgaggctgcagtgancaaatattgngcctccgctctccaactnaggcaataaagcaagaccctgtctcaaaaaaaaaaaaaaaaannnnnnnanccnggggncccccngggggggncccnnnntnccccntntatanntgntttttccncccccctntttgnngnttttnatnaatgatntccaancttaaaaactacatgacactgntcactga

SEQ ID NO: 16374 - DNA, 417 bp, Homo sapiens
agtacttctagaattaattaaggcgggggcagaaagggccacctggccttcgaagaggggtccagggtctccagcttcagaggcggggagatggtgatgactggaaaacgtcccttccctccaacagggcggacgcccacaccagcagaaatgggcgcctttaagtcagaaggcgcagtgtgcctgcctgcaggcaccggggtcctcacatcccactcagccagcctgaacttccactgaaggctgagagctgtggggcctcgagggaacacactatgggggcagagcaaaaagggcttggtcctgagctggaaaaccaaggggaacgggggtgggcccaggctgactcatgcccaacagctcagtgcggacttccagggcaccgcatggcctgagcctcagtttccctgtcagtac

SEQ ID NO: 16375 - DNA, 448 bp, Homo sapiens
agtacttctagaattaattaaggcggggaaggcacgggtagacggggtcttgtcatgttgcccagggtggactcaaacctctgggctaaagtgatcctccttgccttggcctcccaaagggctggcattacaggcgtgagccaccgcgggtggccgtgatttattaaaacaacctagtgaacttcccaacttgtagtttatctcaccacatccttctgcttaccactatcagcttagccattcttaaacactcaccaactcaaaaaccaccggtaactcccaatttgccctgttacaaaatctcaccctcctgcccagctttcacaagtctttctaatctggtctctgcaaccaaagaaaggtatttcccacaactccctaacaagcatcaacgctgctctattcaggctcatctcctcagtgtttcctgcacattctaatgattatt

SEQ ID NO: 16376 - DNA, 389 bp, Homo sapiens
  misc_feature 38, 47, 54, 78, 90, 102, 123, 125, 131, 139, 160, 175, 181,202, 217, 218, 287, 288, 296, 297, 303, 309, 313, 350, 351,355, 357, 366, 378: n = A,T,C or G
agtacttctagaattaattaaggcggggtaactctaanatccttgantgcagangcctactgtttttctcaacattgntgaagtctgacntaatggtgcctnacaacaaggtgtgtcaaagtnancaaacnaattttantctaaaatttaaatatgaatncatttattcattcanaaagcntaaaaactttctatatgacangcattatgctaggtnncaataaaaatgtgaccagttaagtgaaataaattatatgctctctaggaattcccaatctagtggtgcnnagagacanncaaaanactaanggtngtataataatgcaatacacatatctttattatggtanngaantntaagaacangagaatccatcntgaattaagtt

SEQ ID NO: 16377 - DNA, 446 bp, Homo sapiens
agtacttctagaattaattaaggcgggagaataaagtctacttgtatttgtaaagttgacacaatgttttatgagggaatttaatgttcttttcaggaacatgaggctggacagaaagataatcttacaagaaattatctcagtttttcattttggccttttgttcacaaaagagctagaattcaaaagaaaacaacatttagcctatttatttatttgtttattattttttgagagggagtcttgctctgttgcccaggctggaatgcagtggtgccatctcggctcactgcaacctctgcctccaggtttaagcgattctcctgcctcagcctcccaagtagctgggactacagttacatgccaccacgcctggctaattttttgtatttttggtagggacagggtttcaccatgttgatcaggcttgtcttgaacacctgacc

SEQ ID NO: 16378 - DNA, 431 bp, Homo sapiens
agtacttctagaattaattaaggcgggaggactataaataaagctaccttggcaatgggcagagcagcagaaggaaaaagaaaagaaggtaggggaatatggaagggagcataagtgaggggaagagaactctctgaaaagctttggctatagaccctgcctcatgcatatttgtactcttaagtaaacataggctaggtaggccagggaaactcaagccttgaagcaattgtaaaactgtaacactttctaatgatatcatgaatacaatctattcatcccaggcctcagagaacaacaagaggaatgagagcaagcaaataactaagaacacagagatacaaggcactctgagttgagaacagcagaactaggcaacagaaagacacctatatagactttcagatggtgggattttcggaaagattgca

SEQ ID NO: 16379 - DNA, 406 bp, Homo sapiens
agtacttctagaattaattaaggcgggcgcctatagtcccagctacttgggaggctgaggcaggagaatggtgtgaacccgggaggtggagcttgacagtgagccgagatcgcgccactgcactccagcctgggtgacaagagtgagactccttctcaaaaaaataaataaaataaaataaaataaaataaaataaaataaaataaaaatctgggttctatagaaggtattctatctcttttaccagaaaccatgctcttttctcagtcattaactttagctgtgctactctagttacccaagggtttactaccttttaaatttctcttttcttgactctcacaactaaaatttccctttccttggcttccacaactaaactcctgtaaatcttcttgtaactccc

SEQ ID NO: 16380 - DNA, 615 bp, Homo sapiens
  misc_feature 209, 417, 448, 486, 524, 562, 598, 599, 607, 615: n = A,T,C or G
agtacttctagaattaattaaggcgggtggggttgctgtcttacctatcccaatctgtttctcaaatgtcattttaagaatctgagcttccctgatgaaaaccataaatcaatagaccacaaccccacccctaaattctcctcattaatgcttttcttcagagcattcactaccattggatgtctgtaagttatttcactgatttattncgtttacttgaagtcttttgccaccagaatgttagttatttgaaagaagagacctctggtctcttgttcatgttgtttccccaatctgagttcgatgcttggcacatacataattggttctcaatactgtgtgttgcatgaatgaatgatatccaagcttaaaaactacatgacactgctcactgaggtttttgtttgtttttattantagtacataattgaaggtgattttattatgnaattatataagttcttgctggaaccttattattacagnctttttttattttatgcattaaatacacaacctacttntgggttatttatttttctgccttcttggaaaatttttnattcccctattggctcacgtccaaaatgtgcctgtnnccaaaacntttttttn

SEQ ID NO: 16381 - DNA, 453 bp, Homo sapiens
  misc_feature 51, 75: n = A,T,C or G
agtacttctagaattaattaaggcgggtccctacacttcagcctcacattngcaattgcttcaggacactaaatnctgcatatgcctcatttctgcgactggcatagacgtaggcaatcaggcaggagcaagccagagggagtggcataagttcacgctagtaggagtaagtggtgattaaactctgaggctcaccaccctgctggcattcagctcttcaggcagctcctaagtgggggcgggcggaaggcttttcttttaatgtccgatcttctggctaactctggctatttgctttattcaaactcttaaaaagagatggtcatctcaaagagtctctgcacccattgataaaaggggaaaagtcagagagcagcctcctcgcccaccttcagtctctgggacctgcccacaacaggctctttcaaagggaatcaatcaggtcgccatgaa

SEQ ID NO: 16382 - DNA, 393 bp, Homo sapiens
  misc_feature 367: n = A,T,C or G
agtacttctagaattaattaaggcgggctgtggaacacatgtcatacagcgctccggtccctgcaacaacctaggagggaaatgcgaggatgcgcctatcttacagaagtacctgcccatggtcacacatctagtaagagaggcatcctcttcaccactcactgcactgcactgagggagaaaccccgcccaagtttgtctaaactaaaagaattgtcagcgaggacattttttcaaattacatctaaagtggcaagaatagcttttctcagaactactgggcaggacctgatccaccctgagaagagagtcttgtgctcaggagctgcagagcgtcactagatccatccagagtgccagacttctncaccacaggctcctgagaacccggaa

SEQ ID NO: 16383 - DNA, 374 bp, Homo sapiens
agtacttctagaattaattaaggcgggggagcatctaagaggatgctgtctgccactgagtgccttcagaagagagggatgcagcagctcaggccgtgacaactttagattcttaaggctggaattttcccatgtgtgcccatggcaagaacagtaaaaccttagggggaaaacgagttgggtaattgtagtcaaggtagcagggaagaaaaaaactgagaaaacttgatccactccatttaagggaagacccaagctcctcacaagcgtaaggggacaatgtctgggttattttttattttttttattttttgagatggagtcctggtctgtcaccaggctggagtgcagactccgtctcaaaaaaaaaaaaa

SEQ ID NO: 16384 - DNA, 391 bp, Homo sapiens
  misc_feature 30, 32, 37, 38, 47, 53, 54, 62, 71, 78, 88, 96, 98, 103,104, 114, 116, 137, 138, 142, 147, 158, 161, 167, 174, 177,181, 195, 201, 221, 249, 251, 256, 257, 259, 272, 277, 296,313, 361, 366, 367, 389: n = A,T,C or G
agtacttctagaattaattaaggcgggggnantcttnnacatattanttattnnactctgtnacattgctnacagggnaaaacaggtnaaccatgntntatgnncaaaatatanantgtgagaaaataaataacacnntganaaatncaaagactaancanacattnaataaanaanaccnaacacatgcataanatacanactcatacagtaatactcanccttgaaataatcttctaaacttatganantagcnnancataatacagaanagaanatctcaacactgttattgnaaagttgttttaaattntgtgtgctaaatcattgatattaatattataagtaactgtaagtcttntagcnngctagatattaggcaatatatngc

SEQ ID NO: 16385 - DNA, 337 bp, Homo sapiens
agtacttctagaattaattaaggcgggggaattgatagctatctctatgtaaatgtgattccttattaaattatagggagattgggtttaaaaaaataactgtccttatctaccctggtggttcttagatttttggattttatggactagtaaaatgtatttaaaaatttggaggatgtacaaagaagtgtaactttttatatttctaaataagagcataataaaattaaactataatcagctctcaccatgatatcataaaggaacatttgaatatcaaaaaacttggaaagacaaagtcactgaataaaaaaattttataaattcaataaattta

SEQ ID NO: 16386 - DNA, 462 bp, Homo sapiens
  misc_feature 4, 16, 20, 23, 31, 43, 48, 58, 59, 61, 64, 74, 76, 93, 97,98, 102, 104, 108, 112, 129: n = A,T,C or G
atgntactggccgtgntttncanacaggaancagcggtgaccntgatnactggccgcnntntcnacacaggacncngatatgaccttgatgangagnnacgnangctntctntcattgaactactatgngccagactttgtgacctccccttcgcatgttctacttaaactggatcctcaaagcaatactagaagatatttaaaaaagctttctccaaaatgaaactagttttagcaacttattagtaacacaatgcacacacatcttcataattacattaatggaagatgtgagtctgattctacctacaccatctgagtctgaaatcattaacaaaatgagctaaaaagatgatctacctaggctgggcgcagtggctcacgcctgcaatcccagcactttgggaggccgaggcgggcggatcacgaggtcaggagatcgagaccatcctggctaacatg

SEQ ID NO: 16387 - DNA, 382 bp, Homo sapiens
  misc_feature 295: n = A,T,C or G
agtacttctagaattaattaaggcgggagcagaaaatattagaatcaaatattaaacctcctagagcaagctgtttcacgattcaaaagtatataagagaagcagagaaaacaaagaatatacaaatgcattattccaaagacaatgcactctctccattagaaaaaattaccatatacaactccagtaacaacataatacaaatttcaaagccacatttgaaactatcagtaaaatgcaaaatatgtactgtcttcactgaaaagaaaagaatgtcttcttggccaggcatcgnggctcatgcctgtaattccaacacgttgggaggccagggcaggtgggctgcttgagcccaggagtttgagaacagcctgggcaatat

SEQ ID NO: 16388 - DNA, 424 bp, Homo sapiens
agtacttctagaattaattaaggcgggagcagaaaatattagaatcaaatattaaacctcctagagcaagctgtttcacgattcaaaagtatataagagaagcagagaaaacaaagaatatacaaatgcattattccaaagacaatgcactctctccattagaaaaaattaccatatacaactccagtaacaacataatacaaatttcaaagccacatttgaaactatcagtaaaatgcaaaatatgtactgtcttcactgaaaagaaaagaatgtcttcttggccaggcatcgtggctcatgcctgtaatttcaacacgttgggaggccagggcaggtgggctgcttgagcccaggagtttgagaacagcctgggcaatatggcaaaacttcatctctacaaaaaaaaaaaaaaaaaaaaaaa

SEQ ID NO: 16389 - DNA, 448 bp, Homo sapiens
agtacttctagaattaattaagagttgccagcctctctgtatgtttggattattatgtcatgtgaatttgcactgatcctaaaaccaaaacacagattcctaggccccgccaatcagaaagtctgatacagctgccctgcagtgaggagttggaggttgtgtttccaagaggtggaacctatcttcttttaaacagttgcccagtcattacagccatgtgctcagtttcctcaaaggaaaccgaatattgaatgttaaaacttagcaataatgatcaattatatcaagtactcttttacttaaaggcaatttgtttagatatttaagaaaagtttgtaaaactgatattgttataaattaaaacattttatatacaacatttttcaggtcacaatgatgtgtttcaagtataatgttgcaaaagtattgtagctttgaatttagctca

SEQ ID NO: 16390 - DNA, 361 bp, Homo sapiens
agtacttctagaattaattaaggcgggaagtatgaagctccaatggaggctgagaaggcaggcccagcagcagacgaggagaaagaaccagaggccctgacaggaccccagtacctacacaactaacaggaagaagaccagagaacctccaaaaacagccaggctttgaagtagctggggatccttttctgaaggaataaaagaagacccgtggagagctctcagtgagggcacgtccagggatcacagccaccgaggggaaaaagaaaagaaaggagttaccagattacaagtgggaaacagtgcccctgagttgctgtgaaatctgggcttggtttttgttttttgtttttttaaattg

SEQ ID NO: 16391 - DNA, 258 bp, Homo sapiens
agtacttctagaattaattaaggcgggggaagggtaaatgtatgagtaagtataaataattttttttaaatagtgaactttaaaatatacataggaaaaaaaatgcgtgacaacaataatgcagaagatggggttggtaaatgaagtcgtgagattctggcatcattggggaagtagtgaaagtaaaatttaaagtagattatatcaggtttgcacagtccaatctctaatgcaactactaaaaataaaggattttta

SEQ ID NO: 16392 - DNA, 495 bp, Homo sapiens
  misc_feature 32, 34, 36, 37, 40, 42, 44, 49, 51, 60, 64, 94, 107, 136,138, 162, 180, 191, 237, 258, 288, 309, 335, 340, 348, 399,404, 408: n = A,T,C or G
agtacttctagaattaattaaggcggggggangncnngangntntatanancggctctgngagnctgggatattcatagtgcaaacatatgaanctgtgtctcaccntatacaaatataaaattggtcgctgttanancacttagggtctaaagactttaanctatgaaagctactacangaaaacattgnggaactctccacgatattggtctggggaaagactttttgagcaatnccccagaagcacagacaaccnaagcaaacatggacaaattgaatcatgtcnagttaaaatgcttctacacancaaatgattcagtcaactaattgaanagacnacccatanaatgggagaatatatttacaaattacccctctgacaagggattaatagccngattntatnaggagctcaaacaactctataggaaaaaaataaaataatcttatcaaaaagtgggcaaaatatttgaaaagatatttttcaaaagac

SEQ ID NO: 16393 - DNA, 413 bp, Homo sapiens
agtacttctagaattaattaaggcggggggtttggagaaaggactgagcaggaaggctgagtgcaaagtttgcaatcaggcgtgtaaacttagccagctccctagctagatgggagcctcttggaggcaacctgcttcacgtaaaaggaatcgtcagcgtcgctgttgcaaccttggaaaattcccttttaataacatcttcacaatggagagaaaggtttgttcttcttcttcttacttgaaaacactgttaatcctaccacctggtggagagtttgatgaataaagactgttgctcaggaaacatgttagctgccacgaataggaatgtctttgtgaggtgtattactggttgtttctaaaacataatcttatgttttaaaattcagtcttttggcaaaaaaaaaaaaaaa

SEQ ID NO: 16394 - DNA, 443 bp, Homo sapiens
agtacttctagaattaattaaggcgggggagagaaaatgtgaatattttatatatgatctgaatgacctctaaaacatactggtaaaggaaaaataaggtagtgtgtgtacaaaaaccaggtaaaaacattaatacttaatgcttatccacacaatttttctcaacactggttgcctctacagatggagtcgtgggaggctgagggttaagatggatgggacacttgaacctcctgagttttatacctttatgaacgcattatttattcacaaagttactttcttcttgaatatgtgaaaatcaaggcaaatcaatgattctgtgccctcacctatgtttatacctgtggtctgacaactactttctgttactactcaaccccctctaagtactaaattacctttaacacctgagcctctcaagcctccgtactagttctgaa

SEQ ID NO: 16395 - DNA, 386 bp, Homo sapiens
  misc_feature 36, 42, 62, 73, 88, 91, 98, 102, 110, 111, 117, 122, 124,133, 138, 139, 141, 151, 156, 160, 166, 169, 171, 174, 181,184, 203, 214, 226, 231, 244, 245, 250, 257, 261, 262, 263,279, 285, 290, 297, 299, 302, 320, 323, 352, 354, 361: n = A,T,C or G
  misc_feature 365, 369, 371: n = A,T,C or G
agtacttctagaattaattaaggcgggtgcctgtantcccanctactccagaggctgaggcnggagaatggantgaacccaggaggcngancttgcantganccaatatnncaccantgcantncaacctggncgacnnancgagactccntcccnaaanaagaanaananaancccaaanggntgttaataccccatgaacnccaattataanctccagggtcanaccangccaaagggtttnnaaganctgaatnaatnnntggactcattcctttnctttantcccncaccctnanagnccaaggcgggaggatcgnttnaggccatgagtttgaaaccagctgggcancntaatganaccntgtntntacaaaacatttttt

SEQ ID NO: 16396 - DNA, 385 bp, Homo sapiens
agtacttctagaattaattaaggcgggggagactcagaatgtttttctgctcctttccatcattagcttatgtttctggctgctcaggtgaatttaccctggatattcatacttagtaactgcctaaaagctgaaatttcagattttaaaaagagaaatcattttaacaggaatctgtgcccagggagtccaagaattggtgaatttacagttttggaatgtgggcaggctgggaaagtttgaagaaacagccagttatttgcttttccacagagaatatatactgaacttccttttccttagggagcaggtagcatttgaaacttgcctttgagtgtcattgtttccctacctcatggtgggtttgggccctacccctcaaacc

SEQ ID NO: 16397 - DNA, 309 bp, Homo sapiens
  misc_feature 266, 293, 294, 295, 296, 297, 298, 307: n = A,T,C or G
agtacttctagaattaattaaggggggaagaaaataaatatattgtgttgaatgctggcctggagcttattaaatgagatttgggctgtgatatggattttaaagtcactggagtgaaaaagattattaaatttatgtatgtggaagatatctagggaaaatatttgaagagaaacagctccaggaaagcatattaggaaaaaacacatgcataactactattgaaggaatgtaaatctatacagccaactttaaaaacacatccnaaaaaaaaaaaaaaaaaaaaaaaaaannnnnnccccccccngg

SEQ ID NO: 16398 - DNA, 284 bp, Homo sapiens
  misc_feature 55, 239, 246, 249, 253: n = A,T,C or G
agtacttctagaattaattaaggggggtgtttaaaaagaatcaatgataatgaantttcaacctttcattaatatcttcttttacatccaacagtcagaaaatgtttttaaggacaaataggaaagtaccaaaatataatctactcactgaaccagttaatttcaaagctttacacagtgctttgagaggataagacttgctggaaaggtacagtgaagtaggagattttttttttttntaatcanacntccncaggaggaaaatgttttaactttgcctccta

SEQ ID NO: 16399 - DNA, 436 bp, Homo sapiens
agtacttctagaattaattaaggcgggggtaaaatagagtctctggactctaggacacaagcaaattcagagccagagtgtactatcctgaaagcacgagtaagtgaagggttttgagaccttagccctcatataccacttggtgcccagaacagtgccaggtcattaccctctaggctggacagtagagaactctactggaaatctgaccagggaagagatataaagagaaaagctggaaagacactgacattgaggattcctggatgaaaccaaatcaagtccagccaaatcatatgctgtggccaggcgctcatgcctgtaataccagcactttgagaggccgagatgggaggatcacttgaagccaagagtttaagaccagcctgggcaacatagtaagaccccaactctacaaaaaatttaaagaagaaaa

SEQ ID NO: 16400 - DNA, 427 bp, Homo sapiens
  misc_feature 72, 90, 167, 268, 269, 271, 282, 284, 285, 290, 291, 292,302, 311, 314, 317, 324, 326, 331, 339, 364, 365, 368, 369,370, 371, 372, 373, 374, 376, 377, 378, 379, 382, 390, 392,397, 406, 416, 418, 423: n = A,T,C or G
agtacttctagaattaattaaggcgggcggatcacaaggtcaggagatcgagaccatcctggccaacacagngaaaccctgtctctactnaaaatacaataatagtgtattgcacatttttaaactgaaagtaaatttaaaatgtgcttctcacaaaaaataaggtntttgaaatgatggattagcttgatgtaattacttcatattgttcataaatcatgaacatcactctactctataaatatatgcaattataaattgtcaaaannanaaaaaaaaaanannaaatnnngggccccccnggggggggnccncanacccccntntaagngatgattncccccccccccggggctgggtttannaannnnnnnannnnccntggggctntntggtnaagagacanaaaactgacntnccttncctt

SEQ ID NO: 16401 - DNA, 437 bp, Homo sapiens
  misc_feature 30, 32, 37, 38, 39, 40, 44, 50, 51, 53, 55, 57, 59, 62, 64,66, 70, 72, 73, 75, 76, 90, 93, 103, 113, 114, 118, 121,122, 125, 126, 127, 129, 131, 132, 133, 140, 141, 146, 149,150, 153, 155, 157, 158, 159, 161, 166, 171, 194, 208: n = A,T,C or G
  misc_feature 219, 240: n = A,T,C or G
agtacttctagaattaattaaggcgggcgncngaagnnnnaganacactnnangntnangcncnanaatngnntnnaccctggaagcatnatnttgcacatancctagattgnnccantgnnaannntnannngacctgnncaacngannganantnnntntcatnccaanactttgggaggccaaggctggcngactgcctgagatnaggagcttganagcaccctggtcaacatgatnaaaccccacctctactaaaatataaaaaattagctgggcgtggtggcacatgcctgtagtcccaactacctggggaggctgaggcccaagaattgcttgaacctgggaggtggaggttgcagggagctgagacggcgccactgcaccccacctgggcagcagactaagactctgtctcaaaaaaaaaaaaaaaaaaa

SEQ ID NO: 16402 - DNA, 298 bp, Homo sapiens
agtacttctagaattaattaaggcgggtggtgagtgacaagaatgaggcactaacagcgtgcgctgagaggtgtgtgtgtgcccctccgtttcaggctgaagttgactacattcctggcatttatgtaaatccctagactgggatgggtctttttaaaaatcaaaaatgggccgggcgcggtggctcacgcctgtgatcccagcactttggtaggccgaggtgagtgggtcacaaggtcaggagttcatgaccagcctggccaacacaagtgaaaccgcgtctctactaaaaatacaa

SEQ ID NO: 16403 - DNA, 425 bp, Homo sapiens
  misc_feature 36, 38, 46, 52, 53, 54, 58, 59, 64, 66, 67, 73, 85, 94, 95,114, 118, 140, 141, 144, 149, 159: n = A,T,C or G
ctcgagagtacttctagaattaattaaggcgggaancngacatacngacttnnnaaanntcttntnnattgtnggcattttcatntatacattnncctctaagcactgctttanctgnatcccaaaaggactggtatgannttntagtnacataccttncccagctccttttccttgcactttattccaatcctcacaaagcacactgtggcagcatttcttagggttttgtctttgaaatttatagacatcgatatttattaggtttttacttttctagaattgtttcttgcctttgtttctaaaatgtcttgctttctttcactttttattttttatgttcattcactctttttttcctctttgcatgctattgattgttttgcaacaacatggagaaatagcagcaaagaataaacaggaaa

SEQ ID NO: 16404 - DNA, 458 bp, Homo sapiens
ccccctcgagagtacttctagaattaattaaggcggggaaagaacaaagggaagaaaacagaaaaaactaaattaaaaacactaatgtaagctaatactgcttacatatgaacatcaagatgccaagggacccaatacaatcctcagtctaacattttcaatggcacagcctagtgatcacacgatactggtgatactctctagttacccctggcaacctttctcaactgtaacgatgctaccctacaatagctttcactgggcagctttctcttcacttagctgaatgctctgggaccatctgcgtcggcaagcataaaaggccagcctgcctgtgggcccgtcactctgaacaccacctctctgaccctgattaaatacaactttcaatcctttttgtcctccctgttgacttctcctattaagggagccctctgacaaagaaagcggaagagtgg

SEQ ID NO: 16405 - DNA, 346 bp, Homo sapiens
  misc_feature 30, 34, 35, 36, 37, 40, 41, 46, 48, 53, 57, 67, 82, 85, 94,96, 100, 103, 106, 107, 108, 111, 112, 113, 114, 142, 153,184, 205, 334, 338, 339, 340, 341: n = A,T,C or G
agtacttctagaattaattaaggcgggggnaccnnnnganntgatncnactgngcgngcacactggntgcaagggaagcatnttncacatctgntnacantgnaannntcnnnntgtcctgctgtgggtgtcctgctctcangaagggagcantttcacgtaagtcactccacacaagtggaancagctgtctctgaaactccangaatgtgcacctttcctgctgttgcttgctctcccgtccttttaatgaacttttacacgtcgggggatatttctctgtggttgaatagtgaacattttaactgatcaagagcactatgttctgaattgncccnnnnaaaaa

SEQ ID NO: 16406 - DNA, 466 bp, Homo sapiens
  misc_feature 428, 429, 430, 431, 432, 433, 435, 436, 437, 438, 439, 440,441, 442, 443, 444, 445, 446, 447, 448, 449, 450, 451, 452,453, 454, 458: n = A,T,C or G
agtacttctagaattaattaaggcggggtaatcagcagtgataaaagggtagacagagggcagtggaattgaacagaggaagaggggggtgaaatgaaggcaagaaagtaaggaaaacatgagtatttatttaaagtgagtagttggaggctaaaagggaagttgcaccaagtttgggtctaacatgttgtggtagtaactgtgttcttcatattataggtaaagaagtcattgactacttttaaatagggagattaggtggtcagtgtagagttgctgggtgagcagaatgcataaatgtgcctgattaactaaagatggcaaggattatggatattcaaatagcctttcccacctctgttgatgaattggtagtaacctacatcctgttggtaagtagtcagtctagctaggaatgggctatcccnnnnnnannnnnnnnnnnnnnnnnnnngccncccccccc

SEQ ID NO: 16407 - DNA, 455 bp, Homo sapiens
aacaaaagctgggtccgggccccccctcgagagtacttctagaattaattaaggggggaaagctatcattttaagaacagtgtaagtcacttgttctgggaccttgctgtgtatcagaattgtctggggagcctctttctttaaaaatgccctctgtcccactaagtcagattctccataagtgaggacttgaaacctggaattagcaactactaatggcagccctacagcttcacactctcagagaaggaatcttcctccagggttatctgaggtatgctaacctgcttaaacctggtgctgggccttggaaaaagaaaaaaatcagatttaaacttgcggttacattaagatgatacttttgtatatttgctttccattaataaataaggcagtcatttacaaaatcaccaggaaaaggagaatgaagtattcatggcctgtcacttcccagc

SEQ ID NO: 16408 - DNA, 267 bp, Homo sapiens
agtacttctagaattaattaaggcggggctgtttgagtcagagatgttcagttatttccatgaccttctattgagcctgttctttttccaaataacacttattataccagagcagagagactcctggaattttctataaagcaagtgtcttgtatttaatttacttttaccatttgcttccattataatttgagagttgtttttcaatggcaagtaaatacagctcccacaaaaggaacgtcatcttcaagaggcctgacaatctgt

SEQ ID NO: 16409 - DNA, 394 bp, Homo sapiens
agtacttctagaattaattaaggcgggatagagttagggtagggctgggaacagggatgtgtgggaaataagccagtactagtgcaaagaagtaaactaattcatgtcaatttttgccttgaaaatatatatcacattttccaatattaatggaacaataacaaaaataattgtgaaatagagtacagtgaaactgtcaattagatctagatataaaagtagtacaggcaacattttctgaggtcaatataagaaaataagctactaccggctgggcacagtggctcacacttgtaatcccagcactttgggaggccgaggcgggcggatcacgaggtcaggagatcgagaccgtcctggctaacacagtgaaaccctgtctctaccaaaaaaa

SEQ ID NO: 16410 - DNA, 338 bp, Homo sapiens
agtacttctagaattaattaaggcgggggatataaccaggccttaagaaggaaccagaactagaaaccagaagctccaggaagctcaggaagtcttcattcttcctttttctgtatgcatcttttcctctatttccatggtaggtatgcatctcttttcacagttcttaaacggttctgccacactgacgttaacagttgtctttctatccttttttaaattcctaggaaagtgatcctctctggtcagctattagaggtgggagggaaggtacacacacacagtacaaatgtggctcctagaaaccagagcagttctcaggaaaaaaaaaaaaaaaa

SEQ ID NO: 16411 - DNA, 379 bp, Homo sapiens
agtacttctagaattaattaaggcgggaaaagaaaaataaatatagatggcagaagacaatgaagaattctgaaggagaaagtgtgtgacccaagaattccaaaagcagttattgctttctacacataaaagcaatagaaagacactcctggccgggcgcggtggctcatgtctgttaatcccagcactttgggaggccgaggcgaggggatcacctgaggtcaggagtttgagaccagcccggccaacatggtgaaagcccgtttctattcaaaatacaaaaattacctgggtgtggtggcacacgcctgtaatcccagctactcgggaggctgaggcaggagaatcacttgaacccaggaggtgggggttgcagtaa

SEQ ID NO: 16412 - DNA, 438 bp, Homo sapiens
agtacttctagaattaattaaggcgggggagatcagagatactgagtttaaagacggcagtgtactgagaaaaatggtaaacttctacttcctgaaattaagcgtttctgaacagagattcatcaaatctgcagaaaagagaaaggcagataaccgtaggttctgaggctcggtgtttcctccctaatggctttgccaacagaaatactgacaggttttgtctgtcacgggccttcctatttatcaccttttcctctcctacctcctactgtggtcttgcctcatctgtacttcatgtaccttaagcctaatagtgaatgttgaagaaatgtctctctttggaaattatctgttttattttattgatttaaggtcaaattaagaaataagataatgagacttgtcaaagaaaacgaatacgtagaagatgaaacttgc

SEQ ID NO: 16413 - DNA, 393 bp, Homo sapiens
  misc_feature 231, 262, 293, 370, 388: n = A,T,C or G
agtacttctagaattaattaaggcggggtaaccattttacaagggaaataactttcctcgctattttcttcctgaaatacgtgcaatgtaacacacagctagtaccagaccttttgaaactactttttcctgaacaagccattttaaaattccttagtattttcttctctaccgatgtcaggacttttttttttgggattaacacaatctgagctgtgactcaaatggaanagcatgctgaccgtcatcaagccacagcagngggtcagctgggggacaccaagggaggaggngagcacagcaaaggcagggacagcatgaccggggctcccccaaacagttccacctctacccattccagttggatganaatgaacgggtgaaaaanaaccc

SEQ ID NO: 16414 - DNA, 366 bp, Homo sapiens
  misc_feature 315: n = A,T,C or G
agtacttctagaattaattaagggggctgagggtggatgtagaaggcacaggatgaccgattttgaggacacttttcctttgcttcagtctcctttatgtggaaggtgacaacaaaagagctaagctggcaagtcgtgaggtccttctctttctaagagttaccaagagtaaggcctgtctgtcatcaaatacaaatttggagcttacagctggttgagatttggcatacagatccttccttctttaaagtgttttccacgtgccatttttagaattgggataattctaaaacacagtaaattaactcaactgtnaactttttctccccatacttgacttttatcagggctgcctcttcctacctt

SEQ ID NO: 16415 - DNA, 422 bp, Homo sapiens
agtacttctagaattaattaaggcggggccgcagcccgggcgtgcagtgaccttggacagctcagatcctgcggaccttggctttccactccgctcgctgagccggtgcatcacagcctgggctccacctgtagaggagatgtagcaggagggtccgccaggccaccttccaaaatccgagtgacgggcaggtccgtgcgttcgtgcatttttctgggcagagatggtagatttaatccggttgccacaggggacggcatgcagagaaggccacatacctactcatttgcgatgctgtttgcagtcgtcttaggaaggaaaagcaggccggaggggtgtggcccgttcctgagatggggccgaatctaaggttggcgaccaggtagagaagcgggcccagccacacccggctgccaaggagg

SEQ ID NO: 16416 - DNA, 439 bp, Homo sapiens
  misc_feature 93, 264: n = A,T,C or G
agtacttctagaattaattaaggcgggaagttgcccatcccattttgggtagctgaatgttaaaatgaaattttagtttcatagctgctgtangtgcccctttgtcttttaagaatagactgtatgtgtgtactttaacaggtttattataaaagaatagaatttcgacaatcattttgactaattatattatcttatattgaaagaaaataaaattgatttacctgtggttacacaactaatggtaggttgttagatgtgtanagctacttaacatactatttattcattcacatgatttcccaaagaataacctgggacaggataaacattctttaggagccacctttcaaaagttagattgttttttaccctaccttttgagatatatttttaaagaaatattttatagttaataagttgtagcaaaaattaatct

SEQ ID NO: 16417 - DNA, 360 bp, Homo sapiens
agtacttctagaattaattaaggcggggtatatggctattaatatgatcattaatttattcattcaacaaaatattactgtctacaaaatgacagacactgttctggatgattgagatattgcaatgaacaaaaagtctctgccctagcggagtttctattcttgttggccaatagagacagaaaaataaaacaattatttattttttttaagatggagtctcgctctgttgccaggctggagtgcagtggcgtgatctcagctcactgcaacctccacctcctgaattcaagcgattctcctgcctcagcctcccgagtagctgggactacaggtgcatgccaccacacccagctaatt

SEQ ID NO: 16418 - DNA, 435 bp, Homo sapiens
  misc_feature 336: n = A,T,C or G
agtacttctagaattaattaaggcgggggttcccccaaaagggagtccgaaaggagtgaggagtgaagacacacttggctcctcgtgcccctctccactgctaggtcaccaggtatttagcctcagactttcctcatgtgaaacacaggtgcttgtaaatggtggtgtttaccatgattactgttcttactatcagtaacacttgtccactccatcgtgttcctctcccatgggaagatgtgggtaccagatgatccagaatgactgatttcaaaacataactctcggccgggcacagtggttcacgcctgtaatcgcagcatttgggaggcctangtgggcagatcacttgaggtcaggagtttgagaccagcctggccaacatgatgaaaccctgtctgtactaaaaatacaaaaaaaaaaaaaaaaaaaaaa

SEQ ID NO: 16419 - DNA, 751 bp, Homo sapiens
  misc_feature 453, 462, 496, 515, 518, 599, 650, 654, 675, 692, 724, 728: n = A,T,C or G
agtacttctagaattaattaaggcggggttcttgaccaggcatggtggctcacgcctataatcccagcgctttgggaggcggaggcaagtggatcacgaggtcaggagataatgttccttttaagactagatagtaaatgatattaacatagattttcttcctcggtaatatttttctcttcttaaagcattccgactctccatggagtaactaccagccaggagactgtcagtaaataatatgtgataatagagcatattcttcccctagtaaagcttcttgctgaaattattgcaattgatagttttcatcaatgcaactccaaactggtaggcaggaccctattgtcttataattgccttataatgatgataacaataatagtatgaaccatttacttacttgatggattcatagatttattcatccagtattcatttgttgcctactangctaggtantctgctgggtgccaggaatgtccttgagagcaanactaaatttcctacttctnctngagctaaccaggtccaagaaaaaccagattattttagccaaaataattataggtaaccaagttgaaagttagggtattganttggagggaattaaaaagggaattattttgggataaatattattgggaaanggangcttgggggaaaacctgttanaaaaaaactttttccanaaaggaaaaccgaaagttttaaagctgaaagntccnaggaaatgtttaaaaaaaaaaaa

SEQ ID NO: 16420 - DNA, 420 bp, Homo sapiens
agtacttctagaattaattaaggcgggaaggactaagattcaaattatgaaacgtaacatagaaagggctattgcagtggccagactgtaactcaagtacagttatgacttcacatgctagcagtatgcgacactgtcttataaggcaataatttaaatatgtttagaagcacgagtgcgcgcgcacacacacacgcacgcgcacacacacaaatgcaatttgccaggtggtggcttgtgtctgtagtttcagctacttgaaaggctcacttgagcccagaagttcaaggctgcaatgagctaattacaccactgcgctccagcctaggtgagggctggagactccatctcaaacaaacaagcacacaatgttagacatgggaagtcaaagaaaatacattgaaaatctaccacaaccaa

SEQ ID NO: 16421 - DNA, 411 bp, Homo sapiens
agtacttctagaattaattaagggggattagctttttaatttttcttaataaggtcatttaaaaaactataattgttgcatgaaaggatattttaataccaaaaatatagaaaaatataaagttggaataaaagctaatagttttgaattgaataagtttaatgagaaattcaatactttgactttaattggctcatttttgcctcaaaatattacttattaaaaactttgatattggaagttgctgtttagtaaaacataaatttaaaaaaagatggctgggcacagtgtctcactcccgtaattccagtactttgggaggtcaacaagggcggatcaccagagctcaagtttgagaccagcctgggcaacatgatgtaaccccatctctactaaaaatatgaaaattag

SEQ ID NO: 16422 - DNA, 550 bp, Homo sapiens
  misc_feature 76, 183, 212, 293, 303, 311, 322, 346, 375, 383, 398, 400,428, 441, 455, 476, 482, 490, 504, 507, 519, 523, 538: n = A,T,C or G
ccaaaattaattcatagtcaagctgctcttatccagggaacacttatctggtaacctctgctattaaaaaagatangcttccatccaaaaaccttctaaacaccccaaattggggatatgaagcccatgtactaaaactctctaattttattcacaggaggagcaaaacatgtgcactccaanatacaatttaagtattattcattgagtanctactatatgccaagtattttcactgcattgacttatttacccctaatgataaaccccataagggcatttaatttacaagntgaaactggnagatttanaagggttaaantattttgcctagggatcaccatanacaggtgagaattccaaaaagccaccttntttttccnatcttggctattctnanaaggccattgccagtcctttaagaaaantttaaaatcaatntccattaattttgnggggaggtcaattttaagtantataanggtggccnaaaattttttcctnccncattttaaagantgcnatttcccttggtggngcctcccttttt

SEQ ID NO: 16423 - DNA, 431 bp, Homo sapiens
agtacttctagaattaattaaggcagggcaaacacatcatctgcttttttggcataagcacttcaacagctacattttagtgcaaaaaagaaaatcactaacaatctaatgagatctaacaaagccccttaaattcaaaattatcaagactattttaaatatggatttgtatacattcattaggtaatatagtattaataaatttttttggtggagcatggtggcttatggctataaccctagcacttttggcggctaaggcaggagaattgcttgaggccaggagtttgaggccagcctgggcaaaataacaagactctgtctcctaaattaaaaattaaaaaaagaaaagaaaatccccaaatatttagaaactaaagaatattacataaccctaattaaaatacagaaaataaataatccatgattca

SEQ ID NO: 16424 - DNA, 676 bp, Homo sapiens
  misc_feature 434, 545, 592, 595, 615, 617, 627, 645: n = A,T,C or G
agtacttctagaattaattaaggcgggggtcctgcagtaggatagggggtgaaactcagcaaaatgtcaggttatctgctgctaacataaccccatctgtaacctccaaggtccttgggcctttcaggaacatgtttttcacatttcatagaccactgtaaatctaaatagctaatacaacagctaaagatcttaaagcaatttggagacattcatatagtaaattcccttcgtctaccaaaggaaatatgagcatctctgaggcagagcagctgcttaatggttacagagcaatattacacaacagcttaatccaggaagaaaagaacaactctgcatttgtgtgatgctgtatttacactacatgtgtgctttttaaaaaaaataaaattgagtaggaaataaagacttctacaaactgaaaagtctcaaangcaatatcaaattatattattttacttcttttttatttttctctgaccaaagccacagtaaatcactactcaaaagttaatatctggttaacctcctttccaaccattacngagggccccatggctatctactggtaatatctcaaatattatcagtnccnttgatgttaacaacatttcntngaaatccaanggaaaccggtaatgctcnttttacggctctggtctatcttggaattaaa

SEQ ID NO: 16425 - DNA, 450 bp, Homo sapiens
  misc_feature 12, 40, 59, 118, 124, 125, 132, 139, 142, 143, 144, 147,169, 246, 267, 298, 302, 367, 372, 400, 406, 410, 431, 434,437, 445, 446: n = A,T,C or G
gggaaaccaaanagaggccttggggggttaccccgggggncccccccccccctttccgnaggaagtttacctttttcttaaaggaaatttaaaaatttaaaaagtggccggggggggngggccnncgcaatncctttanttnnnccnatttgaaaattttggggggttnagaaagggccccagggggaattgttttgcttaaaattagaattaattaaattaccaccaaaggggaaaaaagccaanccctccaaaaagaaaatttanccccctcccaaaaaaattggtccagaaaagntgcnttggaaggggcttgaaaaaaaaacccccttggattggttaaaaaagaaatcaagttcccccaagntttanttaaaaacctggaaaaaaccaagccttntttttnccanaaagcccaagttaaaaattgnccnaangaaaaaannaaaa

SEQ ID NO: 16426 - DNA, 404 bp, Homo sapiens
  misc_feature 13, 18, 30, 31, 35, 40, 42, 46, 47, 54, 55, 58, 65, 73, 97,136, 140, 142, 149, 177, 180, 187, 194, 205, 206, 211, 219,222, 226, 235, 243, 250, 259, 260, 272, 277, 279, 291, 311,373, 378: n = A,T,C or G
gactggccgccgntttcnacacaggacacnnatangaccntnatgnnggggacnntgnggaattntctatganagtaaaacaagctggatgtagcantaactagttattatttttacagataagcaaaaaaaaaanccanancaacccnccgggcctttttaatacatctccttatnatnccataancttacantgttgtttaannggacntcaccagngcntaantaaaataancctaattngttgttngcctttagnnaataaataaatngcttntntttaacatgtcntttattggaaataacaattnttataattcttttgcaaggctgtcaaaattgtcttttaaaatgcatagcacaaacatttttntgccncattccaaaaaaaaaaaaaaaaaaaa

SEQ ID NO: 16427 - DNA, 482 bp, Homo sapiens
  misc_feature 40, 57: n = A,T,C or G
agtacttctagaattaattaaggcggggcatggacccatncacacctgcccgcctgntgcctttctcccaaggccctccctgcattcctgcctaaagctcactggaaatgtcgctgtctacaccaccaccactttaaacacccacagttgtcttcctggaggtggcagcttttatagcaactacaccagtgagtcctaaattcctagcaggggctgatgagcaccagctgtattctgcaaagcccctcacccacccaaaccctgtgcctcctgcctttagctctctataattaaagtgtttaaataaacaaagagcctttggttatagctattcaagactcatctaagatgcagaaaacctaatctaagattaggaagtgtcaatatttcacagcttcaccaacaaccttcaagcttcactattttctcctcaaagctctctgagaataccctcactttcaaaaaaaaaaaaaaaaaaaaaa

SEQ ID NO: 16428 - DNA, 388 bp, Homo sapiens
  misc_feature 32, 39, 46, 78, 106, 114, 122, 149, 175, 184, 186, 224, 245: n = A,T,C or G
agtacttctagaattaattaaggcgggatggngaggganccactangtgcactctctcagggtgacactggtatcctntcacttggatacgctggtggcatttggnccacactnactatgtnactggttacacaaagagaacccagganaacagactaataaaaaacaaagtccngaggacatntntacctgcttttaaagaaagcgcttaaactgggcgtggngactcacacctgtaatcccancactttgggaggccaaggcgggtggatcacctgaggtcaagaattcaagaccagcccaaccaagatggtgaaaccccatctctactaaaaatacaaaaattagccaggcggtggtggtgggctcctgtaatcccagctactcg

SEQ ID NO: 16429 - DNA, 233 bp, Homo sapiens
  misc_feature 127, 173: n = A,T,C or G
agtacttctagaattaattaaggcgggaactgaaaaaagaaatgaaggtatgcttacatgggaagtattttaacacaacaggtaatttttgagtgctcattatgtccaaacactgatgagcacttanatcaaagatattattcttgtcaacaagaaacttacttagggtctanctgttgaaaagataacaggaaatttatagtctagctgttgaaaaaggaaaataagataat

SEQ ID NO: 16430 - DNA, 437 bp, Homo sapiens
  misc_feature 348, 375, 388, 390, 413, 414, 422: n = A,T,C or G
agtacttctagaattaattaaggcgggttatagcagacttcactgatgagtaacactctggaaatgtgtaaaaagctatgctagcatcccaaatacaaacacaaaattttgttgtttggaaaaatctgaaaatatctcaaactttataagaattgtagagtttgggaacaaaaagaaccaatcgtgaagaagggacttctgtcttctttcctcatccttaaccaagtaactcattgcaaagacagcttattcagaaatatatcactgagaacggtctgattaaaaaagaagtctcttctgttcatttgtttttatgaggtttttttccttaggggaagagttttttanaagtttgcttcttataaaatagtttcntggattaatgcancngtttttcaacctgggttctgctnnaaattaantcctaatgccttgaa

SEQ ID NO: 16431 - DNA, 405 bp, Homo sapiens
agtacttctagaattaattaaggcgggtgctggcagggatactcatgggccccgggcatgaggccggtgaagaaagctctgtgtcggctgcagctctgggccgcaggagggcgccggtgcagggaggagatattgttgctgggtatcagagggttccggggagaagacaaaggctgggactcagccatagaacaggccacgtttccaggttgcccgagcaggcccacggctactcaaacagtgctttcctgtgaacccagcaaccttaccgttatcctttggcccagaaagtgttactgttggtatcaacaaggttttctcctaagtcttaacttttcaaaggttgttcagaagagagaatttaataaaactccacgagacagtagaacttacaaaaaaaaaaaa

SEQ ID NO: 16432 - DNA, 295 bp, Homo sapiens
  misc_feature 53, 54, 56, 69, 109, 281: n = A,T,C or G
agtacttctagaattaattaagatggggttgtttagaaagaggcctactctgnntnatggtaatgtttnatatcttgactgaggtttttgaaaacacaggggtattcantgtatcagaatctacaaaactgtgcacctcaaatccatatattttattaaattaaattatacttaattttttaagctaacaaggaaatttaaagcttggcaggagatgaaaattaatgatcaaaattcataatagtaagcctacctaaaaatgaacttgaggtttgaatttntattacctgtgtga

SEQ ID NO: 16433 - DNA, 429 bp, Homo sapiens
  misc_feature 371, 417: n = A,T,C or G
agtacttctagaattaattaaggcggggtaaacctggggacacaggccctacctgcaagggcagctatgcctcagctccgtcagcgttaccagagaggaacacagagccagcacccacagatcttggattttcaaaaagcatccggatttctatgtgaagtctccggatccctcaaggatgataactagctcaaaataaaaacaaatacaaaaagtcagctgttggccgggcgcggtggctcacgcctgtaatcccagcactttgggaggccgaggcgggcggatcacgaggtcaggagatcgagaccatcccggctaaaacggtgaaaccccgtctctactaaaaatacaaaaaaattagccgggcgtantggcgggcgcctgtcgtcccagctacttgggaggctgaggcagganaatggcgtgaac

SEQ ID NO: 16434 - DNA, 496 bp, Homo sapiens
  misc_feature 279: n = A,T,C or G
agtacttctagaattaattaaggcgggaagcagaatgtctgtggaaacagtgaagcagagagtactgcgactgttaactacagaaggctgccccggccccagcacgccttacatgcagaaaacaaaaaaacaaaactgacatccagaggactagccccacaaatagctagggcagtgaactccaactcattttatgatgagtaataatttttttttaactggcacaatatcacttcaaagatattttaaaaatcaggaaaagaacatgtaaaacttatntaatgaatgttcatcagaaaaacatagccaaagcatactattttctgaatagccatcagaaaaacaaaaccagaggaaattctgggcaagcatcatagacaaattatgtaacttaatccaatcacttccattaagagtaatcacaaggcagaatcagaactcaggaaagagaccagatgacgaggaggtaaaaatgtgagcaatcaggactcaagaa

SEQ ID NO: 16435 - DNA, 404 bp, Homo sapiens
  misc_feature 30, 31, 34, 39, 41, 45, 50, 51, 54, 58, 59, 62, 67, 70, 74,78, 79, 86, 92, 98, 104, 108, 110, 111, 113, 116, 120, 122,125, 127, 133, 134, 140, 141, 188, 205, 245: n = A,T,C or G
agtacttctagaattaattaaggcgggctnntanacttntnacgnattanngtnaaannatnggatnatncttnaaanntttatanattgtntggaanttatangcangnngnacncatntngtngnacttgnnatcagnntaatgctttgatgcctggaatacgaccccaggcttgttataaggttnaccattttgttccctanagtggtagcaaaacctgtccatttctgagctgtgtttgantgcaagctaaaaagtgtaggggttgttaagaaatgatataagataaattcagcctttaaaaaagaaatcacctgagcatattaagcagcttgtttatattggtatgcctgcagcaagcatatacatcacaaatgagagatattgtgttattaaagaata

SEQ ID NO: 16436 - DNA, 354 bp, Homo sapiens
agtacttctagaattaattaaggcgggaggcaagggtgaaggaacctccccattcattacaaggggctttagctggctgatatgaaggttgaagccaatgctagcagcccactgaggacaacttgcattgcaggctaaaatgactctgatgtcggccaggcgtggtggcttacgcctataatcctagcactttgggaggccaaagcgagcggatggcctgaggtcaggagttccagacaagcctggccaacatggcgaaaccccgtctctactaaaaatacaaaaatctgctgggtgtggtggtgcactcctgtaatcccagctacctgagaggctgaggcaggagaattgctt

SEQ ID NO: 16437 - DNA, 401 bp, Homo sapiens
agtacttctagaattaattaaggcggggcaaaggcaaaaactattgggtactattctcactacttggtgacatgatcaatcataccccaaacgtcagcatcataaaaatatctatgtaacaaatctgcgcatgtaccccccaatctcaaataagttgaaattatatttaaaaaaaatcttcaacatacacaatacatggaaacgtcaaaatgttaggcactgactagacagcaaaataggcggataattaagttgacctatacttgggctggacgcagtggctcatgcctgtaatcctagcactttggagccaaggcaggtggatcacttaaggtcaggagttcaagaccagtctgggcaacagggcgagacccccatctctaaaaaaaaaaatacaaaaa

SEQ ID NO: 16438 - DNA, 426 bp, Homo sapiens
agtacttctagaattaattaaggcgggaggtggatgggaggaaggaaaactggtatctaaccaaatatttcacctgtgtttttggtttttgctactgaattggacagaggctgtcaccattcatggtggttctgaaaaaacaaacaaaaaagccactccattcctgattattactctaactagactgttgttgctctcccttgagtttcagagtagttgtacctctgccacatcagtgaaaattatactactttaaaggagtttttcttctcacttgttttacatttagtcacctattacatagctgtcctttgggcatctggctagcatctatgagccattggtacatttcttccttgataaatccccagtgtctaggatagtagccggtacatagcaggcatttgtgtaattacatgatgaata

SEQ ID NO: 16439 - DNA, 441 bp, Homo sapiens
agtacttctagaattaattaaggcggggagggggtaggtgctggaggtacagaaggtcatgccttctctgccggcaaatatgattaatgtgtgtacagggaggagaaaaacgccactcacctggctatcagccagcctgactcatgcctctgggcatcttagaacaccaaatatccagcaactctggctggggtctagagagatgtctattagctttcacaatgtctgggttaggaaggtgcttctaatcttgtttgtaataaatattagttcaattgttagaagtgtttttaatcacctaaaaggaagtaaacaggcttgcctcacaacctcgacaggcagtgtatgtgtgacttgttctttctatccggaatcactcggttcaaatgctcagaggggaagaaagatggtcataaaataaaagtgttatattaaaaataa

SEQ ID NO: 16440 - DNA, 409 bp, Homo sapiens
  misc_feature 260: n = A,T,C or G
agtacttctagaattaattaaggcaggcagttgggatgagagggttgtctgaggtcaattgctggtagcagcagtgttatctggatactgaatcttgggtagcctctgctaagactagaccctcaagggcctgaagcctaaggtagtagtggccatggctgctgacaaaagtagcagagcctctttgctggaaagcttccccattctcaatttaaccctgtaagactcttgctcattaaaatctagtaatggcctcatantctgtggttactaaataaaatagcactaggacttattggtacatgcaacaaacaatatatttatgctctgagaggacacagataatggactttcacctacaggatatgtaactgctacctataaagaaagtaaggatgtagtcacaagc

SEQ ID NO: 16441 - DNA, 240 bp, Homo sapiens
  misc_feature 1, 29, 59, 73, 86, 91: n = A,T,C or G
nccgggccccccctcgagagtacttctanaattaattaaggcgggcggggggggggggnaactacatgcgctnaaaatactttttncttantgctagagccgttcatcaccaccccacgcagaatttcagctgcttacgttgaacaaattcaacaagtttatcctcaagtttatatgcagcaacaaaggtctatgaatttgggctcataaaactcaggcgaattaaagaggaaacagccc

SEQ ID NO: 16442 - DNA, 394 bp, Homo sapiens
agtacttctagaattaattaaggcggggaacatttctatctggacagtcgtaaggaaggcgccggcccagaatccacaaatgctacgtgtcccttctgtctccctatcccgcatcagctctgtcgtctcacctctcacacatccctacccaactggcaccgacaccactcatgtccccaagaatcccctctaagccagccatgacaaacgctcagctccattcactaccccacagaggatctcggattaagagcacaggacccggccgggcatggtggctcacgcgtgtaatcccagcactttgggaggctgaggcgggtggatcacgaggacaggagatcaagaacaccctggctaacacagtgaaaccccacttctactaaaaatacaaaaa

SEQ ID NO: 16443 - DNA, 404 bp, Homo sapiens
agtacttctagaattaattaaggcggggatgttatcaaatttggaaaatcaggcaagctgagattcttagagtttgtaggtgctcattacaattttattttattttttctgatagtagtaataacatattttctgactatgataaaagccaaagtgttatctatgttctttacgtgaaagttcacttagattctctttctcatatggattatagattgtcccttattcaggaaagcaggacattttttggtctgaagagatttccctctgggtttcatttgtatcaaaagtgaattgtgaatcccaaaggcattcacattgtaagatgatactactagttgggatactgaggttccatttttattcctttaatagcttcctaattatagattccttttccttta

SEQ ID NO: 16444 - DNA, 350 bp, Homo sapiens
agtacttctagaattaattaaggcgggggtaatttgttacacagcaacagaaaatacaagcctactctccttaagaaaccttcccactgcatgagtaaggattatttttaccttctcaaagtctttgttacagggactacaaaaatggaaggccacacagaccctgagtacaactgtataaaagcagcaaccttaggtttagtcatagttgtctgcattagaactacagaatgttaagagttggaaggaaactgagaggccccttagtatcatcctttatgtttacagataaagaatgcaaggacatgtaatagttcataacttgttcctgatcacatagctgattaaag

SEQ ID NO: 16445 - DNA, 640 bp, Homo sapiens
  misc_feature 601: n = A,T,C or G
agtacttctagaattaattaaggcaggcacacaagtatctgttatattatttttataattttccatatgcattaaacatttcattaaaagattaatcacttgcataaaaaaatgaaagagaactcttgggtattgcaaattggaaataaaattgtaaaatatagtccagctctatctgataaagactacatatccaaatgtaatatctattaaataataacttttttatttcaccttaatggttaacttctatacaagaaaggtgaaggacaaagacaatactaacaagattaatcttaaggagatatgtcaatctgaactgaggctaaaggcatttttgaattatccacataattgtctaaactctccttttcatcttatctaacataaaaacattaatattttcaaaatcacctggcactggtaaaagattcttgtatctcatgaatgagtatcaagcaccaacaatgagttagatgagatcggtcacacacaaaaaaataatgtttattttgactgtctttttaaatgacaaagagtaatttcaacaaaaccaaatgctgcagtgtggcactcagctataacagtgtttttctttttnccaattaacccataaaagctttgctttggcattggtcat

SEQ ID NO: 16446 - DNA, 452 bp, Homo sapiens
agtacttctagaattaattaaggcgggcggatcatgaggtcaggagatggagaccatcctggctaatacggtgaaaccccatctctactaaaaatacaaaaaaaattagcgggtgtctgtagtcccagctacttgggaggctgaggcaggagaaaggcatgaacccaggaggcggagcttgcagtgagctgagattgcgccactgcgctccagcctggacaacagagcaagactacgtctcaaaacaaaacaaaacaaaacaaaaacaaaaacaactcaaagtgtaagcacccaaagggaaggtacttgtattgcttgccattgtatatatccatagcacctattactctacttggaacacagtacatggccatttgttaaataaatgaacaaacaaaccaagatagtgatgttatgaaaaccaaatgcaaagggagtttcaagaagaagga

SEQ ID NO: 16447 - DNA, 404 bp, Homo sapiens
agtacttctagaattaattaaggcgggaggagtaagttttagtgatctattgcacagcacgaaaatcacattattaataatgtatttgtatacttcaaaattacttagaggagatttcaaaagttttcaccacaaaaaaggaaatgaggtgacagatatgtcaattaacttgatttaattattctgcaaggtatacatatatcaaaacacgctgtattccataaatatatataattattatttctcaattaaaaaatttaaaaaaatcgttcctactttaaggcaatgacatccttatacctaatctttttaaaaagcatatgattaatatatttagtaatttgcatgcctgctttttcaagttaagaatgtaattcttgaaggtttattaatttgtctcaaat

SEQ ID NO: 16448 - DNA, 417 bp, Homo sapiens
  misc_feature 32, 47, 51, 60, 66, 68, 71, 79, 82, 88, 90, 96, 105, 111,122, 128, 136, 138, 143, 144, 146, 148, 169, 193: n = A,T,C or G
agtacttctagaattaattaaggcgggttgcnatgtggattctgacntcgnattgatgancttttntnaantccattgntgnaccttntntttaantagaacttntacctntgtgtgacagngataanaaagctangntatgnncnangcgctgtggctcccgcctganatcccaccacgttgggaggctgangcaagaggattgcttgaactcaggacttcgaggctgcagtgagctatgactgcaccactgcactccagcctgagtgacagagcaaaactctgcgtcaaaagaaaaaccaaggctgggcacagtagctcatgcctgtagttccagctactcgggaggctgagacaggagaatcgcttgagcctgggaggaagagggtgcagtgagcccgagatcgtgctactgca

SEQ ID NO: 16449 - DNA, 332 bp, Homo sapiens
  misc_feature 316, 317, 318, 319: n = A,T,C or G
agtacttctagaattaattaaggcggggtagtcagggtgggaaggtagcatatctaagggattcagaattttctgggaggtggagacttggaatatatttatcacataattctcacagtcagtgaaatggctgattcccagaagtgaatacatatcctagtggaattataaaaggtattggttatatgtattaaatggaaccttacattagaccagtaaaaaaaaatgaaagctattgtagaacagtaaattaaggaaataaattaaaataggatactgactataatacaaactataattttgttgtaaagacttnnnnaaaaaaaaaaaaa

SEQ ID NO: 16450 - DNA, 385 bp, Homo sapiens
  misc_feature 56, 62, 66, 260: n = A,T,C or G
gcattcatctcttgaggttgtagagggtggcttatgagctctgctgggaacttcantttttngtgngttacatgatttgatatagaaggatccatcaggcagctgtgtgtcgaatacactgcagggaagacaagagtgagaaaaccaataagaaggctacaacgatatggctattgttgtgaaaaatcttaaataaattgctaccatataaaatccatcaggattaaacaataatgcatatccaagaggctttattttangagtatagagatgagttaatatcagaaaaactattagagcagtataccatattaacaaattaaaaggttaaaaaagcatttagttaaagagagcaatagttttcaaagaagcaactgacataatt

SEQ ID NO: 16451 - DNA, 387 bp, Homo sapiens
agtacttctagaattaattaaggcggggaaagaatttattgaaatgctactttatgcttagctaaaccactaatggtaatgacagccctaatattttacattagttcttccagtatgatagtgaaaccattatattctgaaaatgatttttaccttaatgcatatattaagacctatttaatcaagagtgtcgataatagcaatattgcttttaaaatataatggtcccatatatctgttagcttaggtcacagtttgtctataaatttacgtttattaacatattaagtcatacaaagatagcatgtagctctatttttaaaaatctgtgttacaaagaatgaattaatgacctatatttgtcttctgttctgatttgaggtcgag

SEQ ID NO: 16452 - DNA, 425 bp, Homo sapiens
  misc_feature 32, 36, 56, 420: n = A,T,C or G
agtacttctagaattaattaaggcggggctgnactntattaatatctagagactgnctttatattacagcaaattaaaaccaaatcagttaccatagctttttgaaatagaagagaataaccagagacccccacagcccaataaatcaacaaaaactggaaataccatttatggaaatacagaaatattatgtataaatacattaaaaaatgttctatgttaggcttgcaaaacatgctgaaatgtcattatggtatgtgacattttattcagaaagagggccatggtaaaatacttagaaaataggatactgaagtttaaatttctaactcaatttctaacatttaaaaaaatcatgtaagttccaaaatgttttgagcactacctttctcatctaaaaattagggatacatagccgtnaaatt

SEQ ID NO: 16453 - DNA, 278 bp, Homo sapiens
  misc_feature 238: n = A,T,C or G
agtacttctagaattaattaaggcggggggcaggcaacgtctctacacagagctgctgccacatggctgggaaggactcagatccggtacatccactgatctgccgccaagtgtgaaccctgaggtcagaacaactgaacttggatgaggagggggatacctgtgtactgtagtatcaggtttatgagtacctacaaattcaaatcattttgcatccttcaatacattgaatttcctnaataaacctgtgagaatcattggtaggctcaattttacag

SEQ ID NO: 16454 - DNA, 420 bp, Homo sapiens
  misc_feature 227, 235, 250, 269, 344, 361, 364, 413: n = A,T,C or G
agtacttctagaattaattaaggcgggtggataacttgaggccagtagttcaagaccagcctggccaacatggcgaaacctcatctctattaaaactacaaaaatgagccaggtgtggtgatgcacgcctgtaaccccagctactcaggagttcgagaccagcctagcttctactctagtctcagtgacatagtgagaacctgtctctattaaaagaaaaaaaaaanaatccaancacctaagcactgcnttttcacttactcaaccanatttgtaaaatgtaaataatccttgctctatctcccttaaatatttattgggaaaatcaaataagctggttagtntacatggacttacactncanggagttataaaatgagtaaagccttccgttttccttaaaagttcctcanaacttat

SEQ ID NO: 16455 - DNA, 391 bp, Homo sapiens
  misc_feature 28, 64, 66, 71, 72, 73, 78, 81, 89, 90, 92, 96, 98, 100,109, 112, 116, 120, 121, 122, 127, 128, 136, 139, 144, 145,150, 153, 175, 186, 206, 218, 227: n = A,T,C or G
agtacttctagaattaattaaggcgggncgggtgggtgtgtgcgcctgtaatcccacctacttngnaggcnnnggcanganaattggtnnancccngnangcggaggtngcnatcntcgnnnatggnnccactganctntctannctggncangaaagcgagattccgatctcanaaataattaantaaataaaagaaatagtacngttatccattanataacgagnaaaatccagaaatatccaaatttgcttttataacccaaggcaggttcacaaggtgaggagtagtagtttttaatcactcgtattttcatttgtagcattgcattccgtgtatttaccttttctttaaacactcttgcttttaatttttaaaaatgcattaatgc

SEQ ID NO: 16456 - DNA, 407 bp, Homo sapiens
  misc_feature 81, 168, 183, 205, 207, 211, 216, 218, 220, 221, 319, 377,387: n = A,T,C or G
agtacttctagaattaattaaggcgggaggtggatgggaggaaggaaaactggtatctaaccaaatatttcacctgtgttnttggtttttgctactgaattggacagaggctgtcaccattcatggtggttctgaaaaaacaaacaaaaaagccactccattcctgantattactctaactanactgttgttgctctcccttgantnacanagtantngnncctctgccacatcagtgaaaattatactactttaaaggagtttttcttctcacttgttttacatttgtcacctattacatagctgtcctttgggcatntggctagcatctatgagccattggtacatttcttccttgataaatccccagtgtctangatagtgccngtacatagcaggcatttgtt

SEQ ID NO: 16457 - DNA, 423 bp, Homo sapiens
  misc_feature 360: n = A,T,C or G
agtacttctagaattaattaaggggggaaaatatgtgaaggttggagaggggaagaacctacattaaaatggatttaaaaggcaaagaactaaatgtaatctgtggacctggtttggatcttgatttagacaattaacaaccacctggtgcttggctcactggttgctcgtcccagcactaagggccaagaataaaaggacatcaatttacctttctcaatcttactccccaatactccccttcactgattctgtgcaccagttgaactgctctgctctgcacattaaatattgcatttttcagctgtttttgtttgtttgtttgtttgttttgagacagagtctttctttgtcacctangctggagtgcagtggaaccatctcagctcactgtaacctccacctttcaggttcaagaagttc

SEQ ID NO: 16458 - DNA, 388 bp, Homo sapiens
agtacttctagaattaattaaggcgggagttaagagattacatttttgagaagttcagagctatgttagaatcttggctgtacaactttttagacatcctaccttggaaaacatacctgatgtctccatgtttcaatttattaagtcataaaatgtgattatcttataagtttatggtgaggactgcaccatatgtacctagagcagtgtgttcttatgatgttgataattgttcttttagcataaagtgttgacgtggcaagattcataaaaactaatcagaaaaagaactcaaatattctaccttattatgcattcgcaatgtgtctataatattcaggcttaggacttccagctccagcaaaataaccctgaaaaaaaaaaaaaa

SEQ ID NO: 16459 - DNA, 302 bp, Homo sapiens
agtacttctagaattaattaaggcgtgactcattggaggaggggaaggtctgtgggagagaagggagaaccgagtccaaaaagaggcaccaggggttcacagtgggctctgagcatcaggtgtggggccaggaaaaccatgaggtaggacaggagacatagggattgaagttaagggaaggaattaagagttcagaatatggcttgtgcaaaggaagggattctagaaacaagacgtggccatcactggggtcaagaagagggcatggagacaggaaatgaaatggggaaaaatgggccggg

SEQ ID NO: 16460 - DNA, 557 bp, Homo sapiens
  misc_feature 548: n = A,T,C or G
agtacttctagaattaattaaggcgggtagatagataatgcgataataatagataagtaataataaataaattaataataaatagaatgaataagactgactacttgatagcacaacagggtgactatagtcaataataacttaatggtatgttttaaaataatgtgaagaatataattcgattgtttgtaactcaaaggataaatgcttgaggagatggacatgctattctccatgatgtacttatttccaattgcatgcttgtgttaagtacatatcaggtactgcataaatttatacatctactatgtactcacagtaatttaagaaataaataaaaataaaaaattatataatgtatgaaaaaagacagtcactaaagtattcatagagccatagattatataatttcatttatgtgaccttcaataattagataaaactaaactgtatttttttggaaataaatcctggatggtaaaattctaaaagaaaagcaaggaaagtatctttgtggaggaagaagtagtgattaagagagcacagangatgggctt

SEQ ID NO: 16461 - DNA, 233 bp, Homo sapiens
  misc_feature 102: n = A,T,C or G
agtacttctagaattaattaaggcggggagggataagccaggtcctagagaatagtaattttcaatattattgatatctttggaaattaggttctggaatanccagtttattttgcaaagtctactttaaagctacctgtggcacgtgtgtattatatgtattatgtgctgtgtacatgcacatacatacacaattatttcaaaacttcattttagggcatattccataaaac

SEQ ID NO: 16462 - DNA, 429 bp, Homo sapiens
agtacttctagaattaattaaggcgggggggaataaagttaaaaaagacttcaccaatcaacgccacccatgttaaaaattactaatgaagtaaaaggctaaaacctcttctacagaaactaacagttccccaacaagggaacagccacaccctatctacctctttcctgcgaagaaatcatctatggttgtttccatacagaaacaagtttcaggtattacagtattataagaaatcactcttctgggaaagtatgtgaatgagccaaaagaataagaggccaggtgcagtcgctcactttgggaggttgaggcgggcagatcacttgtcgggagttcaagaccagcctgccaacatggtgaaatcctgtctcttctaaaaaaaatcaataattagccagggttggtagtgcacacttgtaatcccag

SEQ ID NO: 16463 - DNA, 476 bp, Homo sapiens
  misc_feature 465: n = A,T,C or G
agtacttctagaattaattaaggcgggcatttgggctggaaaaagagtgcttttccttatttctccaataggaaggctatgggtccacgtgacttaggtgcttataaacctcaaatgcccttgctttgctatggtgacaaagaaaattccacatatttggatggttgactgtcaactatttttgagagtctagatatttgctagaaacttctaaaggaatgaatactaagcatataccctccaaatttagtatagaactagaaacaatgagaacaaataatttgtttgcactcataatctcacagttgcacagttaacttaatatgctccctggtggacttggcctatgtcattctgggatagaaatcaaatttcactaaattccattaaatgagagtgaaataacacatacagctgcctcccttatcaatttgactggttataaaaatgttgtttttaactcantattttggatc

SEQ ID NO: 16464 - DNA, 387 bp, Homo sapiens
  misc_feature 314: n = A,T,C or G
agtacttctagaattaattaaggcgggagtttctcctggtatggattaggaaaatgaaatgagaacaattaaatcctttacccatgacatagttataggcagtggcaaaatcagaactacaaactagttatagtgatatccagtgtagtaacctagtattcctaccatgatcccttttattccttaaactttgagaggtctaaaattaagtcaagatggattaaagacttaaatttaaaacccgaggcatgatggttcgtccctgtaatccaagcactttgggaagccaaggcaggctgattgcctgagcttangagttcacgaccagcctgggcaacacggtgaaacctcatctctactaaaatacaaaaaaattagccgggcgtg

SEQ ID NO: 16465 - DNA, 441 bp, Homo sapiens
agtacttctagaattaattaaggcgggggatgagtgggaaggaaaaagcaagacctcctagtttgtaggagtgaaagggctgagacttgacagtggtaaaattgcttttagggtctacctccctctcaaagttttcttttcctgagtaacctgagagcagtcaaaattcctgcaattgaaaactcttctgacactggagagggtaccctacttgcctcactactcccacgaaagctaaaaataaaggctattagtcctcattttctcacacacacagaacgtgcagtaagccatgtcaggagacaagtcaacaccagttttcctaatatccttctttgataaatatgaagaatcaccaaacgtctgaggaaatcagaagcacaaagagaaaactgatgtgaactaatatttcaatgcaccatataagaaactggtaactta

SEQ ID NO: 16466 - DNA, 339 bp, Homo sapiens
agtacttctagaattaattaaggcggggtgatggacatgtttcatattttgactgtgggtagatatgtggctctatacatttaataaaacacatctaactgtacacttaaaatgagtacattttacagcaagtaaattctacctctaaaagctgtttttttaaggcgtctcaaatatttcccctaaaaaaatttaagtgatatcacaaatctgtaatatgtgctatagtctaaacagagctttctaaaaggctgcgtggattcttgtcaaaccaaaatgttagaaaacattatttagagtttgaaacaaatttattcacatgtatgatttcaatttttt

SEQ ID NO: 16467 - DNA, 394 bp, Homo sapiens
agtacttctagaattaattaaggcaggtgatgaagctgagggaagacacttatcatcttaaatcccagagaccaacgctttcaacttaaaaatgaaaatgtcccaattataaatccctgaggtggaaaaggctgcaacacgaaagcattctaagccatgcctttgtgttgtattgcagtcaagaggaaataaagaggtcccctttgtttaataagcaactgaaagtttttctttcatgcctctcatatttcttggcatcaccataactgttgccatttaatcaagattccctttaaactggtgaatgctagcagaatgtctcaagagagctgatttccttcactttcaagttcattgtgaccacgaatgcattaacctgggctgcctacatttc

SEQ ID NO: 16468 - DNA, 357 bp, Homo sapiens
agtacttctagaattaattaaatgagaaatacataaacatattctccttgtgaaaggaaataaaacattataaatacaaaaaagggtgaagtttctttcgaccatgatctttaatctggtttggctcccctgtctcataggtaaccactgttgggacttcggaatatatccttctgtgtctttttctatatgtttacacacatatacttgacactgaaaagatatggtattggttgtattctgtgctgtattatataagtggttgtgcaacttgcttttttttcactttataatacatcttagagctctgcttatgtcatgtggatccagtgcggttttgttttgtttttttttttt

SEQ ID NO: 16469 - DNA, 414 bp, Homo sapiens
  misc_feature 160, 165, 194, 199, 200, 205, 209, 211, 212, 220, 221, 226,227, 250, 298, 311, 318, 326, 346: n = A,T,C or G
agtacttctagaattaattaaggcggggggggcgtgacgccacgagcctcggcgccggccactgggctttccagccggaaggtttggtacatctctgtctacccctagggaaggaggtgagggagaagttgagagggcagcctggagggggaggggactntgctnctgcgtgtgttctatcagggactgactgngaggnnaggancctntnnattctggnncacannctgggtgactcttgctctccagntgctactgcagctgcacctttgtgctcaatgaatgcatcagccatggncgcacggtcctgnctcagcncgagcctnctgcagggatggagcagcancaaggggagcaaacccaatgacccacgcctttaccctggggattcgcacagagatggtgctgcctgga

SEQ ID NO: 16470 - DNA, 426 bp, Homo sapiens
  misc_feature 307: n = A,T,C or G
agtacttctagaattaattaaggcgggccatactgagccagtagctgggggaagcatccagtatacctgggcccccctttgtccaccttcctacacagcttgtggacttgcttccacaattttgtttctaaatacactttcattattgtcttaaaactcctaatgccctttgggaggccaaggcgggcggatcacgaggtcaggaggtagagaccatcccggctaacacagtgaaaccccgtctctactaaaaatacaaaaaattagctgggcgtggtggcaggcacctgtagtcccagctactcangaggctgaggccagagaatggcgtgaacctgggaggcggagcttgcagtgagccgagatcgcgccactgcactctagcctgggcgacagagcaagactcagtctcaaaaaaaaaaaaaa

SEQ ID NO: 16471 - DNA, 288 bp, Homo sapiens
  misc_feature 8, 30, 41, 42, 45, 97, 135, 152, 191, 263: n = A,T,C or G
agtacttntagaattaattaaggcggggtnacataaaatannctngggcatatcaatagggcacataagtcatcttaaaattccttccactaaaggnagaaaaacacaagacctaagaagaacttataaaacttngaaatgagacctgaggnaaaaggatattcaaaggacactggtctagagagatctgnattccttatgtctcacataaatcttaaaaatagacttttcattcatataccttatagatattttctcttatngatatggcaaaactcaagatattgg

SEQ ID NO: 16472 - DNA, 414 bp, Homo sapiens
agtacttctagaattaattaaggcggggaaaaaagcctgtgcaggctgggtttctttctaaagtgggaagttaaagcaacgggaaaccaccaggtaggatgtttttcctatattggatggtggcacaaagttctcttccaaattattccagggatgcaatgcaatgcatatcaagtcaatggagggggccatctgcaatattagatattaaaacatattttaagcctacaatagcaaaaacaaggcactgacacaagaatagataaaaggccctattgcagacacaaattcagcataagaaaaatggtgttttaaaaagatttgtgccaataattttggattatatttttattttctttctttatgagtgtttctcttttatataactttaagaatagacctgaattataatat

SEQ ID NO: 16473 - DNA, 419 bp, Homo sapiens
agtacttctagaattaattaaggcgggatttatatatatgtatatataaaatttacaaatgggtaagttaatttagtctgttatttaatctgtattctctttatttgcctagcaaagcccaaaccaatcagaaattgttatagcaaaaagaatcaggagatcacttagttctgtggttcccaaacccagtgacatcagaattcccctgggaaaccatcttgagggtatccatgagaaatctgtcaggtagttcttatgtagctaccccctgttttctccatttgtggttattactgctctcatcttagaagttggaagcccaaataaggcagctgttaagtattttataaataaatttgcccaagtaattggcacagctcaagtcaaaacaatagtctattctccaaatggaattgttc

SEQ ID NO: 16474 - DNA, 257 bp, Homo sapiens
  misc_feature 89: n = A,T,C or G
agtacttctagaattaattaaggcggggcacaatttcaaccaactttaaattatttcattctggaagtatgtgttgagtaaatatgaantataaggcccctagaggtacagatggctatggccgtctaaaccattttactcttaacttttagtgtcatggacctctttgtcaatctagtgaagtctatggaccgctttttttaaaaaagcctttaaacatataaagtacagtacattgaattacaaaaggatccaag

SEQ ID NO: 16475 - DNA, 421 bp, Homo sapiens
  misc_feature 196, 237, 268, 301: n = A,T,C or G
agtacttctagaattaattaaggcgggtggatcacttgaggtcaggaattggagaccatcctggccaacatggtgaaaccccatctctactaaaaatacaaaaattagccaggcatggtggcacgtgcctgtaatcccagctatttgggaggctgaggcaggagaatcgcttgaacccgggaggcggaggttgcantgagatgagatcacaccaccgcactccagcctgggcgacanagcgagacagtctcaaaataaaacaaaacanaacaacctaaactgatttcaaaagaaatagccnaggagcatgattctaggaggcaaacaacactcaataaatgctttagtagataaaagcagataaatattggaaaagcaaaaaaaccaacgtaagattgatctttaaaattcaatttaacac

SEQ ID NO: 16476 - DNA, 403 bp, Homo sapiens
  misc_feature 294: n = A,T,C or G
agtacttctagaattaattaaggcggggtttcaccattttggtccggctgatctcgaactcctgacctcaagtgatccacccacctcggcctcccaaggtactgggagccaccatgtgtggcccactgcagggttttgagcagagaaataaaacattggttttatggtatctttagattttaagtattatttctgtctccattatgttttagcctctttttttgactcatgagcaagtaatcaaaatgattcagtattctatgaaatgtactactagtgaaaagtatctcatanataatttaagctcaaatccccactaatttactttatgtgggtagaatactaaaaacagataatattgtttctgttaaattcaatcatgtgactcaaagaaatgagtgtc

SEQ ID NO: 16477 - DNA, 407 bp, Homo sapiens
  misc_feature 30, 31, 32, 39, 41, 42, 43, 45, 47, 50, 52, 54, 55, 60, 69,86, 90, 99, 102, 104, 105, 106, 110, 111, 120, 121, 124,126, 127, 128, 147, 166, 168, 175, 178, 180, 182, 186, 187,212, 219, 220, 246: n = A,T,C or G
agtacttctagaattaattaaggcgggggnnnctgagangnnnantnagngncnntcccngccattacnattttgaaaatctcccnttanataccattnaanannnacannggattaatnntantnnngatgcacacatgtgtgccnacaggcccatgttcttaantntgacaanctntncnggtnnaatcacaagcctaagccaggcatgntggctcnntgcctgtaatcccagcactttgggangccaaggcaggcggatcacttgaggtcagagttcgagaccagcctggccaacatggtgaaaccccgtctctaccaaaaatatacaaatattagccgggcacggtggtgtgcgcctatagtcctagctacttgggaggctgaggcaagagaaacacttgaac

SEQ ID NO: 16478 - DNA, 419 bp, Homo sapiens
agtacttctagaattaattaaggcgggggccaaagaaaactaaaagtatgagtggagacaaaatagagccaaaaaagaaatgtaaaaatgcataccataatgccagcactcctgttactagtgtttcacaaggaccaccataagctttgtagcagccagatttaaaaagaaagaatgtaaaactcagcttccttccatcaaaagaactcagttgttcaggtgaatcgcaactgttcttggccttaagatcagacagacttttatcctaacgaccttcataaagaggatataatgttaagttcattcatctcacagtaggcattcaaataagtgtttgttgaatgaattgtagtaccttcaatataagttggtggcattgcatgaaaatgtatttcagcaaaagcagttttgccaaaatt

SEQ ID NO: 16479 - DNA, 688 bp, Homo sapiens
  misc_feature 509, 566, 596, 604, 605, 607, 610, 611, 623, 624, 629, 630,635, 642, 651, 652, 660, 661, 663, 671, 674, 684: n = A,T,C or G
ctcgagagtacttctagaattaattaagggggaagtagtataagatacacttatgttagttaatccctgtaaagaagaatgatattttagtggaatatggaggctccaaatagcttgtggaaaggtagtataactagaagtatgtgaatcaatgtattactcttatatgaaagtaaaggcacggttgtccaatgaaccactagtttcccactgatccatcgtagtctggtaattagtgcatgttatggagcattaattagaaaaggtctacatcatatattatccatttatagaggcaacaacattggccctttactggttctgaattgtgagaggcctttgttttgacacttgataacagctcattctgatatgaagtcacttgatcactacaaagttggtgagcagcacagtcttgttaaccattggtttggtttagtatatatcttccaaatttgccaaaccaatggcttttcacaaggtgtttataattgttaaatgcctatgangtgataactttcatgtgtggttggattaatactggccattaataatttaatcttggntggaatcaaaaactctaactagttgggatntgtgttgnnangtnnggaaaccccatnnttttnntgggngggcacngtaattggnncatttaanntncccctttnttngggttttttnaatt

SEQ ID NO: 16480 - DNA, 163 bp, Homo sapiens
agtacttctagaattaattaaggcgggagataaaccagaattttctagacattcatataagttccagccatgaaatcagacagatttacatctcagaaaactaaagcatattcaatgtaaacttacttttgaaataaacgtgagtttccaaaaaaaaaaaaaa

SEQ ID NO: 16481 - DNA, 432 bp, Homo sapiens
agtacttctagaattaattaagacgggatggctgagttcaagctaaatagtatttcaagtttcaaattgtttggatttctttttggttacatagtcctaatatataaatcagctgccttctgaaaattggagttttaagcagaatctcactaagacttctcttgttatctaaatctaaataaaaagggatttacatactgtcagtatatactgaacagaaaaccttgtaaaacagtagtaaactggagggatgcattagttttaacacaaagcaaaaccttgtaaactcaggagatagataacctgccaatagaatcacaattctaaatgtgaatctttatcgaagtggtaactcagtgtaaagaagggttttaaatcagttcattagtctttatggtcgcttccgttgactagaagtaaaaccaccagcag

SEQ ID NO: 16482 - DNA, 400 bp, Homo sapiens
  misc_feature 286, 334, 363, 383: n = A,T,C or G
agtacttctagaattaattaaggcggggggggatagctttaggagatatacctaatgctaaatgatgagataatgggtgcagcacaccagcatggcacatgtatacatatgtaacaaacctgcacattgtgcacatgtaccctaaaacttaaagtataaaaaaaaaaaatccaaagttagtagaaggagaggaatactgaaaaatacagaaaaaaataaaatggaaaatagaaaaacagtatcagtgaaattagggagttggttcttgaaagcataaacaaaatanacattttccaaccattaccaagactaagaaaaaaaagagatgacttanataaatcaaatatgaaagaggagatattntaatttatgccatagcaatnaaaaaatgaaccattag

SEQ ID NO: 16483 - DNA, 395 bp, Homo sapiens
agtacttctagaattaattaaggcggggcagtgattcagtaatacttagtatatttaatcagccaacttcaaacctgtgaagttctactataataagagttttgactttttttaaaaaggggatagggcatgagggaaaaaaaaacaatcctagaattttaagttctagaagtagtggtagagtgtggtgggcaagcaaaagaaaacacattgtaaatacatgtcctaatgggaacgatgatccctttcttcaaaaataaagccaaaaaaaattaaggtatctaagagtcctctgattgaaccttagctcggcaacactctggggaaactaaagagaaaaggagggaggcagaaagagagagaggaagaggtaaagagagacttacagatttgca

SEQ ID NO: 16484 - DNA, 532 bp, Homo sapiens
  misc_feature 28, 32, 35, 37, 38, 48, 49, 56, 60, 61, 62, 67, 68, 69, 70,73, 77, 78, 79, 80, 88, 91, 102, 106, 107, 110, 111, 112,113, 115, 117, 125, 127, 128, 130, 131, 136, 143, 144, 150,152, 153, 154, 155, 156, 161, 162, 170, 172, 175, 181: n = A,T,C or G
  misc_feature 185, 187, 193, 201, 208, 222, 237, 263, 273, 308, 309, 322,330, 332, 458, 510: n = A,T,C or G
agtacttctagaattaattaaggcgggnggancantnngccgtgaganngacatcncccnnncatgnnnnatncctnnnncttctatntantcaaaattcanctgnntgnnnngncnggtgcctntnntnncatcnactctanntgctangnnnnnacaanngattggancnaanacgcgnaagntncgttgnactgagcncataccnctccactgcactcnggctacgacaatganactccatctatttcaaaacaaaaacnaacaaacacnaccgggttggccaggcgaggtggctcatgcctgtnntcccagcactttnggaggctnangtgggtggatcactaggtcaggagatcaagaccatcctggctaacatggtgaaacaccgtctctactaaaaatacaaaaaattatctgggcgtggtggcgggttgcctgtagtcccagctactcanaaggctgagaccggagaatcacttgaatccaggaggtggagattgccatganctgagatcgcaccactgcactc

SEQ ID NO: 16485 - DNA, 369 bp, Homo sapiens
agtacttctagaattaattaatattttatattcacttaaaaaactagacatgcaatgtctaattacttggtaaagcttatctttcagtaaatcaaccacaagataaacctatttatcattcttcttaaaaacatgcaaatatataataagcatagcaaattggaaaagtctaatttagatcgaaagaactgttgctagaatattattagaatgaaattacaagaaacattcagtgaactcttaaacattcaggagatcacatatcttgggattcacagcaagttagtagattttttggctttagaagaaacatatgtgaatttattttttactccaatattgatccattgacatacatattggcgaacc

SEQ ID NO: 16486 - DNA, 574 bp, Homo sapiens
  misc_feature 184, 186, 198, 222, 229, 233, 239, 258, 262, 268, 282, 287,298, 315, 316, 320, 325, 330, 339, 350, 363, 387, 392, 439,462, 494, 556: n = A,T,C or G
agtacttctagaattaattaaggcgggtgaatcacttgagcccaggagttagagataacttctgatccaatagaaagctctagagcacacagagcaaatatacttcatcagtcgagctgtagtttctctgtaaaaaacttcgaacgacttccaaagttcaaaaaaaaaaatgtaaagacaacancntgattgctaaanattcatgtggtcaaagactggaanaatgacncagnggaggngttccctcaggggaattgngggngatttnttttaaaaaaaaangcctnttattgggatncccaatcaagtaaaatnntganagganaaagnggtttgatntaaaggaagcncttgggattcagngaaaccagaagaaaaactagcccnttccnttgctccctggacaacagtcaagtggaacaaagcaaactttaaattntcccaacgataaggcctaaaagnacattgggggatgcattttcatcctgaatcanactacctgctttttttaaaaaaagatcatttttcctggccaggcgtgctggctcatcctggnaatcccaccttaaaaaaa

SEQ ID NO: 16487 - DNA, 422 bp, Homo sapiens
agtacttctagaattaattaaggcggggtaagtccaaactggttatgtgtctggtacaatgagaagcatgcttccccaacaccgcaaaaaagaaaggagagagtgagagcaagagatgagatgtccttaggacaactatttaccaggtaaagttgaattcagaaagactcataaggatttaaccatatgagaaaaagccaaaacattccttaaagccccagtatcatgacacatagacataggaagaaatatgcaaagcaactggaatttcattgatgttggagcaatgagcaccttcctatgcctacatgactagatacaggtattagccctgtttagtccgaaatggattgggttaggtatttgaacctgatgaaaacacagtgataagtgagattcttattaacaaaaaaaaaaacttt

SEQ ID NO: 16488 - DNA, 573 bp, Homo sapiens
  misc_feature 547: n = A,T,C or G
agtacttctagaattaattaaaattaaccctcaaaatcttccggcatataaattggtgtttgggaattaaaaaaaaacttctggcataggttttttcgtttgcttttatataatgtgaaaaatagcattaaatgtgaattgttttgtgtcttctgaacaagttggtagacaaatattatttagaagtttgctctaaaaagatgatttcttaaggatataaatccagagatttagttctttcttaagtttctaaggtcaaactcgtggttttttgtttgtttttttctattgatgagtttagcaaatttcagcaaatactttgaagtaaggagcttttagataatgtgtagtcacatttacaaccttagtagaattttaaaaacatttaaaagtgcatttctaaattcagtatattcagtttctatttcaagaacctctgttccctgatttaaaaccttttcaagtacataagtatcttttataaatagaaccaaattagtcttaatatgtagaaccttgaattatcttggctatttcaatgcctcanataacttaataagaattctactttaa

SEQ ID NO: 16489 - DNA, 447 bp, Homo sapiens
agtacttctagaattaattaaggcgggaggatcacctgagatcaggagttcgagaccagcttggccgacacggcgaaactctgtctctagtaaaaatacaaaaaattggctgggcatggtggcacatgcctgtagtcccagatactcaggaggctgaggcaggagaatcgcttgagcccgggaggtggaggttgcagtgagctgatatcatgccacagcaactccagcctgggcgacagagtgagagagactccatcccagaaaaaacaaaaacaaaaaacccacattagatcaggcttgttatagagtctcagggagagttttttttctcccttctacacagcaccaaaatcaagaaaggcaagattctttgctgcccttcttcatgacaaatttactttttgttcatgttcagagtgtagctgtttggaatcccagctttacgta

SEQ ID NO: 16490 - DNA, 330 bp, Homo sapiens
  misc_feature 330: n = A,T,C or G
agtacttctagaattaattaaggcgtggtgatttataggcctgtctgaatacagatcgcacacagtattgaaatactggaagattcaaacactgtctatgactcaaatagcacaagcagtgatagtaaattagctaagtgctcatctctccagacaagagtttccttaggaaaataatatctatttttggtatttcagtagctctagaaagagatgaatactactaaaagagatgaatatgtcaatgctaagtcatgaatgttttaaaaagccacatttctacacaaatggaaggaaaattttgctttttttttttttttaaaaaacttn

SEQ ID NO: 16491 - DNA, 452 bp, Homo sapiens
  misc_feature 29, 34, 39, 44, 45, 46, 52, 53, 54, 67, 68, 70, 71, 76, 83,84, 87, 89, 95, 96, 99, 100, 101, 103, 104, 106, 108, 109,111, 112, 115, 118, 119, 120, 121, 126, 133, 138, 141, 144,148, 160, 193: n = A,T,C or G
agtacttctagaattaattaaggcgggangatcngtttngcccnnnagtgannnaccaccctggacnncnnagacnggccgtnnctntncgcatnnaannntnncntnntnntgngannnnacacnttttctnccaantantangganctgacggcatcncgattacttgaaatctgaaaggttgagctgcancaagccgtgatcgtgccactgtactacagcctgggcaacaagaacacgaccaactggaaaaaaacggactctttaatatatgctcctaagctatttatggaaagaagctaagagtttccacttctctcttctctttgtgacttcttgatttgtttacactacctatttctacttccttacctcctgctaactcatattcaatctaaaaaggcactttaattcgccaatgactttaaaataccgaaaataagatactttc

SEQ ID NO: 16492 - DNA, 463 bp, Homo sapiens
  misc_feature 346: n = A,T,C or G
agtacttctagaattaattaaggcgggcggatgatctgaggtcaggggttcgagaccagcctgaccaacatggtgaaaccctgtctctactaaaaatacaaaaattagccgagcatggtggtgtgtgcctgtaatcccagctactcaggaggctgaggcaggagaattgcttgaacccgggaggcaaaggttgcagtgagctgagatcgcaccactgcactccagcctgggcaacaagagcgaaactccatcccccccctcaaaaaaagtgttttaagagtcctaaaacatggctttgcctggaaaccaaatgcaggaggtgggacagagggaaccatcggtcagnctccaagctccatggtgtggctttgtcttagaaaaagaatttgcctggccaggcgccggtggctgacgcctataatcccagcactttgggaggccaaggcaggcggatgatctgagg

SEQ ID NO: 16493 - DNA, 495 bp, Homo sapiens
agtacttctagaattaattaaggcggggtatctaagaattgattttataaaataacatattttaagaatgagaactttctcaagttattttactcccagaacaaagactataatcttactatatttttaggactctcgtctagggcaggcttttgatataaataaatgatgcattaacattatatgaagacagaagtgtatgtgccagcagaaaactaaatggggagaattgtatgtttatacaactccaaggtcagttcactaactccttcctgaacatcacagctcagatttttttcttcttttgatacatgttcctttttctgttagtagatgtctctttatcaaacattccataaatctgagtctagtgagataattttttattaactctccctttacctatttctgtgcagttttgtaaatatctaataagcagttgcataaaacaacctagtaatctgaaaacactggacctaaaactaaaaaaaaaat

SEQ ID NO: 16494 - DNA, 698 bp, Homo sapiens
  misc_feature 637, 653, 662, 667, 672, 673, 680, 688: n = A,T,C or G
agtacttctagaattaattaaggcgggggcaatctttaggctaatgatattataaaattgtttgtaaagcctggggcttaaacatctctagtgccataactagctactgttttaaaaaggacatttggttcacatttgcatctttgagataaagatttttatgtcagaagttcagccctctggacagcgtaaaatcttaagaaatactgtctgggttttacgaattgtccacaaacttagtgtttggtttttgaagatggtttgtggcccaggctcccatgtgacctcaccctccaaaggttaaggatgcagtctaaagaattatccataagtttaaagccttctaaaagttattaatgttctcaacttgtataaccttgtctatgctacctacatgctatataaaacagtgttttctcatgtttgttcttgaattcttgctagtttcaagcaggttcactagttttctaattactatagttggtgaacaagttctatactcacttcttttgattagatatattttcaatcatttccaagctcaaattgtggtggccaatattgaaaagatgaattggatatctgtgagaatgtcagtggagaataccccccaaaaaacctttgcccgaaaaaaaanatttgggggggggggntggaacctnggganaaatnnccccaanggggtttnaaaaaagggg

SEQ ID NO: 16495 - DNA, 318 bp, Homo sapiens
  misc_feature 28, 30, 31, 37, 42, 46, 52, 56, 58, 61, 64, 66, 79, 83, 172,284, 302: n = A,T,C or G
agtacttctagaattaattaaggcgggngnnatactncctcntatncctttnactngnaanctngnagttattcaacangcanactaaaagtgttggcagagatgtaattttaaagcacaattccacacattgcttcagtattacagctgctccttgtttgtttaataatanaactgatgagtagataatttgagaggaaagctggtgcaggtgtagtgctatttagatgtcatggaggacacatgtgacatctgcagctagctatatggtaaaagcaaaacanaagttaaaatcagccctntgtcaaatctgcatag

SEQ ID NO: 16496 - DNA, 388 bp, Homo sapiens
  misc_feature 72, 111, 114, 306, 347: n = A,T,C or G
agtacttctagaattaattaaggcggggggatatgaaatattttatgtctaaccttaataagccccacctancaatgcagggctacaatgatattgaattttaactagatntanagtacaacctctaagtgtagattcaacattaaagcaaaatacatgcaactagttttgaaattttgagtaaactgacaaaggagtacttttaaagtaaaaaaatcaaggaacacccaatgttaaaatataacatttgaaaaacatttcaaaaataatgaagctttaaattggcaaggtccgaaccatcaactngcttcaatttgaacacttaacgcaaacaagaaatgcagcanctgtcagatgccgttagtgattcaactctgaaataaaaggt

SEQ ID NO: 16497 - DNA, 222 bp, Homo sapiens
agtacttctagaattaattaaggcgggaggggtggagaaaggggaaagcatggttaacaggaaacaacatgtaacggaagagacagcccagatgtgtctggctcacaacagacgtgatcatgttatgctggcctggaagagcatcggatcagacgtgacaagtcactgcttagagaccatcaagcaaatttatatatagattggagaaaaaaaaaaaaaaaa

SEQ ID NO: 16498 - DNA, 439 bp, Homo sapiens
agtacttctagaattaattaaggcgggaggatggttttagaccagcctgcgcaacatagtgagactctgcaactatttaaaaaataataataataaaaagtttgtttaaaagaaaacaatggaagttctgaggtgacgtctgaacacgtcatgttatatgctttatgaatccatcacacacatttccttttacaatgtgggatctggtcaaggtaaattctctgtgaaacctatgagggaaatggacagttctggagactaacacaaaccttaaagaacttgggagtcttattcttcatatgatcatcttacaccatcaggtactttttgtgtggtgaccctctgggtggggaatcttcaatctttttagttcctccaaaataaaaggatgatatttaaaactgtagaaaggggaacaggccaggcggggtggttcatg

SEQ ID NO: 16499 - DNA, 177 bp, Homo sapiens
agtacttctagaattaattaaggcgggagataatctttgataaatggtgtctggaatttttcttaggcagaagaaaatcatttagattcttacctaaatgattagagaaaaataggtcccaactggaaatagtaaaataaaaaatcaagccactggttaacttaaaaaaaaaaaaaa

SEQ ID NO: 16500 - DNA, 696 bp, Homo sapiens
  misc_feature 432, 461, 515, 589, 608, 643, 655, 673, 674, 692: n = A,T,C or G
agtacttctagaattaattaaggcggggccgagagggcagagcccaagcctggaggggcagaactaggttcaacctgtgggctaaggcttgcctgggacagggacctgtagaggaccaggcggggtctgaactgcacgtgcagtacggttgactcgggagactagcaatccagagggtgtcgtaagcaggtgtttatatccattcgctgagtatctaaactagtgccaggtctttggtatgtctttggtactcccccatccccacccccaacgtatccatctaccctatcccacctccccaaaagaagcccgaataaaacaaaatccttgatctcaaggagctcaacatctatttggcacggggggagggggattttttggggaagggcttatggaggggctaatttttaaaaattaagttgaatgaagccnggcgcggtggctcatgcctgtaatcccancattttgggaagcccaagccggtggatcacgaagtcaggaagatcgaaaccatncttgccaacacggtgaaaccctgtctctactaaaaatacaaaaaaattacccaaccttgcggtggcccctgtantccaacttctgggaagctnaagcaggaaaatgcttaaccagaagcgacttcatnaaccaaaatcgncccttgacttcactgggnnaaaaaggaaacttttttnaaaa

SEQ ID NO: 16501 - DNA, 255 bp, Homo sapiens
agtacttctagaattaattaaggcggggaccggggcctctgggtggtgcgagcatcatgttgccttttaatatggagcatgtgccatagctctccaggagaacccctctgtgtcacagcgaacctcagtcactgacactcaaaagaaggaattatttcaactcaataataaacaaataaccctattttaaaatcaaaaaaaaaaaaaaaaaaaaaaaaaaaaaaaaaaaaaaaaaaaaaaaaaaaaaaaaaaaaa

SEQ ID NO: 16502 - DNA, 442 bp, Homo sapiens
  misc_feature 189: n = A,T,C or G
agtacttctagaattaattaaggcaggagaaaggcgtgaacccgggaggcggagcttgcagtgagccgagattgcaccactgcactccagcctgggcgacagagcgagactcgtttcaaaatagtaataataataatagttaatactcaatgagtgcgtactatgtatgagggaccctactagcacttnataagtaaaagttaactgaaaattcttaatagccccatgagataggcaggcttattatccccccattacaggatgggtgtggtgggtatttcaggcacagacagattacgtatcctgcccaaggacccgcagctaaataaaagccaagctttcagctctacggtgtgactccaaacctgtattcccagccattacactataattcctcaaagtctgggccatgtatttaggcagcacctagcttcaatcatca

SEQ ID NO: 16503 - DNA, 413 bp, Homo sapiens
  misc_feature 29, 31, 32, 48, 50, 52, 56, 61, 67, 92, 137, 152, 161, 178,208, 219, 227, 239, 240, 243, 261, 264, 269, 272, 307, 323,333, 338, 357, 377, 385, 408: n = A,T,C or G
agtacttctagaattaattaaggcgggcntnntaatttcacaactgangnanatcntgganactatntattataacttccctgattatatanagaataaaatgaagttcactagaaaggaggtagaactgagatganaactcaagttcctanagtcatccntcaaataccctttatanaataacaagcttttcctcaaatactcattntaatattggcncatgttanagcatgtgaatnnggngtctctgctttatcactngtnttatnganacaatgtttaccaaaagaactgtgccactatgcangatattatacatgttntatttaaaantactntttctcaaatgggtgtgcntatccaggcccggtatcacntgaaaagnttctggctggatattttctatanagact

SEQ ID NO: 16504 - DNA, 384 bp, Homo sapiens
agtacttctagaattaattaaggcggggcagggagcattggataagagcaaaaccctcattctccagtaacatctcaccatgtataaagctgctaaaccaaggaggagcagcaagagcacataattgagaagtatggagagagctaagacaaaaaaaaatgggtgaaagctttgaaagaagctgacgctagggccgtaatggaggagcaaaggagggccagggcttggtgagttccacagagacaatagtttctacagattctacagtttcagtatttaaactgtactaactttgggggttctttttgtttcttttatctatgtatctgtatttctttggtaactattaaaataaagaaacacactagaattccaaactaaaaa

SEQ ID NO: 16505 - DNA, 437 bp, Homo sapiens
  misc_feature 31, 33, 35, 41, 51, 53, 59, 63, 65, 71, 72, 84, 92, 93, 94,99, 129: n = A,T,C or G
acttctagaattacattaaggcggggccttntngnattttngtagtaaccncntgttgngtananacagtnnttgctccggttnaaaacaannntgganatggacggtgggatggtcacacaacattgngaatatactcctgccactgaactacacacttcaaaatgcctaaaggataaattgtatattatgtatattttaccacgagagaaagttataaataaatctttaaaaaattgtaaatatatatttattaaaattaaatagaagtcagaatactaaaataaatagggcagcagtaaattttaggcaagttacactaataatgggcactcaacaatttgtattcttttagtaatacaagcagaatttccatgtttgaaagtttcaatgaaacgttttcagatccatttccctttgtagatggtaatatccct

SEQ ID NO: 16506 - DNA, 468 bp, Homo sapiens
  misc_feature 454, 467: n = A,T,C or G
agtacttctagaattaattaaggcgggaggaacatggaggagtgaagagggatgtcaccttgtaatgaagagatggcagtgaggactctgatggtgggcagactaggggaagacctttctgtttgttttcagcttgccccttagcatctcactatcctcattgataaaatgaagctaaggctgttttctaggtcatggaggaggattctatctgacaatgtctattaattgcctagtataatacctggcatgtcatgttcaataaatactaccagccattattattgttgtttttgcagctattattgtcactgttgttattttactaatgtcggtgagaaatcaatgtctgaacttgaaatttctgtctcttcattcattgtctggtgttgtaaggtcacatggctgcaggagaaagacagagaccataaatgacaacagtggactaaaagtnccaaaaaaagaana

SEQ ID NO: 16507 - DNA, 439 bp, Homo sapiens
agtacttctagaattaattaaggcgggttcttcccttgtctcagtatccatgagcctctctgggtttgagcatttctccacactgaatatggattctgtgtttaacaatacggttttttgtctgtttgtacaaaacctaaacacaagaatctagttgacctagtgcttagtcaaagaaacggtgatctctttcaacactggaggaaaatcattagtgttgtatttgctgaaagaaagtgtatgggcctccaaaacaatatactcctagtaagcatacaatatactcctttgcaaggtaagtttaaacacaatttttatgttataggctgacaatagcaactaacctcctcctgagatacaaccccattgctgtacagtatatttttctgcaacaatcatgtgttatttttgagatattaaaaataaaaaaatagttaat

SEQ ID NO: 16508 - DNA, 409 bp, Homo sapiens
gagggaattgaaagttattgcttaatgggtatgaagtttcagtttgagaagttgaaacagttctggagatggacggtgggatggtcacacaacattgtgaatatactcactgccactgaactacacacttcaaaatgcctaaaggataaattgtatattatgtatattttaccacgagagaaagttataaataaatctttaaaaaattgtaaatatatatttattaaaattaaatagaagtcagaatactaaaataaatagggcagcagtaaattttaggcaagttacactaataatgggcactcaacaatttgtattcttttagtaatacaagcagaatttccatgtttgaaagtttcaatgaaacgttttcagatccatttccctttgtagatggtaatatccctac

SEQ ID NO: 16509 - DNA, 181 bp, Homo sapiens
agtacttctagaattaattaagggggcagtttgaatcagaacctcacatttccttttgccacatctttatgaccatggtcattactcccaccctctgcaagtacctaagactctttcacagaggaattcatgtctttataccagtaatattttttgactaaattttttttccatttttctt

SEQ ID NO: 16510 - DNA, 671 bp, Homo sapiens
  misc_feature 282, 301, 354, 359, 390, 422, 430, 435, 439, 450, 453, 466,481, 484, 489, 510, 516, 528, 536, 552, 554, 555, 556, 562,563, 564, 565, 577, 578, 580, 582, 583, 590, 596, 599, 600,602, 604, 605, 606, 609, 610, 611, 612, 613, 614, 615: n = A,T,C or G
  misc_feature 616, 617, 632, 633, 634, 636, 637, 638, 639, 640, 641, 642,643, 652, 653, 654, 655, 661: n = A,T,C or G
agtacttctagaattaattaaggggggctgggcaagcactaactggagagtctagactacaacataatggacaacaatacaattttttctctttaagatattcagtaaataatagatatccatagtagaaacctctttattaaaagcaataagtcaattataatatagcatttttagatattttcttatctaaaagaattgtgccttgagcttcaagttacgtggacacaggaaatcccgttgcattacagtgctattaaaccttctaccacagccacagtntcacgatgattaatgcttnccatgaccttcaggtactgaaataaccataactgcctttggatcatcgaaaanataanattaggttcaatattaacttagttttatccncctttaaaaattcataccccgggttttacatntttaaaanggttntttnaaaaaaaaggnccncttttttcttttnaaaaaaaaacccccnctnaaaanaaaaaaaaaggggggtttttnaaaaanagggggggggcntttttttngggggggggggggggnannnaaaaannnngggggggggggnnanannggggggngccccnccnngngnnnaannnnnnnnnggggggggggggggnnncnnnnnnnnaaaaaaaannnngggggngggggggggg

SEQ ID NO: 16511 - DNA, 587 bp, Homo sapiens
  misc_feature 28, 30, 31, 32, 33, 40, 43, 47, 49, 50, 51, 59, 66, 68, 70,72, 75, 77, 78, 81, 82, 90, 91, 92, 97, 99, 100, 101, 102,125, 126, 128, 132, 135, 138, 172, 230, 266, 420, 513: n = A,T,C or G
agtacttctagaattaattaaggcgggngnnnntggctanganaatnannngagcaggntctgaancnanantgntnncgnnttatggannnatctncnnnngaataaatactaaaatctggtgnntncatnatnaanccaattatctaaccatcctttcatccattgcttntcttgctgctccttagtcaagggtgtttctgtagacttacgtccaagtggtttctcanccaacatacctcagtcttcctgagccagttgcttanaatccattctgacttgtccgttccatgggatgcggtagttaaatacattaatattacccctgaatataacctagataatagtctggtagcatacttgcattattgtgggatgttgagtggaatgctgagctctatgcttgccaaactatatcanctacttatgctgttctcatcaaacatttgaactctggatgtcttccaagaagcttttttctactatttcattttggtaaaacaggctacttangaggtcaaaagaaacaaaactgctgatttatgggtcttccgaaagtgataaaataaggagaagctgaaaaacct

SEQ ID NO: 16512 - DNA, 425 bp, Homo sapiens
agtacttctagaattaattaagggggaaaaaatccattttaagaaaaatgtgattctacaactacatggataaatctggcattatactgagtggagtaagtcagacataaaagagtacatactgtatgatttttttttatatgaaattctgtaacaggcaaaactaatctagtgatagaaatatgagcatttgtctggggtagcaagtggggaggtagactgactgcaggagggtatggaaagccttttgggagagagggaaatgttctaaatcttgattggggcatatacatttgtcaaaaatcatcaagctgtacacttaaaatctgagcattttatatgtaaattatacctcaatttttaaaaactgtgagccataaagagccaatgtcttcaaaagtagcaaagaaatatcaaatatgtta

SEQ ID NO: 16513 - DNA, 440 bp, Homo sapiens
agtacttctagaattaattaaggcgggaatgtatgaacaaaagttacctaaacatagactttgattggcacagtaagcttttgtaatcagcattttcatcctttcctctgcctaaatgcaaactggccataaagccaataatctcctaaatatcccttgaatataatccccagagaaatgaaggactggtaagtaaatccctattacataaagctgtttgctactattccaagaatttaagatttgacaagctatggatattgttcatacatacatctagtaggatcttaattttccttctaaatctgaaaaaaaaaaaaatcaagtcaaactggacttttctccaacagtttactgactactaaaatacagtaggtactaacaatctaagaacacagatttttttaaagcttacagatgaatacttttatttataagag

SEQ ID NO: 16514 - DNA, 584 bp, Homo sapiens
  misc_feature 41, 50, 55, 80, 87, 91, 115, 117, 363, 370, 380, 442, 462,531, 549, 566: n = A,T,C or G
ctcgagagtacttctagaattaattaaggcgggggagcacncgtgcatancaatnctgaaatgctgcaatatacgtgaantaagccnccancctttgacccccgagcttccattnanactgtcatgttgggcccaactgaagtgagggagaggaggagacagcatactcaaatgctctgctctttttcaaggcagtgattagacaattgcttatcattgcattcgccaaacctggctcttgcaggttccacaaggggccacgtatttgagactgattaaaagaaggtgatgtgatttcctactcctaccggaattggtgggttcttcgtctcactgacttcaagaatgaatccacggaccctngcgcctntgccatccangaaggcatgccagaaaaacagttggaaaagatgcttatcaaacctatcagaatcttatgacntcttaactatccccttgctntggtctgaatgtttgtgtccctgcaaaattcatatgtttgaaacccaaccccatggtgatggccctaanaggtgaagcctttgggangtgatgaagtcatgaanactctgctgtatgaatgg

SEQ ID NO: 16515 - DNA, 550 bp, Homo sapiens
  misc_feature 84, 470, 482, 514, 534: n = A,T,C or G
ctcgagagtacttctagaattaattaaggcggggtaagtctggattcataagtagaaagttacctacatggtgtgacttcatanaacttgtgttgacaatctcttcagcaccagcccttgtgggcaccttacagcactatatcatctaaccctcctcacattgctatgaggtggggaacactgccccattttacagagaaaatgttcaaaaaggtaaatggcgtctgtccaagatctgtctcctgccagaactcctgttctttctaaaatagctcagtgcctaagtgaaaccaaaatatctctcctccttggcctgaaatgccaagacaggagactcagttggtttttttggggcggagtgggtggttataggcatcctctggtaaacactgctgggctcacactttaagacaggttgaggctcacagggaggactgctctcaaggaacacaccgacactgaggcaaganacaagctgtctnctggaacatgggaaagtggagacaaaggtctnccggaggagtgaggaagcanctgggatgcccaaagg

SEQ ID NO: 16516 - DNA, 290 bp, Homo sapiens
agtacttctagaattaattaaggcggggagggggaggggggtcccacagtgagagaacataaagttaagatccaggccctgagtcaaactgaccctgctgaaggggtttgtaaaagacttttcccagtggtaaaaatacatggtttttttggcctgtagcatatacatgtttttatatccacaggctcttagtgttaaacaaacacttacaaaatctgtaagcaaactaacatatcctaatcacgttccaaaaagtaacaagtactcgaaaaggctcaaaatgaggtaaa

SEQ ID NO: 16517 - DNA, 286 bp, Homo sapiens
  misc_feature 282: n = A,T,C or G
ctcgagagtacttctagaattaattaaggcgggagcaggcatctcacttgagcagaacaggtgcaagagtggggtgtgttaaatttgagatgttaattcatctccaagtgaagatgttgaatagatacatggatatatacatttgtagtttaggaagatgtcttcccagggatgttaattggagtgagtaatgcatggattatatttaaaatcatggaattagattgggactactgtggggatgagtaaagttacaaaataggtcaaaagattgaggcctanatga

SEQ ID NO: 16518 - DNA, 354 bp, Homo sapiens
agtacttctagaattaattaaggcgggagatggttccattattttggatgaagaaaggtatttagaaaagagaaaaagtgagattgtggttacatgagaacaaacatgctttgtctagtgaaagaggtcctctttctgtattggcctttgtcacttagaccttgacgttcttatttgcataatgaatattgtaaatagaaaagtgggttagattaatttgtaaattttagtaatttttataactattttgtatgagaagatgccctatcatctattaacctaacaccattgttttattatctttactggtcattgagtcaggctgttgaactaatcatatgctgcttccactga

SEQ ID NO: 16519 - DNA, 412 bp, Homo sapiens
agtacttctagaattaattaaggcggggtaaatgaaaaagatcacaaacagcccctaccccactagactgtaaactctacagcagcagggcccttgactctgttcaccattaaatccccaagaatcatacagaggtaaaaatatatctgtaattttaaaacagaaagccacgtgaagagaaagttcatttatttataagaaattggcctggtgcggtggctcacacctgtaatcccagcactttgggaggccgaggcgggcggatcacgaggtcaggagatcaagaccatcctggctaacacggtgaaaccccatctctactaaaaatacaaaaaaattagctgggcatggtggcaggtgcctgtagtcccagctacttgggaggctgaggcaggagaatggtgtgaacccg

SEQ ID NO: 16520 - DNA, 594 bp, Homo sapiens
  misc_feature 1, 56, 71, 72, 279, 360, 432, 462, 490, 520, 525, 561, 567,575: n = A,T,C or G
ntagtacttctagaattaattaaggcgggaatgaggtaacatgactgttgatggtnctcatctaaatgttnnaatatattttgaagttttaaaacttaagccatttgcagttttagtttaaaattcttggtttcttcatagcagcaagttaagaattgtggatgcttcgatattcaactatttacactgtttagagaagaagctgtgctaggagaaaggggagaaaggaagaccactggaggcagccactcctctgttctgggtatttcacctctgctntgaaacttgcaggctgcattgagcaaaagaaaaacaatgtgctttgtgacagcatgcgtgaatgtagaggactttatgctnagtgaaataagccaggcagaagaagacaaatactgcattatctcacttgtatgtgaaatctaaagagttcantttcataccaagcacagtagtagaatggtnggctataatggggaagagggagctgttntcaaagggtaccaaagtttcaggtaaaaanggaanaaacttctagtggatctattggcacagccattcatnactacnggttaaanaacattataattttcaaaa

SEQ ID NO: 16521 - DNA, 363 bp, Homo sapiens
  misc_feature 52, 71, 75, 85, 117, 122, 177, 178, 186, 194, 199, 240, 248,252, 260, 265, 268, 286, 288, 294, 298, 300, 316, 327, 328,331, 354: n = A,T,C or G
agtacttctagaattaattaaggcggggggagaggggaagggggccaatttnatcatgctcagatgggcanttcntggttagcantggtggagataggctcactttgaactcctatnagctntttgacatctgataacttgactcaaccgctatgaccaaaagcacccctcccccannggagttgnttttcatngacantgcccgaacctggaaggaagggcccctgagtgcccccaaangtcacccnctcnatgttccnggccnctnacttttaacttggacatntngattcnctgnancccagagccttttaantaaactgctgnntgnagtctgtgggtttctttagaacngactctcta

SEQ ID NO: 16522 - DNA, 476 bp, Homo sapiens
agtacttctagaattaattaaggcagggaacagtgctttcatttattttcacgataatcttacgtgtcaatagtccatagttagcaggtaaataatatataccaagataaaagataaaaacacttaaacatgaaaattttaaagttatgtcaaattatttccaaaattccaattaacccataaaaggcaaagggaaagaggttggcagaaggcaggtttcttgcatccccatctatggagttactctgggcactaggcatacttgatcagcagacatcccactgtgtaaatgtagaaaccagaaggagaagtagtggtagtggtagtctacttctaccatattgtgtaaaagtagaaaaccagagcatgacttcctgtcctttgcactactgaattccaggcgtgctgaaaaggtggatgtaagtcaacttccaaagtagaaaccaaagaagtactgttgaaagaaatgctgattt

SEQ ID NO: 16523 - DNA, 450 bp, Homo sapiens
agtacttctagaattaattaaggcgggggggctgggaaagccggagagtggggggcaggggctggtcaggtcggtatcccagtggaaatggcttaggagcggccacgcattgcttcttacacgaaattaagtaactcgctctgggtcattcttgcagcttgcatacttggcagagctgcagccagatcccgtgcttctaactcctaggttgcttgtgttgcataattgagcctacgccttaattattgtgcctccaaggagtgtattttggaaagacccctacgtccctttcagaaacattttcgagcacttaaataccaagagatttatattccctctagtcctcacgtaacaaacacctctgcgaggtgttatccccatcttaccaaaaactgaggtttgaggttggttgtgcttggtcacaccaacgatggcgagctggggattccc

SEQ ID NO: 16524 - DNA, 282 bp, Homo sapiens
agtacttctagaattaattaaggctggtctcgaactcttgaccttgtgatctgcccacctcggtctcccaaggtattgcatttgtatgcaatgaccaatgacttatcgttattacgctcctcttttgtattattatctgcgtaacgggtgctacacactttttccaagttgttaatattccagtttgtgaagtcactttatatatatctaaaattttcataccacccattattgcttttttcactgctagttcaaccttgtagctcatactgaaaaaaaaaa

SEQ ID NO: 16525 - DNA, 418 bp, Homo sapiens
  misc_feature 24: n = A,T,C or G
agtacttctagaattaattaactnctacaatagcttcaaggcaggtctattcttgtgaaaagtaagatggccacttgagattttaatgtttttgataaatatgtttgttcttcataactactttctttcttttttttttttcctttcctttattaggaaactctgagatttccctcatgctagctaatggtgacacaggagtgtgaaaggcacagatgccttcaatcagggtttagtattacacatggtacaaaataagcacacaataagcatctgaaagaatgaacaaaccaccttcagcctgaaggaaaacgctttttacctagggtcctgcatattttaaaagccctgaaggaagaggtcttctacagactcttcacttgagagagttcaagagctactgccatatgggaactaa

SEQ ID NO: 16526 - DNA, 409 bp, Homo sapiens
agtacttctagaattaattaaggcggggggataaagagaggttggtcaaagggtacaaacatacagttagaaaatctaagttgtagtattggatatagggtagattaagtgtagttagaaacaaagtcttttatattttaaagtagctagaagagaggacttgaaatgtcctcaacacacagaaatgttgagtactcaaggtgataccccaaataccctgatgtgatcattacacatgtatgcaacaaaatatcacatgtaccccacaaatacgtgtaatgttatgtatccataaaaagatacattgataatgtaatcatatcccactgtataattatttttggaagatatgtatcttcatatatatatatagtcattttaaaccatgacttgagtactaaaccagtag

SEQ ID NO: 16527 - DNA, 405 bp, Homo sapiens
  misc_feature 37, 39, 42, 43, 45, 47, 48, 60, 63, 67, 72, 73, 75, 78, 98,110, 111, 116, 120, 123, 125, 129, 133, 134, 143, 145, 147,148, 152, 160, 164, 168, 176, 178, 180, 183, 184, 188, 190,198, 203, 206, 208, 209, 210, 211, 235, 247, 252, 254: n = A,T,C or G
  misc_feature 284, 285: n = A,T,C or G
agtacttctagaattaattaaggcggggctagctgancnagnngnanncatccataagtngtnttcnttgtnngnganataaattaagtctgccactnaactaacattgnngattngatnctnanaaantgcnncacgttcantntnnaagntattttgnatancttnccattttngnanaanncatnanaacttagnatagnatnannnngtgcaatgtctccaactttagganaaaagtaggggnggctncnaacttgtgtttattcggaaatttacaatgnnttaattccaaatggcctcaaacattaagctttatgtgagaacaaaaagttgctataattggcttccatgaataagaatgtacacttttaaatttatccttttactaactgtactccagtc

SEQ ID NO: 16528 - DNA, 291 bp, Homo sapiens
  misc_feature 278: n = A,T,C or G
agtacttctagaattaattaaggggggagaagtaactttcttattactcaaccgtcttaaatagagttctttaagtgtatttttaagaggtctcaaaacttaatctgaagggacgtcaaatgctggacaaattctgtgtatacaactcaagtcagcccccaattttactggtctttaaatcatgtcctttttaccagaagtttgcatttctaagctaaactattactgttagactagatccaaaacttaaaaacagtttaggaaaaaaaaaaaaaaanaaaaaaaaaaaag

SEQ ID NO: 16529 - DNA, 566 bp, Homo sapiens
  misc_feature 29, 30, 36, 38, 39, 46, 52, 54, 57, 59, 65, 72, 81, 90, 91,101, 115, 116, 141, 149, 155, 168, 170, 172, 173, 179, 180,192, 220, 226, 231, 234, 240, 243, 258, 271, 275, 286, 352,362, 376, 396: n = A,T,C or G
agtacttctagaattaattaaggcggggnnagatcncnngaccatnggaccnangcngnatagcnttacganatttacctnatgctaaannagcagttaangggtgcagcacacnnccatggcacatgtatacatatgtanctaacctnctcatngcgcacatgtacncnannacttanngtataataattntttaaatacttataatagatacttggantgtganccaanaantctgtntgnccttaatgccactgnggcctattactgnaaantatccatacanaaagttaacaaggatacccaaaaattggggctccctctgggggggagcccacctaatccatatctncagaactttncaccccccatcatngggaatatttttttcttttnagcaccacaccacacctattccaaaattgaccacatagttggaagtaaagcactcctcagcaaatgtaaaagaacagaaattataacaaactgtctctcagaccacagggcaatcaaaccagaactcaggattaagaaactcacttcaaaaccactcaactacatggaaa

SEQ ID NO: 16530 - DNA, 427 bp, Homo sapiens
agtacttctagaattaattaaggcgggggagagagagagagaaagaaaaagagagggagtgagaaagaaatcacaaggggagaagcaactgcaaagcagtctgaaacctccatgctgacttgtcagcacactctttctcctgtgggaaagtcagaatctagttagaaggttggtttttgtggaatcaaagcaaggtgagcaaaatgagtgattttaatcaccaggaaaacctaagatatttgtaccctctgagggatacaagagtctagagtggcagcactgctagtataattgccccttcctgtgcttgtggtagaaatgtctgatcaatcactgcatcttttccttcctactgctccctgggccagccctaagattcttagcaagagagtattctggccctgtgcggtggctcatgcctgtaatc

SEQ ID NO: 16531 - DNA, 451 bp, Homo sapiens
agtacttctagaattaattaaggcggggtaaggacattttttaaagcatgaagttaaataccagaagaaatcaaatttagaggaggcttggtgataaagggtaagagtggttcagaaacctgctgttttctgctttaagcctaatattgtattggtcaacttttaaatgtatgtatatgtactactttgacaagaaaatgaaaatttaaacatccagttagagggcaggattaatcaaattcagtcctagtgagttaggcattccagcacactgaaaacccaactttgcttttccctccttgaggacacggccttgccaatactgtattttgttcaacaactgggagagctctatgtttttaaacattcccttacatggaaatgttagtgtaagttttctgcaataatgatgtaaatcctgttgataaaaagaataaagaggtcataagaa

SEQ ID NO: 16532 - DNA, 310 bp, Homo sapiens
agtacttctagaattaaagcatgtacggtatcaacgcagagttattaaggcgggagctgacatactccatggatagtcaattcctagagttaataaagaatacagtagatatctttgcattaaaagtgccaataaggatgtttacctttatatgtgttaggagatcttctgctatcagtgtcaccctgaatcaagggaggaactaggaagtaagagtttatggtcatcagatactgtggcctaatgtccttcagagaatacctttgtgtgaactctctaaaagtttattcccaaaaaaaaaaaaaaaaaa

SEQ ID NO: 16533 - DNA, 286 bp, Homo sapiens
  misc_feature 32, 245: n = A,T,C or G
gggctccctcctgaccttgatccttgggctgnggggcttttccttacctctgttacaagacagagctgcctaccttcccagatcagcatgccaattatcttaataatgtttcctcccaaaggcaattagaagagactccctttcaaaaatctgatggctgttgaaagttaatgaacactttaccaggagatcttacttctggttcctttgctgctcccctaagccgtttcctctggtgggtgacngccagagatatcggtttgtgggttgatgaaactccctcccc

SEQ ID NO: 16534 - DNA, 308 bp, Homo sapiens
  misc_feature 1, 3, 45: n = A,T,C or G
nanagtacttctagaattaattaaggcgggagggtggaagaggangaggaggctataatataggccaatggcaaaggagagaaagtgtgcagatcctctgcaggtccactagtctacctcacttgctctcagtgggcaatgaagagaaactgcacccagagagagggggaaatggtggtgcttttcactcacatctaatgaggactactgccagttctagcctgaaccaaagtagcaacattattcccttgggaatgcaccatggtgtctgtctggcacaagagggttcaaaatgttggtcttatttt

SEQ ID NO: 16535 - DNA, 413 bp, Homo sapiens
  misc_feature 254: n = A,T,C or G
agtacttctagaattaattaaggcgggcggatcacgaggtcaggagatcgagaccatcctagctaacactgtgaaaccccatctctactaaaaatacaaaaaattagctgggtgaggtgtcgggcgcctgtggtcccagctactcgggaggctgaggcaggagaatggcgtgaacccaggaggcggagcttgcagtgaggcgagattgcgccactacactccagcctgggcgacagagcaagactccgtctcanaaaaaaaaaaaaaaaaaaaaaaaaaaattccacaaaacagtgactggcgctaatatacatgagctttatttagcagcctcgtgaaggtcaacatacaaaaaccacaggcacttccatgtgctaacaactggaaatggaaaaaaagtgccatttacaata

SEQ ID NO: 16536 - DNA, 440 bp, Homo sapiens
  misc_feature 152, 163: n = A,T,C or G
agtacttctagaattaattaaggcgggaggatcgcttgagcttgcgagattgagccctgattatgccactgcattccagcctgggtgaaagagtgagaccctgtctcaaaaaaaaaaaaaaaggaaaaaaatgaaaaaaaaaggaaaaaaangaaaaaaaaangaaaaagaaatagataacttccaaagctatgtatctatttttaaaaaattaatagttaaaaatattctcacaaagaaacactagtggattcttccagacacttagggataacactgtgtataccaattatatacaaatcttccagaaaactgaagaggaaggaataccgtctcagtttattttttgggggccagcattaccctgatacctaaaccacacaaagccattacaaggaaaagaaaactatagcccagtttccctcttgaacatggatgta

SEQ ID NO: 16537 - DNA, 424 bp, Homo sapiens
  misc_feature 50, 228, 297, 369, 377, 385, 387, 388, 397, 403, 406, 409: n = A,T,C or G
agtacttctagaattaattaaggcgggaaggaagatctgatacagagcanggataatccattcacaggaacgagaagaaagcacagtagatggtaacagaagcaagatgcttggtagatttggtggaaggggaaaggttaaagttctcttttatttcttttttcttcccaacaaaattagaggcacatttattttttgaatgggaggaggtagcgggggtcgtttcangtttgaggaaagtgggagaagacatggaacattccactccactaaaagactaggagctcaaatggacangggagaatttctatcctctcattggtctgtgaatttttcagtattatattcattagatataaaggttcatanatggtttntggcatantnnattaatgtntattgngtnaantactgagacattcac

SEQ ID NO: 16538 - DNA, 556 bp, Homo sapiens
  misc_feature 29, 37, 46, 58, 62, 63, 65, 72, 73, 135, 147, 161, 221, 274,306, 343, 536, 540: n = A,T,C or G
ttgggcccccccttttagagtacttttanaatcaatnaaggcgggngggagaggagcnctgnncnggatganntcccaccataaccagggacatgaaggacaaaaggacttggctgctcagcacaaaagcaaaantccctagaatgnacttccaccaggtngagtccttccctacttcctccttcaaggggcagagtcccagtggttagccagaggaaagnccactggtcaggatgtctgtcccactctcccagtccaagctgagcccacctgnatgtcctggagtcaccatattttctgcccagnctgacaaaatcagtgaccttaacagtgtgtaaaatgngcctaagttgctgcccttcctttataaatctgctagcagtctgaaaggttggcccgagtggaacatgcaaagcagtagccctctgaggagcagaagttaaaggctagtaccagaaaaagacttttcctcccaaaaacacccttcagtggtttgggagaggctaattatggtcaataaggaaaagaacaatgcnactngtgaaaaaaaggggaa

SEQ ID NO: 16539 - DNA, 454 bp, Homo sapiens
  misc_feature 4, 14, 15, 18, 151: n = A,T,C or G
agtncttctagaannaantaaggtgggttgataagtatactcgtatatttatagaacattccaaaagaatccataagaaactgttagcatcagttaccccaaagtatcctaaaacctattgcctatttctatatcctttgcaccagtcccncactattagatttccctcaacagtagtaaataatggtagttactatttttagtgtactcaacaaactttcccacctcacctccaccttgcccatttatttattcatttactccttataagtttaataagatcagacacagtcactgggtttagcaatgtggaaatcacgtagtgcccttaaaaacagcagtttcaggccaggcatgatggctcacgcctgtaatcccagcactttggaaggccgtggcgggtggatcacatgaggtcgggagtttgagaccagcctggccagcatggtgaacc

SEQ ID NO: 16540 - DNA, 369 bp, Homo sapiens
  misc_feature 352, 353, 354: n = A,T,C or G
cgggccccccctcgagagtacttctagaattaattaaggcggggtatctgtgtgtggaaggaacaaaatcaatcactaggcgccagaagcgggactatgatagtcccccaccttctaagatggtgaccagtggtccttgtctcctggcattaacccactgatgcagtcccttcccatgatgaccagagctgatctgtaacaccaacggggtattatagaaatcaaagagtgtagccgggcgtggtggttcaccctgtaatcccagcattttgggagggcaaggcaggcggatcacttgagatcaggagttcaagaccagcctggccaaaatggtgaaaccccatctcttctnnnaaaaaaaaaaaaaaa

SEQ ID NO: 16541 - DNA, 191 bp, Homo sapiens
agtacttctagaattaattaagggggagttggagtcggagtcatggtggtggtgcctgggcctctcaggagatgtgggagaggaggtggcctcagctggccgcctgtgctctttgtctttcttcttcttctctttcttgtgtttcctctttttctttttcttcttctccttcttgcttttcctgtggctct

SEQ ID NO: 16542 - DNA, 435 bp, Homo sapiens
  misc_feature 367, 372: n = A,T,C or G
agtacttctagaattaattaaggcgggcaggtacaatttacatttgacacacagggtaactgagttccaggcctatgcatggaggagacaggattttaaaattccaaatctcatgggttttctcaccacatcatgtgaggtgtcctatagaacaatccttaagtgaatgcgtttcgtgtccgttttcaaagatcatggtcagtgtataaaaatagacagttaaatgtccatggaacgtgtactgtccctctccttcccctgaatcatggccacaaagaaatccttcaaaagatcaaagaaaatggagatattgaacaggtcacactctgtgatcatgatgcaatgggtatagaaataataacaaganggcantttaaaaaattttacccacttgcaaattatgaaacacactcactgataaccctggaatcaaaa

SEQ ID NO: 16543 - DNA, 139 bp, Homo sapiens
agtacttctagaattaattaaggcgggtactttacaaagagatatgagcattcattggcctacgtactctctgattattagaaatccccgataagctaaattaaagtttccaaggctaatattctgtggtgtgtgagtg

SEQ ID NO: 16544 - DNA, 297 bp, Homo sapiens
  misc_feature 34, 38, 39, 43, 66, 67, 68, 76, 82, 89, 99, 109, 114, 120,122, 124, 140, 143, 153, 199, 242, 261: n = A,T,C or G
agtacttctagaattaattaaggcgggaccattngacnntctnaatcctggtacataggggtcagnnntgagaggnctctgncctctgnggtcagcctncctgaaccanttttnccaaanananatggtcccgcctgcancanccacacattnagcctacggagtctgccccatgacgtacgccacccaatggctctgncagtcagcctgcggttaggcaggggcagggatggatgactcangaggccttcactccaggancctgccattcatttctaactgacaaaagtaacaatg

SEQ ID NO: 16545 - DNA, 349 bp, Homo sapiens
agtacttctagaattaattaaggcgggtaagttgagtctaaaacttgctgaagtgtctgtagtttaatgttttaaagccctagaatagtgttaggttcatgaaaagtgttcaatgaatattacctaatattactattttttaatagtttaaaagatgtcttgtaaacataaggttcttttaaggtataagttttttgttaagagaaataacgtttaagaaaatctgtcagtagaaaaaagtctgtttaacaattagcaaacttgccaacaagcttcaaagctcaaattaataattaacatgcctattgtgtagaaatccaaaaagctgggtaaaaaaaaaaaaaaaaaa

SEQ ID NO: 16546 - DNA, 365 bp, Homo sapiens
  misc_feature 273: n = A,T,C or G
caactaaatttagagaactaaaacctctccactcccagacactacttctattctaatgggatggccttaaagattcctgaaaactcctaccacaggacatgaataaattcctgaccaggctaaaaagctttctctcctatctactctctgtaaacttttgccttctaggagacaagaggaaagggtaggggagagggaggggcctgaatgatgtaccctctaccagatcctgcaaagctggctacacaaagggctagctgagcctccagcaangatctattgctgagagaccttgggttgaacagtttctctaggccccttccctagctcccgtgagctctgctcagaggcctgagtcaattcta

SEQ ID NO: 16547 - DNA, 437 bp, Homo sapiens
  misc_feature 12, 393, 398: n = A,T,C or G
agtacttctagntttaattaaggcgggcggatcacttcaggtcaggagtttccgaccagcctggccaacatggtgaaacaaaaattagccaggcttggtggcgtgtgcctgtaatcccagctactccagaggctaaggaggagaatcacttgaacccaggaggcggaggttgcagtgagccaagattgcgccactgcactccagcctgggcgacaaagcgagactttgcttaaaaaaaaaaaaaagatataggcatctttagggaatcattattctgcctaccatagagtctagggaaaatttgtgctttaagggaaaattgcattgtctagagcagtagttggcaaactgcttcctatggggtaaatccagcagccacaaatcaaggcttgncgaangccaccagaagctgtaagaggcaaagaacagattcaccc

SEQ ID NO: 16548 - DNA, 401 bp, Homo sapiens
agtacttctagaattaattaaggcggggtaaatatgctagctacacagaatagagatacatctcctagccgtccttgcagttagttatggctaatcagacattatcagaaatactgtatggtgtggtagcttccagttattccttgacacaactaacagacagcctttgtcctattttcttcttcacctcttagtctactctgctacttagaacacaaaacacatggctccttttttatggaatgtgatttacaatattaataactattatcagtttataaatatattgtatttaggtgaaggaatgcttacttgagataaaacctccatacgtaatgactcaatctttgtgtaacgtaaacaaaatgcaaactcagagctttctttgactggcaaaaaga

SEQ ID NO: 16549 - DNA, 415 bp, Homo sapiens
agtacttctagaattaattaaggcgggtggatcacaaggtcaggagatcaagaccatcctggctaacatggtgaaactccgtctctactaaaaatacaaaaaattagccgggcgcggtggcaggcgcctgtagtcccagctactcgggaggctgaggcaggagaatggcgtgaacccgggaggcggagcttgcagtgagcccagacaacgccactgcactccagcctgggtgacagcgagactccgtctcaaaaaaaacaaaaagaagcccaccaagaactcaaattcaaaagaaaacaaacatagaatactaaagcattaaaatcctaacagaaaaatgtgcaaggtaacaggaaattcacagaaggatacaaatgactaaaaatacataatcaaagaaatacaaattaaaaca

SEQ ID NO: 16550 - DNA, 565 bp, Homo sapiens
  misc_feature 28, 30, 33, 44, 47, 51, 55, 61, 69, 71, 72, 74, 75, 91, 94,96, 99, 100, 102, 124, 125, 128, 132, 144, 145, 149, 155,157, 161, 162, 163, 167, 171, 172, 173, 174, 175, 176, 177,181, 183, 187, 191, 195, 204, 205, 207, 216, 252, 258: n = A,T,C or G
  misc_feature 262, 291, 312, 330, 344, 405, 407, 484, 485, 503, 511, 514,515, 561: n = A,T,C or G
agtacttctagaattaattaaggcgggncnttnttctctaaacnatncagnatgncaactnttgaaaangnnannaacccagaaggcgganctngnaannancaaaaatcgcgccactgaaccnnaanctgnacaacaaatgcnngacnccctcncngggnnnaaantttnnnnnnnggantnggangctnctanccccccccnntnggggaaaanttttcaacttttttttaatagtcaaagcatactacnttccanattnttgccctgttcacctttaggaaaaggctncaatggaaaatggatttaatnttaggcaatttatcagtnttttttcagttacntcacacattagttaatttatcactttctctcccattttcatactaaaatcaaactaggatntncagaccagccgtttaaaacatattgaactggccgggtgcggtggctcatgcctgtaatcctacactttgggaggccnngggcgggaggatcaggangtcagganatnntaacccccttggctacaaggtgaaagccccctttcttcttaaaatnccaa

SEQ ID NO: 16551 - DNA, 524 bp, Homo sapiens
  misc_feature 35, 56, 222, 226, 229, 230, 231, 232, 233, 234, 235, 236,237, 238, 239, 240, 241, 242, 243, 244, 245, 246, 247, 248,249, 250, 251, 252, 253, 254, 255, 256, 257, 258, 259, 260,261, 262, 263, 264, 265, 266, 267, 268, 269, 270, 271: n = A,T,C or G
  misc_feature 272, 273, 274, 275, 276, 277, 278, 279, 280, 281, 282, 283,284, 285, 286, 287, 288, 289, 290, 291, 292, 293, 294, 295,296, 297, 298, 299, 300, 301, 302, 303, 304, 305, 306, 307,308, 309, 310, 311, 312, 313, 314, 315, 316, 317, 318: n = A,T,C or G
  misc_feature 319, 320, 321, 322, 323, 324, 325, 326, 327, 328, 329, 330,331, 332, 333, 334, 335, 336, 337, 338, 339, 340, 341, 342,343, 344, 345, 346, 347, 349, 351, 356, 358, 359, 380, 390,397, 424, 431, 443, 479, 481, 482, 483, 488, 489, 498: n = A,T,C or G
  misc_feature 518: n = A,T,C or G
agtacttttagaattaattaaggcgggagattctnatcagatgtgggaaggaagtntatagaagaaagaaaaactgtcactggatggcaaaatcataccctaagctaatttatgtgtcttaaaccataaaataacttaatacatgtaaattatttattatattttacagctcctataaaataaaagtttaaattaggacattgcaaaaaaaaaaaaaaatantaanaannnnnnnnnnnnnnnnnnnnnnnnnnnnnnnnnnnnnnnnnnnnnnnnnnnnnnnnnnnnnnnnnnnnnnnnnnnnnnnnnnnnnnnnnnnnnnnnnnnnnnnnnnnnnnnnnnnnnnntngncttgnannacattcccctttcgccagctngggtaattanccgaaanagggcccgcacccgatcgcccttttcnaaacaantttgccgccaancctttaaattgggggaaatggaaaaattggttaagncnnnttaanntttttttgnttaaaaatttccccgttttnaaattt

SEQ ID NO: 16552 - DNA, 430 bp, Homo sapiens
  misc_feature 29, 34, 42, 43, 44, 55, 59, 63, 65, 72, 73, 74, 75, 76, 77,82, 83, 84, 86, 89, 90, 91, 96, 103, 108, 114, 118, 121,130, 140: n = A,T,C or G
agtacttctagaattaattaaggcgggangagangctccttnnngacgcccaacnaaantccngnggcctannnnnnggagnnntnacnnntcccntgatganatatncatatnctcnganccttgatantctgaaggangaaaagccttaaaaaagagagcaggaacactgccactggagggcaaagcctgaatggaaaatgcagtcagcttggaaaaaaagatcccgatgagcctcagagaccagaatgtgattcagggtgatgcagcatgtttgtggtttctgtagggaaatgtgttctaccttgtaactgggatagaaaagcacatttcatctctaccctgtatttcctgccaagtcagaccttggttttgattccagagtgccctgaccaggggagctgccaaagggctgcggggcctgctttta

SEQ ID NO: 16553 - DNA, 404 bp, Homo sapiens
agtacttctagaattaattaaggcgggggcggggctgcaactcctgtgcacaaaggaagggccctgggtaggggtcaggagctgccttgcccagagatgtgtctgggtcactttggaaacaggaatcctctccccaaaatgggtagcaatgggggtacagaggccaaagacgcagctgcatgtgctgcagtgcctgggacgccccgtagtgaagagtgatgtggcccaaatgtcagcagtgccagtgtcagactcctgctaagagacagtatcaagaaagataacttcaaaatacactttctggaggcctggcgtggtggctcaggcctgtaatcccagcactctgggaggccaatgcatgtggatcacctgaggtcaggagttcgagaccagcctggccaact

SEQ ID NO: 16554 - DNA, 245 bp, Homo sapiens
agtacttctagaattaattaaggcggggttcttagatcaaatatgaaattgtgaaagtttgctatgtatagtttaatgacaagtatataataacaaatatctaaatctttcatcaacagatgtctgaatctgtggcctgttataaagtaaggtttagacgaaaactttcagtttttaatacaacagcactaaatacttggtatagaacacatagtaaactcaagaaaaaggaaaaaaaaaaaaaa

SEQ ID NO: 16555 - DNA, 274 bp, Homo sapiens
agtacttctagaattaattaaggcgggagaatggcatgaaccccggaggcggaggttgcagtgagccgagatcgtgccactgcactcctgtctgggtaacagagcaagactccatctcaaaaaaaagttgtctgcttattaatagtcttactcatttggggaatactactttaaaagacttgtcagagaacagaatttgtttatagaaagtttattttcaaaattcagagaaaaaatattctctattctgttaaagaaaagtattctgttaaag

SEQ ID NO: 16556 - DNA, 538 bp, Homo sapiens
  misc_feature 176, 469, 507, 511, 512, 513, 518: n = A,T,C or G
agtacttctagaattaattaaggcgggacgcagctggcggggtttctgcaggcggaccccacttggcactgcatgcttggtccccaaggtccatggtagttttcctactattcgctaaaaagcagtatcaggtaacaacccatcaaactgtaatcccagcactttgggaggctcangcaggaggattgcgttagcccagaattcaagacctgcctgggtaacatagggagacctcatctctacaaaaaaataaaaattagctgggtgtggtggcacatgcctgtagttccagctatttgggaggctgaggtgggaggattgcttgagcccaggaggtggaggttgcagtgagccaagatcacaccacttggactccagcctgggtgacacagtgagactctgtcttaaaaaaaaaaaaaattatttcccacccttgatttctaatgggtggggctaagcatgttctatnccattagggcaaacgtgggtccctaaacccctaaaaancctnnnttaanggaaaccaccaaagagggaa

SEQ ID NO: 16557 - DNA, 286 bp, Homo sapiens
  misc_feature 270: n = A,T,C or G
agtacttctagaattaattaagggggtggggtgggcaacataaatagctaagttcatcgctgtgtgaagcctctcgtgaccaagatgactcttccacagaatgtatttgtagtaaatcagtttgcgttagaaagagtcaaacaacagacccaaatgttacttaggggagagaagggattcctaagataatcattttaaaaatcactatacaatccctacttatagttcctgctgatacagtctaactgaggctcaagcacaagtccaaanaaaaaaaaaaaaaaaa

SEQ ID NO: 16558 - DNA, 438 bp, Homo sapiens
  misc_feature 328, 395: n = A,T,C or G
agtacttctagaattaattaaggggggaaattcccaaaatataaatgagtatctggtggctccatggatcaaaaacacatatgcaaggcgtatgtgattaatttgcctttgaacattttcaagtctgaggggcctatgatacagctacggagagatattaagctggcaggtagatggcattgaaaatctggataatctccactggagacatggatttgggaaagagtataaagaatgcacgcccatctcaaatgacttttcagcaggtgagaaaatccctcatgcagcagaatgtctcacctagtgtcgctgctgcaagccaatccanctgtgtagggggtccctccctggggggagcagcccttgatgatgtatggattggggacaaaccccanccggggagctaaacctgctgaaaacatacctgtcagtaaaaac

SEQ ID NO: 16559 - DNA, 417 bp, Homo sapiens
  misc_feature 52, 63, 72, 80, 91, 94, 118, 132, 269, 278, 354: n = A,T,C or G
ctcgagagtacttctagaattaattaaggcgggtggacagtttaaaagatcnacgaagcatgntgttttttnattgtgtngtcgacttaanacntaacgatttttgcaactcaacccntataacaccatcanaattggttgcatctattttaatacaggttcattaaggaaaaaaaaatcatccttcacagtttatttcagaactaaacccataatctgtgggtgaaaatcacctgtgtgctactctttaggattttattggtctctanttggaggcntatgagaggtaaatcaataaaaccaaactttttcatttaacttgaggtcattcttaggttacttcaatcttgcttnaaaaggtaatttaaggaaaaatttattttgtaatcaggcaacttgatttacaatttttttcta

SEQ ID NO: 16560 - DNA, 501 bp, Homo sapiens
agtacttctagaattaattaaggcgggtacttttcataagggataaatgtttatcctcacctccagctttaattagttatagtcccggcctcctccatctagtccagggaagactggtggcttttctgatgggcttgtttggaagaacaaaggggctcggccccttctgctctgccagaagctgcttgcttgcagaaggctcttgtaagtttaacagacaggactctgcctgcctctgcagagaaagacctgtggttgtcccacacttatagagatttgcagggtaagttcatctatctgtatgcctaaatctggatcaatattaaaaacccatgactgctgcataccaaagccacatccttcaacctaatctttactaatattaaaggtaaaatatataaaaagatggaatttttatatccatctgtctttcaattggttccactcttgggccagaaataaaagttacttattgtctcccttcatcctaacacttgcttt

SEQ ID NO: 16561 - DNA, 413 bp, Homo sapiens
  misc_feature 402: n = A,T,C or G
agtacttctagaattaattaaggcgggagaatcacctgaacccggaaggcagcagttgcagtgagctaagatgcgccattgcactccagcctggcccactgcactccagcttgggcaacagaaaaagaaaaagaggagtcaaggatctttttccttagatcaattaaaaggaagcaaaacaaattagtgaaacacaatatatagggtagaagaaattaagtgtccactaaatgtctgacactcttcttcgtaactgtttgtattagtccattctcacgctgccatgaagaactgcctgagcctaggaggttgaactgcagtgagctgtgattgcaccaccgcattccagcctgggcaacagagtgggacccttctcaaaaaaaaaaaaaaagggagggaggnaaaaaaaaaaa

SEQ ID NO: 16562 - DNA, 420 bp, Homo sapiens
  misc_feature 42, 43, 50, 61, 62, 79, 87, 98, 110, 132, 133, 140, 151,153, 180, 191, 208, 223, 246, 261, 267, 273, 285, 287, 293,294, 298, 305, 313, 327, 343, 345: n = A,T,C or G
agtacttctagaattaattaaggcgggcctttgctaatgtgnntaaccgnaaatgccatgnnagataatgtattttctncatctggnctgcttctctncagctaaagaantcatctcatgagggggaaaaannacaacanctcaccttccntnccaacaaataaactatccagacacatncccttcatgangttgaatcccaatttangaaacctcagacagntcaaagcactgtcttatccacanggctgaaaatacaanactttngtcctncaaaattaaaantntaaatnntatnactaagnttggtatnctgtcccacaaaangccaccttattccatntncataccactaaagaactattgaaaataatgacatattaaaaaagatcactcctctgttttccttatggcattttt

SEQ ID NO: 16563 - DNA, 202 bp, Homo sapiens
agtacttctagaattaattaaggcggggggtggggtgcggggagggatttagctttaaatcgtgttacttgctgcctagaaacctagatctctcagagcaatgttgagaagtgtaaaattaaagtgaattaaagttggaagtgtaaaaataaagtgtaaaattaaaaggagagaaaaaaaaaaaaaaaaaaaaaaaaaaaaa

SEQ ID NO: 16564 - DNA, 398 bp, Homo sapiens
  misc_feature 41, 70, 120, 123, 134, 149, 150, 152, 158, 190, 242, 329,387: n = A,T,C or G
agtacttctagaattaattaaggcggggaacatttctatcnggacagtcgtaaggaaggcgccggcccanaatccacaaatgctacgtgtcccttctgtctccctatcccgcatcagctntgncgtctcacctntcacacatccctacnnanctggcnccgacaccactcatgtccccaagaatcccctntaagccagccatgacaaacgctcagctccatcactaccccacagaggatctnggattaagagcacaggacccggccgggcatggtggctcacgcgtgtaatcccagcactttgggaggctgaggcgggtggatcacgangacaggagatcaagaacaccctggctaacacagtgaaaccccacttctaccaaaaaantaaaaaaaaaa

SEQ ID NO: 16565 - DNA, 399 bp, Homo sapiens
  misc_feature 244, 257, 261, 268, 270, 282, 286, 319, 337, 347: n = A,T,C or G
agtacttctagaattaattaattaaggcgggtctaggcagccgtccttgctgagaatctggacagggaccaccggggctgagcgtgtggcactgcctccagactcattctggcctggacctcctttctggggagcctgctgctgtctggcaggcttccagaatggaccgtagcccactcgctagatgagagtggcaaacgcatccagaagcaaagacgaggaaaaaaaaaaacaatcaaaattnggcctcatctaangttnatggttntnaaaataaatgtnttgnttgacagaggaagtaacccatacacaaagtctntactaccccaaatcaagngagtcacatntgttggcagcgagcacaataaataacaaaactcacctgggctccccatcgtt

SEQ ID NO: 16566 - DNA, 393 bp, Homo sapiens
agtacttctagaattaattaaggcggggggaacattcttaaatttgaaactaggaattatgatatttgcagtttcatattgtatacagtaaacagtcttcaaattctagttctccttgagatcttatacaatgataacagttttaaaattatgccttctgttttttgaacagctttttactattgacagcttttaaggaagtagttttcatgttgtcgtgtttactctcttactagacaggaagacagaacagaaatccatcctcaacttctggggataatctgaggattataatgaaatatcagatgcttaaatgatttcaacagacttttagatgaagttgccattagcaccttgttatcatcaatgtaacacataggcaagtggattaaa

SEQ ID NO: 16567 - DNA, 313 bp, Homo sapiens
  misc_feature 101, 293, 294, 295, 296, 310: n = A,T,C or G
agtacttctagaattaattaaggcgggggaatgacataagcacattgggggaatgacataagcacattggaagtagctaggatttgtctaatgtatttcanaaggcactgacaggtttgctgaaatgtaagtcaatataaggaagggatcaacaaggttagaaaggtaaattgggagaagactgtggggcacattgaatgctgggctaggagccattgaaggaaatgatgaagggagaatcatctaatagcagtgtggtcaatataatggaataaggagagatcgaagacccnnnnaaaaaaaaaaaaanaaa

SEQ ID NO: 16568 - DNA, 426 bp, Homo sapiens
  misc_feature 410, 414: n = A,T,C or G
agtacttctagaattaattaaggtaggaggatagtttgagcccagaagtttgagaccagcctgggcaatgtagcaagacctcgtctcttcaactgataaaaaatttagagaaaaaaaagaaaagaaaaatgttttacagttgagtctttgtcatacctttttacttgcagttggttgtcgtttgttttggaattggactattcaaaattttttttttccaccactgtcttatggtgctgaggactcttcatattctcttattttaacctttccagaagatatacttacatatttgctttccctgaatatattttaatccaaggcttttttgtcattaggaatattccaatttctatattacattatttaactggccagttcatacccatttctgttcagatttagtttgnttgnttattcatttat

SEQ ID NO: 16569 - DNA, 469 bp, Homo sapiens
agtacttctagaattaattaaggcgggtgatggtggcacgtgcctgtagttccagctactcaggaggctaagataagaggatcacatgagcccaggagttggaggctgcagtaaattatgatcgtgctactgtactccagcctggatgacagagcaagaccctatctctaagaaaaaaaaaaaaggaaaaaaaaactggttcaaattggatttttctattctttcataagatgataaatgaaaaaaaaaagaaaatagatttttgaaaagcaaataatctcttggaatttcttattaaagtataaaaaattattctaattgaggcatgttaatccaatattaaagtattaaaggctgagtgtggtggcacaggcttatagtcccagctactcatggagatttgagaccaggtgaactgcctgagttcaagaccagcctgagcaacatagtgagaccctgtctctaaaaa

SEQ ID NO: 16570 - DNA, 537 bp, Homo sapiens
  misc_feature 381, 492, 493, 497, 498, 499, 500, 501, 502, 503, 504, 505,506, 507, 536: n = A,T,C or G
agtacttctagaattaattaaggcgggggggcagagaggagactcctaaaacaagctttttaaagttaatcttgattttgaagattctaaaattatagtcatgaatctagtctggtcagtgataatcccactaagaaaaaaacattcttaagtttataatgggtcatcacattccacattacataaacaaagaaaagccaaattcaggcccggcacggtggctcacgcctgtaatcccagcactttgggaggccgaggcgggtggatcacctgaggtcgggagttcgaggccagcctgaccaacatggagaaacctgtctttactaaaaatacaaaattagccgggcgtggtggcacatgcctgtaatcccagctactcanaaggctgaggcaggagaatcgcctgaacccgggaggcggaggttgcggtgagccaagatcatgccattgcactccagcctgacaacaagagcgaaactccgtctcaaaaannaaannnnnnnnnnnaaaaggcggccccccccgcgggggagctnc

SEQ ID NO: 16571 - DNA, 389 bp, Homo sapiens
agtacttctagaattaattaaggcgggggtaaaaagaagccactacaccttttaaacaactcttctcctgtcacctctcaggtgttttattttagtttggtattatatttaagaattctttcttagtggcatacatttcatttctgtgatcagaaatcagctacaattaatattttactgacttatttgatattctctgatggctgtatcaattttcttctttatccatgcatctctttctttactttggctgaagggataaagttttcaaaagggatatatgagtggaatcgtttttgaatcttttcacgactaaacaggtattttattttgccatcacactttattgatcttttgctctgtttagactttcatgttcaaatcccttt

SEQ ID NO: 16572 - DNA, 415 bp, Homo sapiens
agtacttctagaattaattaaggcggggcaggcagagaggccatgatactggagaaatgtaggaccatattgagaagagtttgtctgtcagaagtttgggcttgtcctgggagaacagggagccattgaaggattttaagtggagattctaaaaaggtgcaatttacgcgtgtagaaaatggattggcagcaaccagttaggggactttttttcacctgtatggtttttatcttaaagaaaagatagatatgaaataagtatggcaaacatatatgttcattatttcatcctttgtgctcttctgaattaaaaaattaaagtattgaaaataaatgaaaattctctaaatctgggagggacagggattagcaaacaattcagtctaacgaagaaacatcaaataaacccaaactg

SEQ ID NO: 16573 - DNA, 504 bp, Homo sapiens
  misc_feature 480, 492, 503: n = A,T,C or G
agtacttctagaattaattaagggggattagctaacaaattatcttctaataaaataggttttacctagttaaaatatggaaaaagacttaacatattttgttctgctgatttggtgggggagattatgtgtggtcacttaaatcatgagagtcagggtgctagccacatagaattctaatgtgtctttcatccccagtgaagacatatgggtgaagtgttagtgaacctcccctacccatctgtttttctgttagttgtagatttgggtgaaacttaaatttttggtgagtttggtcacattaaacctgagatgagtggcagtcttggatattttggcatataggacaccatttctgtttctaataaaatgtggatttgtacttgggaggctgaggtggaaagaatcacctgagcccaggaacttgaggctgcagtgagcccgtgactgtgccactgtgctccacctgggtgacagatntgagaccctgtntcaaattaaant

SEQ ID NO: 16574 - DNA, 284 bp, Homo sapiens
  misc_feature 268, 276, 277, 284: n = A,T,C or G
agtacttctagaattaattaaggcgggagtttgagtaaaactgacgtgtaattctagaaatgcccaagcaggatttggaaaaggagtcctagaaattgagaaagaaattggggctagtgacagaggcataggattaagtaataactgaatttattaagagtgaaataggcctccaagttgctgacttagaataaaatctcacaaaattaaggactgatttttaaaattagcctgcactgttaaagctggagatgaaaaataaaaaaanaaaaaaannaaaaaan

SEQ ID NO: 16575 - DNA, 413 bp, Homo sapiens
  misc_feature 327: n = A,T,C or G
agtacttctagaattaattaaggcgggggtatgtaagtgcttaagactgaaattgtaggatctaaggttagtatgtacttaactctgtaagaaaatattcatgtcttacctcacatctctagggaatgaaagattttagatcagaatggtagggtagaggaaaatccattggggaaattgttcctttggtatttacttaatctgaacattttttaaatgcaattgtaactattgatgaaatgtgaatattgattgaaaaaagacgttgatgttaaataagactttacaagcttgtaaaagaaaatataagttccagaaggaaaacangtttttaaaaaacagctttattgtgatataatttatataccatagaattcacccatctaaagcgctcaattcagtgaattttgttt

SEQ ID NO: 16576 - DNA, 380 bp, Homo sapiens
  misc_feature 4, 299: n = A,T,C or G
agtncttctagaattaattaaatggaaccactacttatatacagatttacatgcaatccagatctttaattttgccttcacaaaagcctaatgtctgtaattaacctttaatttttatttctgtatgagacaaaagttgaggacttggtgaaaggaaatagcagttacagcaaaacctcagtgattacaattgaggaaaaagtcaaaattataaaatacctttaaagacatgcactttccatattttcaagtcaattttaactaaaaactaagataatgtttcctagtagagttgcttnaagattagactagacagggttgatttattattagcatgtcatttgtacataaactagtagaaaatagcagttttaaaagtt

SEQ ID NO: 16577 - DNA, 221 bp, Homo sapiens
  misc_feature 8, 71, 95, 221: n = A,T,C or G
acttctanaattaattaaggcggggcaatagcattaggtctgtgaaaatttgtagtctgtgggcctattgntagttaaacctcagacaggttttntggaaatacctgtgtagagcaatatatgaatcctggaaataaaaatcagaaagattagataaccgccaggacaaaacaaaacaaacaagcacaaactaaaaaaaaaaaaaaaaaaaaaaaaaaaan

SEQ ID NO: 16578 - DNA, 396 bp, Homo sapiens
agtacttctagaattaattaagggggggatggaaggaaagaataatggaaggaggaaaggaattataaaagaaaattggctaaaaaaattaactcattactaaaatattaagggttcaaacagtattctcaggacttggtatctgcatttctacagcctatttttcttaatacttgctttaactgtcaaaggagttatttcctaatgtcatcctttagcaactctaaacttacatcttgccattttctaatataacataaaaaagagcaactctccctgaaatacctatagaagtcttggcctcactttgatgagacaaacttgcatgtttctgttcctaaagcaactgtggatccaggggggttcaatgttttgattgtccaaacctggatcaca

SEQ ID NO: 16579 - DNA, 330 bp, Homo sapiens
  misc_feature 295, 296, 309: n = A,T,C or G
agtacttctagaattaattaaggcgggtatcaggataataatgatcttgtgttgtctactttttgggtaaacagtgtattgaagatattttctccttttatacggatgcacatttagatcagcatcaagaattctcaaagtgtattcaaagaattaatttcattagaaattaataggctaggcaccatggctcacgcctataatcccagcactttgggaggccgaggaaggtggatctcttgagcctaggagtttgagaccagcctaggcaacatagtgagacctcgtctctatnnagaaaaaaaaaanaaaaaaaaaaaaaaaaaaaag

SEQ ID NO: 16580 - DNA, 148 bp, Homo sapiens
  misc_feature 31, 34, 39, 40, 44, 46, 48, 54, 59, 60, 61, 68, 72: n = A,T,C or G
agtacttctagaattaattaaggcggggganganggacnntcanancngcattntcaannntatgaancatnggaacagctcaggacatgtaaagtggctgacacacacatatatatacatgggaatatatgtatatcgtgtgtgtat

SEQ ID NO: 16581 - DNA, 412 bp, Homo sapiens
agtacttctagaattaattaaggcgggcagatcacttgaggccaagagttcaagatcaaactagccaacacggcaaaactccatctctactaaaaatacgaaagaaattagctgggcttggtggcggatgtcagctactcgggaggctgaggcacaagaattgcttgaacctgggaggcggaggttgcggtgagccaagattgcgccactgcactccagcctgggcaacaagagtgatactccacctcagaaaaaaaaaagtacactacgagaagttagaaactttatggttaagcaacagattagacttctccctaaagggagaatgaactggaaatagatctgaagttacacagagagagcactgacatacagagaagtggaaactaaggaaaagaggttaaaaaacatg

SEQ ID NO: 16582 - DNA, 232 bp, Homo sapiens
  misc_feature 198, 206, 207, 212: n = A,T,C or G
agtacttctagaattaattaaggcggggctgacttagacagctgctgacaatattaccagaagtttaataataaactaatttttaaatacaaacgttctaatgccatataattgagaacttatcaggattctcttctagctgtttaccttctcagcttactgatttctgttctgttcaaactttcagttaaaaaaaanaataatannattanaaaaagcggccgccaccgcg

SEQ ID NO: 16583 - DNA, 322 bp, Homo sapiens
  misc_feature 42, 253, 278: n = A,T,C or G
cgagctgtattctaaactatagagcacatcttaaaaatggtnttctgaaattaggctttttctcaattctttttcccattaaaatagtcgtgactgaccaaagaactatcttttagaaagataaaatggctaataaatacatttaaaaatactaaacgacactaaagacccagaaatgcaaattaaaatgagatactggctgctaaccatcagtttggcaaaaattaaaggctgataacattcagtgctggtnaggagctggggaaaagggcattctnacatactcttggaatgtcaaagaatgggcataaactttttcttt

SEQ ID NO: 16584 - DNA, 416 bp, Homo sapiens
  misc_feature 177: n = A,T,C or G
agtacttctagaattaattaaggcgggtgcccataatcccagctactcgggaggctgaggcacaagaatcgcttgaacccaggaggcagaggttgcagtgagccaagatggcgccactgcactccagcctgggcaacaagagcaaaactccacctcaaaaaaaaaaaaaaaaaaaangagaaagcgattgaagcctgtaatatggctgcaagtttggaacctggccagtaaacagtagattctccgtggcagagaacagcagatgaattttgagaacagtggtgtctaacactcaagtttgaacttgttgcctgttctgtaactacttttgagaatcccaaaccttctatcaaagttaagacacaacacccttacaataactgtattttgccaagcatgaataaaaagaaccttga

SEQ ID NO: 16585 - DNA, 270 bp, Homo sapiens
taccgggccccccctcgagagtacttctagaattaattaaggcgggagaactgcttgaacctgggaggtggaggttgcagtgagccaagatcgtgccattgcacaccagcctgggcaacgagcgaaactccatctcaaaaacaaaaaacattgatcgaagtctggctgtgttcaggggctttgctaagctcctagttttgcgccatttaactcctgtagtggttaccaccccccaaggaaaaggttccccccacaaaaaaaaaaaaaaaa

SEQ ID NO: 16586 - DNA, 289 bp, Homo sapiens
  misc_feature 289: n = A,T,C or G
agtacttctagaattaattaaggcggggagtgggtcggagccacgtcttaagagggtcttgaatgtcatcaagccggtgacacatgaactcgattctgttgtcagtgagtgggaacctgggttcttaaaagcgaccaacttggccgggcacggtgcctcacgcctgttatcccagcactttgggaacccgaggcaggtggatcacgaggtcacgagttcaagaccagcctgaccaacatgatgaaaccccgtctctactaaaaaaaaaaaaaaaaaaaaaaaaaaaaan

SEQ ID NO: 16587 - DNA, 363 bp, Homo sapiens
  misc_feature 20, 29, 34, 37, 42, 43, 44, 45, 47, 55, 58, 62, 73, 115: n = A,T,C or G
ctggccgtcgttttaccccnggaacaagntatanccntgatnnnngncgcgtccnttnctcnagagaacttantagaattaattaaggcgggtgtcaggctgcagagcagctcantggggtggaggggtggtcagtcaaggcaggcttcccgggagaggcttcagcagggtttataagatgaaaaagagggccgggcacagtggctcatgcctgtaatcccagcactgtgggaggccgaggcgggcggatcgcttgaacctgggaggtggaggttacagtgagccgagatggcaccactgcactccagccttggcaacacaagactgtctcaaaaaattatatataaaaaaaaaaaaaaaaaa

SEQ ID NO: 16588 - DNA, 538 bp, Homo sapiens
agtacttctagaattaattaaggcgggaggccgaggcaggcggaccacctgaggtcaggagttcaagaccagcctgaccaacaaggtgaaacgccgtctttactaaaaatattaaattagccggctgtggtggcatgtgcctgtaatcccagctactcaagaagccgaggcaggagaatcactttaacccgggaggcggaggttgcagtgagccaagatcgtgccactgtactccagcctgggcaacagaatgagactctgtctcataaaaaaaaataataaatatataaataacataaaaataaatacaaaatttaaaaatccatctgatacaattataaccaaattgtatcaggaagtttctaagcctgacactggaggggaaaagtgtgaataggttgcccagctaactcaactgcatcctgtagtgataagccccatcacagtaagtgcaaagcacagacctagctagattaaagatgccctaacacccaagtactcctaagaccattaaaaccagagatctgaaaaattccag

SEQ ID NO: 16589 - DNA, 340 bp, Homo sapiens
  misc_feature 5, 15, 17, 21, 25: n = A,T,C or G
ccggnccccccctcnanagtncttntagaattaattaaggcggggacttaatagtgtggtcttcggtggaaaaatatcctgttatacctgagaggatttgtctggagtactctgtaaagacactttcattctttcaatcttttctcattgtttccagtggctgaactttcttaaaagtagtctaggccaaggcaggaggatcacctgaggtcaggagttcgacaccagcctggccaacatatagtgaaaccttgtctctactaaaaaatacacaaattagctgggcgtggtggtgcacacctgtatagtcccagctacttgggaaactgaagcaagagaa

SEQ ID NO: 16590 - DNA, 507 bp, Homo sapiens
agtacttctagaattaattaaggcgggggagaaaagagagattcaacattactcagctattacaaaaataaataggcaaatgataagaatatctaatttattgtaagagccttgaggcaagaagtaagcatcctaatgaaaacagggttgcatgaaacaagaattatatgaaccacacggtaaaaatctgacagaatcagaattattgtcttagtcacagtggtaaaaattattaccagttgattactgagaaagaactagagaatagtagagcccactacgtatcttttctagtttgctgcatataaacacatagtaaactatatttctctctgttcattaaagagtaagggtttgataattctcaacaaatgctacaaccaccttcataataccttaagtaaaagaacttctctggtttaattgtagtgtaggagaggaagaacattttttttcccttatactctgttaggtttaccagctgggcccttgaatcaaattggcaag

SEQ ID NO: 16591 - DNA, 451 bp, Homo sapiens
agtacttctagaattaattaaggcgggcggatcataagttcaagagatcgagaccatcctggccaacatggtgaagccctgtgtctactaaaaatgcaaaaattagctgggccgtggtggcacgcaccctgtagtcccagctactcgggaggctgaggcaggggaatcgcttgaacccaggaggtggagtttgcagtgagctgagatcgcaccactgcactccagcctggtgacagagcgagactccgtctcaaaaaaaaaaaaaataaataaaataacaaagtcaaactcaaatacgctttctactggtttacctcaaatctatttcttgtatggtatttgcaactctacatagtttttttgccccttcttagaaactgcagggtgatcactcagcagtgattttttaatgaatagcaaaacttgcttttgtctatacaacggacagaat

SEQ ID NO: 16592 - DNA, 302 bp, Homo sapiens
agtacttctagaattaattaacttttcaaccagcatacagatgtgcttcttgtgatcattatcaagaaatcattttctttcagcaaaatgagaagccctggtggcagattgtaacttacaatgattgatcacatcatgagatcattaaccttaaaatgctcttaatcatttattgaccaaatgaaaaaaaagcttataaaccagtattgaatatatctaaggcacattatcatgtaccttttggaagattaagttaaaggaaatatttttacaataaaataataattggtgaaaaaaaaaaa

SEQ ID NO: 16593 - DNA, 504 bp, Homo sapiens
  misc_feature 2, 4, 27, 34, 39, 41, 42, 44, 47, 49, 60, 64, 66, 75, 79, 82: n = A,T,C or G
tnanactggccgtcgttttcaccccgnaacaagngatancnntnatngntgccgggcccncccncnagagaaatnatanaantaattaaggcggggggttaatatttaacccatataaccaaaatattaatcagtacatttaatctattttatactgtgggcaatggttaataatgcctattagctctgtcagcaaatgatacatttcctgtatgagttaagaaaaaggtagaaatcataacaataataaatctttgagtggtcactgtttaggcactctattcacatgcattatgtatattataaatatacgcatacacacacacatattcacgtaatgtacagagtagcccgatgaaagaaggacttggccaggcacagtggctcacgcctctaatcctggcactttgggaggccagggcaagtggatcacctgaggtcgggagttcaagaccagcctggccaatgtggtgaaaccccttctctactaaaaatacaaaaatt

SEQ ID NO: 16594 - DNA, 268 bp, Homo sapiens
agtacttctagaattaattaaggcgggtgtgctcaataacatggtctcatcttgcatatttagttgccattccatcctgctagcattccaatcccattcctatgctaggcttaaccaccattattagtataattattcatactttacagagccaatcacatagttacatatgtattgtcatctcttctcattaacctttttttaatccatttccaataatcacctctcctaggaagataattttttaatgatagtagaggaatagacg

SEQ ID NO: 16595 - DNA, 393 bp, Homo sapiens
agtacttctagaattaattaaggcgggaaaatcatctgagcccaggagtttgaggctgcagtgagctatgataatgccactgcactccagcctgggccatagagcaagtcctgtctcaaaacaaaaagcaaacaaccaaaaaagcctgcaagtatgtctgactctgaattagaactctgataatgaggcttttttcatcaagtgcctaccttaacctaattaacacaacttaatgcagcaaacaaataaactattgcaatactagaattgggaggcaggccggttgtggtggctcacgcctataatctcaacactttgggaggccgaggagggaagatggcttgaggccaggagttggaaaccagcctgggcaacatggcaacatagtgaaac

SEQ ID NO: 16596 - DNA, 485 bp, Homo sapiens
  misc_feature 21, 24, 30, 33, 42, 43, 46, 54, 55, 56, 59, 65, 69, 70, 107: n = A,T,C or G
ggccgtcgttttacaccccgnaanaagagntanccttgatgnntgncgggcccnnnctngagagnactnntagaattacattaaggcggggcagggaggactgtcanttatcactcctgtgtttctttcttagtgaccacctctgaccacccaacttaatacttttactcctccctgccccaaagctgtatgtatctcctctctgctttatttcctccagggcatgtgtgcctcctgtgtgttgcctgcccccatgtggaagggcagctccatgggacgcggctctgtccacttagcttggtgtttgttactggggcccaggatgttcagtgcttgtggaatgaaaaatagagtagaataatgaaggggattaaatatgtgacattttagtatgttgactgtattatacactgctactaaggaattgaagccgatgtataaacattgtgtctacacattatactattttatgattattgtatgga

SEQ ID NO: 16597 - DNA, 361 bp, Homo sapiens
  misc_feature 18, 20, 23, 27, 32, 34, 35, 41, 42, 43, 45, 52, 53, 55, 58,68, 69, 109: n = A,T,C or G
tgccgtcgttttcacccngnaanaagnggtancnntgatgnnngncgggccnntnctngagagaactnntagaattacttaaggcggggactaccggggaccacagcanacggcagtgaataaagacaaatgaaattaaagaccctcttgggtgtgctgactgcctaccgcagggagacttcattaacagggggcaagggatacaagactgaagaaaacacaaaatagaacttattttcaaaccacagcagtttcaacagttacccaagcggtgtaccgaaaccacacacaggactgactttagcaaaaacaatatgaaccaaatggtttaccacagtatgtactgttaaaaaaaaaaaaa

SEQ ID NO: 16598 - DNA, 426 bp, Homo sapiens
agtacttctagaattaattaaggcgggggaagaaagccaaggtcctaaagaaattatctaaggtcgttaaaagcagaaaaattctgatattacaaagtaataaagagcagtcttctcaaagcaagacaaaagctcttaatctgagccagatgattgctagtactagtagcccaaaaagcctaacctcagttagtattatatagtagtatttttactatacttcctcaagctgcactggcataaaaagggattcagacttctttccgtgtgatgaaggatcagaaaatgcttgaatcggatgcttcctccagtacgctgaaattaaacaagtaaaactgcctctgatttcttttttttcttttttgctaatgtgtattttaaaatgaaaagtcttcctaactagtcttcctagtcaatgttatggtt

SEQ ID NO: 16599 - DNA, 428 bp, Homo sapiens
agtacttctagaattaattaaggcgggggtaatcttcctaaagattatacacccaagaattaagtcaaagcctgtctgattccaaagtctaccctttttctattccacatggcacttggcctcctaaactcctccattttttttgaaatgtacgccataattatggaatacaaaaacatttcaatgtttttggtatcctgactcaaacattagaagcatattgaaatttttaaaaattgtttgttcaaagctttataaaatatttatacctgtaattaagatgagaaggtaataaaaacaaaaacaattaagtgtatgtgatcgatacatggtttcatccttatcacaaatacaaataataagcatgctaattcaaagataaaagttcttagatctgactggtaatggccagataacctcagactcac

SEQ ID NO: 16600 - DNA, 401 bp, Homo sapiens
  misc_feature 358, 364, 385: n = A,T,C or G
agtcttctagaattaattaaggcgggagagggcttggatgggaagagggtgtgtaagagcagagagtgtgtaagtgcagagaaagcactcttctaaccttaacaaagacaagaacagctcagtaagtcatgtgctttctgagagaaaatggtgagccttttacatataaataaagggaattatctaaacaaaggaaataactgcatgtgttggaagacactaaaatatctgaataatttttactactgcgtgatctgaagtttctttcaaaaaagccttaaataggtttcttcctatgtctcaaacaggggactattttgaatttgaattaaagaagtcaaggcccggggccattagngggctnaccgccctggtaaatccccanccaccttttggggaag

SEQ ID NO: 16601 - DNA, 653 bp, Homo sapiens
  misc_feature 3, 20, 21, 22, 23, 27, 30, 31, 41, 42, 44, 46, 48, 50, 57,65, 69, 83, 86, 95, 98, 119, 165, 173, 182, 200, 211, 215,384, 388, 408, 598, 615: n = A,T,C or G
acnggcgcgtcgttttacannnnggangannaaatgccggnnancngngnccccccntttcagtncaanaaaaaaaaaaaaangcngggcagggnttnagggggccatgatcacaccantgccctccagcctgggcgacagagcaagactccatctcaaaataancaaataantaaaataanacaaaattctaataacanattgaaattanattnaccttaattttacaaaagaaaatctacatcctaacctacttttaatgaaataggggtgctattacatcattcacagaatgttatttcaaaaccttaagagaactttgactagccctctgagttttgcagtcttcatgtaagtatgtactaattggttttgttttttaanaatnacaaacatattgaagtttanagggaataaaatacaaattccaatatacccatcacacagatttcttagttattaaggttttgctacattgtgccatctatcactcccctttccattcagctaagtcttcttttatttatttatttatttttgagttggagtttcactccagcctgggcgacaggagcaagactccatctcaaaataaacnaataaataaataaaacnaaaattctaataacaaaattgaaattagatttacctta

SEQ ID NO: 16602 - DNA, 402 bp, Homo sapiens
  misc_feature 23, 146, 148, 184, 203, 208, 225, 290, 375: n = A,T,C or G
agtacttctagaattaattaagngcgggggcctgtagtcccagctactcaggaggctgaggcaggagaatggcgtgagcttgggaggtggagcttgcagtgagccaagatcgcgccgctgcactagcactacagcctgggtgacanancgagactccgtctcaaaaaaaaaaaaaaaaaaaaangaacccaacctggaagtanctganagccacctggtgtgaanagaggaagtctcctctcctgtgttctggttcctttgcggacactgtgccgtaggccacctctatnaattatgtcctgggcctgaatcttcaggctctcccttggcagcttcctgcctgaccttattttttatttatttatttatttattnatttatttatttatttatttatttatt

SEQ ID NO: 16603 - DNA, 621 bp, Homo sapiens
  misc_feature 7, 223, 356, 379, 393, 438, 444, 449, 572, 574, 619: n = A,T,C or G
tgcaaanatggaaattgattcagagttaggaaaatgaatactagaatttaatgactagctgatatgaagcctaagagaggaaggagagaagaataatacacaggtttctggcttaaacaactggctgggtgttggtgacaattactaaaaaggaaaataagtgtggccaggcacagtagctcacgcctgtaatcctagtactttgggaggccaaggcaagcanatcacctgaggttgggagctcaagaccagccagaccaacatggagaaaccccatctctattaaaactacaaaattagccgggcacggtggcacatgcctgtaatcccagctacttgggaggctggggcagganaatcgcttgaacccaagaagcanaagttgcccgtganccaagactgtgccattgcactccagcctgggcaacaagaacgaancccccntagancgaagaagaaagaaaagaaagaagaagaaagaagggagaagaaagggaagaaaggaagaagattgaaagaggaagaaagaagaaaaaagaaacctttgaagaagaggaagaaagaaaagaaanangaaaaagagaagaaagaggggagaaagaaaaggaggaagaagaanga

SEQ ID NO: 16604 - DNA, 267 bp, Homo sapiens
agtacttctagaattaattaaggcgggaggtgtgggaggtttggttggggtagggtactagatagtaatattaatagaagggagatttacttttttattgaatattctttcgtattctttgaattttgtatcatattatgtattgccacatgaatacaccttcgacaaatctgaactaaagtcatgactagtagaaataaaggggaggggatcagacttgagaattatgtacgaaataaaattgatagaatgtattgattatactta

SEQ ID NO: 16605 - DNA, 326 bp, Homo sapiens
  misc_feature 304: n = A,T,C or G
agtacttctagaattaattaaggcgggaggctgtggtcccctcgttgtattcagggttacacctacacagtaaggttgcagggtgtgtgtggggttccagccccccgcctagttgattagccctccatcttgatgattgtgcagggcaggagatgggtctccccaggggaaagagaagttttcacctcttagtaaatgccactaaggtttttcaggttacagtagttctttgactaaaggaagtcacaataatgtttataagtactgatgtggcctttggttgtatcacaaaatttaaattaanattgtggaatcaccctgaaaag

SEQ ID NO: 16606 - DNA, 419 bp, Homo sapiens
agtacttctagaattaattaaggcggatggtctcgatctcctgacctcgtgatccacccgccttggccttccaaagtgctgggattacaggtgtgagccacagcacccagccagcctcactaaagtttaaaagcaatgttaatacacccctaacacagaactcttgtgttgttatgatgaatgtgtggagtaatacactcagtagctgctttgttctactcaccgtctcatgctgttaatgagcattttttatttatttttattttatgaaaacaacatttatataagtctgctggcattgatggtgaaaggctttcattttaaaattatttggctttttccattaaagggacagggcacaattacaactgccacacttctttttgacactagcaaatagctaatgttctttacatttt

SEQ ID NO: 16607 - DNA, 392 bp, Homo sapiens
  misc_feature 372, 373, 374, 375, 389, 390, 391: n = A,T,C or G
agtacttctagaattaattaaggaggaagggctagaaacgctcagctgagaaacctgaaacagggccgggggggttagataacctggtatcagtactgtctttctcagctgggcgcagatcacgcctataatcacagcattacgggaggccaggagttcaagaccagcctgggcaacgtaacgagactccaggtggtggcaggcacctgtagtcccagctacttgggaggctgaggcagaaggatcgcttgagtcaaggtcgaggctgcagtgagccgtgattgtgtcactgcactccagcaggggtgacagagatctcatctcttaaataaaattaaaaaaaaaataaaaaatactcttaaataaaatttnnnnaaaaaaaaaaaaannna

SEQ ID NO: 16608 - DNA, 462 bp, Homo sapiens
  misc_feature 392, 447, 456: n = A,T,C or G
agtacttctagaattaattaaatttcttaatataaccgtactaaaattacttgcaatatgtgatgtaattaaagttataatctcaacactttgtagaaggtgtatcagcaccgtgcttatataactgatacacaagtagtaatttaatatttacagagtacctgaacccaggccacacattttctctagcactctgctctcttgatttttaagtagaaaggttgaaggaaataaattccaaggtcttttctaatctaaggaaaacatatatcaataatggaaatatatctaggaccccatgtgttccaatctcagatgtactctatttaaaacatagtccggcgattagccgataaataaatataaacacacttaagtactcttcttttctncacctctccaggaaacaagatgaggaagacacctttcttccttttcatgtttggnttggttggntctttc

SEQ ID NO: 16609 - DNA, 478 bp, Homo sapiens
  misc_feature 437, 444, 456: n = A,T,C or G
agtacttctagaattaattaaaataaaaataaagtaatacagcattttacttctaaagttactcaaaatatttattttgatctcacaagatggggactcagagtcaatgactatctcaaaaagcctaaaaagctagtgaaaaagccagaaataccagcaaacagacctaacaattaggagaagtagaaaaaaagagttgaaataattttcaaagattgctgtacagttttgtgaatacagtattagattgtttactaggagtgacacctaggtggagcaaataaacgctaatgactgagggccagattaactgatctaaaaggggtcaagctttatgaaagcttggagcaaaacaaaagccacagtatacaggagtaatcacatctaactgcatagcactaaaaaacaacctgatttttaaaagtggtgggcattgnggggtantgattagagganggaaaaaaaaaattaggaaatt

SEQ ID NO: 16610 - DNA, 509 bp, Homo sapiens
  misc_feature 6, 18, 52, 145, 288, 304, 307, 350, 361, 369, 395, 416, 446,448, 469, 474, 479, 483, 489, 503: n = A,T,C or G
cccggnccccccctcganagtacttctagaattaattaaatttttcatagcncctagacagggcatttagcctctaagcatataaaagggattaagtgaggcttgttttcctacaacattaaagtgagttaaggatataatttangtatgagttgaagacagtcaaatgtttcttcatgctttgttcagttttctgcaagtttatatctgccataagatagggctactcatcttcaattttgaaaggatggattgtgctacttaataacttgcacaacaccttacatnccattaaccccaaganccnggaccaatactgggttggacactgctaaatggtcagtcctacncttccagtatnccgaggcncccatttttaaaagtggtttaaggcncttttgggaggcccaaggcanggtgggatcaccaaagtcagggaaaatcgnanaccatcctggctaacaccggngaaanccccncttntgcttnaaaattcccaaaanccaaaa

SEQ ID NO: 16611 - DNA, 242 bp, Homo sapiens
  misc_feature 24, 71, 96, 97, 118, 138, 144, 150, 168, 174, 198, 222, 237: n = A,T,C or G
gggtggaaagccttcttgaaaaanaagagtaacttcagagtttgttgagtttgacatataaacaagacttnttagtgtcactaagatgcttggtanncagttgagtgtgttggcctanggctcaggaaaggatactgnagggtnaactantgcctagtgaggaagttntgcctntgagttagtctagtggccttacanaaaaacaaacaaggaggacccatntgtaacttcacttgngttcc

SEQ ID NO: 16612 - DNA, 408 bp, Homo sapiens
  misc_feature 1, 63, 79, 128, 268, 297: n = A,T,C or G
naacttaaggagtaagatagggaaagaaaagaagattggagctggactacatatcagtcttcncttagattcacaaatnccagcatatttgacaatgtgtttcaattttctttttgtagagacagagnctcactatattgcccaggctggtctctaacttctggcctcaaacaatcctcctactttggcctcctaaagtgctgggattacaggcataagccatcatgctttgcctcaaatttttaatttatcacagaattcttccccntaaaagaaatattaactggctttgaaatntatttcacaaactgaatgagaaaagcattccttttttaagttttataaaaaatagtttgaagttctactgaaatcagttctacttgaaagaggccaggccaggtgcaatgg

SEQ ID NO: 16613 - DNA, 203 bp, Homo sapiens
agtacttctagaattaattaaggcggggaatatgacaggaacaaggaagcgcgggacaggagacagaactgtcattactgagcttcagctaaagcacgaatagttcgtttttttcttttaatgtatttttttctttttataaagatgggggtctcactatgctgcccaggctggtctagaactcctggcctcaagtgatcctc

SEQ ID NO: 16614 - DNA, 361 bp, Homo sapiens
agtacttctagaattaattaaggcgggtgaggctggtcggccatagtgggctccgcctgagacagggtgatggggtggccagggcggcactcaagccatcccttaggaagcagcaagatctggctctggttctctcctggctcctcttggatcttgaggctggtgcctttttttattgtaaccaaatacccagacttcaaggagattgaggctggtgtctttccgtcagcttgtgcccaaggggacatcatcctctcctctctgaaagcactgtggatgtgaggggtgactctcctatccagcaaggaatgtagtggtggattttctaccttcatctctaattctctccacctcatccaaa

SEQ ID NO: 16615 - DNA, 317 bp, Homo sapiens
agtacttctagaattaattaagggggttgttctctaaacagcacgcacattagttgtaagaaaaatgttgtgttatagtatttatactgttgaagaataagaataaaatattaaactgcagtaagttaatagcaagaacattatacaacatttatccctgttgtaaagtttgaatcataagcagtaagccaaatattaattattaatattctaaactacagcttttgaaacctatttcaatgttattaaatattttaaactcatggtgtctaacatttcctggaaaaccatggtgtttttgtgtacaccctggtcaa

SEQ ID NO: 16616 - DNA, 368 bp, Homo sapiens
  misc_feature 352, 360: n = A,T,C or G
cccccctcgagagtacttctagaattaattaaggcgggttggacaggcttggtgtaaaatctctattttggcaaatctttgagcacaatctccaactgtatgggctggggagatgaagagaaacatcctgggatatctcaggccctactctttactttcagagtgaagaagggaccagagaaccaggaaaacagcagaatctttaagggaaaatcagggatattggatacaatttcttaaactcagagggaacgcatagggattacctataaaatcagaacagtaacctcaagaaggaaatctttagtaaatcaaaattgccaaaatacaaaagtttttttttttaattttnatttattnattttttt

SEQ ID NO: 16617 - DNA, 313 bp, Homo sapiens
  misc_feature 20, 22, 27, 29, 31, 33, 35, 42, 44, 46, 47, 49, 54, 55, 64,65, 71, 73, 74, 80, 81, 89, 95, 96, 99, 101, 103, 104, 110,113, 114, 116, 119, 124, 136, 144: n = A,T,C or G
actggccgtcgttttacacncnggaanangntntnaccttgntncnngnccgcnnttttccatnnagaaanannaaaaanntttattgntggtcnntcncntnnggttangannanaanaccancctgaccatctntggtgcanccctgtctctacaaaaataaaccgggcatggcccggtgcggtggctcatgcctgtaatcctagcactttgggaggctgagacaggcagattgcctgagctctggagttcgagaccagcctgggcaagatggtgaaaccccatttctactaaaatacaaaaaatcagccc

SEQ ID NO: 16618 - DNA, 487 bp, Homo sapiens
  misc_feature 459, 461, 466, 467, 468, 470, 471, 472, 473, 474, 475, 476,477, 478, 479, 480, 483, 485, 486, 487: n = A,T,C or G
agtacttctagaattaattaaggcggggtttcaccatgttggccaggctggtctcgaactcctgacttcaggtgatctgcccgcctcggccttccaaagtgctgggattataggcgtgagccaccgtgactgacccatttcttttttaagtaatacatttttaaagaaaccactgacagattttcccatgtagatgtggagcttgatttcagggtaagtatttgcagagaaagacctgtggattcaaagtacaattgaacaagttttgttagtttgaagtcattggaatagtttaggattgtctttggaatagttgaccaactaagagtagaacagttaggtaaattggatttatatgttttcttttatctttggaactcaaatagagcaattcctgagcataaatttttaattataaacttcaaggactcattgaaatggtcctagaaagcctgagananaaaannnannnnnnnnnnnaanannn

SEQ ID NO: 16619 - DNA, 446 bp, Homo sapiens
agtacttctagaattaattaaggcgggaagagtttcttctgtgggaaaataacacagacgttccttgtttaggattgggagatttaacatttactttttccatagtgttatgccctcaatttaaatgacagaggagataaatacacattgagaaatgaaacacttatgttttccgtcctatatagttcttgaggatttcaagtcccattagaatatttctcatacttgattaacatgtagaccttattaaagactcctgtgaggctgtgtgcagtggctcacgcctgtcatcccaacactttgggaggccgaggaaggcggatcacctgagtccaggagttcgagaccagcatggccaacacagtactatctgtactaaaaatacaaaaattagccgggtgtggtagtgcatgtctgtaatcccagctactcgggaggctgaggca

SEQ ID NO: 16620 - DNA, 444 bp, Homo sapiens
agtacttctagaattaattaaggcggggcccttcactctggcaaacttgacacataccccagacaatgcatgaatgaggctatcagagattgaaatcccactatttgcaatttagattttattcatataaaacacgatgtgcatagagaatatgcatttttcgaaagcccatgaaaaagtttaaaacataacccaaaaccaagccacaaatcgaagctcaaaacaatttcacaaaatgaatacctgcttaggccacgttctttgatctgaactttataaaacgacatattaaaccaacaaacaacaacatctgcctactggaaacgtttgaatcattctctgtaatgagtcatgagtccaagaggaaatcaagcaaaaatcacgtcctacgtagaggctgacagcaacaagtgtagtgacacagcgtccatgggcctggccaaa

SEQ ID NO: 16621 - DNA, 516 bp, Homo sapiens
  misc_feature 2, 24, 26, 29, 33, 35, 38, 43, 47, 49, 53, 54, 59, 65, 67,70, 74, 75, 106, 376: n = A,T,C or G
anactggccgtcgttttacacccngnaanaagngntanccatnatgntnggcnntcccnccctcnanagnactnntagaattaattaaggcgggctggtgaataanaaaatgcaatgttttgagattctgctggcatagtctcagagataggaaagcaactacaaaaaaaactaaggaaaagtcatttctagaaactcacaacaaaagtagctactagaaactgtagaagacactaatagttaccatcctctagatgataattcactctggaatgtgagtgacatgtaagaacttttattttttattcagagtacttagaagttttcatacataaagtgctagaggatctttatttctatctgtgatttaaatcanaaactttagttttgtgtcatagccatagcccctgagaaggttagcattattgggtgtggtatagaattctcagctaaaagaatagctgtcccatcctggatttttacctcatgccacaaaggtatgagacctttgtattt

SEQ ID NO: 16622 - DNA, 266 bp, Homo sapiens
  misc_feature 47, 60, 239, 243, 249: n = A,T,C or G
agtacttctagaattaattaaggcgggttagtagaacaaaatggatntaaataggaaaangtgaaaaatcagtaagacagtatgttggaaaggagtacagtagatggaagaattaatgattcaatatttctataaagagtctccatttagatgattcaaagagtatccatgaagaaatgcacattttattgaatatacagaagtgtgattagtggtgaaggagggtgaattctgtttgntatntgactntgacatgtactagaact

SEQ ID NO: 16623 - DNA, 292 bp, Homo sapiens
  misc_feature 268: n = A,T,C or G
agtacttctagaattaattaaggcgggagaagatgggagttgcctcgattttcagacctgtttcctcatttcaaagatggggaaagagacagccctatcccacagtggtctggggaggacccagtgagatagtggtggcaaagcctacccccaaattaatcgtacatttgaggcaaagatgactttctgaggcaggaggatggcttgagcccaggagtaagagaccagtctgggcaacatagtgagacctcgcctctacaaaactaanaaaaaaaaaaaaaaaaaaaaaaaa

SEQ ID NO: 16624 - DNA, 458 bp, Homo sapiens
  misc_feature 27, 32, 35, 43, 44, 45, 46, 50, 51, 55, 59, 60, 62, 69, 72,75, 85, 86, 90, 113, 117, 122, 161, 239, 293, 356, 438: n = A,T,C or G
aactgccgtcgttttacccccggaacnagctntanccttgatnnnnggcnngccntttnnanagagaantantanaattactttnngcanggagagcaggaatctaacagtgnaacngaaangcccattgcttgtgaccccggatttccatttttaggganaggccccagagttaaactcatgtctcacgcatgtgcacaacatttaatactgtataacatttaaaaggaatgacggtnatctgtttcaacagggttagatagatgtcaaaaggatagtgttgagaaaagaanaaagaggtgataacagctttataaagtctaggccacctgtaatcccagcactttgggagtccnaggtaggaggatcccttaaacccaggagttcaggctgcaatgggcaatgatctcaccattgcctccagcctgggagacagancaagaccctgttttcaaaaa

SEQ ID NO: 16625 - DNA, 453 bp, Homo sapiens
agtacttctagaattaattaaggcgggggacttcaacagcccactgacacactagaaaaacagaggcagaatatcaacaaagaaatactagattaaattggactccagatcaatttaatttaacttaatttaatctaacaaatttacagaacatcctattaaacaaatgcagaatataattctcattagtgcatggaacattttgcaaaatagaccatatgatactcccaaaaaatagtgacaataaattctgaaaaatcaaaatcacatcgagtgtcttcttgcactatggtggaataaaactagaagtaaataccaagagaaagtcttaaaactataaaatacatgacagtaaaccttaccatgaatgatctttgtgtccatatgaaattaagatggaaattaaaaagtgttttgaaaagcataaaaatagacacaacataccaaaacctc

SEQ ID NO: 16626 - DNA, 518 bp, Homo sapiens
  misc_feature 3, 193, 194, 195, 198, 199, 201, 218, 219, 220, 221, 222,223, 224, 232, 239, 240, 246, 248, 250, 254, 255, 268, 269,271, 280, 281, 282, 284, 287, 290, 303, 304, 305, 307, 311,316, 319, 323, 326, 329, 332, 334, 335, 336, 338, 340: n = A,T,C or G
  misc_feature 342, 346, 347, 350, 352, 353, 354, 356, 361, 366, 369, 370,377, 378, 380, 382, 384, 385, 389, 390, 397, 398, 401, 402,406, 408, 410, 421, 422, 424, 432, 434, 438, 442, 447, 448,454, 455, 456, 470, 481, 483, 487, 489, 490, 493, 495: n = A,T,C or G
  misc_feature 498, 503: n = A,T,C or G
cangatggtgaaaccccgtctctactaaaaatacaaagaattagctgggcatggtggcgggcgcctgtaatcccagctactcgggaagctgaggcaagagaatcgcttgaacccaggaggtggaggttgcagtgagccaagatcgcgccactgcactccagcctgggcgacagagtgagattccatctccaannnaannanaacaaaaaaaaaaatannnnnnncccccccnggggggnnaccccntntncccnntatgggggggttnntnccccccccnnntnggnccnttttttaaaagtnnnangggncaacnatntaanagnccntcntnnntntntntttnnaancnnnanttaancccanggnncgggttnntntntnntttnnaaaattnnttnncttntncngaagggggcanngnaaaaaatnangggncctnctttnncaaaannnccctttttcccccntttaaaatggnanattnannatncnaanctttnatttttttttccccc

SEQ ID NO: 16627 - DNA, 389 bp, Homo sapiens
  misc_feature 187, 386: n = A,T,C or G
agtacttctagaattaattaaggcgggagttattgttgatattggaaataaaattaatttcatttttatggatgtttttgtttcttattatagaataaatgtataacttgataataaaccaaaaagttattttcagaaagttaccatttcatgttattttctgttctaaaacactgacaacacttancctacactgttttcaaaagatgtccgtgatttacccatgtgttaattattttctttaatgaataataaaatttactcttcttaaaaataacattttataatctatgcttgaaaatgtaaaattcattcaattcaaaataataaactctacttcagtactccctatctgcatgacactttttttggtgttttggtaagtncca

SEQ ID NO: 16628 - DNA, 661 bp, Homo sapiens
  misc_feature 455, 482, 497, 507, 510, 528, 566, 569, 570, 580, 582, 597,606, 611, 615, 640, 643, 645, 660: n = A,T,C or G
agtacttctagaattaattaaggcgggaggactgcttgagcccaggagttcaagaccatcttggacaacatattgaacccccatctctatttttaaaaaattatctttttgacagacctagttccttttcagcttgaattatagatgacacttcactttttgtgtgattaagaaagcagaaggttttctgtgacctcaccagtagcggaccaaaaccatattaaattctgatttgacttaaagattgatctttcagatttaaatatggggatgggtgtgttaaaccacttaagaactattttacatcctcgataataaaactctaatttagaaatataccataatggccgggtgcggtggctcacgcgcataatcccacactttgagaggccaaggcaggtggatcctttgatcccaggagtttgagaccagcctgggcaacttggcaaaacctnatcttttacaaaaaatagaaaaatgangcaagcataatgggnacacatttgnggntttcacctactcaaaaanggctgagggtgggagaatcaccttgagaccaaggaagntcnngggcttgcantngagcccatgaattgnggccactgnaactnccancctgggtaaaccagaattgagaccnctntnttccaaaaaaaaaant

SEQ ID NO: 16629 - DNA, 407 bp, Homo sapiens
agtacttctagaattaattaaaaaacatactagtatatgtaaaaagattatattttagaattccattaaatgtaatggttgtattctagattgctagttataaagatgatgatagtggctagtcgacaaagcactgtgatgaatggatcagtagataagtttttattttcttccccatgagttcaggctccatttctgtgatatagaagtgtcgagaacctgccgtttcaagaaattggctctgctccagcatgaatctgctgttcagaattcaggcgatgaggtattccaggtctttacttgaattcagatccaggtctacctcacagacaacctggaactccagagatggccttaactgtgtctccaagactcttacttagggacatggtggaaattcatttggg

SEQ ID NO: 16630 - DNA, 488 bp, Homo sapiens
  misc_feature 473, 482, 483, 484, 485: n = A,T,C or G
agtacttctagaattaattaaggcgggcaaggtgacactttctggatttgctcctcttgtctaagtgtttaaaaaacaaaacatacattacaaagatatgcctgcattcatatatggtaagggaaaatcttggagctcaattacccagtcttccttttacaaaaattaagtttattctcaacataaactagaaacacttattgactggaatgagagccaatccaagtattggttgaaacacattaaactaaaacacaaagttaagtcaaaaccatgaatataatacatcacttttaaaattcaagaaatgagtttagcataaaacagttaaaaacaaagtaattaagactattatagtgtagacacttcttttagcaaaggattcagctcttatgccattatagaattcttcgaatataaatatccaattgaattaaatattagtttaattgtatgtaaaaaaaaaaaaaacnaaaaaaaannnnaaa

SEQ ID NO: 16631 - DNA, 360 bp, Homo sapiens
  misc_feature 66, 75, 86, 140, 308, 332, 336: n = A,T,C or G
agtacttctagaattaattaaggcggggggaggggggaatgtagtaagatcaatttcttccagatncataaaganggaaactgaangaaaattaaacacatgattaagttttattcttcttgaggacagattttcaacanatatactcttttaaagtaattttttaaatgttttccttaaaactggcattttaaaagtttataatcgtaacaatattggggaaaatggtttttatttcagagttctcactactgggtagattattcaaaatatatcaaagataaaacatatatatgccatgtttattnctttaaaatatactgtcattacancatnttataatgttctttataatcccat

SEQ ID NO: 16632 - DNA, 427 bp, Homo sapiens
agtacttctagaattaattaaggcgggggacaaacttttaagtcacggcagatgatactgattttgtaacaattaccacacaatgtgtatttggagatatcttgaatatatccaatattatctgtcaactaatattttaaaattaaacatacaaataaataaaatatgaaaataacttatccattgagcaaaaaaggcccactgaagatttctgaccaaaactaccattgactctttggtgctgtggggctgctgaaaactgaaagatgaagaaaatagcagaattatacagtcttcacagaaaagtcagctcttgagggtgagatattaacttgggtgagacaatgacaggtgacagcaaatgaaaaagaattcattatattttgttagcttactggaaaaaaataaaattactagtcataaatct

SEQ ID NO: 16633 - DNA, 358 bp, Homo sapiens
  misc_feature 33, 44, 51, 56, 66, 95, 100, 164, 168, 171, 232, 261, 299,304, 320: n = A,T,C or G
agtacttctagaattaattaaggcggggaacanggatgtgtggnaaataanccagnactagtgcanacaagtaaactaattcatgtcaatttttnccttncaaatatatatcacattttccaatattaatggaacaataacaaaaataattgtgaaatacagtncagnganactgtcaattagatctagatataaaagtagtacaggcaacattttctgaggtcaatataanaaaataagctactaccggctgggcacagnggctcacacttgtaatcccatcactttgggaggccgangcggncggatcacgaggtcangagatcgagaccgtcctggctaacacagtgaaaccctg

SEQ ID NO: 16634 - DNA, 440 bp, Homo sapiens
ctcgagagtacttctagaattaattaaggcgggataacacatttcactctctcccaccttttcctccctcaaaacgcaaatactcagcatcacctagacaagctacatcagattatttggtaaggttcccatctcaaatactgaatttgggggaaagggagagttggaagcagtaatatttttaggaagcgatgaccagctgtctttttattttttatttgattgactgacagagtctagctctgtcgccaggctggagtgcagtggtgcaatcttggctcactgcaacctctgcctcctgggttcaagcgattctcctgcctcagcctctcgagtagcaggattacaggtatgcaccatcacaccgggctaatttttgtattagtagagacggctggtttcaccatgttggccaggctggtcttgaactcctgacctca

SEQ ID NO: 16635 - DNA, 354 bp, Homo sapiens
ggtaccgggccccccctcgagagtacttctagaattaattaaggcgggtgagagaaaaggcctgtggaattagaacttgcacttaaccatgccggaaatttctgtacctttctctgcaaagataacttagttacataagtgaataaatatatatgttaaacactcaagaactctactagacatttatggatattatatcctgggctatcactttgagttttatggtactaagcccttttcctttgttcagtgctgatgcaagggaatttcttttttaatatttattttatttggcctgatttttagcttttagattcactgtggtaggtatcggggaaaaaaaaaaaaaaaaaa

SEQ ID NO: 16636 - DNA, 413 bp, Homo sapiens
  misc_feature 3, 16, 19, 20, 34, 35, 39, 55, 60, 78, 80, 382, 410: n = A,T,C or G
ggnaccgtcccccccncgnnagtactgttttaannaatnaaggcgggagaatcgnttgtnccaggacgcagagctttnantgagccgagatcaagccactgtactccatcctgggtgacagagcaagactccatctcaaaaaaataaataaataaaaaataaaacaagagaccaaattttcatgtctgctagggttaaattctaaccctaatattagctgttatactgagatgaagaagaaaacaggtggattgccttggtatttaggaaatatttttgttataaaattacaactttcataaaaccatattcagtatttgtaatggtggtatacaaaatgcttttacaataaattattaaatatttaaggtatcagcacccnaaaaaaaaaaaaaaaaaaaaaaaaaaangcg

SEQ ID NO: 16637 - DNA, 248 bp, Homo sapiens
  misc_feature 45, 49, 91, 106, 136, 139, 159, 160, 172, 194, 201, 203,207, 211, 215, 216, 228, 230: n = A,T,C or G
gggtgcccgggccccccctcgagagtacttctagaattaattaangggnctcctttagatgatatgacaccgctcctatcaattatgctgnaaactaaatgtcatnattttcatgcaccctaaaaacagggattantanttattaatatatgaaatggnnattgtatgtcancacttggggagagggttaaaanacaaacntnaaanctantgannaaggaaaaagangntaaggttagagtcatcat

SEQ ID NO: 16638 - DNA, 425 bp, Homo sapiens
agtacttctagaattaattaaggcggggttaccacactgagttcaataagcactatcactccagtgagaacattagaacatgaagcctaaaaccacttttctgctaggtgatcacaccacctaagtgatagctagatggaattgcagcccagaaatttaagtatcaggagacaggaaaactgggcatacagatgaacagatcacagtagtcattctctcttcttttgacctatacgtaaagaattaaaactacaaggagtcattcttaaaatgcatttgaaagtgtttttgtagcaggattaaaatctaagaaggtaatgaaatggtattagtattaatattctattcttattatgcttaaataatttttaaaatgtttggatgagcaataaactaaaaaacagattttagaaaacaatcataag

SEQ ID NO: 16639 - DNA, 418 bp, Homo sapiens
agtacttctagaattaattaagccgcaaataccacaagtgacaatttatgcaaaggttgagatctgaaaggagtatttagtgtgggctcctccaaaacaagggttgctttttgtcatcgtttaattagtgcttcaccggtgaatatcacgacatagatcaagccagttgctgcttaattttggctgtgggaaacaatacatcctatcagcaatttaatctgggtctcccctcacgttttcttcaacttcagcgtccagcagtgttaaaaatagttgtagttgttgttggagtattaactataacccagtgcagaagaggtatgccgcttggtattggtaatgtgctggccgttcaaccaccatttgtgtgctcttttggggcataagattttgcttacctacggaatacttattttaa

SEQ ID NO: 16640 - DNA, 237 bp, Homo sapiens
  misc_feature 176, 183: n = A,T,C or G
accaaggaaagtttgacacaggggcttataattaaaataagtaatgaaaagatattctattcatggcttattacagtgcatattacaagagttatggtgaactcatggactaaagaaatactagatttaagattcacagttcctccaggcaccgtggctcatgcctgtaatcccancattttnggaggctgaggcaagtggatcgcttgagctcaatgggtttgagaccagcctgcg

SEQ ID NO: 16641 - DNA, 317 bp, Homo sapiens
  misc_feature 51, 58, 111, 187, 199, 262, 263: n = A,T,C or G
agtacttctagaattaattaaggcgggaggtagaaggaaatcatagaaatngtagtgnccttataaacagattatacaagagaaactgttgggattgtgggaataaaaaanataagagatttaaatattatttaaagtgacaaaaaatactcaatagaagaaccgaagataaacacattactaccanaatttccagacnaatagggaaagggaagggataacgataagtgagctattcatctgtcatcacaaagagtgtatnntgtctaaactctgaattcagaaatactagtagataatgcctaaagctgataaat

SEQ ID NO: 16642 - DNA, 195 bp, Homo sapiens
  misc_feature 30, 31, 47, 50, 73, 140, 151, 152, 154, 160, 169, 172, 173,174, 193, 195: n = A,T,C or G
agtacttctagaattaattaaggcggggtnntcttgcttgctatcangangggggtaatcttttagatattanttattttactctgttacattgctaacagggtaaaacaggttaaccataatttatgtagaaaatatanaatgtgagaannanaaaaanaaaaatagnaannnaaagcggccgccaccgctngn

SEQ ID NO: 16643 - DNA, 303 bp, Homo sapiens
  misc_feature 55, 56: n = A,T,C or G
agtacttctagaattaattaaggcgggggaaggactgtgggctcttaggaataanntatccttgttgtctttcaagtacttgaacgcagatttcaaaaaatagaaattatgtttttcttaccacataaatgaagacttatgattttgtaagtgttttgatatccaccacagttttaaaataacccagtaatacttgcagtgttatttttgtagtgtaaccacttgtgtgaatgaacacatagctaataaatggttaaatggaataaagactggcctaagagcatgacattatgaagtaaaaag

SEQ ID NO: 16644 - DNA, 472 bp, Homo sapiens
  misc_feature 24, 33, 34, 36, 41, 45, 46, 58, 64, 74, 171, 254, 255, 256,257, 274, 277, 280, 283, 288, 289, 290, 291, 292, 295, 296,297, 299, 301, 302, 303, 305, 313, 314, 315, 316, 319, 322,323, 329, 334, 335, 336, 338, 339, 340, 341, 342, 344: n = A,T,C or G
  misc_feature 347, 350, 352, 353, 358, 360, 361, 364, 368, 373, 377, 379,381, 382, 389, 390, 391, 393, 396, 397, 400, 401, 402, 403,404, 405, 408, 411, 412, 413, 414, 415, 418, 420, 421, 423,425, 426, 427, 428, 429, 431, 435, 437, 438, 439, 440: n = A,T,C or G
  misc_feature 441, 444, 445, 446, 447, 448, 452, 454: n = A,T,C or G
aactggccgtcgttttcaccccgnaataagagnnanctatnatgnntacgcgggcccnccctcnagagtacttntagaattaattaaggcgggcgcgtgtagtcccaactacttgggaggctgaggcaggagaatggcgtgaatccaggaggtggagcttgcagtgagccnagatgcaccactgcactccagcctgggcgatagagcaagactccgtctcaagaaaaaaaaaaaaaaaaaaaaaaaaaaaaagnnnncccccccccgggggggnccnccnttnccccnnnnnggnnntntnnnancccccccnnnnggnccnntttttnaaaannntnnnnnanggnccnanngggcntnnttncccnccctntgtncncnntttttannncnttnntgnnnnnnatnctnnnnnctntnngntnnnnnanaacnannnnntgnnnnnattnantattggaaatccaataca

SEQ ID NO: 16645 - DNA, 447 bp, Homo sapiens
agtacttctagaattaattaaggtgggaagattgcttgagcccaggagcttgagaccagcctgggcaacacagggagatgctgtctctacaaaaaataaaaaaatttgttgggcatggtggcgtgcacctgtggttctggctacttgggaggctgaggtaaggaggatcccttgagcccagagagagaccccgtcttaaaatatgcatgtttgtatgtatgtgtacgtatatatgtatacacacacagatacaaatatatatgtgtgtgaatgaaaatacatatatatctatatataaaaacacagatatataaaaatatgtgtgtgtgcatcctgaaagggtgttgtaaatgtcaagaataaaaatcatccagtttgatgtattttatagtgcatttctagaatgtacatattttgatacttaaaactgttaacagacattaacaa

SEQ ID NO: 16646 - DNA, 664 bp, Homo sapiens
  misc_feature 654: n = A,T,C or G
agtacttctagaattaattaaggcggggggatattactttaacttcctgtgcctcattttccatatagcctaataatacttgcctttatgtaccgcatgctctgagagtgtcagagtgttataaaggccaagttttattgtcaaatgcatttgtatgcaaatttagtcaaaagcgttttcagtcagtttttctttttttttttccaaagaggtacattccctatttgaattgtttgatttttttcactgaatggctaaggcctcagcataattccaggtagttgtttatgggcagcctgatttccttagacagcacagaaatagtacagtaggtgtgaatgtaagacagataatcaaataaaaaataaaggcctgatttaaatactaacataaatgttacatggattttcaaattacttgacaggctacagtacagtaaatgggactgtgcctttgataattccaatgaggcaatgcatggaaatataagaaatctcagtagttatagtttcagactaaagatcataagaaccaaaactaaacctcaggacaagattcactatggcaattaaactttgggaaactcattcactggacacaagtagttcatagtaagtaatgtcagaagtttccaaagaatcaggaaaaaaaaanggaaatgaaa

SEQ ID NO: 16647 - DNA, 424 bp, Homo sapiens
agtacttctagaattaattaaggcgggagcagaaaatattagaatcaaatattaaacctcctagagcaagctgtttcacgattcaaaagtatataagagaagcagagaaaacaaagaatatacaaatgcattattccaaagacaatgcactctctccattagaaaaaattaccatatacaactccagtaacaacataatacaaatttcaaagccacatttgaaactatcagtaaaatgcaaaatatgtactgtcttcactgaaaagaaaagaatgtcttcttggccaggcatcgtggctcatgcctgtaattccaacacgttgggaggccagggcaggtgggctgcttgagcccaggagtttgagaacagcctgggcaatatggcaaaacttcatctctacaaaaaaaaaaaaaaaaaaaaaaa

SEQ ID NO: 16648 - DNA, 407 bp, Homo sapiens
  misc_feature 21, 28, 29, 32, 37, 40, 48, 55, 62, 65, 69, 75, 77, 91, 101,108, 112, 119, 136, 145, 148, 157, 161, 162, 163, 164, 166,172, 176, 178, 183: n = A,T,C or G
tactggccgtcgttttacacnccggaannagntatanccntgattatnggcggtngttttcnttncagnaccagnanaaatagtattttgngggctgagcncacgggntgtntgccctnccccaactggccctctncacctccanctngtctacttngggnnnncncggttngttncnacttnaagaccagcctggccaacatggtgaaaccccatctgtactaaaaatacaaaaatttgcctggtgtggtggtgcatgcctctagtcctagctactcgggaggctgaggcacgagaatcacttgaacctgggaggcggaggttgcagtgagtcgagataacactactgcattccagcctgggtgacagagtgagactccacctcaataaaaaaaaaaaaaaaaaaa

SEQ ID NO: 16649 - DNA, 392 bp, Homo sapiens
  misc_feature 58: n = A,T,C or G
agtacttctagaattaattaaggcggggttaatgcaaactgatatataatgatcaagntatacagtatgtttctttcttattcaaacctcactaagcatgaagtatgtatgctgatatggaaaaataatataaacataggttgcttgttaaaatgctgaaaaatctccataatttggaggagtgtgagtcatgactgtatcaactgtgagcaaaagagcacaaacagctgcttctgatccctatggtgccattcaattttcctactttagaagcttcataaacacaataaaatgaatgagatagggactcagggtttctcatttttcagcaagtcattataaaaacggtctctacaacatattcacaaattatgattaatgtgctgcaaatt

SEQ ID NO: 16650 - DNA, 431 bp, Homo sapiens
agtacttctagaattaattaaggcgggacaggtgacgacctgcctgtgagaagcccatagagctctcttctcctcaccactgggtcagttgatcctcatctgtagatgagagatcctcatctgtagactcagccctcctgcagccattagtgcctctcctgtttctaatcacagggaatctaaagaaatttaaggagcctcgttcaggagctcagtgttagattgagctttctggtgggtccattctgactctgaatgttgattttactatctaaaatcattattcttgtttctatggctagggtcctacttgtattcaatttcctatagaactagcgtcctgtcttgttaattcccagtcattagaatcccacacccaagtttgggaccaggttagggctctgagtcccatgggcagaaatctctgatac

SEQ ID NO: 16651 - DNA, 425 bp, Homo sapiens
agtacttctagaattaattaaggcgggcggatcatgaggtcaggagatagagaccatcctgtctaacacggtgaaatcccgtctctactaaaaatacaaaaaaaaaaaaaaaattagccgggcatggtgacgggcgcctgtagtcccagcttctcaggaggctgaggtaggagaatggtgtgaacccaggaggcggaggttgcagtgagccgagatagcgccactgcactccagcctgggtgacagagcaaggctccatctcaaaaaaaacaaaacaaaacaaaaaaaaaacagtcttctggctactcattagggaactctgagccaattacttaacctctctaagcctcattcacaaaatattcaaacatacctcggtataaaaatgaatgatcccctatcccacgatgtatacaattaagatc

SEQ ID NO: 16652 - DNA, 415 bp, Homo sapiens
  misc_feature 29: n = A,T,C or G
agtacttctagaattaattaaatacatangacaaatttagggatggggacatatccatgggcaaggcctgcttactacccgctgaagcaaaggcaagaggagaaacacatcctgcagagaaaaagaaagccatataaaatggaagtcccacccctgatgcctgggggcatagacagactgaatttaacatggtaaatggcgcagctggtgtagaaaaaaaaaatcatccatttggagatgaagagcaacgcagactcagtcatggttctctataaaacttatgtttttagatttgcaggtaatacaaagaaaggatacctataaatccaagttataattattttttgttgctttttatttgtctcaaaattacttttcagttaagtctggtgatttgatttaaatatttgagact

SEQ ID NO: 16653 - DNA, 388 bp, Homo sapiens
  misc_feature 352, 357, 367, 378, 381: n = A,T,C or G
gctccctgatggaaccagagtaaagcatattaaataggagttcaaatgtgtaatcaagactttacaaagaatctccccctgcaaaaataaaaaaaatcagactttacaaggaaaataaaagtattctgcaagcaaggagtaaaccctatatatgatacctattcacagctcgaaaacatacttgagttatgaataggagttgtaaatcaccccaaaaaaacaagaaaaattatatttaaagtaattcaaactaaaatcttcatttatatgctgaaatggaaatatctggatgtattgcctaaaatcgaattaatagaaaacaaatgttatttgatttcaggtttcacaacangaccnggataaaagnaaaaaaaaaanggnaaataaa

SEQ ID NO: 16654 - DNA, 439 bp, Homo sapiens
agtacttctagaattaattaagggcgggggctgcggtgagttgagatcacgccactgcacttcagcctgggtgacagagcaagactccatctcaaaaaacaaacaaacaaaaaataacattaataataataacaacaaaaacagcaacaactaccacatattaagccccaacttaaaaagcacagtgatagactctgtaggtacatatttcatgtgactcttatgaaaatactggagagcacatactgccgttctgatccaacagatggggaaactgaagctccaagcatctaattaccaagcccaaagacataggaaggtgggggctggaatacaaaccaaggactgttacttctcttttcagtccatctctgtggtccacacatatctgccactcactagtaaagaaaagactaaaggatgaggtgtcctggttctt

SEQ ID NO: 16655 - DNA, 419 bp, Homo sapiens
agtacttctagaattaattaaccactgcttggcaggtactatgttaagtgatttacatttgtgcttatatactcttcatgacaattctgttaggtaaatactagtataactgctttacatatgacaaaagtgactcctgggaagggaaataaactcaaaaagtgtagtatagtctgtgactggatgagacctaaaaggcaattgctgtagaagtaaatagatttaagacgtttaaaatggtataccgtttatatacttatccttcttcctgtgtatactagggacacataatttctacctacattgtggaaaacatataaattattaatatataatttttaaatgaaaaattaatttcataaataataaaattgccaagtcagaacacactgcattcatctatatgttaaattattact

SEQ ID NO: 16656 - DNA, 286 bp, Homo sapiens
  misc_feature 7, 93, 160, 274: n = A,T,C or G
gacaacngtttacaatgcagtaatagaggcaagtcaaataaggatttattgcatcaaactatcttaatgagcatatactcattggtgttctanaaacaaaagccaaagtactttaggctgagaaataaatagaaggtgagaaaaaagaacagtctttatngtcagtaagagttaaaagagaaagatggtagttggggaaagacagatggggagaaaggttggctggttgttaataaaaccagtagaggatgagcatgtattataaatgctggtnggaaagaaacct

SEQ ID NO: 16657 - DNA, 452 bp, Homo sapiens
  misc_feature 423, 424, 425: n = A,T,C or G
agtacttctagaattaattaaggcgggtggatcacttgaggtcaggagtttgagaccagcatggccaacatggtgaaaccccgtctctactaaaaataaaaaataaaattagccgggcgtgctggcccacacctgtaatctccagctactggggaggctgaggcaggagaatcgcttgaaccccagaggcagaggttgcaatgagccgagaccgtgcctgtgtactacagcctgggtgagagagagagactccaccttgaaacaaacaaaacccataatttttgatgatagattacatgatttctggcatgtaactcaaaaggagttccaagaactaagcaatattgctatgacaaatcttccatcaacttatttactaatgtaaacaaggtctgttagtacttccttctcaaaaaaaaaaannntaaaaaaaaaaaaaaggcggccgccac

SEQ ID NO: 16658 - DNA, 369 bp, Homo sapiens
agtacttctagaattaattaaggcgggctggtaccagaaacgtgggtcactaatagtggtgcccagagaagtcaaggaggcctctgggttacaatcttagatggtgtccttgtagttgttggtggttgctttggcttttgatgcatttagcacttaaaatggattctggagtagaaatagagaaatctcatactcctgtgttctgggaatctgaggcacattcactcaactagcacggactttggaggatcctgctttgcttgactttttttcatgtcaagttgaaaaccattaaaatgataataagtagtccgggcacggtggctcacgcctgtaatcccagcactttgggaggctgaggcgggtgga

SEQ ID NO: 16659 - DNA, 429 bp, Homo sapiens
agtacttctagaattaattaaggcgggggggagttgcaggggaggtgttcttacttagcccaaatgcctttttttaagtgaaaggtatccttcctactccctaatgaatctggcctgaaattgagaagttcctaacttaaaattgcaactgctaactttcctcgagatgcagttaaatgagaaaataaataatattttttaaagtcactagctttaacgcattggcaacacgatcatttcctgtagtgagtgaccctggttcctaaaaataactccagtgctattcaattgcttatattgggcattttttttaattcttatttgggaaggacattctcttccacagctgaagaaactcagtgtttgaaaagagctgcctaaaacactgtttccgtaggctgttaaaaatgttcagcatctgaatgctgg

SEQ ID NO: 16660 - DNA, 683 bp, Homo sapiens
  misc_feature 15, 20, 26, 35, 649: n = A,T,C or G
ggccgtcgttttcancccgnaataangggaacctntgctgggtgccgggccccccctcgagagtacttctagaattaattaaggcgggggagaaaatggaagtggtaggtataaattggtggtcatatggattgaagtatctctgtctctgtcatggtcgagattcttccttagttgaatattattctaccttgctcttggcttccttcaaacaattatcctgttgccagcatgtagaatcatcaaactgtacttgaaagagactcgaaaatatatccatttgtgggaagaatagaagggtacaaatcagtaaaaagttcctggagcaaatgacaactaaaataggttttgaagggcaaagtaggtttttcacagacaagatgatgaggtaggagaaagaaaaaccctttcaagcaaaggggattatcacttgtttaggtagacctttttctgatctctgctggtagaaaaacctttttaatcctttaaaaccaagtcaaataccattctcattcctaagcagagttacttttccctcctctgaatctgatagcactttagttgtacttccttactacccgaccactacctcttgtaccttatactgctcagtcaactttcagaatgttactccattctgtgggaccanaaatgaaccttctgttgaccttttttttaaattt

SEQ ID NO: 16661 - DNA, 439 bp, Homo sapiens
agtacttctagaattaattaaggcggggaaggttggaagtcccaccccctccccttaatttaagaagaaggtaaagctctctggcgttctagtgtctccttcttgggaatgtggccctcggggccatggtctcctcacaccattcagaatgagcctatgaccccccaccccagcctgctctggaaatgcaggcagcccatataagaagcctggtcacatgctgttcctcttgcttccccctaagtcagcatctctaggcaggggtctcccctaactccagcttcccaaaaacccccattacctttccttctgaagccatgatgtggcggtgcatcgacttgtacttctagctgaactgcctgttttttaggtttttttttcccaaccatcttaactgattaaagtatcctatcaagtccccaaatatcaagaagcccat

SEQ ID NO: 16662 - DNA, 454 bp, Homo sapiens
taagggacaaagctgggtccgggccccccctcgagagtacttctagaattaattaaggcgggggatcaggaattatttaaatattttgagtaagctgtagcattgagaaaaaaataagataggtagtatcatagacatgctaactgaaatatcagaaatattactaaaagataatttgaggaaatgggacctagaaacagcaaatgacttgttgaagtcacatagctagttaatgtcagagccctatgatcactttagtttgttttatgtagccaatattaataacatttatagagtggttacatatgccaagcttggataagtgctttaaattcatatgttgacctggagcagtggctcacacctgtaatcccagcactttgagaagccaggggaggcggacctcttgaggcgaggagttcaagaccagcctggccaacgtggcaaaacccca

SEQ ID NO: 16663 - DNA, 292 bp, Homo sapiens
  misc_feature 29, 60, 145, 270, 278, 287, 290: n = A,T,C or G
agtacttctagaattaattaaggcggggnttagaattaaataatgatgaattagtgatangttctagctaaatatttatagtacacttagcatttagtatttggtaatttttaaaaagtatatgcatcaatgacattcatacggntctatgattcctttaaatggttttacgggcaaattaatggtaaggtcttttcactcttaaataattttatgaatctatttccattctattcagattagtttgcggaagcaaatacccaaaaaaanaaccgagntggaactcnaantc

SEQ ID NO: 16664 - DNA, 437 bp, Homo sapiens
  misc_feature 19: n = A,T,C or G
gggtaccgggccccccctngagagtacttctagaattaattaaggcgggggaggagagaagttattaacttcttaaaatcatgttggatttttccacttgtataatcagcatatattatctttgagattaaaaaccaattaagaaaaagttactttttttctatataaattctcctgcatcgcaccctgaaaagttttactcaaaattgaattgactttcaatactgaaagaaacgtggtatactatggaatcacactagatgaatgtatttccaagtaaattgcagtatatttcattatttccatttctttggcatatatgtgtggcattcaacttttatattttcatatttttgtttattgactaactttataaaaactagccttgttcaaagcaatgcatatgtgaagttatggtttggtgctatagttaccgt

SEQ ID NO: 16665 - DNA, 587 bp, Homo sapiens
agtacttctagaattaattaaggcgggtggaggcaatggtagcatttctaaactttccacttccttactgcagtggttctcaggtttctctttgtgaaatatggtacactatcctcacattgttatggataacatgaaatacactacatatgaaagctctttgtaaactgaagatgagatgtaataataatgttttacatatgagttgtaataataatgttttaattcagtaaaaattactgagaatttactacctgctgagcactgatgaatatgctctgtttattttgttttcagcaacatcaattgaaaaggtattaaaaacatctgcttcaaagaactaggctgttattctctaggttagaatgtgattctgaaatactgagatataaaacttttggactgggctgtaaatactgctgaatattcatgccttaggtaagaagacggtccaagcaagatatctggctacatgcttgtctgtcctatgttcaataaataaagtctataaatattacttagtaaataaaatttctatcttttaaaatgtggcactatgtacttaagttataaaatggggaaactga

SEQ ID NO: 16666 - DNA, 499 bp, Homo sapiens
  misc_feature 18, 23, 26, 30, 32, 35, 41, 44, 45, 46, 48, 61, 62, 71, 75,94, 106, 108, 111, 112, 113, 114, 131, 136, 154, 162, 166,167, 169, 488: n = A,T,C or G
ctggccgtcgttttacancccgnaanaagngntanccatgntgnnngncgggccccccctnnagagtactnatanaattaattaaggcgggggntgtagtgagccnanatnnnnccattgcactccattgngggcnacggagcgaggctccatntcaaaaancaannanagtcaactgaagctttgagagttaagggacttacccaaggccatacactgaaagttgagtggttcagccaggattcaaactctgtcctgtctgattcctccacccacaggtgctttttggggttcattcctgtcttaatctgtgcctaatattggctgaaacaatgttagcctaattcctttcaagcacttctatatcacacaggagtgtaatttgaaaaagtatattcgacatgacaatatgattttatagttagcaaaaagaaaaaaaaacagtattttaatgaaaagtcagcctgatgaaaacctggctggcttanttctttaaaat

SEQ ID NO: 16667 - DNA, 305 bp, Homo sapiens
  misc_feature 30, 32, 36, 38, 44, 45, 47, 52, 54, 55, 57, 59, 62, 64, 65,66, 69, 70, 72, 75, 82, 83, 88, 89, 90, 91, 94, 99, 101,105, 106, 119, 120, 121, 126, 159, 178, 215, 244, 264, 270,276, 282, 286, 296: n = A,T,C or G
agtacttctagaattaattaaggcgggagnanctcntnaacctnntnggcgnanntngnaangnnnctnnancangccactnnacccnnnntgncacancnagannctctctctaacannnagacnaaaagaatatgtgattaattagtgggctaaatnggagaaatgatgcttttgnctttctgcacaccatctacatacagtgtctacaattnaagtgaaaagattcttttatcgtggactnaaattgaaattatagcatcngcaganagcttnttgtcnagcnattaaacatntttcaggaa

SEQ ID NO: 16668 - DNA, 400 bp, Homo sapiens
  misc_feature 8: n = A,T,C or G
agtacttntagaattaattaaggcgggggctctcaatacaaacaaaccatattgatataaatgtaatttgcctatgaatacaatgcatgtatccataatgaccatgtctaaccacataaatattagtttaagcaaatccaaaaacaaatgcggaaaacactttggttggaaaacactttcttctcctttccctcattttctaggcaaggctcctacacttcgggctgcagctggaagtaaactgtttcatatggaaatgaactatttcttacaacataccatgctaatcacgcttacaaggcattttttcaccatttggttacagagaaagaagctttgaaaaccagcagcttgttcctaatttaaacttcccaaacccacacatcctcacataaaggaa

SEQ ID NO: 16669 - DNA, 559 bp, Homo sapiens
  misc_feature 43, 52, 57, 60, 64, 65, 73, 77, 87, 91, 95, 97, 99, 101,109, 110, 117, 128, 134, 220, 295, 531, 559: n = A,T,C or G
ggccccccctcgagagtacttctagaattaattaaggcggggngggaactgngtctntgnaatnntccatagngaanaccttcgganatantatnancnanaaggatanngcttcanactgttactgnttgganatcttcattaataaaaatggagaagtgggagaattggttgggtacagaaggtgatgaccgtggccttagacttcctgaggtctgcngtggtggtgagccacactcatgccagtggatcatggtcatttgaactggagcttagtataagaactgaggctaanataaaagatttcgcaaagcttccaaaagcaaagcatagaacaccattctctgagggaagaaatacaggggaggaacagaagactaagaactaagttttatgatataccattagtagagaaaaagaagttagtaggttaaacagaacaaaggaattcaaaatgtttgaaatttctgggagacagaaaaggagaagattttggagggagattgtcatcagtgtcaaaagtgttttgangagtcaaagaatggaaagttgaaaagcn

SEQ ID NO: 16670 - DNA, 434 bp, Homo sapiens
agtacttctagaattaattaaggcgggaggataattagaacccagaagttcaagaagagcctgggcaacagagggaaactgcatctctacaaaaaaaaattttaaattagctgggtgtagtggcacatgcctgtggtcccagctactcaggaggctgaggcaggaggatcacttgagcccaggagttcaaggatgcagtatgcagtgagctacaatcacgccactgtactccagcctcagacagagcaagaccctgtataaaaaagaaggtaatcttgctctacccaaagtcaactttctcaatacagtctttatcctgggacaaaactctgaaaaaaattctacctctggcacccaccttatatgggtgtgcaagcctgggagtggatggagagacaggagcagatgacaaatgcagtacaggccgagtgggc

SEQ ID NO: 16671 - DNA, 392 bp, Homo sapiens
  misc_feature 383: n = A,T,C or G
agtacttctagaattaattaaggcgggcatggtggtatgcgcttatactcttggctactggggaggctaaggtaggaggactgcttcaggtcaggagtgagctgtaataagccatgatcatgccactacactctagcctgggcaacagagcaagaccttgtcgagcaagaccttgtcaagcaaaaacaaaaacctaccaaaaaaaaccaaattattttctagattgtaccttacctagactctgccaaggactagcctaggaaaggagttatgactgtatcatcactaatctattccccctactataagaaaaaaactcaagccacagaccttacatatgctggtggcactgttgctccctgccccaaggttagtattattgntatattcct

SEQ ID NO: 16672 - DNA, 417 bp, Homo sapiens
  misc_feature 227, 348, 368, 392, 401: n = A,T,C or G
agtacttctagaattaattaaggcgggatcatggaggtgaagaatctgttatctgatgtaaactgctattccatgtgaggtgaatgaactctttaaggggtgccacttagttcatgggcaaagataatttactgaacactacccagtcccagaggctgctgaattcgttcaattcgactaaacagactgttctgatgtacttgtttattccttcttgttcatccaangctgtgtctaactcattagtaagaaatgacaccgtgttagccaggatggtctcgatctcctgcctcgtgatctgcctgcctcagcctccaaaagcactctactaaaaatataaaaaattanccaggccgtggtggcaggtncctgtggtcccagctactctggangctgagcangagaatggcgtgaacc

SEQ ID NO: 16673 - DNA, 218 bp, Homo sapiens
  misc_feature 87, 191: n = A,T,C or G
agtacttctagaattaattaaggcgggtgggaaatgcccagccacaaggtgatacagggcaccttcttctgtgccgctttcttctgnggaggaagtcgctcaagtgatccccagatgctattgttactgggggtattatgctccccaaatactgggtgtttctgggatacagcatgttccccacatgctantgggttccttaagatgttaatatgttt

SEQ ID NO: 16674 - DNA, 409 bp, Homo sapiens
agtacttctagaattaattaaggcggggggtgcggggaactagtttcctataaaatgaaaacagtttcaaaaacattttttaagttagtaagactccttcaaccaaaattttatttttaaatttcaatttagcattgaagggcatctatcatttagcaaccaaacctcaaaccacttcacccagtaatataatacaaccgagtggttcttaaatatgaaaacagaaattgaatacagtgtacaaatataaacacaaaaacatttcaccaaaaagtatcagtctacctcaaaaaatgttgaaattatctaccaaggtttcttgattactttagtagatataaatttgagcaactacaaataatatctcctccatctgtagctctctccttagtatcaaaatatctaacaa

SEQ ID NO: 16675 - DNA, 295 bp, Homo sapiens
agtacttctagaattaattaaacaggatacactatcatcttgcaatttatagtgtgtaaggtaatagagccttgacaaaaggagaaacaaaaagcaaaaaatctaccactgtttatttagtactgagtattccatccacaacctacctacctacaaatacgtatgcatacgcgtgcgcgcgcacacacacacacacatacacacacgcacgtgttagaaagttaaatggtttaacaagatttagaaagatgagcatcagacccccgccttaattaaggcgggggagggggaaatg

SEQ ID NO: 16676 - DNA, 433 bp, Homo sapiens
agtacttctagaattaattaagccgggttgtgcaaacatcctgtctcccattaaaatgcctgagtgagcttagtccaaactgtgggttcatggagatgctataagaaaagactaatatttagttaatggcattttggttttttgcctgcagaatcaaactaagataatcctttgctttacagttcagttcttagtgtttaggatgtcagtatttcttaggcaatcttgattacacctgatttatatcagtgacctgctctgtacagctgacatctcatgaaacagctcttcttgcattatatgtaaaaggaatggaagaattttaaaatatgagatgcacttgatgaaattcctttttccaaattctaggaaatgaaaatatatttactttcacctagaaaatttttgactctctgattcttcttacaaaaaa

SEQ ID NO: 16677 - DNA, 809 bp, Homo sapiens
  misc_feature 551, 593, 597, 606, 608, 686, 705, 708, 723, 757, 792: n = A,T,C or G
agtacttctagaattaattaaggcgggattagtcagatgtggctggagttcagcacagattgaagctggctagggcacaaagaaatgtggttgaaaatctaggctttgactaacaatatgtttatgtatataaaatgtgttatataagttttgaaacaatgtatttgctcccctcctaggttttcttttacttcaattccaaaataatatatttgttaaaactctgaaaaggcccagatagtaatgcactttatgtgatgcacataacacctaatttaggttcagtttagtcaacaaatcattatcctcaagcactgagaaatttctcacttgcagatgaggcacgagggggacagaaattcaatccagaatagcagggtaagtaacccagtttccaatagcagtgacattgtgagcagagtgggcaataactggagacatggggggaaatccaatggccactacaggacactgtggatggcaatatttcactctggaagacacatttccttcccagcagagtacaaccgcaggggcatgctatcaaccanggcttagtttaactaagccaggttttttgatcattcagagtnaaanatgggaatntnttccaatgccaaagaatcaaagaatattcctcctcggtattttaaccttggcttttggccaatttcattttctttcgngtttggaaaattattttanttnaagcattcctatttnattccaaccgttttggtactggcttacccccaangggaaacaaaaaattttagttttaaagactatttnagggcccttaaaaaaaa

SEQ ID NO: 16678 - DNA, 652 bp, Homo sapiens
  misc_feature 505, 578, 579, 594, 607, 626: n = A,T,C or G
agtacttctagaattaattaaggcgggtccataagtatagttacttaagtcataacatcagaaatagacttggaatgaaaaagaaatatgtcaatatggtgtctacatatttttcttaaatatgaaaaaataaaagtcaaattattaaaatgaagtggtaggtaacatatcacttttttttagtttgtataatgcaggactttaaaagctatttattaaaagaaatgaaattacatttttattgttcttcaagcctcttcaaggccattctttcaaactaactttagatactcatttattctacacttgattcattactgaattttattccagttctttgcccttgtgtttgaggtggtcatctcagatgggttagctttttttcctcatgaaacatttttctttatgttgtaatgacttcatattttctattataaattctttggaagttagccctagtaaaataaaattaaatctaattttctaaaatgtctttataatttgnactcagttacccttgatgggtaagccagtatttattggaaccataccaattctaaaggaaaaatggccataannttaatctggtcctcnggaaaattcctcntcttggtaaaaaatttctnaatcttatcaaaggtttaaaaagaaa

SEQ ID NO: 16679 - DNA, 228 bp, Homo sapiens
  misc_feature 38, 42, 44, 50, 71, 86, 89, 90, 98, 109, 117, 126, 139, 155,168, 191, 200, 211: n = A,T,C or G
agtacttctagaattaattaaggcgggagctgtctgcngtananggggcntccgtctcacatcaatggganaattaatccatgtcnatnntggatctnaatgtgactgncataacantagagctgngtgaaaataatanaatagaatatctcagntcacgaagggatngctgcatttgactgaattaaaancaagaactnctgtacatcanaagacatcagaagtgaa

SEQ ID NO: 16680 - DNA, 207 bp, Homo sapiens
acttctagaattaattaataaactcaatttggatataacatgtgactaccagatggcttcacagaatcatagtctagactaatagaaggaggaggttgagaagagggagagtgctagtcttacattattctgcaatgtacaaagttctgtacacaatgctacacccagggtattgtgttcagttccagttgtcacaattgaaaacga

SEQ ID NO: 16681 - DNA, 432 bp, Homo sapiens
  misc_feature 334: n = A,T,C or G
agtacttctagaattaattaaggcaggagtttaagaccaccctggccaacacagagagaccccatctctattaaaaaaaaattattaaaaataaattaacagggaggaataggcctggaaaacctgtgttgtcctttattggtaattaaggtagttttttctacattaacattttcctgtccaggacccactgaacgtcccctacatcaagaaacttccttttatttgacagaataggcctgttgaaacaatgttgctctgaagtatcaacagtgcaaagagaaaattaacaaaattgagcaaaggtctgctatatgtagcaatttgtttcttncacaagaggatgtgtttttgttttttctgaaccctttctgaacactgtaacattttcaaatgcaaagatatgtgagaaatctaaggtatggcttttaa

SEQ ID NO: 16682 - DNA, 403 bp, Homo sapiens
agtacttctagaattaattaaggcgggggacacaaaagctgtttctagaaacaggtgtgagctgacctctgcttttaaggtttggggtccaggcactactgtagaatctcaggtagcctcccttctcccttggaattagaaaaagggctgagaggccaggcgtgctggctcacacctgtaatcccagcactttggtaggcctaggcaggtggatcacaaggtcaggagatcgagaccatcctggctagcatggttaaacctctctactaaaactacaaaaaattagccaggcgtggtggcgggcgcctgtagtcccagctactcaggaggctgagggagaagaatcgcttgaacctgggaggcagaggttacagtgagccgagatcgcaccactggactccag

SEQ ID NO: 16683 - DNA, 367 bp, Homo sapiens
  misc_feature 342: n = A,T,C or G
agtacttctagaattaattaaggcggggaagctagggaatgattcgcagcactatgggactggcaaaagaatccagaagatgacatactaacacttgcagttaccaatatgttgttaaatattagtgtctggggatctgttaggtagagataaaacttaatgagataagacggaaaattggctatatctgacaagtagccacttcttacccactaaattttctatattctttctctagttcttaaggtgcctcctagtgatatgattcagcacaatataatgcactgttacttcacatttgggaatttattcacataaaatcctaaaagaaatttaatcaanaaaaaaaaaaaaaaaaaaaaaaaaa

SEQ ID NO: 16684 - DNA, 444 bp, Homo sapiens
  misc_feature 313: n = A,T,C or G
ctcgagagtacttctagaattaattaatatggacaatcaaagtttgagtattataaggtggctctctaaagttttctgagctagatgtattccaattgctgattaattcctgaaactgtgcttctcttaagtgtttcaagatggtttagaatgataacttcatgaatattgggtagtaaattacttactaattaaatggtgttagaattacttttgaatagtggtagacaagggttagtaggagggtatttatttctccatggacaaatttggccactgtagggagacatcaaactaaagtaaggctctgcanagagggatgattcatacattttgtgctttctgatgataggagttggcagttttttaatgcttaaagaggaattacagagtttactctttcagaccaaacacttgataatctggttaaaaatttacaaacta

SEQ ID NO: 16685 - DNA, 252 bp, Homo sapiens
  misc_feature 19, 22, 25, 26, 27, 28, 29, 33, 37, 39, 41, 42, 46, 51, 70: n = A,T,C or G
gccgtcgttttcaccccgnaanaannnnnaccnatgntngnngccngcccnccctcgagagtactaatanaattaattaaggcggcttgggtgaacagtttgaggggtgagcctggagatcattagataacaattatgacttaaaattatttcaagagctgacttcgaataaggcaacagattcccccacctgccttccttaaagttatagagaagaccagaagcaattcaggaatgggaaaaaaaaaaaaa

SEQ ID NO: 16686 - DNA, 248 bp, Homo sapiens
agtacttctagaattaattaaggcggggaggaatggaggttccaggatggctcacaagcccagcagcttaattcagccaggctccttggctaggagttagtgcgcagtgacatcaatgagcaacacatggctcatatttatgaacgtccaggccaagttcttctttcatacagagaatggcagaaagctaaaacttgttaataggtaaaacaatgaatttaaatacagtattggctaataaaactgtt

SEQ ID NO: 16687 - DNA, 422 bp, Homo sapiens
gaacaaaagctgggtccgggccccccctcgagagtacttctagaattaattaaggcgggtccctgtaatcccagctacttgggaggctgaggcggaagaattgcttgagcctgggaggtggaggttgcagtgagcagagatcccgccattgcactccagcctgggggatagagtgagactccgtctcaaaaaaataaaaataaaaataaaaataaaaaaattaaaaataaataatgaacaactgggttcatctaggaatacaagtttgcttcaatatttggcaattagtaattgtattcatcatgttaatagatgaatgaaggtaaaccgaatgctaatcttaataggtgcagaaaatatttgacaaaatttgatatccattcataatagaaactattaatcaagaaaaaaaaaaaaaaaaa

SEQ ID NO: 16688 - DNA, 788 bp, Homo sapiens
  misc_feature 4, 23, 35, 36, 40, 43, 52, 53, 54, 58, 72, 80, 91, 104, 106,109, 110, 114, 115, 116, 127, 128, 129, 130, 132, 133, 135,138, 140, 144, 147, 150, 154, 158, 159, 162, 171, 174, 181,183, 187, 190, 195, 197, 200, 208, 209, 218, 225: n = A,T,C or G
  misc_feature 228, 249, 259, 261, 264, 268, 269, 271, 277, 279, 282, 285,288, 303, 321, 322, 323, 326, 331, 337, 340, 363, 365, 369,376, 379, 380, 381, 382, 386, 389, 390, 391, 394, 396, 397,399, 400, 410, 411, 416, 558, 617, 626, 655, 673, 692: n = A,T,C or G
  misc_feature 697, 704, 711, 731, 734, 736, 740, 760: n = A,T,C or G
aganaactggccgtcggcttcancccccctaaatnnaagnaancctggctgnnnggcnggccccccctaganagtacttntagaattaatnaaggcggggaacncnaannatcnnntcatattctgnnnntnncnttncnattnccntantagntgcnntcnaatgaaaanacnttcttcntntaanagnaaaanantanattattgnncccttcccntgtgttnaanatatactctgacacaaatttntttaccaggnangcnattnntnccttantnccnttnaanccttttttatttaantttttacattaacattannntgnggaanaaatcnttnattatgatgggagatgacagttntntcantccattnttnnnnattnggnnnatnanngnntctatcaccnnttacnggaaattccatcacttctttgttgtactaccattccatctttgtcataaattaggtgatcatatatttgagagtctccttctggacccttaacaattaattttatatattgacttgttatgaaataattttacaaaattctntaattctggataatttgtaaataattttaaaactttctatgtataaaattatgctattnatatataanaacatttgctaatatgcatgaatacttgntcaacttattcacatcgnctttctgaaactgaatttnttggnggaaaangttaacnctaatttattttcccggganaanancacnctaatttctattcatcttgntcccttttcccattttatttacttaaaa

SEQ ID NO: 16689 - DNA, 371 bp, Homo sapiens
  misc_feature 16, 35, 36, 37, 39, 41: n = A,T,C or G
aaaaaccttcctgaanatggtttatcactctaaannngnantgggtttatgttcatacctttcttaacccacaattctatccctgggacatctgccccaggaaatactcaagtggtgcagacaaagataggagtccaagaatgccatcgacatggttgttggattgcaaaccctctagcaacaaagtaaatactcaacaataaacctctggtgagttaggatatctccaggtaaagaatattctttagatgttttaaaagtcattttaggccgggtatgatggctcacacctgtaatcccaacacttttgaaaggccaaggcgggcagatcacttgaggtcaagagttcaaggaccagcctggccaacatg

SEQ ID NO: 16690 - DNA, 481 bp, Homo sapiens
agtacttctagaattaattaaggcgggatggcagtgagacgcagtgggtcataaaaagtgagagctttggagcttaaaatacctacatgtgatatcagccatctatctaagtgatattgggcaagtgactattctgaggctccttagcttcttatcagaagaaatggaaacaccacctccattacaaaggaggtattatttccattatgagatagcacaactaaagtatctagttatagtaggcattcagtaaacagtgtatctttcagttctgttttctatatcatctaaatgaaatcacacgaacacaattctgtactaccactctacagtttctaagatagaaacaacacaggcataaagggttcttaatttacaaatgtacctcaatattagagttggattacagtgattttgttaaataaagccaatgtatattcaatggcctgaaggatctttatttaaaaaaaaaaaaaaaaaa

SEQ ID NO: 16691 - DNA, 623 bp, Homo sapiens
  misc_feature 524, 578: n = A,T,C or G
agtacttctagaattaattaatacagccacagcctagctgagattctccccagcaactaggaagatgggtctgcgtcacctctcaggtactgaggagaccagctgggcaagatcttcaaaagctaatgatggggaccagagcaaaggtaggagtgtggtgagaatacagtggcctagccatgcagtgggatggctgggtacacaaatgctagctattggaattggattttctcagccaatgagaatatctacttggggctatttgcttttttggctaattaagaatggtcccaggtcaaattctgtctggaaagttggccactgagtaccaaaattatactttaagtaaatgtagcaagctctgaagggagctaacatccctgaaactgactcttaccatatgctggctctgtcttcaaggttctcagagttgctgtggttttatttgtcattttaggaaagggaagagggaattgattggatatttccttccccatgtgaggaaaaggaacattacttattgnttctcttcaaatcaattaaaagacaaatcatggctggaagactttgatacttanatcagatttcagaatctacttgtttagtatcttattttcccattt

SEQ ID NO: 16692 - DNA, 308 bp, Homo sapiens
agtacttctagaattaattaaggcgggagaatcgcttgaactcgggaggtgcaggttgcagtgagccagggtcgcgccactgcgcttcaacctgggtgacagagcaagactctgtctcaaaaggaatgacctgtgtagctaaaatataatgagcaaaatagaaacatttgaaatgaaatagtagagaaatgtattcattagcggcaaaattaatcaatatgggtataattttgattaaaatataaaaccagaattctactcttcaaaaaggcctgggattacaggcacccccccacgcatagctaatt

SEQ ID NO: 16693 - DNA, 782 bp, Homo sapiens
  misc_feature 30, 44, 45, 57, 62, 80, 112, 175, 188, 216, 217, 262, 290,291, 293, 294, 299, 318, 323, 328, 330, 350, 354, 356, 376,389, 390, 391, 392, 406, 417, 426, 434, 436, 442, 447, 448,451, 452, 462, 463, 476, 478, 481, 483, 491, 493, 513: n = A,T,C or G
  misc_feature 517, 520, 522, 526, 536, 555, 565, 570, 572, 573, 577, 580,584, 585, 586, 588, 598, 600, 603, 607, 611, 612, 613, 614,615, 619, 621, 625, 626, 627, 628, 629, 638, 639, 640, 643,645, 648, 655, 656, 658, 659, 661, 663, 668, 670, 671: n = A,T,C or G
  misc_feature 675, 684, 690, 694, 698, 699, 700, 704, 711, 715, 716, 722,724, 725, 734, 735, 737, 740, 748, 749, 751, 753, 754, 760,766, 771, 777: n = A,T,C or G
agtacttctagaattaattaaggcggggantgcctaccaatatnnttaattcttacnactangaaatttaaagtcttcanaagaaatggctcaaaaataaagaaagtataanttaagggaggcagaaagaattgccaaatgtttgaggcctacagtgtaccatacaccatggtangggcttgacatangatatcccatttcatctaaaggaatctnnatcagacatgcaaagaatgtattattatcatcagttttgccaaanaggacacttatctttaatcacatatcanntnntcgantgaaatgggattcaaaccnaatgntttcncnccattttatctccctgcggngatnanaaattttaaaaaaaaaaaangggggcccccccnnnngggggcgcccaccnccggggggaangggcaatcnccctattncntttttnaaaannaannggcccccccnntgggggggggggngnttntnaaaaaaancngggggggcttggaaaaaaancctnggnantttnccccaaaatnatttttttttaaacccatntttttttttncaaanannggcnggnaaannnanaaaaaaaccncnttnattntttnnnnntttncncccnnnnnggggggggnnnggntnggnccccccnnannananaaaancnncccnttttttttnaaaaantggncccnnncctnttttttnggannaaaaanannttttttttnngnagngggccccnntncnnaaaaancccccncccanaaaaanttttt

SEQ ID NO: 16694 - DNA, 441 bp, Homo sapiens
  misc_feature 92, 319, 369, 372, 375, 383, 392, 393, 399, 400, 412, 414,421, 441: n = A,T,C or G
ctagaattaattaaggcgggcgaatcacaaggtcaggagttcgaggccagcctgaccaacatggtgaaaccccgtctctactaaaaatacanaaaaaaaaaaaaaataaaagagtatgttgtccagtccatgcatgatatgtggttgtgcagtttgtgcatttgtagcaccctcaaagaaaggtgcatgtccttctccaaacaaagacccgaaggcaagttccatgtgttcttaccctcagtgaggcttatgtaattgttttggagattaccagaaaggttaatattaacagcttgttttaaagttcacctttaacatntcttgcccctttctattttgattcccggggaatacacctatcatgggcantanttnactttaangtggaaacnnaatatnnttttattacaanangtatttntttatgtttttgataaaaan

SEQ ID NO: 16695 - DNA, 380 bp, Homo sapiens
  misc_feature 7, 25, 45, 46, 48, 52, 55, 75, 110, 117, 144, 175, 188, 208,238, 263: n = A,T,C or G
agtggtnaaatgagacatttcctangggtagaggtacaaagctannanaganggnaacccagactgaattttacnttccttatttccaactcctctcgatgtctacctgnaaacctntccaatctttaagcattcaactgcagngaaatatcctctggggaccttctgggacatnccaagacagagtncatcacccttttttaatagngtcctgtacttttcttatctttctattggngcttttaaaacatattttcttgcgnattaccttcacatgcactgtgaacaccgacaatttaatgtgtttttgtgcatgtgtatgcatgcacgctgaataagttccttgcatgctaaaaaatgtttcaacctacaaaataaat

SEQ ID NO: 16696 - DNA, 387 bp, Homo sapiens
agtacttctagaattaattaaggcgggattccagctacacaggacaattcactgtcctaggaacatgctttgcactttcctgcctttgtatctttgctcatgttgttcctatgtctaaccttctctccctgcttgttcactcagaagaaccatctttaaggttcagcataaatatcatatttacaaaaagctgcttcctgatttctaccatccccaagcaactgttttttctcatctctgtaatccctctcttatagcactcaagtcacaggattattgtgtgtccatgtcttccccacttgaccacgatccaattgaacacaaggatgtgtattattcacttttgtcttcacaagacctcagcagtttgatcccacagactttcac

SEQ ID NO: 16697 - DNA, 182 bp, Homo sapiens
agtacttctagaattaattaagtaagtgcattgcgggtatataggtaggcttcaagatatctgtggagtaatttcaaatgtattttggtttaattatttaaaatcctaaatctaaagattataaaataaaacacataacgtcctaccctacacaaaaaaaaaaaaaaaaaaaaaaaaaaaaa

SEQ ID NO: 16698 - DNA, 398 bp, Homo sapiens
  misc_feature 337: n = A,T,C or G
agtacttctagaattaattaaggcggggaaaaggtaatttaagaataataattggagatttaattactgtattctcaaaaactaatggaccaactagacagaaaatcagcaaggttaaaaaaagctagaacaacattatcaaacagctcaatctaactaatatacatactgagtaactacagaatacacattcttttcaggtgcacatataaaattcttcaggataggccgtattctgggccacaaaacaaggctcaatttaaaaactattgaaatcataagtaggttctctgaccactgcggaatttgattacacctctgcaacaacaaaaatcanagaaacttgtacacatatctcaaaattaaccttctatttaacccacgggtgaaagaagaaa

SEQ ID NO: 16699 - DNA, 435 bp, Homo sapiens
agtacttctagaattaattaaggcgggaaaactgaggcgcagagacgctgtataagtcgcccacataactagaaagtggcagaaccatgattagtgattctggctccagagccaacagttctaactagaaggctacaaacattcatatgcactgcaagcagtatattctatactctctgcctcttgttttccccatgtacatgctctaaactccagaactgtgcacagagccatagccatgctatgttggacagacaaaatttgagaagtatgatgaataaattatcaatatcccccataaatatggtaagaaaatgtgaacctggtagtctagatatggccgagcagcagaaataaaatgagatcatcatattccttgagattttaaaatatctatctttcaccaatatataaagtcctcgtctcccagactat

SEQ ID NO: 16700 - DNA, 416 bp, Homo sapiens
ttacattaagggggaaaataataatgatgttatgagacacatgtggtatctattactgaaagtagtgtttatcaaaatatttagtggcaaggaaatagaaaagaaaaattagagtatagaatagtagctacagaatgaactcagcaatgtaaaaaatattatgtctacatacccattacgtaaaaccattagttttctaataacagttttagattgagaggagtaaaaacacgattaatgccagactaaactattatatctatatgctttattttctgtcctgttacatttctaagtgttttttgttgctctcttttccatggatctctttttaaatttctttctgctttttaagaacgtttaaatcactttattttaatacattagccacatcttatgagattttcttttaatcc

SEQ ID NO: 16701 - DNA, 383 bp, Homo sapiens
  misc_feature 356, 357, 358: n = A,T,C or G
agtacttctagaattaattaaggcgggggagaggcctcacagagaagaggacctgcgcgtaaagtcctggaggaatcaaagcagctttggagatctctgtactagaatgcactgaagggcagtctctttacaatgtcatccatcactagatagtttaactgtactcacagccctctactcaaggcagagaaaatgtggctggcccaatctggacctcgtttaatcatgtatatgctgtgatctgctggtcttgtgcctggcttgctcaacccctgtcccaacactgtcccacctgctataacaaggtacaccacagattgtgctcaaggagattttagatttcctttaagacccannnaaaaaaaaaaaaaaaaaaaaaaaaa

SEQ ID NO: 16702 - DNA, 346 bp, Homo sapiens
  misc_feature 15, 143, 202, 232, 244: n = A,T,C or G
agtacttctagaatnaattaaggggggagttggggaaagacgagtctgtaagagaaattttgtaacatttctgaaaaaagcaaacaaagtgggataagaaggcctgggaaaaggactggaaataagatgagaaggggcatttngtcatattaatgaaaaatgaacatttatttttacatcgatttttttcatctttaagaanatttgttttcatgtatgatttaaaattaanttccaaaattgngtaaattgacattttaagggaagtacttttctataccattatttgccacgagacataagttttctaaacttccttttccaggtcgggggtaaaaatttaagg

SEQ ID NO: 16703 - DNA, 417 bp, Homo sapiens
agtacttctagaattaattaaggcgggaaattccaagtctgcagagctcgctcaggttctgagcaccagagggggcttcctgggggccgctgaggactaacctgggcctgggtcagccagtacctgagtacgaggacgctgtccaaggctggggacgaaccacccaaaagatggccagaagccccggcactgccccagcagcggtgggaagggaagcgccagggagcagagaccttaaaggggcagaaaaccctggagaccagcacagctctgggtccacctgacagcttaagagtagcgcccaagccaggctcagtggctcacgcctgtaatcccagcactttgggaggccgaggtgggcaggtcacttgaggtcaggagttcgagaccagcctgaccaatgtggtgaaaccccgt

SEQ ID NO: 16704 - DNA, 530 bp, Homo sapiens
agtacttctagaattaattaaggcggggatcataaaatagaaaacatactctttctaaaaaatactgaagaaataacttcatgcattcaattttcatgtttcacattatacatactaaagagctaacatttattgaccagtgctgggtactgttccaagtgttttgcataaacatatttaataaatgcacaggagcaaaaatagtacaaaaaatccatagcaactgaacaaaaaataagtaattcacagttaaccaactgtctaggaattctggactgctttactaggtgaaatgttttagaagtctctacagtttctagttagaatttctgaactctgaatgcaattaggatgctaatacatttattcagcatttttattaaagatggataaaccttcctctatttctcaaagcattagaggactatttgtcagcaaaccatcttccactcttcttttttgacacattcacaatggcaaacttttggtctaatactataattcttccacatggttaacttgctgaaacc

SEQ ID NO: 16705 - DNA, 284 bp, Homo sapiens
  misc_feature 167, 169, 188, 189, 194, 195, 197, 212, 221, 225, 229, 230,234, 263, 270: n = A,T,C or G
ccgggccccccctcgagagtacttctagaattaattaaggcgggctgagaaaggcaaagttgtctaggaaaggtgattatacactactcagacaggtacaatccacaaatgctgttttttttgttttgttttgttttgttttgttttgtctgttttgagatgggttntnccatgtcgggccaccgctnntctcnnantcctgacctaaggtnatcccccangctnggtnntttntaaaaaaagaggtataaggctggacacantggttcntgcctgtggcccca

SEQ ID NO: 16706 - DNA, 569 bp, Homo sapiens
  misc_feature 299, 305, 372, 456, 475, 481, 483, 501, 502, 506, 511, 524,550, 552, 555, 559: n = A,T,C or G
agtacttctagaattaattaaggcgggaggatcacctgagcccaggagttcaaggctatagtgagctaggattgtgccactgtactccagcctggaggacagaccaagaccctgtctcaaaaataaataaatatatttatatacatataaacacaaaagacggactttttagggaaaaaggaaatattttgtaatacctgaatagaatatttataaagctgctcaaaattaaaattatatctaatatcttcaagccccaatgttataaatcagtttcctcgtttgtaaaacgaaaaacntcagancaatggtgaattctaaagtccatattcaattatctcaacacaattttcttgagccaaggacatttgnggtgaaacctagagccagcaggcttctaaagggtagagagaaagaaaacaccattctcttatgtctaggaagactggaagaagncctacccgaaggtagattntttctntntttccaccagctacatannaggnaagtnatttccccagatncctttggcgcaaccataaagcactgncnccnattntgataagatt

SEQ ID NO: 16707 - DNA, 516 bp, Homo sapiens
  misc_feature 33, 364, 500: n = A,T,C or G
agtacttctagaattaattaaggcgggggtcancaaacggttaaatctgatgatacctagtgggctgatataagtaatctcataggaaacaagaagagtattgttgcataaagaactaaaggagttctattattaagtaaataatgagtggatcttgtgaacaaacggagatgctggtgttatgtaagagcaaagaaactatgatgtcaggatcctttacactgttacgttactgaagccccccaaaaagcctctgtgtatccaagttatatctgtcagtatttgccatactgaaattaaaactaaaataattttaaatagttttaaaatgttacatgttaataacatgacttttctttgaaanaataactcttcaaaacaaaaaatttggttaaagaatagtggccactggtttacatttttacaaatcttcctaaaatggtctggttagtagaagaagaacaggattttcatattcactactctacccgtgtttttcnttttcattaaaagtac

SEQ ID NO: 16708 - DNA, 399 bp, Homo sapiens
  misc_feature 16, 29: n = A,T,C or G
agtacttctagaattnattaaggcgggcncctgtagtcccagctacttgggaggctgaggcaggagaatggcctgaacactggaggcggagcttgcagtgagctgagatcacaccactgcactctagcctgggcgacagagcgaaactgtctcaaaaaaaaaaaaagaattaaaaattaaaaaaaagaaaaagaaatgtcagttgagacatttctaagtttatgtgaaactgaggggaaacccattcttcacatgcattggtatatccgaagtattcctgtaatgtaaacaacagctacaataatgtcatgtcaatacatttggccaaatacctgactgtcactaaggcctgaactaaatagaacaaaatcttgaattcttacataaatgccaaagtca

SEQ ID NO: 16709 - DNA, 607 bp, Homo sapiens
  misc_feature 553: n = A,T,C or G
ctgggtccgggccccccctcgagagtacttctagaattaattaaggcgggatgtgaggcgatgaaaatgcataactccctcataacaccaggtttctctgaataatcgaagcctacatctttctccacgtttatagaattttatacgcacatttgaaaagttgggggaagaaagaaaggaagcttttaggtgcctgtagtgccactattctcccatagcattgaaattttctcctctattctgttattttctttggtctgttttcatcgttatgtttttgtagtcagcactattcattgtcatagatctcacactattgggtcagttgtaaaaatggccccataaaaagtagacacaaataacagcaagacaggcatttcaatggcaattctttaactaatatatacctcatatgagttaagattaagtatagcttatatatattaatatttctggtttatgtattaatacatatgacttcactttaatttaatgaaggactgatattttgcacctaaaggatatcaaatgtcaattcttctaattccattgntggtggaattaaatatatcattactataattcactttattttatttaataaaat

SEQ ID NO: 16710 - DNA, 374 bp, Homo sapiens
  misc_feature 31, 48: n = A,T,C or G
agtacttctagaattaattaaggcggggcangaccagcaagaccctancagtgcttcctacaccacagctcaccatattatctgctctcagtttaaagacagacacttgtcagctatcagctcagtggacccaagtatttcccatttacaaaattcagtgtattttctttttccctttaaggtgagggcaccagctggggaaggcattcccacacaagagaacactcaactgtcattactctcaaggtattccgtggtccatggaggctggtccacttgacaaagcttccaaggtcttgtggctttgagtttctttgaccagctgagtttctgtacgggagtttccccaccatccaaggcttccgtaaagctgc

SEQ ID NO: 16711 - DNA, 400 bp, Homo sapiens
  misc_feature 362, 369, 370, 375, 376, 381, 382, 383, 385, 386, 387, 388,389, 390, 399: n = A,T,C or G
agtacttctagaattaattaaagaatttggagtatgaagtgtactttctttttttgcctttttatttaaagttcatattgatttccatgaataaacaaaagcacgaagccagggtttatgcattcactttctgagcagaagggttcagccatgaaaaaccgaacttatctgtttgcaatatattttcttcaaattgggaacagatgcatgtgtcgttccagagtgtaggtaaaaaggactgagctctttactgaataacctcaactttcttcctttgaccattgtgacttttcttccatggaaggttatctgtcatctattttttttcccactgtgtgatcttaaaagatgaattccaaaanaaaaaannaaaannaaaannnannnnnnccccccccng

SEQ ID NO: 16712 - DNA, 420 bp, Homo sapiens
agtacttctagaattaattaaggcgggggtgcgtcgggggaacacaggtctcatacccatgaagccattcctgttgacccccgacttaggacatttaattcaaaactaaaagcatgattattttccttaatatgtagtatagtagaggtaagaaacacaaaatcagcactgggaacattttcaaggatccaggccttattctttttctaaaagagtattttttacaaattaagcatatgcctgcttttatgatatgtagaaacattttcttccagccatcttcctgcttgagaaactacattcccacttgccctaaactgtcaaggggccactttgagtcatctgtcttcactaaagcaaatctttcaaaagctaagtagcatcatttcacatttatttagcacctgcaggacactttgg

SEQ ID NO: 16713 - DNA, 297 bp, Homo sapiens
  misc_feature 19: n = A,T,C or G
agtacttctagaataaatnaaggcgggactctgtctcaaaaataaataaataaataaaatgcctttttaaaaaatgggccatctataccagctaagaagaatgtaagactcagactatcttcattactgatttatttctttggtctggaagcctgtcaatttttgccagttgaatatcagcaataaatagtcatcaagcataatgtttgaataaaaatgttattcttcaaaccaaaataaattcaagatgatttgagatcccaaacgcaaataaaatggtaactattaaaaagctac

SEQ ID NO: 16714 - DNA, 353 bp, Homo sapiens
  misc_feature 322, 334, 335, 337, 338, 339, 341, 343, 351, 353: n = A,T,C or G
agtacttctagaattaattaaagaatccaaaactgtttctttgtaaaaataattttgataatttcctagctaaggaaagcacaaatccatgaatctggaaataaagtgacacaaaagaagaaatttgaaaaatattcttgtaaaaatattttaaaatctacattaaatggatttttttagaaaatccaatttaacaaaatttgcccctatagagacagcaaatttaaaccggccaagtaacataaaataatcatagaaactagttaaggagttcccctacaaaacaaagcaggcccagatcgttttacagatgattctaccnaaaaaaaaaaannannntnanaaaaaaangn

SEQ ID NO: 16715 - DNA, 944 bp, Homo sapiens
  misc_feature 27, 29, 34, 36, 38, 39, 43, 45, 46, 48, 51, 52, 53, 54, 56,58, 70, 71, 80, 81, 85, 92, 94, 96, 97, 101, 105, 106, 107,109, 114, 115, 118, 122, 123, 124, 133, 141, 142, 163, 169,193, 235, 238, 286, 293, 323, 363, 400, 411, 453, 458: n = A,T,C or G
  misc_feature 484, 488, 500, 505, 564, 592, 606, 608, 611, 619, 621, 624,626, 634, 652, 659, 660, 663, 664, 666, 668, 669, 679, 681,682, 688, 702, 704, 731, 741, 748, 752, 767, 781, 793, 797,798, 813, 842, 844, 858, 864, 868, 871, 884, 885, 892: n = A,T,C or G
  misc_feature 893, 894, 904, 907, 910, 928, 937: n = A,T,C or G
tatgatgactggccgtcgttttacacncnggaanangnnatancnntnatnnnngncngtggttttcctnnaagaaaaannaaanacctttntncnnggcngggnnntntccanncanaaannnaaaaaactnctgacctnntgatccgcccaccttggcctnccaaanagctggggttacaggcgtgaaccntcgtgcccggcctgtacctacaatatttttaacctttagcantanttttttggaccggtgacataagattatcttattcatgtttcaattaanatttcanataagatttcatgcatatgtttcaacttanaacacaaaaaatttgataaagaaaaatctttgtattttgnattaggaaaggttcaaagacaaaaataacagatggtnataagaaattntcaaacctggaaataaagcccatagagagctttggcacatanattgnatcaccagagttttatttcttgagtntggnaaaaaaataaantaacntcacaattctaagcctgtttgaaactaaaattttatagccctttaaggggaaatggggnttttttgggacataaaggccacctttanaccagggcaagctngnttncccctaangncancnttgggaanccttagaaaaaacttggnaattttnnggnngncnnctaaattaanannaatttngcccttcttttccntnaccttacattttgtttttggtaaaaantttaccaaanggactancccngccccccgggaaaanacctttttcccttnttttaagggctnggtnnttcattttttaaaantaaacctttttttttttaccctttttttnanaagaaaaaaccttnttgccnggcntanttgggggtttaannaaggggnnngggttaaaanatnccntttttaaatttggtaaanaaaaacccnccccccc

SEQ ID NO: 16716 - DNA, 418 bp, Homo sapiens
agtacttctagaattaattaaggcggggggctagaggcctgtggggccatttctgtcctctaagctctagtctgatctcaccggcagctggtcacatgggaggacaggagatggagaacaaggctgacagtagggaggggagagcagagacaggtggctgagtttctctcacttagagaaaagaaactggctgagtgtataccacgtctgaaatgagcgaaagggaagattgcccaaatcctgtaaaggaccttttttgtggtattaatgctattcttttttatgtcaaaatgtttcaggtttacagaaaactatacagactaatatgaacactcacatagctgctatctaagtcatacttttaaaaaatacaggtttaaaaaaataataatacaaaagtgggtaaagcctcctgtgt

SEQ ID NO: 16717 - DNA, 426 bp, Homo sapiens
agtacttctagaattaattaaggcgggtggatcatgaggtcaggagttcgagaccaacctgaccaacatggtgagtccctgtctctactaaaaatacaaaaattagctgagtgtggtaggtgcctgtaatcccagctgctcgggaggctgaggcaggagaatcacttgggcccggtaggcggagcttgcagtgagctgagatcccgccactgcactccagactgggcgacagagtctctgtctcaaaaaaaaaagaaaaaagaaaaaaaaaggtcatcataataacacttaactcactcagcagttgtgagtacaaataaaattcaaatcctggaagtgtttgaaaaacatccacaagaatgacagaaaggagaagcacactgttgtttttgttagttttaacattcgtgtggcttttttcttcct

SEQ ID NO: 16718 - DNA, 436 bp, Homo sapiens
agtacttctagaattaattaaggcggggtagggatggttcctcaaaagttattataaagaaacaatcaaaaggaatagaggttagacagacaaacaaatgttgtcttctatggtccattcctcagctgtctgccacgtcttcagccttattaccaaactgtttgcaaaaaatggcacattcctcagctctctgccacctcttcacccttattaccaaactgtttgtgaaacagggcacaatataatacaatggctacaataacattaaaaatagataacttataccatataaccactataactaaaaataaatcaaagacctaaagatataaaactcctagaagaaaaggggaaaactgcatgacattggatttggtagtgatttgttggctatgatacaaaaagtaaaggcaatgtgagaaaaaaataaataaac

SEQ ID NO: 16719 - DNA, 257 bp, Homo sapiens
  misc_feature 1, 3, 30, 33, 34, 35, 38, 40, 41, 47, 48, 49, 58, 59, 61,64, 65, 74, 75, 96, 102, 231: n = A,T,C or G
nanactggccgtcgttttcaccccggaacnagnnntancnntgatgnnnggcgggccnntnctnnagagaactnntagaattactttaaggcggcntccagnattggaatggaagaaggaaaactatttgctaatgacatggtgccatatgtagaaaatcctaaggaatccacccacaagaaaaactagaactaaataactgttcagcaaagttgcagaatacaatatcantataccgaaaaaaaaaaaaaaaaaaa

SEQ ID NO: 16720 - DNA, 385 bp, Homo sapiens
tcgagagtacttctagaattaattaaggcggggaatatcagtgctactttaataatataaaaccctattttaaaagattatatcaaagttctttgtatcttttagagctgtggttttcaaattttgctgactacacaacaccatcagttaaaaatatttgtacacacacctatttacttacaaaatatacgcatatattgtggtgagtctatatattcagtattaataaagattgtattttcttattttcagataaatagaaattctaagcctgggcaacatggtgaaactctgtctctacgatacaaaaattagctgggcgtggtggcacacacctgtaatcccacctacttgggaggctgaggcacgagaattgcccgagcct

SEQ ID NO: 16721 - DNA, 411 bp, Homo sapiens
  misc_feature 378, 384, 386, 387, 388, 389, 390, 391, 392, 393, 394, 395,396, 397, 398, 399, 400, 401, 402, 403, 404, 405, 406, 407,408, 409, 410, 411: n = A,T,C or G
agtacttctagaattaattaaggcgggtgcctgtagtcccagctactggggaggctgagtcaggagaatggcgtgaacccaggaggaggagcttgcagcgagcggagatcgtgccactgcattccagcctgggcaacacagcgagactcaaaaaataaataaaaaataaataaataaaaataaataaataaaattgtaaacttgttttataataatatgtcaatcctttatttgcagcatgtatgcaaactttataaggaatggagtgatttgagatatagagtatgcatcacagtctcatttattcctaaattatatttcaaagaaaataagaatctatattaagtttctaaatacacattaaagttttatcaaaanaaaaanannnnnnnnnnnnnnnnnnnnnnnnnn

SEQ ID NO: 16722 - DNA, 456 bp, Homo sapiens
agtacttctagaattaattaaggcggggaaagagggggctgtcaggatttcacatttctcacagctggacaggaaacccttctttaaaggggaatctgagtctactacaggggtcatacattattcaaccctctatgttcaacatctgtttgaactccgatgatctgccgaatgcacatcttcagtagtaagataccaggacaccaaacaagactaaaaagccaaacttaactacaatagatgcgcttattttaaaaagcacgtagattattattatttctaatttcagttgtattataccgatattttaaatatgattatttatatgtttaaaatcttttatgaattgtaaaactgttatacaaaatgcattttagcacgacaaaacaatgcagtgaagagataaactatgggagaaaaaatttgcaaccatacacctgattaggggttaatatc

SEQ ID NO: 16723 - DNA, 301 bp, Homo sapiens
  misc_feature 32, 33, 35, 37, 43, 57, 88, 155, 159, 184, 195, 202, 213,266, 274, 275: n = A,T,C or G
agtacttctagaattaattaaggcggggacanncngntataancaaggaagctgaanttagaaaaatcatatttttaaggaaaaagtntcccaaaataattgataaatgaagcaaaattaatagctcaagaatagggggcttgtaggaacttaanatanaatgacaaatgacgaaacacggcanaaataaagtangtctaantgattcaaagnttcaatacaaaactaacatcaaaaatgaattttgcaaaaggagctatgtaatntaaaaatnntatttaaattaaattgtgtgggtcaa

SEQ ID NO: 16724 - DNA, 657 bp, Homo sapiens
  misc_feature 170, 483, 529, 538, 563, 570, 592, 619: n = A,T,C or G
agagtacttctagaattaattaaggcgggtgcagtggctcatgtccataatcccaacactttgcaaggctgaggtggaatgactgcttgagactaggagttcaagaccagcctgggcaacatagcaagaccccatctctacaaaaaatacaaaaattagctgggtatggnggcgcacacctgtagtcctagctacttgggagggtgaggtgggaggatggcttgagcccagcagtttgaagttgcagtgagctatgattgcaccactgcactccagctgagcaagagcaagaccctatctctaaaaaaataaataaaataaaatgaaaagtagaaaataaacttcatatatttgaacctttctcttcataatcaaagtctgtcagataattacttaactctgttttccttattctccacaatatttgagtactgtcttaagttgtcggaaaggaaaatcagctcataacaaccttctctgggntttccatatgcccacactgcattaagatgaccaataccagaagcangcatggtgngccatctgtagtcgcagctactcangatctanggtaggcggatcacttgagccnaatagttcatctagcctgacaatacancaaagaatcccattgctatttaaaaaaaaaaaaaaaaa

SEQ ID NO: 16725 - DNA, 433 bp, Homo sapiens
  misc_feature 55, 144, 146, 148, 162, 194, 238, 247, 319, 321, 342, 365,391: n = A,T,C or G
agtacttctagaattaattaaggcgggagagtttcaaagcaagtatttaaggttntcaaaatgacaatgacatgccatgctttcaaggaggctaacaaacaagaaaaccatcagtaggaccagtagaagaattctgtcacagtncnangacaaggatcttanagcctaacagagaaaaaagagagggctttcanaagagtaacactcacaccaaggaccaactttcaataaaaacagnggaaactanaagattaagtgctcataaaaaatacactgctaaactggaatttggtatcactaaaaactgaaaaggaaagtncntattaaataacagaaaatatnaattagaaggaaaattatagtcntgatagaatacatgtgattgcatgcnaatcatatagctatttaatgagtcatttgaaaccaaaaagtt

SEQ ID NO: 16726 - DNA, 587 bp, Homo sapiens
  misc_feature 363, 488, 543, 547, 550, 556, 574: n = A,T,C or G
gggtgccgggccccccctcgagagtacttctagaattaattaagacgggttctcttgggttttcaagtagttgtacaatcataatgtctgtaaatagtgctagttttacttcttcctttccaattttttaatttctctctcatgtgattgtcttggctggtactgcagtatagtatttaaaaatagtgctgacagtgacatttgttgtctgttcttgacttcagagggaactgtttatagtgcttctccattaatcactatactgagttttgggcagaaatatatacacacacatacatatatatattttcatggtacggaagcatctatcttctatctattcttattttactgagtatcaanaacactcattttctcaaatgcttccgtctcatctattaagacaaacctgtgatctttcctttgatgtgaaaacactgaatactgaaactggaataaatgcccccctcctccttaattaaatttgntttggctttatatgtaaaaagaacattggtgaaattttaagtctagtatttttcntgcnacnagaaanaaataatgaattttctgnccattttgggggc

SEQ ID NO: 16727 - DNA, 284 bp, Homo sapiens
agtacttctagaattaattaaggcgggaaagtgtgtagggattaatggagcaaggttagccaagagttggtaattattctacttttgtatattttgaaaatttccgttataaaaacatttttaaaaagccaccatgggctgggcacggtggctcacatttgcaatcccagcactttgggaggccgaggcgggcggatcacgaggtcaggagatcaagaccatcctggctaacatggtgaaaccccatctctactaaaaaaaaaaaaaaaaaaaaaaaaaaaggc

SEQ ID NO: 16728 - DNA, 403 bp, Homo sapiens
  misc_feature 40, 46, 67, 355, 367, 388, 392: n = A,T,C or G
tcgagagtacttctagaattaattaagggggatggataanatctangggtccatagtgataaagatntaagcacaggcacgtttacacttagccttgggcccagaatgcatctttattttgaaaaggtgcagattcctaatatttcagatttcttcgaaagtttgaataggttcttgctaaagcagagctactcacattttgcgtgtatttttctagattagcagcaggccgagatcaagatagtcctctgcttacttctgcttgaagacattactgccttgttacaaggtaccggttccaaagcagtgaataagacagtgaatgggaagatgtggggttttgtaaggaaatctnaaaaaactagtnctcttaccgggtacttttaancaanaaattggcacc

SEQ ID NO: 16729 - DNA, 231 bp, Homo sapiens
  misc_feature 8, 12, 18, 219: n = A,T,C or G
cctcccanagtnccagcngctgctctgtatgcaaggtcaccaaaaaaggaggctgccaggccctggagaaggggcagcaccaactccataggccctctaggctcccaggtggggtctccaagtccaagaagccgtggcctggagcagcttctccttctctgttgcccccacagcactagggatcgccccattcaataaatacaagttgatttgctgatnaaagaaaaaaaa

SEQ ID NO: 16730 - DNA, 202 bp, Homo sapiens
agtacttctagaattaattaacttgggaaatggcagaactgatacttgaaccctgatgtatctaaggagccctcatttctacctcactatgctccctctaagaaaaccaatcagtgtgcatacctatgtaacaaacctgcatgttctgcacatgtagcccagaacttaaagttaaaaaaaaaaaaaaaaaaaaaaaaaaaaa

SEQ ID NO: 16731 - DNA, 396 bp, Homo sapiens
agtacttctagaattaattaaggcgggttttcaattgtttgttggattaaatgcaaatcctgatgcctagcttttatgccttcctatcaacagtcttacccattcaacttcattttcactgctgtaattctaatctagctaaaacagtttccaaaatggtcccacatgttcaaaatctgctcaatcctacaggatttcatttcttctctcccacataaaatgtctcctatatgcttccactgcttaaatattaaactcctttcatagcacatctctgttaagcctcttccaactagctacatctaacagtaatcatattgctttatattcagtgttactgcattttggtctgaggcacatgtaactatttgtatcaggactagaattcttttttct

SEQ ID NO: 16732 - DNA, 447 bp, Homo sapiens
  misc_feature 439: n = A,T,C or G
agtacttctagaattaattaaggcattggatagtctctaagcctgtgtgtgtactgaattaatctattagctttgcatctaattcttcactttgaatttcaagtagaaggaagctgtttgcctctaaagtttaaaagccattgatgtgattgttaaacttggtattttaagccattccaggctgcagcctggctttcagtggtaccttctaaacatgcctcaatacaaatgatgctttgttttatgtagaaaatacgaagctgcttttgattattctgtgctgccactgcccgttttctgtggttgtggactatttaggaatttagtgcagtgactctcttgctgagctatggatatttggtatcttcttgttaacattctccaaaagtgtttcccaagcaacaaaacaagcagaaataattcagtataaaggtattgnatttttct

SEQ ID NO: 16733 - DNA, 360 bp, Homo sapiens
agtacttctagaattaattaagggggaaagaaaaaacagctttttagtcaggcagcaccaggcattcctctgcagtacgagtcctttcagtagtatatacaataaagttcagtaaatataacagggaaaagaaagatttttaaatagtgttgagaaaacaagttaacagttcagaaatcaatttagattcacccttccccacacacatgcacatacaacaaaaatactacaaacaaaatagagttgatagaagctaatcaaatcataggaaagctagcaaaagataaaattatttaacagatctttagagagcttttaaaacttcaaagaactgggatccacaaagaaaaaaggtatcaa

SEQ ID NO: 16734 - DNA, 413 bp, Homo sapiens
agtacttctagaattaattaaggcgggaggatcaggtgagcctgggagttcaaggctgcggtgaactgtgatcataccactgcactccagcctggttcacagagcaaaaccctgtctctaaataagataattttaaagttggaaacaaagcacaagggaaaacactaagttatgcaaaattagaatatattgatatcaataaccaaacattataataaaacccagaacacagaaagaggtaaattgttttcagtaaatataatgaggcttaggatctttacaatggaaaaaaactcatgcaaattgataagaaaaatgctaagaccttaccaagaaatcgacaaaggacatgaacagacagtttgaaaaggaggaactacaactagtaaacaaagataaagaaaactggcacc

SEQ ID NO: 16735 - DNA, 430 bp, Homo sapiens
agtacttctagaattaattaaggcggggaagcaacttaacatcttacttctgtgaactgatgacttggactagcacatcatcacatcctcactcccctaaacactgtcttaacaaaaaaaggatctaaatctatattaatttgacttctctaaaaactaaaagatgttgtatatgctgcatagttgagaatcatacccagttaacctttaaaaatgatgtagtaagtttgaggaacccagaagcaaaggctttgctaggcagagaagtggaagagtacaagaaattaacaccacctgtaaggttcgaagtgttatctcccttggctagcagagtgttcctttataaagaagctactctttgattaatagacttattgaatcaggtgaactaacatagttttagtaattaaagaattgcaaaatgttccaa

SEQ ID NO: 16736 - DNA, 379 bp, Homo sapiens
  misc_feature 32, 36, 42, 61, 66, 69, 76, 77, 84, 93, 99, 100, 106, 107,108, 123, 128, 136, 137, 139, 149, 158, 161, 162, 171, 172,174, 178, 180, 184, 193, 200, 205, 213, 225, 227, 228, 233,241, 242, 243, 244, 254, 276, 280, 281, 282, 283, 284: n = A,T,C or G
  misc_feature 285, 286, 287, 288, 289, 290, 291, 292, 293, 294, 295, 296,297, 298, 299, 300, 301, 302, 303, 304, 305, 306, 307, 308,309, 310, 311, 312, 313, 314, 315, 316, 331, 344, 353, 354,355, 356, 370: n = A,T,C or G
ccgggaccgggccccccaacccgaggggcttnaaancccaanaaggcgggaaggggaaaantgganaanagggacnnaaaaacnacaggagcnaggaannaccggnnnacagggacagagccncacangaaaaagnncnagagaggaanggggggaancannacaaaacannangaananaggnaaagcaacngaaccgncaccnaaaaaagnaaagggaggcancnnaaggnacaaggannnngcccaccggnaaaaaaaaaaaaaaaaaaaaanaaannnnnnnnnnnnnnnnnnnnnnnnnnnnnnnnnnnnncaaagggagcggaanacgcccccccacngggccgcgnnnnacaacggccggacngggaaaacc

SEQ ID NO: 16737 - DNA, 402 bp, Homo sapiens
agtacttctagaattaattaaggcggggttataagttattggtagacagccttaacttcactgaagcaaatttagaaaagtgtggataagtaccccccaatttaaaatcacaaagctctaacctttacttgacatacttctcttactttactcttataaatactctgcaaagtgagtattattgttcctattttagaagggagaagactgaagcttagaaaagctgatttacctatacctattaagtagcagtgctagtatttgaacccagtctgtgatttcagcaatttctattaactcagaaaaggggaacatgtctggaaacaaaaggacagtaatagcacccatactcctcttctagtctaacttaaatggtattagtgagttgcttgacttttaatt

SEQ ID NO: 16738 - DNA, 227 bp, Homo sapiens
agtacttctagaattaattaaggcaggtaggatggaattttggaagaaataaaaattttagttttagtcctctagtgaaattttattatgtggagatcagacctcaggaatggagttgatccagaagtttaaaaaaaaattttttttctgaaagcttagaagcagtctctaattgtgaagagtttcagtcacatctgactagctgtgagtaattggttaaccccccc

SEQ ID NO: 16739 - DNA, 389 bp, Homo sapiens
  misc_feature 294: n = A,T,C or G
agtacttctagaattaattaaggcgggggtaaaaagaagccactacaccttttaaacaactcttctcctgtcacctctcaggtgttttattttagtttggtattatatttaagaattctttcttagtggcatacatttcatttctgtgatcagaaatcagctacaattaatattttactgacttatttgatattctctgatggctgtatcaattttcttctttatccatgcatctctttctttactttggctgaagggataaagttttcaaaagggatatatgagtggaatcgnttttgaatcttttcacgactaaacaggtattttattttgccatcacactttattgatcttttgctctgtttagactttcatgttcaaatcccttt

SEQ ID NO: 16740 - DNA, 533 bp, Homo sapiens
  misc_feature 28, 31, 71, 124, 141, 147, 151, 159, 161, 165, 173, 178,179, 213, 217, 226, 227, 230, 231, 250, 284, 298, 325, 345,347, 348, 365, 387, 408, 411, 434, 454, 475: n = A,T,C or G
agtacttctagaattaattaaggcgggngtntctcacagattatatactccatgtatccactgatatcgtnaaggaaaacaaagctaaatctctggtgccagaagtcacaataatgactactcnagggtactggtaatgtncaaagngatnatgtggangnattnacttatanaaaanncactgaagggcatgaattcatagtggggcacttntctntttatgcgnntcnntaaaaattttatattaatnaaggaagaccatccctacataacaggcaataacncagttaaaactatngaaagtgaagagctttctaaaaatagngacaaacaaaaacattccantnnagcaagaaatttctganagggataacctatacacacttntgatacataccatatgggatncgntaccctttgcttctttatgaatnagccttatgacatttaatgnagttcaaatatttccaatagnaaatttaaccctgaaataattcaaggggttctaaaagtttcaccaggaagcataaaaa

SEQ ID NO: 16741 - DNA, 394 bp, Homo sapiens
  misc_feature 18, 20, 22, 25, 30, 39, 45, 47, 49, 52, 53, 60, 61, 62, 71,72, 78, 83, 84, 87, 91, 92, 93, 95, 97, 103, 107, 129, 136,137, 174, 207, 237, 344, 383: n = A,T,C or G
tggccgtcgttttacacncngnaanaaganataaccatnattatngncngtnnttttccnnnaagaaaaannaaaaanctttnntgntggnnngngntttccnaaanaaaaaaaaaaaaatcacaggantggagtnncccattctgaaatagaaccacacacattgccaactanttttcagcagaatgccaggtcaattcaataaanaaataaaaatctttccaacaaatggtgctngaataaccagaaatccataagaaaaattaaaaaaacctcatgccatatgcaaaacttaattttaaataagttataagcctaaatgtataaaattgtaaggcttttanaacaagacattgcagaaaatttttacaaacttgaataancagttatttgt

SEQ ID NO: 16742 - DNA, 205 bp, Homo sapiens
  misc_feature 32, 36, 37, 42, 47, 50, 51, 52, 53, 56, 57, 58, 59, 61, 64,71, 92, 109, 129: n = A,T,C or G
agtacttctagaattaattaaggcgggggccngccnncccanctacnctnnnngcnnnngnacngaggatnacttgagcccaccatttaccngccagcctatgcactgngcgacatagaagagactccntctctttatagtaccgcaaaagaaaagaaaagaaaaagtggccaggcgtggggactcaagcctgtaatcccagcac

SEQ ID NO: 16743 - DNA, 266 bp, Homo sapiens
  misc_feature 29, 32, 45, 51, 52, 63, 65, 66, 70, 71, 86, 93, 94, 99, 101,102, 105, 111, 119, 123, 131, 137, 139, 141, 150, 155, 167: n = A,T,C or G
agtacttctagaattaattaaggcggggnganagatgcaccaaanaactanntgagtatcttngnntggnnaaatgtgtggtaatngcattcnnaaaangnnttntttgtntttttttntgtncaataatntatatntntnaatcctganctcanggggaatacacnttttttgaaccaagtgtagtggctcatgcctgtaataatagctacttgggaggctaaagtggaaaagattgcttgaggccaggagtttgagaccattct

SEQ ID NO: 16744 - DNA, 897 bp, Homo sapiens
  misc_feature 30, 31, 35, 38, 40, 46, 48, 50, 53, 54, 55, 56, 58, 60, 62,72, 73, 87, 398, 412, 413, 414, 415, 417, 419, 421, 428,445, 464, 469, 485, 492, 495, 509, 510, 511, 514, 518, 521,522, 525, 526, 527, 528, 530, 531, 532, 533, 534, 535: n = A,T,C or G
  misc_feature 536, 537, 538, 539, 540, 541, 542, 543, 544, 545, 546, 547,548, 549, 551, 552, 553, 554, 555, 557, 558, 559, 560, 561,562, 563, 565, 566, 567, 568, 569, 570, 571, 572, 573, 574,575, 576, 577, 578, 579, 580, 581, 582, 583, 585, 586: n = A,T,C or G
  misc_feature 588, 589, 590, 591, 592, 593, 594, 595, 596, 597, 598, 599,600, 601, 602, 603, 604, 605, 606, 607, 608, 609, 610, 611,612, 617, 620, 621, 623, 626, 629, 640, 646, 648, 650, 651,653, 657, 668, 674, 683, 684, 686, 688, 697, 708, 710: n = A,T,C or G
  misc_feature 711, 713, 714, 715, 718, 720, 721, 722, 723, 724, 726, 727,728, 730, 731, 732, 733, 734, 737, 738, 739, 742, 743, 744,745, 746, 747, 750, 751, 752, 753, 754, 755, 756, 757, 758,759, 760, 762, 763, 764, 765, 766, 767, 769, 770, 771: n = A,T,C or G
  misc_feature 772, 773, 774, 775, 776, 777, 778, 779, 780, 781, 783, 784,785, 786, 788, 789, 791, 792, 793, 794, 795, 796, 797, 798,799, 800, 801, 802, 803, 804, 805, 806, 807, 808, 809, 810,811, 812, 813, 815, 816, 817, 818, 819, 820, 821, 822: n = A,T,C or G
  misc_feature 823, 824, 825, 826, 827, 828, 829, 830, 831, 832, 833, 834,835, 836, 837, 838, 839, 841, 842, 843, 844, 845, 846, 847,848, 849, 850, 851, 852, 853, 854, 855, 856, 857, 858, 859,860, 861, 862, 863, 864, 865, 869, 870, 871, 872, 873: n = A,T,C or G
  misc_feature 874,875,876,877: n = A,T,C or G
ctggccgtcgttttacaccccggaaaaagnnatanctntnattatngncngcnnnntncnanaaagaaaaannaaaattaattaatngcgggcccctgcagtcccagctattcgggaggatggggcaggagaatggcttgaacccaggaggcggaggttgcagtgagccgagatcgtgccactgcactctagcctggcgacagagtgagactttatcgcaaaaaaacaaaacaaaaaaacaaaaaattagccaggcgtggtggtgcatgcctgtaatcccagttacttgggaggctgaggcaggagaattgcttgaatcagggaggcggaggttgtggtgagctgagatcacgccattgcactccagcctgggcataaagagcaaaactctgtctcanaaaaaaaaaaaaannnnanananaaggggncccccccccgggggggncccccattccccctttttnggaanatttttatcccccccncttatgnccnttttttttaaaaannnggnaaanggnnaannnnannnnnnnnnnnnnnnnnnnngnnnnntnnnnnnnannnnnnnnnnnnnnnnnnnannannnnnnnnnnnnnnnnnnnnnnnnnaaaangtnngnaanccnaaaaaaaaaanaaccancntnngnaaancaaaaaagttnaggggnaaaaatttnnananctttaaaanaaaaattgggnannannnaancnnnnntnnnannnnnaannnttnnnnnnaannnnnnnnnnnannnnnnannnnnnnnnnnnnannnntnntnnnnnnnnnnnnnnnnnnnnnnnannnnnnnnnnnnnnnnnnnnnnnnncnnnnnnnnnnnnnnnnnnnnnnnnnaaannnnnnnnncccccccccccccccccccc

SEQ ID NO: 16745 - DNA, 544 bp, Homo sapiens
  misc_feature 534: n = A,T,C or G
agtacttctagaattaattaaggcggggggtttcaccatgttggccaggatggtctcaaactcctgacctcaggcgatctgcctgcctcggcctcccaaactgctggaattacaggggtgaggcagcgcgccagggctatagcaacattttaaaaggacatttgcttgggtatataattttatatccaacattcttttccttaaatatttaaaaatatcccactccttcctttgttgcatccatttttgttgctacatctgatattctgatccttgcttctttgcaggtgatctctgactcactgtaagctttgtaaatttctctatgccttgcatgttctaaaatttctcttctagcatttccaggcatagtttttctttgcataatcctgtttggcccaaaaggcaaatctggcaatgaaaaacccaactcctcacacaccccgtgactctgctggaacttgcttgcacttcttaccaggtgtccctcatcacactgctttgccccatatcccaggacttctttaacccagnaggtgcattt

SEQ ID NO: 16746 - DNA, 505 bp, Homo sapiens
  misc_feature 466, 471: n = A,T,C or G
agtacttctagaattaattaaggcgggcgtggtggtgcatgcctatagtcccaggtactcaggaggctgaggctgcagtgagctgagatcgtgccactgtgctctagcctgggcaacagagcaagaccctgtctcaaaaataaataaataaataaataaataaaaattaaaaattacctgggagacttgttaaaaactgaagattcccaagcccatctcagacccaaggaatcctgtaattttctagattcagtatgacactcaaagttttagggaaaatgagaaggctcaggattagaaattccagatttaactgcttggtggatactggaatgaattatcctctctcagtctctctaactcctcctctggcaaggctcagggccctagcagatttgcccaggtgaaactaatactgagatattttattttcatttatttattattattttttattttttaagancagangtttaagtaggcaaaagaaagcgaaaggaaggcc

SEQ ID NO: 16747 - DNA, 341 bp, Homo sapiens
agtacttctagaattaattaaggcggggtgaggagtagaatcctctgtgggactgccaggcctgtctcacagacctcatttcatccccaaaatactttgctttcccttcctgacccccttgcctaggaaaattcctagtatcttctaatctgttactcaaagaacaatcaaagagtgacaatagaaccaagtttacaattcagattttactcagtcactaaagtatctgcaaaacatacccctggatttgatgctagatcatagagatcatgtactcccatcaagtctatagaactctggccaatggcaccgggcgtggtggctgtaataccaagtacttt

SEQ ID NO: 16748 - DNA, 438 bp, Homo sapiens
agtacttctagaattaattaaggcggggagtgaggggacacggtagctcacacccataatccaaacactttgggaggccaagacaggcacatcgcttgagccaacacggcaaaaccccatctctacagaaaatacaaaaattagccgagcatggtggcacacactcataatcccagttattagggagactgaatcaggagaatcacttgaacccaggaggcagagactgcagtgagctgtaatggcaccactgcactccagcgacagagtgagactctctcaaaaaaagcaaaacaaacaaaaaaaaatcaaagaaatttaaaatcttttctataaacccaatctactggtaaggaaattaaagcacagattctccataaccatcttttctgattctaaacaagcaattaagcttactgccaccccccaccttcccac

SEQ ID NO: 16749 - DNA, 440 bp, Homo sapiens
  misc_feature 403, 418, 420: n = A,T,C or G
agtacttctagaattaattaaggcggggtggggagggagcgagcaaaaggcatctttgacccttttagattgcatttcattcctcaaaactaggagaagtacagtatcttgtactggataatgattaggaaatctgtgtcagaacagtattaaaaattaacaaaaataaaagttacccgtatttggcacctactatggtaaaagctatattttaggtactttacacgcaatatttccagtccttatctccacctggttagaatttgcagataaggggccgggcccggtggctcacgcctgtaatcccagcacactggggggccgaggcgggcagatcacaaggtcaggagatcgagaccatcctggctatcctggctaacatggtgaaaccctgtctctactnaaaaaaaaaaaaacnanaaaagggggcggcccgccac

SEQ ID NO: 16750 - DNA, 457 bp, Homo sapiens
agtacttctagaattaattaaggcggggtgtggtggtgcatgcctgtaatctcagctactcaggaggctgaggcaggagaatctgggaggtggaggttgcggtgagctgagatctcaccattttactccagcctgggcaacaagagtgaaactcctcaaaaaaaaaaagaaaagaaagaaagaaagaaagaaaagaaaacccccaagaatctcaattctctataaaaacttaaataaatagaggaccctccaactgttccaatgcagctaaagtaactgtcacactgcctaatcactaagcaaagctgtgctgctatatggatggtaacacaggcaatatctgcagacatgtctcatttaatccacagtattttaaaaggcatggtaagtaaccagctatttttcttttaaatgaccagtcaatattccacatttatgctatatgcctggcccccaa

SEQ ID NO: 16751 - DNA, 475 bp, Homo sapiens
  misc_feature 28, 31, 36, 45, 46, 63, 200, 223, 224, 233, 259, 260, 263,267, 268, 269, 272, 273, 274, 275, 309, 310, 312, 336, 341,344, 348, 385, 396, 411, 438, 440: n = A,T,C or G
agtacttctagaattaattaaggcgggnttnatgtnatcacactnnaccagtctgaaaagccncaaaccaaaaccaaaagaaagaaaagtcctgttggatgaaataatttcttgctgagcacaatcccttagtctagaactctgagtatatttttcagagaaaatgttccttttcggctgggcgtggtgactcaaccctntaccccctctagagcctaataanntgcattcangctattaaaaaaaaccactgtttggnnaanaaannncgnnnncccccccaagggggggcctgggttacctataagnntnaccttttcctgcccccccataggngtganttnaaancaatatttcccgtggggataggaggagacttacagcnttggggttaanacaatgctttttttntacggggaatgcctaacacaccacagngngtttactgtctttgcctgctggcaccccaccccaa

SEQ ID NO: 16752 - DNA, 286 bp, Homo sapiens
  misc_feature 158, 187: n = A,T,C or G
agtacttctagaattaattaaggcgggaggggggattaagtcagattagagtaaattgaggagtgaatggggaagcaagaactgtggagggcttggttagcaaagtagataactctcccacaagaacagattgtaaagagaaatagatagagcaatanctaaaggaaaaagtgggataccaagaggngactttgtttgatgagaaacacctgggcatgttaaaggatgataggaataatccaaggaatagggaaatattaaagatacataaaatgaagtattaata

SEQ ID NO: 16753 - DNA, 416 bp, Homo sapiens
  misc_feature 33, 37, 45, 47, 62, 64, 80, 109, 304, 340, 345, 346, 350,351: n = A,T,C or G
agtacttctagaattaattaaggcgggccaganacanataattantntggataatgaaagtntnggtatattttacattnaaaccaatgaacaaagaatcagtgagccngaaaaagaaatcctgtgttttaaacatgtcatctaaaacatggtatgtgcatggaatattcccatctgctccttttgagttctggatttcagactctcttgtcagccctccagggcctaacagtccctgtgctctccaaggcttcctccatttctaaggtgctgggagttcctctatctgctctctgctgtctcncccacctgcctttcattctatcaacaaaacaagacnaaacnnaacnnaagcccttaattgtgatgagttttgcccataacagcctttctccatgactgactaattaaaaaaa

SEQ ID NO: 16754 - DNA, 435 bp, Homo sapiens
  misc_feature 349: n = A,T,C or G
agtacttctagaattaattaaggcgggttgaaagagagctgttatttactaatcattgtcacctggatgtccactcttctccaatcctggcatgacacagaaagatagataagatcgaatctggaaatagaacaggggaagaaaagaaagtagaaaataattagaaatgaaagagtaaattaggctagagaagttagtaaaaaaaaaaaaaaaaatacaaagaaacacagtataaaaataacagttcagtacgatgtctgtaagtagcagaaagacaaggagggttgaaagagagctgttatttactaatcattgtcacctggatgtccactcttctccaatcctggcntgacacagaaagatagataagatcgaatctggaaatagaacaggggaagaaaagaaagtagaaaataattagaaatgaaagagtaa

SEQ ID NO: 16755 - DNA, 249 bp, Homo sapiens
  misc_feature 49, 69, 126, 235: n = A,T,C or G
agtacttctagaattaattaaggcgggtgctaaatgacgtgatggggtnatttctttttcttccctttnccatatccttctttgcgttggcatgtaacatttttgttcacaccaataacaatatanaaaggaatgggaaataatgaggatagacatggcccccaggacatctgtcaccttctcaccacctttgttgccaccatattattcaggtcaggatcctcctacctatctncccttttatactaa

SEQ ID NO: 16756 - DNA, 451 bp, Homo sapiens
agtacttctagaattaattaaaaatacttttatatacaggaatgttattgaaaaagatatcctcactcattcttcagaaaatgcgatggtctaaaattttaatgcaagttgacatatgttctaaagtaaggaaagtaaaggaagaccactatttattaaagaagatttttttaaaaggacataccataaaggaaaggactggtacagtttaaaacttcttttcatcaaaatgcatcataaagaaaatgaaaagtcaagccattagggaaagatagttttaacacatataactgacaaagggctggtatccataatatatagagaattgctttaaaaaaaataaagacaggccgggcacggtggctcacacctgtaatcccagcactttgggaggccgaggcgggaggatcatgaggtcaggagatcaataccatcctgactaacatggtga

SEQ ID NO: 16757 - DNA, 419 bp, Homo sapiens
  misc_feature 298, 346: n = A,T,C or G
ctcgagagtacttctagaattaattaaggcgggggatgaaggggagcggcattaagctaattcagcacactcaggaataatggtcacatagagaagagaagtggggtaaaggctgggaagtccatacacgtactgtgccacttcagtacctgggacgtttattttattaaaaactttgaactcttttatgacaactgccattcactgtacaaacatcaaatcatagtttaaaaatgtaattctaatgaatatatattatctttgtttatttcacttccattcatgtttcctgttattnggcttaattttaacctatttcatccaagttagctctcatatgcagaantttgcaggtcagttaatgtcatgatgcctcaggtcttctgacttagcatttaaaattgggctctggataatta

SEQ ID NO: 16758 - DNA, 468 bp, Homo sapiens
  misc_feature 285, 360, 445: n = A,T,C or G
aaagctgggtccgggccccccctcgagagtacttctagaattaattaaggcgggctagaaggaacactcatgttcaataccaaaaaagcatctgttatgaccatttatacttgataggggcattaaaataaaggaaatagaaagcattatcacatatgtaataaaatctagctttactgagttaaagctgtgattccaaaggtttcactggttgtcacctaatatttttaaatgaccaaactgataatatagctagaagaagttttaatatcaagaatacacaanattacaaacacatagaaaagaaagtgccaacagcaatgataatactaaaaagtgccttaccacaaaccaaaagtnaacaaaaaagtaaacagtttgtcttcttataactgaaaagcaacaatctaatattaggtgggttctttatagcattaaaacacanaatatttgtaaattatggttttt

SEQ ID NO: 16759 - DNA, 454 bp, Homo sapiens
  misc_feature 8, 323: n = A,T,C or G
cccccccncgagagtacttctagaattaattaaggcggggatggcaactttttaaccctgaagaatttgagagtaagttgtgaccataaacaagaggtagggaatttatttcttcatttttctactttcttatgtgaatattactttttccttaaaaccaaacttaatataacagaaataataattattttaatttttcttaggaaatcgatgaaatagtattttttctgagttttgaaatgaaaaattctgtaactttcaagttgactcttcaatcttctgcactcatcaacttcaaatcttttatttttttgccattttgntttttattcatattttaatttattataggagaatttttcaaaagccatttctaagtctaatatctttgctattttctcttctctctcaaatatgaacttaaattaatgttcttaaatttttagaatatttt

SEQ ID NO: 16760 - DNA, 421 bp, Homo sapiens
agtacttctagaattaattaaggcgggaagcagtaagaagtctgactcatcagcttttgcagagaagagaagtgctgagaatagatctgagggtgtgaggggataaagaataacagctcacccacgtctgtgcagttctttaccctaaagtttaagtgaaatgattcttcatcaagcttcttctcacttgatttaagaaaatccttagagatataacagcatcaatattgcaaaccaataaggaaacaaagcaatagcttagcccttgacatatatttctgataagtaatgtatttcatggtctttcctaaatgtcatgaggtagaagtagatatatccaatgtctatacttaattgatttttgccagaaagtctatcttgaaatgtgagcttctgataaattccttctatttgtgctttt

SEQ ID NO: 16761 - DNA, 408 bp, Homo sapiens
  misc_feature 2, 4, 25, 27, 30, 31, 34, 35, 39, 48, 50, 52, 54, 57, 59,65, 66, 67, 68, 77, 85, 86, 89, 97, 99, 124: n = A,T,C or G
ananactggccgtcgttttcacccngnaannagnnatanccatgattntngncngtngntttccnnnnagaaaaaanaaaaaacnntantgctgggncncgagagctggagaacttgataactntatctaaatattagaagtggagtcatgactgggaacctaaaaacagataattgcaaaaccttttaagatgcaattagaaattaacaacctgtttaaggaaatttaatgttaggtcactaaagttacagataaacttgaaaaaattttaaaaaatactaatatgctaaattagatacaggagtataaagaatcactgaaaataacaggttttaaaagtcatacagtattgataagaagactccctcttcggctgggcatggtggctcacgcctgtaatcccagca

SEQ ID NO: 16762 - DNA, 306 bp, Homo sapiens
agtacttctagaattaattaaggcgggtacaggggtggagggagtgggctggttttgtacatgtgacttacaaagacctctacaacatctctagaaactgtcagaagggtcaaaagaatataaacctccataaaaacgacaaaggttttcttagacctgacaaaacctttactccacttagcagttcttagtcaccatgaagacatccaagaatccaaaaagctttatcttcaactgaaggtttactgaaaattatacctttcctagtacagctatgtctctgtctaagaagtttcaaactccttt

SEQ ID NO: 16763 - DNA, 411 bp, Homo sapiens
  misc_feature 28, 33, 35, 37, 40, 44, 46, 48, 54, 56, 63, 66, 70, 72, 74,115, 147, 354: n = A,T,C or G
ctcgagagtacttctagaattaattaangtggncngnganggancncncgggancnaatgaanccngtgnangncttataaaagtaaataataagctataagaaaaatattcctntaataatgataatgcactaaattatgattccncctgattattacttacagaatactctcaaaattacttgaaaccttccaaattttggctctatcatctcttcaaacctctgtctgacaatggtactcactttatactctgcctccaacatatacacttgacttcctatccatagggttatccttgttgccccccataaatttgacttgcactttcatctcctctcaagcagtcatcantatttattgaggcctacattgcagcgacctgtgatgctctaaggatacagaaatgat

SEQ ID NO: 16764 - DNA, 405 bp, Homo sapiens
  misc_feature 22, 24, 28, 35, 36, 37, 40, 41, 48, 51, 53, 57, 59, 61, 114,121, 130, 143, 146, 152, 165, 167, 169, 170, 176, 188, 200,204, 207, 212, 218, 219, 250, 252, 294, 295, 297, 328, 369,376, 384: n = A,T,C or G
agtacttctagaattaattaangnggcngtgatgnnnccnnggttganagncnctgnantnatttactgatgagttcagcatcactgcctgtgaatctcaatttaaaattgacntgctgcntcctataanaatgggcataagngtnaatagngattgcataacanancnnattggnccataaactacnctcataacaaangtanaantctgntctatnntaaagtaaaaccaacatgctagtacataccntnggtattcagaaggatttgtaaagaatgatcagacaaggggtnntnaattgactaaccatttaacgaatgtgctggngtttccaatacaaactttaaaatgcctaattatactttaantaaagtnatattccnttgttttttaaccaataggcc

SEQ ID NO: 16765 - DNA, 426 bp, Homo sapiens
agtacttctagaattaattaaagcaataagtcattaactataatctggacagatttcaaatctacctaaaatattttcaaaatagattcacaaataacacatattagaataaaaattattaaacaataacaaaatcactagttgaggtaactttaaaacacacacgataccactatataatttcctcacagaaatgctgcacccagttggtggccctgtctccatggcagctgaagagcgtaagccagtgatgagcaaaaggggatacactctcaatgttactcctgcctcaaatttgtacccccgcttggtctcttctttttccttttcctccacttttagaagttaggctaccttgtcatgttttatgagtcatcataacccgccagaaattactgaacaaaataagatataattgaacaagca

SEQ ID NO: 16766 - DNA, 336 bp, Homo sapiens
  misc_feature 27, 30, 130, 185, 255, 271, 322: n = A,T,C or G
agtacttctagaattaattaagggggnggntgagacaagaacaacaaactcaagacagctatgaggaaataaccattacccgttaagttttccctttaatgaccatgaggacaaagtcatgacaatgcantcaccacccactttttgaaaaaaaaaaaacaatgccaatgtgggaaccgactgantcccaagcttatctactgtaggatccaagagagagacaatctcagtgttggagaatgcactgagaacatngaggagaaggctacanagaacactgagtatacaaatgcatacagatagatgtgtatagatatatatncaccatagatttcc

SEQ ID NO: 16767 - DNA, 418 bp, Homo sapiens
agtacttctagaattaattaaggcgggagaatcacttgaacccaggatgtcaacgctgcagtgagccaagatcctgccactgcacttccagcctaggtgaaagagatcccgtctcaaataaataaataaataaataaataaataaataaataaataaataaaataatagtcaagcactatggccataaaagacagaaatgactaaaaatttgaaataaagactaaatataaaatgtctctgttaactagcttcttagactttgccttaaagtttagttggcaaccaaagagaaaaataaaaccaaaatcctaccagtttcttgaagaacaaaagccaaaatctggcactcttattaatttaacagagaaaatttaattcagccaaactatttcttgaaagtcaaacctttgcctaaaa

SEQ ID NO: 16768 - DNA, 405 bp, Homo sapiens
  misc_feature 72, 87, 88, 105, 108: n = A,T,C or G
agtacttctagaattaattaaggcggggtggaggaagtaaataagcatataacagactaacacactgctatntcatagagacaaatnntttgggtcataccacanatngggtcataccacaaatcagacaaataagctacaaattagcttcacttaacagatacaaattaataaggttaatgtccactcattaaacatttcaatctctcaagtcaagctacccatataaacacttggtatccagaagatgttgatcatagtagctataaaacaggtttagtcagaaaagctattaggatcaaaaattggcagtcacacatcttggcttgggtattcctaacacataaaggacaaatatcacatcaaaaacataaaccgtgagcaacctaccggtgcaacaccatt

SEQ ID NO: 16769 - DNA, 603 bp, Homo sapiens
  misc_feature 26, 28, 32, 34, 36, 44, 45, 52, 56, 60, 62, 71, 73, 74, 111,116, 125, 128, 136, 137, 144, 145, 146, 147, 159, 165, 167,176, 179, 199, 200, 201, 202, 203, 204, 212, 216, 223, 231,232, 247, 255, 272, 275, 277, 283, 295, 311, 341: n = A,T,C or G
  misc_feature 350, 413, 415, 427, 431, 452, 455, 457, 460, 461, 468, 495,506, 598: n = A,T,C or G
ggacggcgttttacaccccggaacangngtanancnatgattgnnggcgcgncccntccncnagagtaacngnntcagtaatataatttaaatgcgggggcgcggcggacngtaanagtcctttncantgcaaggnntaaaaannnnttcaaattgatncaccantncatagtatntcnttgggactaacccctatacnnnnnnctgtaaangcanttaactngaaaatanncttcgctttgggganagcctaanctacaaacccccttaanccntnacagangcttacctaaanaacaggctagaaaagnagcaccaccccgtcttattgttagcaacanatagctggnggggaaaagtatttattatgggttaagaagggccgaccagaaccttacccggaagccttgggntngattagccttgngttngtcccaaaggaatagaaattnctntnagnnttccaanctttttaaaaattttggccccaccaanaaaaccccttnttaaaattcccctttggttaaaaattttaaaacttggttttaggtcccaaaaagaaggggaaacccagcctctttttggggacacttagggnaaaaa

SEQ ID NO: 16770 - DNA, 456 bp, Homo sapiens
  misc_feature 279, 307, 310, 333, 347, 430: n = A,T,C or G
agtacttctagaattaattaagggcgggggccaataacttgctaacaaacttgtaactgaacaagctatttttttctgtcaatgtgattgatatgctcattgttaaatttaacttgtttaaatatccattggtatattatcaagggctattactgcaataacctcaaagtatctttaagacaatgctgaatatcatacatagttaataaacaatgattggagcttttcaaaattgctgctctgcatggaaagtaaggtttaatgtgtataaatgtttgncattgaagtttggaatttattttaatgnacnctttcttcccatgctagatatgncttcaaagaaaaanggattaatatattcatactatgcaaaaatatcattttattcttccaaaaaaatggagctttgataaaattttatggtttttangccccttagagtaaaaaaaatcaaaa

SEQ ID NO: 16771 - DNA, 236 bp, Homo sapiens
  misc_feature 122, 168: n = A,T,C or G
agtacttctagaattaattaaggcgggagaggagcaaggtgtggctgacaccagctgcagcacaggctgtcagggtggggaggtggctgggcccttgtaatgggcccaggagatgctgctgncactgtgagagggcctggttaggagttaaaccttcatgcatctganataaatcataagctcttcttggtatgaaaatgtaagaaaattattccatattttgcaggaaagctgca

SEQ ID NO: 16772 - DNA, 395 bp, Homo sapiens
agtacttctagaattaattaatgaaaattcaaaaggtaaaaacagatataaccagggaaaagaaagacagtttcctttttataacagccccataaagtatctcttgcttttgtcaccaatttctttatgtatccagcagctgtaagcacataagcacatatcctggcttaataaatgcacttgtatgtgtctttgtatgcataggtccactctttattacgcacaataggtagcttggtatacacactgttctgcacctacccactttggagatgaaaaacctggctgatattaatgctgatcttaccccatgaaggcccaaaacataacctcttagtgactaacccaccaaacctgtctaacttcaagcccggttctactctgaggacattcct

SEQ ID NO: 16773 - DNA, 325 bp, Homo sapiens
agtacttctagaattaattaaatgatatgaaatattaagcttttgaaggtcaataattgaatctattattattttcgtctatggttttgaactgcatgcactgtgaaacacatatgtaaaagttgctaagccaaagaagtgagttgtattgggaatggaagagagttggtaattaagagtgcagcaggccaggcacagtggctcacatctataatcccagcactttgggaggccaaggatggaggattgcttacttgagcccaggagttcaagaccagcctgagcagcatagctagatcccaccactacaaaaaaataaaaaaat

SEQ ID NO: 16774 - DNA, 308 bp, Homo sapiens
  misc_feature 308: n = A,T,C or G
agtacttctagaattaattaaggcgggggaggagaaggaagggcctaaagggaatagaatgcattaatgtatcaaacttgtctttctgtattaccttataatctgccttggcaagattgggaaactagccctagataacagaagaatagaagatacagtgggggctgggcatggtggctcacgcctgtaatcccagcactttgggaggccgaggagggtggatcacgaggtcaggagatcataccatcctggctaacatggtgaaaccccgtctctactaaaaaaaaaaaaaaaaaaaaaaaaaaaan

SEQ ID NO: 16775 - DNA, 551 bp, Homo sapiens
  misc_feature 421, 431, 433, 436, 437, 438, 439, 440, 441, 442, 443, 444,445, 446, 448, 449, 451, 452, 470, 493, 495, 502, 526, 539,540, 541, 542: n = A,T,C or G
agtacttctagaattaattaaggcgggtaaatggcacacaggcattcactatatcagcatctattcttttttgtatgcttgaaagcatctcatagtaaaaaattaagtaggattatttttaaatattcctactcctgaatgattaactggatgtcccttgcactaggcatgctaaaaattaattaccggcatgaatctaaaagtctcacatgccttttacactctctagaatcgaagtaatatttatttatttacttatttattttatttatttatttattttgagacagagtctcgctctgtcgcccaggctagagtgcagtggtatgatctcagctcactgaaaccccgcctcccaggttgtggtgagccgagattgtgccattgcactccagtctgggcaacaagagcgaaactccgnctcaaaaaananaannnnnnnnnnnannannagcggccgccaccgcggnggagcttccaattcgccctatangngagtcgnattacgcgcgcctcactggcccgncgtttacaaacgnnnngactgggga

SEQ ID NO: 16776 - DNA, 228 bp, Homo sapiens
aaagctgggtccgggccccccctcgagagtcttctagaattaattaaggcggggtaggaattaaattttgccaccttattttgtgtagtttaagctaatgttaaaaatgttgcattccctaattacctatcaactgacagtgaagagaaactcaaacacggaatgatggaaggaataaaatgaaacagattaagtctttacctgaataatcacaaactataaccatca

SEQ ID NO: 16777 - DNA, 481 bp, Homo sapiens
  misc_feature 4, 5, 36, 288: n = A,T,C or G
agtnnttctagaattaattaaggccgggtctatatnagaattgagacttaatggcattcgttaaattccaacacctataaatttacagctggggctagaagagactaatcagtggttccacagatatgtgcctgtcagcgaacatacatttactgagcatctactatgtacgtagtgggttccattctgaacactagaggtataactgaaaagacacgtcacacccttgtgggacttccttatattctaaaacagtggttcctacactttctggactttacagtccanaaagattgttgggagggcaacattttttattttgctaataaagacactgaaaatagcctttattatctcctctcatcatttcataaaagaatattttaatacaagaagggtgaagggatgtaattggaaaataaatgacatttctttgaagtgaatacatcggcttgatgaaatgttaccacacttactaaac

SEQ ID NO: 16778 - DNA, 195 bp, Homo sapiens
  misc_feature 39: n = A,T,C or G
agtacttctagaattaattaaggcgggggatgtatattngcttgtacatacataacatacctctggaatgatagataggaaattagtaataccagccacattttgagtgggtaggggccagagttagaagaaaactttaccctatataccctatatttatactttatgtagtgtaaaccatgtcctgtttaaaaa

SEQ ID NO: 16779 - DNA, 161 bp, Homo sapiens
  misc_feature 2, 31, 39, 40, 43, 48, 62, 63, 64, 65, 68, 69, 75, 145, 147,150: n = A,T,C or G
gnggggaagaaaataaaactttaaaaaatanaaatttgnngantatangtattgtaagtgtnnnnaannaagatnaatattatttgggataaagaaaatattgagaaaagatagtgtggtagaacttgtagttagaaaataaccntngangaaatataaag

SEQ ID NO: 16780 - DNA, 514 bp, Homo sapiens
  misc_feature 477, 498, 507: n = A,T,C or G
agtacttctagaattaattaaggcgggggtctcgatctcctgacctcgtgatccccccgcctctgcctcccaaagtgctgagattacaggcttgagccaccgctcccggcccgcaagcaaattctttcagtaaattcttgcattaaacctatggtttgatggacatttgggtttagccggacttcattgacacagtaggtactgtgtgttgggatataaaagactaataaagaggttcctagtcatggagcttgcactggctattttccattgtacaggttacttaatctctgtcaagtgaagctaatagcatctaactccagggttgtgacctctaaagagttttgaaagattgaaaacattgtacctatgtcatatttaacaagccccttttgaagtcctatatttgtttagtagactgaaaattttgaattcactgttaagaaggagacatggaacctgtggaaaaagaaatanttatttttgagtgttttcaangaaagtttnggatttt

SEQ ID NO: 16781 - DNA, 632 bp, Homo sapiens
agtacttctaaaattaattaaggcgggtcacttgaggtcaggagttcaagaccagcctggccaaaatggtaaaaccttgtctttactaaaaatacaaaaattagcgaggcgtggtggcgcatgcctataatcccagctactcaggaggctgaggctggagaaacacttgaatctgggaggcggagattgcactgagccaagattgtgccactgcactccagcctggatgacagagtgagactctgtctcaaaaaaaaaagaaagaaaaagaaaaaaagattttagtttgggaatagaaggattaacataccaaattaaaaaaaataaatacaaaatcagagttgggacttttagtcaacctgattaataaatctgcctgaataactactgtgatggtgaattaatcattactttccaaggcagtccattcacgatgacattcaagagatgcaacattaatacaatgcttatataactcatattcaaattttctgaatgtacactttacagctatatgtccaattcctaaatcaagaatccaaacaagggcaaccctactccatttaactgtcagggtctctttaaagtctccttgcaactagaatagtaccccagctttttttttttttttt

SEQ ID NO: 16782 - DNA, 532 bp, Homo sapiens
  misc_feature 2, 427, 522: n = A,T,C or G
anaaccacatttccagtggctactgaaacagcagaagcccagaacatttccatcatcacagcagttccaccattcagcactgctgtaaaactgtaatatgtgtggaatttgtttcaaatggcatatgcaagggggagcaaatttttaattgcattaataaaaagaaatttcacttcacaatcattattatttcaacattctcagtgaagagaatcaatgtggaaaacaaaagtaaccaccacttcaacattctcttgaatctacaaaattttcaaagtaatgtaatggaagaaataaatgttaatactggcacatttcatgagcaattttttctattgtacttagaaatttactatttatttagcatgctgccaatctggattaaaaaacattaaaatgggccgggcacgttggctcaccgcctgtnatcccagcccctttgggaggccgaggcgggcagataaccgaggtcaggagatcaagaccatcctggccaacacagtggaaaccccattctacttnaaattcaaaa

SEQ ID NO: 16783 - DNA, 179 bp, Homo sapiens
  misc_feature 120: n = A,T,C or G
ataatttcatgagggttttactattgaaggaaataacttctcataatagttgctgtatttgtgtaagacaataacaatttatataatttaaaagtattttctaattcctagaaccattancagtgaagtctgtgatttctattgtttcctagtatataattaacagaagaaaaaaaaaa

SEQ ID NO: 16784 - DNA, 422 bp, Homo sapiens
  misc_feature 23, 86, 204: n = A,T,C or G
agtacttctagaattaattaaanatcatactgctcaaagaatatagtttgaagctacagttttttttgtcaaaaattacaatgcanaagttttagtttatataatgaaaatacacacacgtatactttgttacggagtatcctttaaaaggctaataaaaacagttctataaattcccaagtattcaaatatgacaaggcagtnacaatattttacttagatgtacaaatggctaaaataaacaatcatcattttaattagaaatatcatgatgagactataaatacaatcctattaacttcagtgaagtctttcccataatgcactaaaaagcatgtgtatcccaaaaagaactctgtaaccagaaattaagaacgaaagaaaaattaggtgggtgcaactcatatgctagctttattcta

SEQ ID NO: 16785 - DNA, 389 bp, Homo sapiens
  misc_feature 322, 330, 358, 370: n = A,T,C or G
agtacttctagaattaattaaggcggggaaaagggaaagttgttgagaaaaaaatgaataaccttcactgccaacaagcatttattcacataactaaccattagacagtcatcttttgttgagaacatgtgataaaccttgtgagcataaagaattactactggctctgcattgaggggcttatcgtactgaagagccataatcattttggcatttacaatacccatggctttaatttggctcagtggttacagaaaagagaggaatactaatgtgttaatttgaaacacttaaatgtgttcaatgttatttgtattaggtnaaaaaaanttgggataaccttatacaccgaccgatngagggactgggngtttaacttaaatggaaaa

SEQ ID NO: 16786 - DNA, 525 bp, Homo sapiens
  misc_feature 404, 480: n = A,T,C or G
agtacttctagaattaattaacctctgtccactatcctcactccccactccttcactgctaccaccaacaaatatcatgcttacacacataccttgaggggaggaggaagggaagacaaatcagaatttgctgtacatgcagtactctagaagccaatgtggagttgacctaaggggatccttataaaaacttagcagacaagaattatatgcacttcattggaattccactaattccagatttcagatcagctgggagggttgtctagactgaagctttacattgttatctttaaagataatgtaaattaaaaggatggaggggaaataggtaaagtgtataagtaaacaaatgatacaaagcactgtaattccccaaagcagtttctttggcaatgcacagnggtttctacttaatactgcatattttatagttttcactaactttaatcaacataaccatttagccaaaattatggngactttcatcaaatgaacctcatgatgaaagggttgggaggggga

SEQ ID NO: 16787 - DNA, 415 bp, Homo sapiens
agtacttctagaattaattaaggcgggggatgcagtgaggaacttaggcagcagttgataagtttgtgcagaagaatgttctctgagttatgaagtgactgcattaggtcttctctgtgcttctgaaagtaggactttgtttcagcctgtcattaatttcaaccactgtttcttttgtccattgtgaaaacaattagaatgtgtatcttctggtattcttttctgctgaagaaaatatagaattttagctttcgaaaacccaaaagccaaagtttgactctcttctgctttgacctgcttccagacacaccatcagcatccttcttcgtaaaaggaatgatttaagggagctatgactcaggcatgtttgtttatagttgacccttgaacaatgtgggggtcggggcactggccc

SEQ ID NO: 16788 - DNA, 333 bp, Homo sapiens
  misc_feature 328: n = A,T,C or G
agtacttctagaattaattaaaattaaataaattcccaaagtgcaaaaattgaagtggtaaatgagaaccagagctgtaaggggaagcatacttcaactgccctgaggacatttttagaccttggtggggctttcgtttaaaatggcctaacagagatggatgataggttgtttaatgcatacagtttaggatttcttagccccctgtataaagccaggatcctgcaaggatcataacctcagtgaaagcatagatgagaaaataaaacctctccactgacaaaaggagaaaataaggaagcttgtgtttcttggcttgggttcctgngaaca

SEQ ID NO: 16789 - DNA, 382 bp, Homo sapiens
  misc_feature 49, 52, 55, 64, 65, 79, 89, 93, 100, 121, 134, 148, 193,201, 207, 210, 212, 217, 222, 227, 266, 314, 341: n = A,T,C or G
agtacttctagaattaattaaggcgggggagggatggggagtggcgtgncancanaggttgcanngagccgagatagtnccacttgacnccancctgggngaaagtgctaagaataaaatntatatgaaaatgnatctttcctctacntgatctcttaagaactaatattcttacaatgatgaaaatatatanctaaagcntcacanatncnttcgnttttnccatnacgttcactctttttctattaatttgtataaaattgctngttaacaaaacacaattacatggtaatgctattttcaagaattgtttntatctaggtatcatgactgtctatctnctgacatgcacgaatgtatggaataatgccacttaatatta

SEQ ID NO: 16790 - DNA, 358 bp, Homo sapiens
  misc_feature 288: n = A,T,C or G
agtacttctagaattaattaaggcggggttctatcttttgttgtgacatgccagtctgacttccttctgccttttcccaacccgttcttatttctttcctctcaaggctgagttctctgtgaactaattaggtgacagaaaaaactcattaacgtggatctgagtaaatggcctgaatcaccgctgtggctggggactaggagatggcatttgtgcgagccctgggccccaaagacaggagatgaccaatttttcctcttagatctgaaaagggtggaggcgggaganacatctttgctgcagcttcactgtccttggaggaagtaaagacattcctgatttgctccaagcttacctt

SEQ ID NO: 16791 - DNA, 161 bp, Homo sapiens
  misc_feature 145, 146, 147, 148, 155: n = A,T,C or G
agtacttctagaattaattaagggggatgtctcactgagagctgaactaaattagagtaaggtaccaaggtaccaaattacaagatacgtgctttcaaaaagctgcggattggtattttataaatgagctcctaagaaataaaannnnataaaanaaaaaa

SEQ ID NO: 16792 - DNA, 407 bp, Homo sapiens
  misc_feature 14, 52, 68, 76, 77, 81, 101, 102, 111, 115, 159, 161, 176,180, 232, 235, 245, 326, 329, 372, 373, 374: n = A,T,C or G
atatgcatttttcnaaagcccatgaaaaagtttaaaacataacccaaaaccnagccacaaatcgaagntcaaaacnntttnacaaaatgaatacctgcttnngccacgttntttnatctgaactttataaacgacatattaaaccaacaaacaacaacntntgcctactggaaacngttngaatcattctctgtaatgagtcatgagtccaagaggaaatcaagcaaaaatnacntcctacgtanaggctgacagcaacaagtgtagtgacacagcgtccatgggcctggccaaaggtgccccgtgagaggaatgaattattaaanggnttattattcctagttttattcaaatttaaaagggaacatagcnnnttaacttcaagaaaacttagaacagggaaaggg

SEQ ID NO: 16793 - DNA, 321 bp, Homo sapiens
agtacttctagaattaattaaggcggggtagtagggaagtattcatatttggtctggaaaagaaagaaaggaccaggttgttaaatttttttcagtgtcatgctgtgaaatttgaaagtctctaggtaataagaactatagcatgagattttagcaagtgtgaaatgtgatcagattttaattcttgttttatttatctattttgagaaattaagaaaaatatagaatacaaaaaggagtaataacagctgtatgcccgtcacccataaattgacagttgttaacattttattaaaatttgctgctgctgcttgaattaat

SEQ ID NO: 16794 - DNA, 293 bp, Homo sapiens
agtacttctagaattaattaaggcggggtagtagggaagtattcatatttggtctggaaaagaaagaaaggaccaggttgttaaatttttttcagtgtcatgctgtgaaatttgaaagtctctaggtaataagaactatagcatgagattttagcaagtgtgaaatgtgatcagattttaattcttgttttatttatctattttgagaaattaagaaaaatatagaatacaaaaaggagtaataacagctgtatgcccgtcacccataaattgacagttgttaacattttatt

SEQ ID NO: 16795 - DNA, 130 bp, Homo sapiens
  misc_feature 29, 32, 35, 42, 44, 52, 53, 59, 68, 69, 73, 81, 87, 91, 106,129: n = A,T,C or G
agtacttctagaattaattaagcggccgncancgnggaggancnccaattcnncctatngtgagactnntaangcgcgctnactgtncgtntatttacaacgatangactgggaaatcccagatatacng

SEQ ID NO: 16796 - DNA, 386 bp, Homo sapiens
agtacttctagaattaattaaggcggggggaaaaaaagatacaatttgatgtaacaatgaaacaaatgtaaaaggaatgaaaagacaagagaaattaagactatacttccagggatcatttctagtttgttcccagaagtttctcttaacgtatagactactacatttttacacaaaacaaacaaacaacaacaacaaaaaaaacagaaaatcatcactttacaatacctgtagaaatttactcatccagccaagaattatgtattggttttaaaaccatccactaaatgactgatggagaatgaaccaaagtaaacataacattttggtcaaagggaagtaacaatcaccagccatctggtatatctctcctaatggtatgcaat

SEQ ID NO: 16797 - DNA, 317 bp, Homo sapiens
  misc_feature 293, 295, 300, 304, 306, 307, 310: n = A,T,C or G
agtacttctagaattaattaaggcggggggatctttttttcaggtgtgagagagttaatctacattccaagcacaactgagcaattaaaacatgtaatgagcagaacactttagtgcttcacctatagagaagtctgaattgggcttctttctatctcccccatacaggccacaagaagctaaagaggtaatccactcctgaaaaagcccagaagaataactataatacttttcaaaccttagctgtgtcaagtgcttgctttgcttccatttctgctttcagaaactcaaancnaaaanaaantnnaanaaaaaaa

SEQ ID NO: 16798 - DNA, 342 bp, Homo sapiens
  misc_feature 4: n = A,T,C or G
agtncttctagaattaattaaggcggggccaggcctcccttaagctctgtgcatggttggctttggggagcctgttggttcctgctcccccttgtcaacatcttatctcttaacatttgagcaggtaggtgtaatagctgtagcttcattcatgggaagctcctgtgggagccagaggttgtgcttcactttaagaaattagaaaaaaaaaatgtagattaaacccaaagtcagtagaaaaggaaataataaagatcagagtggaaaacaatgaaataggaaacagaaacccaacatagacaaagcaaccaaaagcttatttttggagaacagttaatgaaa

SEQ ID NO: 16799 - DNA, 440 bp, Homo sapiens
agtacttctagaattaattaaggcggggccaggattcagtttccagaatttgtattgttagccactacaatgcctttcccagtttcctgtcctagatctgacagtgccattgctgttgaaaaaaagaaaaaggtaaagttacacagcagatgaacagttatcttcatcacaacttcttcacgatgaagacaacatcatgactaggcaggtatgaagctgctcatggagagccaggcgtggtggctcatgcctgtaatcccagcactttgggaggccaaggcgggcagatcacaaggtcaggagatcgagaccatcctggccaacacggtgaaaccccatctctactaaaaatacaaaaattagccgggcatggtggcacatgcctgtaatcccagctactggggaggctgaggcaggagaattgcttgaaccaaggaggt

SEQ ID NO: 16800 - DNA, 530 bp, Homo sapiens
  misc_feature 348, 383, 477: n = A,T,C or G
agtacttctagaattaattaaatttacttgttggttgggattcctgaatttgtttgtatttctttgtatgttaattttaattcatcagattgtaaactcacaaatatggaaggacaagttagttccgcagagaaaaaaaaacccaggtctcagcactatgcaactcaggtctctttagctgtgtaataggaggtaatcatggcatttaaaaacattgactatggagttctctgagtaaatggagaatattagcctccacccacctttatccgtatggacttttggcctaattacttaaccatgggatgaagtcagttttctttcctttctaagatggggaataatagntatttttacttttatggggatgtgtaaagcacaanaatggagataattggttttaaaaatacttacccgtagtgcttaaccaggtaaagaaatttgccccataagtttagttaggtttatttatttggnggattggccatttttaagtatatctcttaccaagatccaaataaaccacctaa

SEQ ID NO: 16801 - DNA, 518 bp, Homo sapiens
  misc_feature 32, 34, 37, 47, 50, 57, 58, 59, 60, 64, 73, 74, 88, 400: n = A,T,C or G
aactggccgtcgttttacaccccggaaaaagngntanccttgatggntgncgggccnnnnctcnagagtactnntaaaattaattaangggggaaaacgtttttagaaagaaaaatgttactaacctctttctttttagagtacagaatatataaatgcataatctcctaggtaatacattataagaacatccattcttttcttttttaaaaaagggtttacttggctgggaacggtggctcacgcctgtaatcccagcattctgggaggccaagaggggcaggtgaccggagatcaggagtctgagaccatcctggcaaacgcagtgaagtcctgtctctactaaaaatacaaaattagctgggtgtggtggcacataaccataatctcagctacttangaggctgaggtggcaggatcacttgagcccaggagttcatgcagtgagctacaattgcaacactgctcttccagcctgggtgacagagtgagaccctgtctcatttaaaaaaaaaaaa

SEQ ID NO: 16802 - DNA, 428 bp, Homo sapiens
  misc_feature 151, 263, 301, 324, 396: n = A,T,C or G
agtacttctagaattaattaaggcgggggttacagtgagctgagatcacgccattgcaatccagcctgggtgacaagagtgaaactccgtttcaaaaaacaaaaaaagaaatgaaaaaagagtctgccattccatgttaaagtggaagatnaacataccatagggaaaaacaattctactcctacatgtattacctgaaattaacccaggaacatgcatattaagagaaacactggttaacaatagccaaaatgctcacttanagcagagtgaataaactctggttagtcacaaaataaantatcccacatcactaaaaaccanaaaaatgaccacagctttttaatgttttattaaggaagcctgatgtatacaaaattatatctcctggatgcntccatgaatataaagctcaaaaaaaaaaaaaa

SEQ ID NO: 16803 - DNA, 388 bp, Homo sapiens
agtacttctagaattaattaaggcggggaagtgataagtggtaaaatgagacatttcctaggggtagaggtacaaagctaaaaaagaaggaaacccagactgaattttacgtttcttatttccaactcctctcgatgtctacctggaaacctttccaatctttaagcattcaactgcagtgaaatatcctctggggaccttctgggacatcccaagacagagttcatcacccttttttaatagtgtcctgtacttttcttatctttctattgttgcttttaaaacatattttcttgcaattaccttcacatgcactgtgaacaccggcaatttaatgtgtttttgtgcatgtgtatgcatgcacgctgaataagttccttgcatgcta

SEQ ID NO: 16804 - DNA, 389 bp, Homo sapiens
  misc_feature 34, 47, 48, 49, 54, 81, 101, 112, 118, 124, 129, 160, 161,163, 164, 172, 174, 181, 198, 205, 235, 239, 241, 245, 248: n = A,T,C or G
agtacttctagaattaattaaggcggggggaaantttaccagtatgnnnattgnctgctatgccattcttctatgtgtatnatcatgtaacatctaaatcnctaaatgcctnaatttntcaaantccantgactgtagttcctgattccctagtccacanntnnaatttttntncaatctncatatgctctgtttttntattccntcaaatcaaatcacttccccttatttttgntgancnttgnctnacaaacttaacatcagcattctctatggctcacttttaacatacagaatgcacaacaaacactttgtattgagatgcctgattacaaaatcaaaatggttttctttatctatctatcttcgatactcaaaagaaacagaac

SEQ ID NO: 16805 - DNA, 221 bp, Homo sapiens
agtacttctagaattaattaaggcggggtcgggagtaaccctagtgtcttaagaaaacaactctcttaccttgtttccatctgctctggcaccacctcgcacccccgaccccgcctcccatgtatttggttaacgtcttaagatctttttttgactagtagagaagagatcgtattaggttaaacttaatacaatttcagttcagaaatgtgattaagtta

SEQ ID NO: 16806 - DNA, 430 bp, Homo sapiens
agtacttctagaattaattaaggcggggcttgcagtgagcaaagatcacgccactgctctccagcctgggcaatagagcaagactccgtctcaaaaaaaaaagaaaaaagaaaatggacttaagactggaggaaaatttgaaattgcccctgggcaggaactctgcagcgaagatgaaacagcacattttatgtggtgctgggtatcagcaggcactaggaattcgatcaaaaagtataaaagggaaaataattatttttcaaaattaggcttaaataacatagaaaatccatctgaaacaactaagttacctggcacacaaagaaaacttacaggtgatgtgccatgtggccactgtaggaccgtggctaaaaacatctattccagggctgggcacagcagctcatacctataatcccagcactttggg

SEQ ID NO: 16807 - DNA, 404 bp, Homo sapiens
agtacttctagaattaattaaatgatgtatttttatgctagccatattaagaacatagttctattaagttattaatggagtgactatacatactggtttaccttgttgtcacacctaagtactagtgcctcttttactctcataagtgtcctggattgaatgataaattaatcatcctggttattaaaattgctaaagcatttaaaattaaggtaaagcatattctatcaacctaatctgcaatcaggaaaaaaaatatattttgaggtcaaaataagagtgaatttcaacaggtagggaaagggaaatacagagtagagagaatgttgttaaaggaagtagatctgtcagatgaatgccacaatgcttttctatggtagatagcatgttgttatcttttgtaa

SEQ ID NO: 16808 - DNA, 456 bp, Homo sapiens
  misc_feature 34, 64, 65, 66, 69, 352: n = A,T,C or G
accgggccccccctcgagagtacttctagaattntttaagcccaggagttcgagatcagcctgnnnaanatagcaagaccctgtctctattaaaaaactaaacaaaacaaaacagaacgataatttgatctacctgtcttcagccattttttttccctgagctctattcactatttcttgaatttacacaactttcccatactattccctctgcctagaatatttttccttcctattgctctcctttgatatcctatccatccttcaagacctgggctaacatactaactcatactaactcccgcaaacatttactgagactcgatgagctgaaaattggataggattttgntactatctttgtttttttattttttatattttcattgacattagcattattatgtgattgtcttataccccctaccatattatcatataaggtccttaaaaatg

SEQ ID NO: 16809 - DNA, 196 bp, Homo sapiens
agtacttctagaattaattaaggcgggataacattaaaataagtatatacaacataaggtttattcaaaactattcaaaccaatcagaatctaatgtttttcattaatcaatggcatttcaatgagtaaagaaagttgggcgccaatttgaataaactccctgtggccaaagatagattattttcaacatcaataa

SEQ ID NO: 16810 - DNA, 353 bp, Homo sapiens
  misc_feature 28, 29, 41, 45, 52, 58, 64, 69, 80, 102, 110: n = A,T,C or G
agtacttctagaattaattaagataatnnatctagtaagtnagtnaaccaangctcanagaggnttaanaacttgcttanttaggataatctatgtagtaantggctgangtgggagttgaatcttctctgactaaacttggcttttctgtttgctaagcctggcttttaacccctctgctggatttctgaggtatggcaaatcacttaactataagtaggttgtaggttttatatctatctactcatctgtccatcggtcttatactttctaatttagatatttcattatgttttcattccattaataaaatgcatttccttaaaatatctgtctcttaagaattataaaat

SEQ ID NO: 16811 - DNA, 230 bp, Homo sapiens
  misc_feature 19, 189, 192, 206, 228: n = A,T,C or G
agtacttctagaattaatnaaagtgagatgaggataaataaaaataatattgactgtcactcatctgaaaataaatttacttcttggtaattaaatagaccttctcaatgcctcagcctttttcttcatattccatctacttgttttcatgtaactttgtctttcaattcgtttttgtttttttttccngtnaggagaattagacntagaaaaattataaaatttaancc

SEQ ID NO: 16812 - DNA, 409 bp, Homo sapiens
agtacttctagaattaattaaggcgggagaattgcttgagcccgggagatggaggttgcggtgagccgagatcacaccactgccctccagcctgggctacagagtgagacttcgtctcaaacaaaacaaaacaaaacaaaacaaaacaaaaaagtattagtgcatgcagtaaatgatctttgttagatatttacataacaatctgcaaagtccagggaaatgagtgttggatgatatttactgaagggtttttactgcctttgtagcaaagaaggcacatgaatgtactctctaagaaagagaaagaacatagttgtatagggcatacaaaaaaaagtaatgttaaattagaaaacagcgcatgcaaaggcatgaaggaattcaagagtgagggacacttggaaaaatc

SEQ ID NO: 16813 - DNA, 661 bp, Homo sapiens
  misc_feature 451, 506, 548, 560, 562, 592, 597, 599, 603, 620, 626, 633,638: n = A,T,C or G
agtacttctagaattaattaaggcgggaacccaggaggcggagcttgcagtgagccgagatcgcgccactgcactccagcctgggcgacagagcaagactccgtcgcaaaaaaaaaaaaaagatgatgttcaaatgtattatatggaggaataggaaatcataaacctatttaaatgtcatttgttttatatccctttatttttgccaggggtatgtcctttttctgttgttcaaagttatattactggccagaatggaaattataggaactagctattgtatgaaattgcatgttttccatccattgtggccaggtttggtattcccttaagatggcaacaaagtaagaggcatttcttctagcacttattcgtgaacccagtgacctccaatttcccattttaaaagtcatcttttatcctcgggaacttttaacctactgggcataanaaccgtgggcttaaagttctttttttatcacttttttgggagttaaaaaaacctnttgaaaggcccggccgtggtggctcacacctgtaatccccanccctttgggaancntggaggcgggcaaatcccgagggtcggganaatcnanaccnttttggccaaacaaaangaaaanccctttntttcntaaaaattccaaaaaaaaaaaaa

SEQ ID NO: 16814 - DNA, 302 bp, Homo sapiens
agtacttctagaattaattaagtcagaaaatttggaagttataaaacaaaagacaaacatatttgactaggaagtttgtatggcaaaatacaccattaaaaaagccagtatacaaacaacagatttggggaaaatatttgcaatgtagatgaaaagagccaacatacatgtaaagggctcttacaaattgataagccaggctaatcacaaaatggacaaataatagaaatagaagaggaaatccaaagagccaaccaatttttaaaataagttaattagtagttagggaaattattttaaca

SEQ ID NO: 16815 - DNA, 154 bp, Homo sapiens
agtacttctagaattaattaaggcggggaagttcagtttcagtggttacataaggtatgtcatttgaatactggttgtaatgtgtttccggtgttcacttgtatttataacctgaatacccagtaccccccccccaaaaaaaaaaaaaaaaaaa

SEQ ID NO: 16816 - DNA, 417 bp, Homo sapiens
agtacttctagaattaattaagggggttttataaagacaaattgttgttacaatatttgtaatgtgaatctagttataatattgtaaataatgtgtatttacatcaataacttgccattctcctttaaatcgtacactatattttcaaactgatgaaataattcagttattattcctgaaaaataagattattaggtgcaaacactttctctggaaaaatcaattttatagtgtttgctgtcattctaaaggtatctgtaaaagagataccagtatgactgattgctctagcttggcaaagaatatttgtttataatctcaaagatcaactgtgagaggcaatcaatcctttgtttggagttttctgtctttaggatatgaaagtatccaactagttgatattacaaatgtttctgc

SEQ ID NO: 16817 - DNA, 813 bp, Homo sapiens
  misc_feature 2, 24, 29, 35, 41, 44, 47, 62, 602, 634, 657, 692, 719, 749,762, 768, 784, 796: n = A,T,C or G
ancagactggccgtcgttttacancccgnaataangggaanccntgntgggtaccgggcccnccctcgagagtacttctagaattaattaaggcggggtaagtactaccattcccattttgcagatgacagagctgaagagtaactcctgctatactgtctgtcaattaccagctccatgccaatgtagagatgcaattttgtgctaacagtgacttgacactgtttcttcctgtccatctatttgccacgctgtggttcctgaaagtcattttatttgctggcttctgaagtaacatttgtagagaatgtttgggataacttctatttctgggggagaaagttgtgacatttttcatgtactgagggggaggagaaggccccggagtcagagctttctccctgacgtggttgttgtcagtcattccctgacctccctcatttcctttcacatgttcccatcttggttttcctatctgttatatgaggttattatgaaacttccctacctgccacatctgggtgttgggcatctgaaataagataatgtgcatgagactactctgaaaaggaaaattaattttaacaatagaatgattttangattggtgagattattttctcttatcccattnccctaacacacaccccaatctanatgaaccttaaaccttgttttaagctggggtgcantggctcatgcctgtaatctcacacttngggaaggcttaagccgggtgggatcacaanggcaggcgtcaanaaaaancccgggccaacatggnggaaaacccctnttttcttaaaaaaaaaa

SEQ ID NO: 16818 - DNA, 462 bp, Homo sapiens
  misc_feature 11, 28, 39, 75, 171, 179, 186, 192, 197, 206, 234, 254, 257,268, 282, 284, 287, 298, 314, 346, 360, 362, 366, 374, 401,403, 404, 414, 421, 423, 425, 428, 429, 431, 438, 441, 446,448, 450: n = A,T,C or G
agtacttctanaattaattaaggcgggnagcaatctaanccatataacgcctaaattgtgatctgcaaacatttnccactaaaagtaaccaaagctgcttcttcaagaaattagttaatccaagtctgtggcataagatgtacaaaacagggctagattaaaaaaaaaaancaaaactnttagggnctcatnaaaangacaagatnacagggctccaaccacctcaagtgcagnggttcacacctgtaatgccngcnttttgggaggntgattacaggttcncnccngtaatcccttntttttgggaggctgangactgcttgaagccaggagtttgagaccaccntgggcaacaaaaananactntgtctccnaaaaaaaaaaaaaaaaaaaaaaaaatncnncccccccccnggggggnancnccnntncccctanggngggangncnttcccccccccc

SEQ ID NO: 16819 - DNA, 417 bp, Homo sapiens
  misc_feature 367: n = A,T,C or G
agtacttctagaattaattaaggcgggaaaggcagaatcactagtttaatattctgaaaagccaaagttatgccattttgcttgagagtgagtgcaagctcttgactcccaggaacagtgcagctaacaattcacctcaggcgagggcagaagcaatagccagcttcttggttctgcctgtggctcagttcctacataattgagtaccaaataatatgtaaacctctagggaagcaaaaaagagtaattcagcttctacccccgaagttattggaggtataatggagagactgagacgtaatcaattacaatgtcatcctcaataataattaacatgtactgtatttagagtttattatggggacanttacaatatattaataatatactgtaacaataacaggcaacacttattga

SEQ ID NO: 16820 - DNA, 441 bp, Homo sapiens
agtacttctagaattaattaaggggggaaaaagaaaggaaaatacttgagttgttaacatatgattttttaaaaattaatgatgctcagttataaaaaatccagtggaaaatatcattaatgtattctgaaacagtttgaaaaagccactccgtgaatcaacctacttttggttttagaatttatttacttatttagaaagaaagaaaacagaaagacaggcaccattctctgtatgttattttcctgaaaggtgttaaggcaaaatgaaaaaaaactctcctctataattatgtaatatatcctaatctcttattatgctttatgattttataattctgtgtaaaatctgtcatagttttaagtcccatcacctaatgcatgcattcttgtctagtctttttatgaaaggattcattcttgtgaatcaacaaggcataga

SEQ ID NO: 16821 - DNA, 436 bp, Homo sapiens
agtacttctagaattaattaaggcgggatgaaggtaaaaattttcttgaaattacattattatcaccactcactgcaaatataactaatcagttcttttaggataacagggcagggtacagtacctaagtccatgaagataaagcaaaaatatctagcagagcatactctcaaaaaagaccaaataaaaagctatagacagaagttacatgcataacattgtgttcaatgagtttcgtgagtgcttctttagtgaataaatctctccccacccaacccctctcccaatacttttttctgaaatttttttcctctgttggtttgataatgtagaaatcactaattctcctaaatataatatttgatttttttttctttttaaaaaattttgctggccagacgtggtggctcacacctgtaatcccagcactttggga

SEQ ID NO: 16822 - DNA, 555 bp, Homo sapiens
  misc_feature 29, 54, 57, 73, 78, 112, 120, 122, 140, 142, 147, 148, 150,164, 178, 192, 208, 209, 224, 230, 233, 234, 244, 257, 270,282, 303, 305, 306, 316, 353, 358, 375, 379, 400, 405, 409,413, 422, 437, 473, 487, 489, 493, 497, 503, 514: n = A,T,C or G
aatgccagctactagggaggctgacgcangagaatcgcttgaacctgggaggcnaangttgcaatgagccganattgngccattgcactccgacctgggcaacaagtgcaanactctgtntnaaaaaaaaaaaaatggcncnccctnncntgctttaggaggancatgctggctgctntgatgagaaaagtncaggagggccaggtcnnaccctcggaaaccantttggnggnnatggcactgnctcaggtgagaanatgatgatggttnaaaccagggcantatcaatggctaaaaaatggncnnatcctgaatnttttttgaaggttgagtcaacagggatttgcccaatncattngatttttaaaatttganaaanacaaaaaagctttggggattngcccngccncaantggctcccnccttgtaatcccttngggaatacccttttggggaggcccaatggcggggantaacttgccccaantnccangganttttgnaaaacccattncggggccaaaaataaacaaaaaaccttttttttttttttaa

SEQ ID NO: 16823 - DNA, 478 bp, Homo sapiens
agtacttctagaattaattaaaaatatgtcttaagtacctataggcttctttcttagaagggcctgaaatctaactgggagagcagaagtgacaaaatcgccaatttataattaaatatcaatcatcttatcatcacttattaggcttaaaaatatgtcttttagtggaatagtataaatacatacataaaaatatggctcatagtagaaagttgataaggagagagaggctaaatcaagtcgagcctccgcagtcccttcagaagccagattggagatgcagttccccagctccctcacttcactcttccaagagtatcctatccaaaactattcactgctgatagcaccatcattgtagatgcactgtggctggcctactcatttttaaaaacaaattaacagcaaacatgtaaatactggaaaattttcacataaaaattcagatgtggaatactggccctagtgggttcccctt

SEQ ID NO: 16824 - DNA, 445 bp, Homo sapiens
agtacttctagaattaattaaggcggggtagggatgtgatatcttccattcataagaacccagctaactagaagggaactatctcaatctaataaaaggcattgatctagacatctacataaaaccagtagaggccaggtgaggtggctcactcctgtaatcctagcaccttgggaggctaagacttgagcccaggaggtggggaccagcctgggcaatatggcaaaaccctgtctctactaaaaataaaaaaaattagccgggcatggcggcagatgcctgtaatcccagctatttgggaagctgaggcaggagaatcgcttgaacccggggaattggaggttgcagtgagccgagatcgcgcctttgtgctccagcctgggccacaagagcaaaactgtatataacaaaacaaaacagaacaaaacaattcaacttaaataat

SEQ ID NO: 16825 - DNA, 209 bp, Homo sapiens
  misc_feature 168: n = A,T,C or G
agtacttctagaattaattaaggcggggatgggaattagaacttactagaataaaattccaaatagaggtttggggaaacctacttgtgagtgctttttaacctcaaaataaggatttggggtgggtaggagaaggtgatggggcagaagaagttgtttttggagganagaaagcagattgaaaggaaaaggacagctgatagccactt

SEQ ID NO: 16826 - DNA, 339 bp, Homo sapiens
  misc_feature 101, 211, 213, 225, 231, 236, 275: n = A,T,C or G
agtacttctagaattaattaaggcggggggaaccaatactgaacagcatttttatttttacagaaaaaggaccaattctttccctaagataaagcccttanagtactaatgaaacttttagaagctcaagtctccaagtctgttgctgcctttccacacacaagcacgttacactttaccaattaaaactttactgcaattccactttcanangaccatgtggtnaatgantattnatgaaatattggtcattatttataagaaaataaacccangaaatatactaatttgccctggagttccaaactaaatgtgtacatgtccttatgcaataatttt

SEQ ID NO: 16827 - DNA, 426 bp, Homo sapiens
agtacttctagaattaattaaggcgggtggttcacagggtcaggagatggagaccatcctggctaacatggtgaaaccccgtctctactaaaaatacaaaaaattagctgagcgtggtggcgggcacctgtagtcccagctacttgggaggctgaggcaggagaatggcctgaacactggaggcggagcttgcagtgagctgagatcacaccactgcactctagcctgggcgacagagcgaaactgtctcaaaaaaaaaagagaattaaaaattaaaaaaaagaaaaagaaatgtcagttgagacatttctaagtttatgtgaaactgaggggaaacccattcttcacatgcattggtatatccgaagtattcctgtaatgtaaacaacagctacaataatgtcatgtacaatacatttggccaaa

SEQ ID NO: 16828 - DNA, 290 bp, Homo sapiens
  misc_feature 47, 48, 67, 165, 265: n = A,T,C or G
agagtacttctagaattaattaaggcgggtggcttagggaggcgtcnnaactggggctgccagtccnatcctggctcagcttggccagcactgggctgctctcctttctgatacagataaaagctttatttgattccagtgtcctcgtctccctcccccaccacntgcaatcaccttaacagctactttctgagcatttaccatgtgctgaatgttccctcctaggacgggtaattagcgcagggattttttttttaaatatcanctgattagacctattggtttccatg

SEQ ID NO: 16829 - DNA, 264 bp, Homo sapiens
agtacttctagaattaattaaggcgggtgcttacaaagcgcaagttctagaactgtagaataggaatggatgaccaaccaaagtcttccaagccatgggagtagaatctattcaagtcaagaatttcagaagaaaatactaacagacgtcaagatgaaatacgtatgtatatagtagttgactccctccattactataaaatatattggtggggggtcgggggattgggtatgttgagagaagaatttgaggtattggaaaaat

SEQ ID NO: 16830 - DNA, 220 bp, Homo sapiens
  misc_feature 51, 53, 72, 136, 148, 197, 203, 216: n = A,T,C or G
agtacttctagaattaattaaggcggggaagagaagtgggtaagcagcgtntnctgttttaacgcacttctncagaacacgtgcagggcaagcacatgtttgtgacaatctttttgcgattctatgaggaaggttnagacccagactntgaggaacacggctttcaggacaaggtttccaagagagactgagtgtcntgtcantaaagagctggtnaaat

SEQ ID NO: 16831 - DNA, 374 bp, Homo sapiens
agtacttctagaattaattaaggcggggggtgatggtaaggagatggtagccagagtgggagacacaggttagctgatggatagtcttgcatgctatgctactgagccttcactcagtaaggaaggctttgggggaactgcagtaggattctaagcaagagaatgctttgataaaattttgtgatttagaaaggtcaatagatggcagtgtagaaaatgaattggaagggcttgtgtataggcagaggactgattaagaagccatagtgtaattaagatctgggcaagacatggacatgcacacttgagggtgaaggctgggaggagggagaggatcaaaaaactacttatcaggtactgtgcttattacctgg

SEQ ID NO: 16832 - DNA, 528 bp, Homo sapiens
agtacttctagaattaattaaggcgggtggatggcttgagctcaagagttcaagaccagcccgggcaacgtggcatgcatgttttgtctcaacaaaaaatacaaaaattagccaggcatggtgatatgcatctgtagtcccagctactcagaagtctgaggcgggaggatcacttggagcccgggagggagaggctgcagtgagctcaaattgtgcaactgcactccagtctgggtgacaaagcaagacattgtctcaaaaacaaaataaaataaaataacaaattcaatattatattaagggcttatttataatgtctatacatgtgatgtatataaaattaaagcataaatactagaaacgataattttttactcatttgaaactttcatatattttaaatatacttgcacaatattgttatatagattataaatgttaagaaaaccgtactttcccatcctttaaagcagctctaaaaatatatgcaaagtaagtaaatacatccaaataaaattctaaaaaagg

SEQ ID NO: 16833 - DNA, 385 bp, Homo sapiens
  misc_feature 46, 51, 61, 64, 74, 78, 104, 250, 347: n = A,T,C or G
agtacttctagaattaattaaggcgggggtgtatggaaaccctccntattnctagtttttnctnttaatatggnacangcctaagacctgaaacttggcctaancaatgaaaagaggcacttgtgtttactgctacctatggcagctggcagcctgggtatttacagaccagtaaccctgccagtctcattcaagttttcattgcagcatgggaaaagattaacagaaaaaaactacttcggctgggtgnggtagctcacacctgtaatccaacactttgggaggctgaggcggctggatcacctgaggtaaggagtttgagaccagcctggctgaaatggcatggnaaaaccccatctctactaaaaatacaaaaaaaaattta

SEQ ID NO: 16834 - DNA, 337 bp, Homo sapiens
agtacttctagaattaattaaggcggggcttgaaaggggataaagtctaatggcactagctggcatttcaaattctagatgcctgaggcagactggcaccgaaacagctcctcgtttctctcaaagtgaacatataattcatagagggttaacaaaataatatcgtgaagtttttcccctttaaatctctagcggtggcggggcgcggtggctcacgcctgtaatcccagcactttgggaggccgaggtgggaggatcccttgaggtcaagagtccgagaccagcctgggcaacatcgtgaaaccctgtctctacaaaaaattagctgggtgtggtg

SEQ ID NO: 16835 - DNA, 329 bp, Homo sapiens
  misc_feature 305, 306, 309, 311, 318, 324: n = A,T,C or G
agtacttctagaattaattaaggcgggtggcgaaagcaaggtattcagggaaggtcagccaggagggaaacctcccagacagatgtatggacatgtgaaagaacttggaggtaaaaaggagtttagcaaattctaggaactgaaagaagatgactgggactagaatgcagtgagaaaaggtgtatgtggtggctttgaaataattaccactatacattatatgtattgaaacatcgctgtatacctcataagtatgtatgcacaattatttttcaattaaaaaataaaaagaaaattgtaaaaannaantnaaaaaanaaatanaaaaa

SEQ ID NO: 16836 - DNA, 266 bp, Homo sapiens
  misc_feature 256, 266: n = A,T,C or G
agtacttctagaattaattaaggcgggagatagagattaggatgctatcaatttataggtagttaaaacaatgtgagaatggatgatgcctaagagagtttgtagaataagaaagaataaagcagaagggaaacgctgggaaacactaccctgtaggaaagatgacccagtgaaaaagacagaaggaacagcctaatgacagtggatgtctagaagataaggagggagagaatccaacataaaaaaaaaaaaaaanactataaaan

SEQ ID NO: 16837 - DNA, 410 bp, Homo sapiens
agtacttctagaattaattaaggcggggacaaatatccaaactatatcaaatggtaaagtaatggcatagccatttgatgaatcacgcagccatagaagtttgccatttttggaaaagtaggtaatgtatgtaaaagaatgctcttaattggccggcgctgtggctcacgcctgtaatcccagcactttgggaggccgaggtgggtggatcacctgaggtcaggagttcgagatcagcctggccaatatggtgaaacctcgtctctactaaaaatacaaaaattagccggacgtggtggcacacacctgtaatcccagctacacgagagtttgaggctggagaatagcttgaacctgggaggtggaggttgcagtgagccaagatcatgcaactgcactccagaccaggc

SEQ ID NO: 16838 - DNA, 416 bp, Homo sapiens
  misc_feature 33: n = A,T,C or G
agtacttctagaattaattaagggggtagactngaaatcatttagtgaactgtaatgtaacaataacaatcaccatcattagcttcctcctgggtcatttacagactccctatctggaagacttgacctgccagagatcaccaagtctcaatacttaggtgcaaaggggaacggctcaaagctaaaaagaaataaactagagacaaataaaattaaagcctacttaatgaactacccaggaccttttaacgttgaagagatggtacaggctaaagatataaacaaccttaactgagttgggctacattttcagatgaaagattcatgacagtagcgaccagcctgaccaacatggcaaaaccctgtctctgctaaaaatacaaaaattagccaggcgtggtggtgcacacctgtaa

SEQ ID NO: 16839 - DNA, 353 bp, Homo sapiens
  misc_feature 162, 166, 167, 172, 181, 188, 199, 216, 297: n = A,T,C or G
agtacttctagaattaattaaggcaggagaatcacttgaatctgggaggcggaggttgcagtgagccaacgttgtgccactgcctccacctgggtgacagagtgagactccattaaaaaaaaagaaggagaagaagggattattgaaattaattaattgggnggtnnttcangttaaatanctttaancagcttaatanatgatgtctcccaaccnggttttagaaaagatccaaaacctttttaatagtattattttaaattagccatggaaacagcctggagcttagtggattgnatttgcctataatctaatttactcatatatgcatacatgtatgcatattataaata

SEQ ID NO: 16840 - DNA, 416 bp, Homo sapiens
agtacttctagaattaattaagggggaattgagcaagggaaattgagacttttggagagattaacagaaggttgtcattgtatgatttgacttgtagcgtgcttatttcaaggaagttcaaaccaaactacatctgacaaaaaatactttgtgctttctaaaggtcctttggattgtgattcagaagggtatttttctactatttagagcaaaactgttcaaaagtggctagaggaggaaggtgcctaccacctgttaacaatttagcctaaaggcccatcagcagccaggtgcggtggctcacgcctgcaatcccagcactttgggaggccagggcaggtggatcacttgtgattaggagttcaagaccagcctggccaacatggcgaaaccgtctctactaaaaatacaaaaat

SEQ ID NO: 16841 - DNA, 498 bp, Homo sapiens
  misc_feature 450, 478: n = A,T,C or G
agtacttctagaattaattaaggcgggggagggagggcaacgctcagaagcagagctgcgcgatgtgcctttctgggctgctcagcccaaggcccgagacctgcttgcctgaggaggggcagatgcacggcggctgcaccccgtggggaggccagcatgcctgcggcagctgaccctggcagtgcgagggccccccatccggaggccgcagcctagcacagtcccgggcaggacaggggagagcgtcgtgctcagcagaggagaagtgggcagtagagctccctttccgttcttgaagcagacgtttagagtctgctccttcccagtgtccgcaaagaaggattacaaggcgcgccacccacacggttggtctccctggggcggtctgaggccttgcttgtatacccagctcctttggagtcagggctcgaggccaggccccaaagggtnatttgctcaccgatccccaaaggctaanaactttgaggtgccctgggc

SEQ ID NO: 16842 - DNA, 426 bp, Homo sapiens
agtacttctagaattaattaagtcctctgaggaagacttttcttttcttcttcaaaaataacattgcccaagaaatcaaggagagaaggtggaaaagtctgctgtgtatgcaaacaagaaaggacaatgcttccaccaatatctccctgtaacctacttatacagctcttctaaagacttaaatctgacagaagtaggcctttttccctcatatagcacattttgtatcttaaaaagggtctcagacgatatcccagcaacagcctttcctcattacacactatctcatagtacaatgcttcacatccaacagatggtggagccatttttgatacttttctttttttcaataaaatggagcaacaccaaccagttgtcatcctacaaaaagacagccgtcaacactgacgaatttagaagcagccc

SEQ ID NO: 16843 - DNA, 308 bp, Homo sapiens
agtacttctagaattaattaaggcggggcagatactgcatatggtaacaaggcttggaaagaattcctgcctttttctaacagcagtgggtaaagtttttaaatttgcattggtttccacaagatggtaatataaatatatgatacatgagaaaaagtgattcattgatttttcacaagtcaatcatttgagtaattggtaataggtaatagtttcagttttatcttttataactgtaacagtcatatgtatgacctaagtaatttttattttaatggaaggttttctaagcttctgtttatttaggt

SEQ ID NO: 16844 - DNA, 822 bp, Homo sapiens
  misc_feature 56, 61, 78, 159, 325, 391, 411, 413, 432, 455, 461, 462,470, 475, 478, 485, 491, 494, 502, 503, 510, 524, 542, 557,567, 571, 577, 578, 579, 580, 581, 582, 583, 585, 586, 590,592, 603, 609, 610, 613, 614, 615, 616, 617, 618, 619: n = A,T,C or G
  misc_feature 620, 633, 646, 647, 654, 660, 669, 677, 685, 700, 701, 711,722, 724, 729, 732, 735, 738, 749, 761, 772, 776, 777, 780,781, 792, 796, 800, 806, 808, 809, 810, 822: n = A,T,C or G
agtacttctagaattaattaaggcgggatggctgagttcaagctaaatagtatttnaagtntcaaattgtttggattnctttttggttacatagtcctaatatataaatcagctgccttctgaaaattggagttttaagcagaatctcactaagacttntcttgttatctaaatctaaataaaaagggatttacatactgtcagtatatactgaacagaaaaccttgtaaaacagtagtaaactggagggatgcattagttttaacacaaagcaaaaccttgtaaactcaggagatagataaacctgccaatagaatcacaattntaaatgtgaatctttatcgaagtggtaactcagtgtaaagaagggttttaaatcagttcattaggntttttatggtcgttcccggngnctagaagtaacccccccancccccaaagggaggattaattangggagnncccccaanaaaanaantgggcanttcagnggnaaaattannaaaaccnggattttttttttngttaaaaaacccttaaanccaaaaaccaaaagntttttttttncacncccccnnnnnnngnntaanancccccccaaanaaaaannttnnnnnnnnggcgccccccccncccgggggggggnngcccccnaatttnccccctttngggggagncctttttnatcccccccccctcnntgggggccgngtttttttaanancgggnggngcngcnggggaaaaaancccggggggttncccccaaattnattnnccnnttggggaaaanaacncccntttttncnnngggggggggaan

SEQ ID NO: 16845 - DNA, 395 bp, Homo sapiens
agtacttctagaattaattaaggcgggcagagtgtgaggggcagaattagaaacaaattgttctagtctcatctctgtcctttgttccagtggccaaaccacctagaaacaatccttttctgtataaccagataaactggttgcaaaagatgacaatcagaagagcaaaccccagccgggtgtggtggttcatgcctctcatcccagcacttcaggaggctgaggtgagcagatcacttgaggtcaggaattcgggaccaccttggccaacatggtgaaatcccgtttttactaaaaatacaaaacttagctgggtgtgctggcacatgcctgtgaccccagctactcggtaggctgaggagagagaattgcttgagcccgggaggcggaggttg

SEQ ID NO: 16846 - DNA, 398 bp, Homo sapiens
  misc_feature 296, 315, 321, 323, 362, 363, 371, 386: n = A,T,C or G
agtacttctagaattaattaaggcggggagtgggcggtagagaagggaggcaggcagggatcatagcatgcctgtcatggatggaaggagccagcagaggggaagctaatgacagcagaggcaaaggggatggctcacacctgtaattccagtgctttgggggccaaggtgggaggatcacttgagaccagtaattcaaggccagcctcggcaacatagtaggacccaatcactacaaaacatgtcttaaaaaatgagctgggcatggtggcatgtgcctgtgatcctagctgctnaagaggccgaggtgggaanactgananttctagtgcagcgagctatgattgtggtactgcactccnncctgggcnacccagtgagatccnctcccccctaaa

SEQ ID NO: 16847 - DNA, 204 bp, Homo sapiens
agtacttctagaattaattaaggcgggaaagaatgaaggacaaacaaaaggacacatatcaacgaatattgactgtgtaaaataagaatgtctttcttgtggattttaacatacattataattgaaatgcatgccagtacacaaaaggaggggtggagggaaagttatatgtgcgaggatctttgggggaacagtaaaatttct

SEQ ID NO: 16848 - DNA, 487 bp, Homo sapiens
  misc_feature 466: n = A,T,C or G
agtacttctagaattaattaaggcgggtacctgtagtcccagctactcaggaggctgaggcaggagaatggcgtgaacccgggaggcggagcttgcagtgagctgagatcgcgccactgcactccagcctgggcgacagagcgagactccgtctcaaaacaaacaaacaaacaaacaaaaaaaacagctattctacttagcttgacttcaaattttaaaaataagtcaaggtcaaagtctttggcaaaccacaatgaatatctggaagtaatgtctatacacattagccaacgatgtggatagtaaaaattacttaatcattccatttttttctgttagctctacaaaattactgagtcctaaattccatcccccaccacaattataatttcacttatgccagacttgtaatctgtccacaaaactgttttccaactgctgcatagagcagcattctttggctcangttccctggaatttccccaaa

SEQ ID NO: 16849 - DNA, 328 bp, Homo sapiens
  misc_feature 317, 323, 324, 326: n = A,T,C or G
agtacttctagaattaattaatggcttcatataggttggagtcttgttaggtgttgaccttttctatttgcttcacaggttgtttgcattcgctccacttggaatgctctctctccaaagctgagttgtgacacaagacctctcattctgaagacactgagtgaactattttctctagttccttccttaacggtcaatacaactgaatatgaggtatgcatttggagctcagcacattgcctgcttcttcatgggaaagatgtgtgttataataacttttggaataaatattcctaatctgtcaaaaaaaaaaaaanaaaaanntnaa

SEQ ID NO: 16850 - DNA, 320 bp, Homo sapiens
agtacttctagaattaattaaggcggggaaaatataagaaacacagacataaatatccgctttattttgctttgcttggaaacgactgtttaagattaaactaacattcaatctatgaagttgagccaaagggcaacactgccaagagggctatatgaagttgttttctaaagctatttttgttaggaaatttaatttctctagttccctttcccatggtgaaataaggacagttcattctgttaatctgggttttcaccctgactctagattctccttaattatacctttattcctatccaaaatggcatcctttgact

SEQ ID NO: 16851 - DNA, 500 bp, Homo sapiens
agtacttctagaattaattaaggcgggcgtggtggcgggcgcctgtagtcccagctactcaggaggcagagcttgcagtgagccgagaacgtgccactgcactccagcctgggcgacagagtgagactccatctcaaaaaacaacaacaacaacaacaacaaacaaagaacttatggttagaagtttaggctctgaagtcagaccctgcctatgagccccatcatttactagcttaggcttaatgataagcaccacaggtaagtctatacatcctcatgaagcttacagttcagtgtacctaaatatttccttaagaagaactgagatcctggtgggcacagtggcttatgcctgtaatcccagcactctgggaggccaaggtgggcagatcacctgaggtcaggagttcgaaaccagcctgaccaacatggagaagccctgtctctactaaaaatacaaaaaatagctgaacgtggtggtgtgcacctataatcccagc

SEQ ID NO: 16852 - DNA, 312 bp, Homo sapiens
  misc_feature 284, 303: n = A,T,C or G
agtacttctagaattaattaaggcggggtactgagtaacccggtggtcaagaatggcctggaaaaaatgaagaaagtcaaaaaaagaaaagccattagccttgaatcctagaacatcttttttacagaacagaattttaataactaggatttcacttctctttctatggctcagtggtaaatgttttttcattattatagtatgtctaccaacctatggcccacgcatggaggctttgtgatagttacagaaacctttacgacataataaaaataatgtaaccnaaaaaaaaaaaaaaaaaanaaaaaaaaa

SEQ ID NO: 16853 - DNA, 433 bp, Homo sapiens
  misc_feature 310: n = A,T,C or G
agtacttctagaattaattaaggcgggaggatcacctgaggtaaggagttcaagatcagcctggccaacatggtgaaaccctatctctactaaaaatacaaaattagctgggcgtggtagcacgcgcctgtagtcccagctactcaggaggctggggaaggagaatcacttgaacccgggaggcagaggttgcagtgagcccagatcgtgctattgtactacagtctgggcaaaaagggcaaaactccatctcaaaaaaaacaaaaacaacaaacaaataaaacaaaaccccaaatataccaccagtggntttctttctagttttctgttttatagtctttttcattcataatgatagtcatttttaaattttattaagaggcacagaactttcagtttttatttaaaaggacttaaattcttctgtcttatt

SEQ ID NO: 16854 - DNA, 403 bp, Homo sapiens
  misc_feature 28, 29, 31, 35, 46, 48, 53, 61, 62, 64, 65, 68, 72, 76, 78,88, 94, 101, 102, 105, 115, 127, 128, 141, 146, 245, 291,292, 295, 316, 329, 336, 390, 394: n = A,T,C or G
agtacttctagaattaattaaggcgggnncntgtncgccacagaangnactcnaggggacnntnnctnacangatntnatcatgaggnattggnacactgnnganacacatgtcntattacgaatcnnattatattcttangtgtnagccataattttcatgcagttcccttgcggccagaccactccagttcattctggtgatgctctgaaatacagactaactagaaattaaaattcctaccnaatctctcttaagggttttaaaatcatctgtaggaatagataaatnnctngtacctttaaaaatgtttcangacagattatatncaactgnatatttctttcatttatcagatatttgcctataatgtgacaggcactgtgctancttntgggaaaaa

SEQ ID NO: 16855 - DNA, 512 bp, Homo sapiens
  misc_feature 108, 397, 414, 415, 416, 417, 418, 419, 420, 421, 422, 423,424, 425, 426, 427, 428, 429, 430, 431, 432, 433, 434, 435,436, 437, 438, 439, 440, 441, 442, 443, 444, 445, 446, 447,448, 449, 450, 451, 452, 453, 454, 455, 456, 457, 458: n = A,T,C or G
  misc_feature 459, 460, 461, 462, 463, 464, 465, 466, 467, 468, 477: n = A,T,C or G
agtacttctagaattaattaaggcggggttaacaggtcattgcagtaatctgtgggagagatgataaataagagcgtgcaaagacattattgcacacttttcatcctntgcttctaaacatctctagaattgggatatctcaagatattccatactgatttaaagtcatccgagctgcccctcaggcctttgagcatgtgatgcccatacccatctctcttattatgtcggtaaagaaacttcagccctagagaagttaagttgctaaggaacacgtaattcgtaagggacagagcagtcagatcttggaaacttagtttcttgaagatccagttgattttctactaaagctccagcctgggcaacaaagcgagacttcatcccaaagaaaaaaaanaaaaaaaaaaaaaaaannnnnnnnnnnnnnnnnnnnnnnnnnnnnnnnnnnnnnnnnnnnnnnnnnnnnnncgcgctcantggcccgtcgttttacaacgttgttgactggggaa

SEQ ID NO: 16856 - DNA, 433 bp, Homo sapiens
  misc_feature 1, 3, 16, 21, 28, 33, 37, 41, 62, 64, 66, 68, 79, 81, 88,94, 95, 97, 98, 108, 109, 111, 114, 120, 126, 129, 133,134, 135, 142, 158, 168, 172, 184, 187, 192, 193, 215, 216,221, 277, 346, 366, 367: n = A,T,C or G
nancaaaagctgggtnccggnccccccntcaanagtncttntagaattaattaaggcgggcncntntncgccacagaangnactcaangggacnntnnctcacagganntnatnataggnattggnacnctgnnnaaacacntgtcatatagcgaatntctttatatnccancgtttttccatnatnaaaanncagattccttggggcctgaccnntccanttcattctggtgatgctctgaaatacagactaactagaaattaaaattcctacccnatctctcttaagggttttaaaatcatctgtaggaatagataaatcctcctacctttaaaaattgttcangacagattatattcaactgnntatttctttcatttatcaaaaatttgcctataatgtgacaggcactggtgctacttctgggaaaaa

SEQ ID NO: 16857 - DNA, 334 bp, Homo sapiens
  misc_feature 96, 203, 298, 300, 333: n = A,T,C or G
agtacttctagaattaattaaggcgggtattgagtttgttaaaacactcataggttacatatacaatgcacattagtatttcagtattctaatcanataacagaagcaacaacatagcagtgcaaaattgcctaggtagcaagagcagcagtcattgatttgctgtcctcacagtgtaggctaacttaaaaagaggacttgtnccataccccaattttaaataagctaaattctgacagatagcttaaggcaaccagggaataccataagcctcttttataaccaataataagtaagntngaatgattgttctaccataagtcccatttttgnt

SEQ ID NO: 16858 - DNA, 430 bp, Homo sapiens
  misc_feature 402, 418: n = A,T,C or G
agtacttctagaattaattaaggcgggtgaagttgtgggttttgcataaaattgaactgttaccaggctaagtcaactgaaattggaatctggggtactgcttgctttgaggttactcttatactgtccaccatttgctggctgtgtgatctctaaacctctctgtgccctgacttttctatctttaaaatggacgtaacaacagaggtttaataataagaggtttggaggttaagtgctaaaatgcatataaaatacctagcacaggacacagtaaaaagattgttaccgtatttcattgaatctggttttaagacacttcctgatttcaaagaaactaaaagctcatcttgaagtccaggaagtaaggttttgggtcactcaaacttccaaggggactgnatttggtagtaactantgataaacaaac

SEQ ID NO: 16859 - DNA, 440 bp, Homo sapiens
agtacttctagaattaattaaggcgggggcttgaccttagctagcacaatgtgttcatccatggtaacaggagagaaggcactgcacacagatgcagatgcagtcacataagtagatgttgtgataaaaatatatggacattttctgagaaaacagaagcaatcattagagataagaaacagcccaggtgcggtggctcacatttgtaatcccagcaccttgggaggccaatgcgggatgactgcttgagtccaggagtttgagaccagtctgggcaacatagcaaaacctcgtctctataaaaaatacaaaaattagctgggtgtggtggcacatcctgtagtcccagctactcgggaggctgaggtcagaggattgcttgagcctcgggaggttgaaagttcagggctttagtgagccatgattgtgctactttcact

SEQ ID NO: 16860 - DNA, 259 bp, Homo sapiens
  misc_feature 48, 82, 104, 120, 195: n = A,T,C or G
agtacttctagaattaattaaggcgggatattgaggggaaactgacanaatagacaacacttttgaatacatggattagaanataaccatcagatgcctattancttaatgctaattcangaagcaactaagagtgtgttttaaagctcaaagactaaggacagcaaatgtgctgcggacaaaaccttggtccanaactccagtttcataagtccagatctgtctgattctgcaacagctgctctgcgtctgttctatt

SEQ ID NO: 16861 - DNA, 419 bp, Homo sapiens
  misc_feature 32, 35, 41, 44, 56, 61, 407: n = A,T,C or G
agtacttctagaattaattaaggcgggggaantanagctanaanagaaattaaatnctttnggtagactagagacagaaatataacatggtaatataaaaaggcatgcaattttcaagatggcctgaatattatcataacaaacataaactgttttagagaggattaacatttttatgaagttgctttctttccagtaacatgatatatttttatttgtcaaagcctatttttgtggcaagacatttttagtcatactgatactgaaagagtttatccctaataaacattcagaaaataatttttaaaagatatactttatcaagaggaaaattgagcccagaaggattgtgtgctggtctttgctgtttcctctcagatctattccttgcccttctcctgctttgntctatatttcat

SEQ ID NO: 16862 - DNA, 438 bp, Homo sapiens
agtttttctagaattaattaaggcaggcattttctttttttaatgagtgctattcaaatgaattcagctgtgggaaattgtttgtggctcattcacatctgacaattctgttcatgggctcctcctcaacagctgtccctactaatgcaagataattttatgtaaaattaatgtttccataagaaggcctcatgagaggagttgtcttctgtggtaggaagtcaagaaccaaaggaaaactataaactcaaagaagaaatatgcaacaaagtaaatcagttttggtgatttcccaggtgattttacaggttctatgccaatttggaaaatgcgttctcttcttttgttgaaaaataaaaaaatacttgtgaaaaaattgttactgctcaacaaatagttctctttcattatattaattagacaaattatgtctttaaa

SEQ ID NO: 16863 - DNA, 249 bp, Homo sapiens
  misc_feature 224, 229: n = A,T,C or G
tgggtaccggccccccctcgagagtacttctagaattaattaaggcgggggaggtgtaggatttcaagaagacaaagtagacaacagtttacaatgcagtaatagaggcaagtaaaataaggatttattgcatcaaactatcttaatgagcatatactcattggtgttctagaaacaaaagccaaagtactttaggctgagaaataaatagaaggtgagaaaanaaaanataaaaaaaaaaaaaaaaaa

SEQ ID NO: 16864 - DNA, 421 bp, Homo sapiens
  misc_feature 13, 23, 38, 44, 94, 147, 152, 179, 193, 208, 218, 247, 264,266, 327, 373, 406: n = A,T,C or G
gctctaagcctgngaagacaganttaaatgtaattttnaaggtnaggcgtttatagctatttcattagaatcaggaatgagacatcgaataganctattattatggttatttgatattgttttcttaggttgtacattatacaatanggcangaaactaaaaacccatacaaatattgncaaagaagcagcanattactttgtttatngattacagtnttacacatttagaaagtataagagacttngacagaaaacaatgtantntacctcaggaaaacactaatattttaccagatggcatagaacagaaactgaaaaaagtganagaaagaccatattttcttgataaaaatatttaggtatcacaaaantattaatgcttccacaattgtctaaaaaactcntccaatacaaatcac

SEQ ID NO: 16865 - DNA, 977 bp, Homo sapiens
  misc_feature 24, 38, 40, 46, 50, 55, 60, 64, 71, 75, 94, 101, 122, 132,145, 149, 155, 157, 161, 175, 196, 201, 210, 225, 240, 265,307, 346, 349, 385, 392, 416, 453, 458, 463, 471, 489, 512,524, 527, 540, 541, 542, 573, 594, 601, 628, 643, 655: n = A,T,C or G
  misc_feature 693, 696, 697, 724, 732, 737, 748, 758, 762, 769, 771, 815,816, 819, 827, 831, 841, 842, 856, 863, 876, 880, 899, 908,921, 930, 946, 948: n = A,T,C or G
tgggccccgttcgtttttttacancccgcgtgaaaaanangagcgngtgntcacncctcntganattgtgngttngccccgcgggtcccctttntttcttnttagagagataaacatatagntaaagaaaantatcacttttaangtgnccgtgngngcgncccttcgctaattntctcccaagaataattttatngggcnaaagcgacntggaggggccaaagncaaggagggtatccntttgggatatctctcgggggcgaangggacgaacaacaatcttggccacctagtatggcacagatgngttatcgttggccccatccttgcccccatctccaatcgnttngtggtaggagcacccagaacaaatgtaacgtccccnttattgnacataaatattacactcccttatnataaaaaacagtgtacacttttgtgtgttagacaaanaattncccgngggcccgntcacgggggccccggccncgcctctcatcgtcgcttggaantaaattcgcgcnacnacaacctctctcnnntggaaaggggcattgtaaacgccaggggggncggggcatttcacccgaaatnggatctnggcgcattgaattacgggaaacgctcnactacctcgcgcctngacccccctttncgcaaaatcctccaaagcgcgtgctttccttgggttangcnnaccccttgggggccaacccttggcccngcttgggnaaagnccttatttttngggggccctngcgnccagggngngggggaaccccaaccttggggctttggccccctttcccttggcnnccnaccccccnactnattttttggnnccggggcccctttnttttttncccgaggtttttncccntttttagggggcccacccncccctttcnttttccccccaangggccaagnctttctttaaacccangnccccccttttttccatttggaaaaagggg

SEQ ID NO: 16866 - DNA, 401 bp, Homo sapiens
  misc_feature 392: n = A,T,C or G
agtacttctagaattaattaaggcggggtagtagctcagtaaatatttgttgaatgaatgaagtcacccttttttccccaagtgtttgttttttagaagttttattctacaaaaaaagctgaaaaaaatagtgcaatgcacatttgtatacacttcacttggatttaacaatgaacatttgccacattagcgttctatcttcctccatatgtaatatatccgtatgtgtgtatatatatgtgtgtatcaatttgtcttcatctctctgtatccatgattattagcagtagaagtgaaccatatgaaaggaagttgcagtcatagcatttttctcaaaataattccttgtttatctcctatgaacaaggtcattctcctacgtagcatattgntaagaaatt

SEQ ID NO: 16867 - DNA, 712 bp, Homo sapiens
  misc_feature 1, 3, 26, 30, 40, 44, 48, 51, 59, 671, 690: n = A,T,C or G
nanactggccgtcgttttcaccccgnaatnaggggaaccnatgntggntgncgggcccnccctcgagagtacttgtagaattaattaagggcgggcatattctacataggaagcagcttaagcaaaagcttgagataggaatgagcaatcagggtattgggctagaaggaattcgactagaagtatgaatagaaaattagtaataaagttataaatatgtaagttaggtgccatattactaaagactatgtataccaagtttaagaatattatctctacttaaaagaaatgaagagctgattatttttgaaaagaacagtaaaacaatgaaaataacatttcagtagaactaacctgtctgaagaatttgggacaaacttatagtgaggggtagaagaaatcggaaacagagcaaccagtttagaggtactggttaagaacctgggctttagttaggcagatggacctgctctgctacttggtaagttactaaacctaagtctcagtttcctgtctgtagagtgggataataacaatgccaattttataaggttgttgtgtggctaaaagaatacatataaaagcatttaacatagtgcttggactataataatttcttcacaaatgttagcactattaccttcattacaaatcatttctaaggtgaggtnttgaggaactggacaagangccatagaaacttaaaaggaaa

SEQ ID NO: 16868 - DNA, 562 bp, Homo sapiens
  misc_feature 531: n = A,T,C or G
agtacttctagaattaattaaggcgggcgaacaggagagcaccggaaggctgtacagtgccaacgtcgtcagcgggagagagaatcagcataagcctcaagggaaaagtttcacaaagacgaaagagcaattgtgtggctacagcatttgggaatgaggacattccccgtccccaccctgagagataaagggtacagaggatgcaaagtgtctcctggagagggcaagacgaggagtaaaggcttcctgcaagacccacggggcagggcaagtactcaggaaagacgctggggagctggaaatgagacttgcagaaagttctgtgaaaaggtggaaaagaaaggagaaaacccgagaaactatattgggaagaagactcagtacacacaagtatatggaaatacccaaatacacccttccccaattttctgacctatacaaattttatctatttaaggccgggtgcagtggctctgctatttctaccatgacaatttattcagcttcatcaaaaacttatttacagtccangttccttacccactgtagattcttagtccac

SEQ ID NO: 16869 - DNA, 409 bp, Homo sapiens
agtacttctagaattaattaaggcgggatggctgagttcaagctaaatagtatttcaagtttcaaattgtttggatttctttttggttacatagtcctaatatataaatcagctgccttctgaaaattggagttttaagcagaatctcactaagacttctcttgttatctaaatctaaataaaaagggatttacatactgtcagtatatactgaacagaaaaccttgtaaaacagtagtaaactggagggatgcattagttttaacacaaagcaaaaccttgtaaactcaggagatagataaacctgccaatagaatcacaattctaaatgtgaatctttatcgaagtggtaactcagtgtaaagaagggttttaaatcagttcattagtctttatggtcgcttccgtt

SEQ ID NO: 16870 - DNA, 436 bp, Homo sapiens
  misc_feature 424: n = A,T,C or G
ggtaccgggccccccctcgagagtacttctagaattaattaaggcggggaccagttaggggaactatgatattagactgtggcaatgtcgacctccacacaggaggaaagagtagtcacataccctaaatcttgcgtaacgtggtgtcataaaatttcaataaatctactgagttaaattaacagcaaagcagaaaaatttgccaaagctatttatagctccactaaaatggaagacaagttaagaaaatgtgtgttctaaataatcatgtcagaagttagtgtttccttcaaatataatcataggcctaagaatttttatccaagattgatgaaattttattttacgcaacaataaatggaacacaaaggctgcacatcatttttttgtcttctgtacatatcactaaaaaaaaaaagcatcntactaaaacaat

SEQ ID NO: 16871 - DNA, 408 bp, Homo sapiens
gctggtttattaaaagagaacttgaaagataatatccatgtactaaaagaagactaaaatatatttggtcaaaataatagatataattccaattttaagctgtaggaataaagaagagattaaacataatttaatactcaaataaactatattctctctccaaattctgtggcaagagaatccccacttgaggaacataagatctatcaaggaaaatagttaatgggatcaaggtaatgaatcaagttattaaatgcccttattaatatttttaaggctatatatataagtgtgcccatatattcagaaattctaggcaagggaaatgacattcctatacaagctctttgagatttggtaaacattttcacaggaactacctaatggcaaacctgtctggtaaatgct

SEQ ID NO: 16872 - DNA, 447 bp, Homo sapiens
  misc_feature 25, 29, 31, 34, 43, 44, 55, 56, 57, 60, 61, 71, 74: n = A,T,C or G
tggccgtcgttttacaccccggaanaagngntanccatgatgnntcgcgggcccnnnctnnagagtacttntanaattcattaaggcgggggaagggagggatggcaggtagagaggtgatttttaaggcagtgaaagtactctctagggtactgtaatttgtcaaaacgcagagaatggaaaacagtgaacggaaaacacagagtaaaccctaatgtcaactctggacttcagttaataataatgtatcactgttggctcattaattgtaacaaatgaaccataatgatgcaagatgttaatgattggggagcctgtggaagatgggaggggaaagggttatatgagaattctctatactttttgctcaactttctgtaaccctaaagctactctaaaaaatgaagtgtatcaagtaaataaataaccaaccaaccaaaaaaaaaa

SEQ ID NO: 16873 - DNA, 426 bp, Homo sapiens
agtacttctagaattaattaaggcgggggttccttgcctgttcatttatcaaattctgagtgtcttccatgtaaaaaaatattgtgctatcaagtgaagatacaaacttaaacgaggcataggtccttcttgcaaaaagctaaaaatttagcttagagaattaatatctaccctgaaaaaacagaagtggtttcaactagaagtgaaaaagtataattaaaacctctacaatagagggaatatgggaaatctctcaaaaggaaacccacatgggatctaatcctaagaaaagctctgccttctggaaatacatacttcatgtaagtgactaaaatgcagtagataatgtttcctaaagaaaacttcagatatccttaaaatctacttctcacttaattttcaaaaatcacactcctacacaggaga

SEQ ID NO: 16874 - DNA, 329 bp, Homo sapiens
  misc_feature 56: n = A,T,C or G
agtacttctagaattaattaaggcgggggaaggggattctaggttgaaaagaacancacatgtggcatctgtcaggattggccagaaggttttcatgatttagagcacagagagagggaagagaggaaggattgggaactgatcctgaggctagtgtgccctgaagtgtaggacacatccagctggcagcacaggagatgattgggggcaaaacaaggtcatggcatggaataacagaaaattatttccttttccattttcttccagtctttaagacatcaaaaagtgccaggtgcggtggctcacgcctgtaatctcagcacttttgg

SEQ ID NO: 16875 - DNA, 550 bp, Homo sapiens
  misc_feature 28, 42, 50, 56, 61, 81, 98, 115, 120, 124, 135, 136, 153,167, 169, 176, 219: n = A,T,C or G
agtacttctagaattaattaaggcgggngaaactgaacaatnggttaatntggtanaacantgattacaagtttcccaatntaattctaaaactaatnattggggaggataaaanactgntcanaatattatatnngattagcactcaaaganaaaaatcattatanangggttanaaactaccaataaaacatgcgtatatgtgtcttaagatatggntatattaaactataatttacagaaaatatattttattgcataaatgctgctgaaaattttgattatacttttgaaagaaagcaactgaacaatgtctctcaaacatacaaaattagcactagaaaaactataagcccattgtaaaaatttaagtataaaaatgacacagtagaacactataaacaataaaaaaatatagaaagcaaaggggtatttggtcatagaggtgtggaaagtagtaaatagacaaaaatccattttccagattgtttatccctaggtttttattgagaaattttataaaaagcaaatttaagagaggaatttttta

SEQ ID NO: 16876 - DNA, 379 bp, Homo sapiens
agtacttctagaattaattaaggcggggttatattacatgccaaatggatattttattggtgaattaacaccacagggaatccatcagaatgtatctactaacaatcttgtccaaatatctttaacatatacatataaatactgaaaaatcacatgcaccaattatcagaattacatgaatgctttatctgatttaactgcaatgaaattgtagagttttattcacttagataaacaatgaaattaattggagcttcataaaaggtttgtgtgcaatgagagtataagggagctcagcaagtttatagagatcaaaagaaaactgtcttataaaaataggtcatttttgcaatagatttgaatcctaggaagcaagctt

SEQ ID NO: 16877 - DNA, 419 bp, Homo sapiens
  misc_feature 5, 123, 200, 256, 279: n = A,T,C or G
agtanttctagaattaattaaggcgggcggatcatgagatcaagagatcgagaccatcctggcctcgccctcccaaagtgctgggatcacaggcgcgagccactgtgcccggcctaatcttanagctttagagccccaaatgtagttggcatacaatggtgactacaatagggtgtccccaacatttggtgacaaggaanagaccaatctgaggttaaaattaaaaagtatcataacctgtatgaagccattatanagtaacacatctgaaaaacttgnaggacactcaagtaactaacctgcccaattatcttaaaactcatttaaggaaactaggtgctatgcacaggaatctatagagagtgcagtcatgattgctacctctccatgctagaaatggctaatgttacccttttact

SEQ ID NO: 16878 - DNA, 401 bp, Homo sapiens
  misc_feature 320, 340, 387: n = A,T,C or G
agtacttctagaattaattaaggcggggactctgttgattggtcagtcctgggtcagttgcctgtctctgacgggaaaggaaattaccttcatccctcaaaccctgggacttagtgtgatgcagaaattattccccaaaggggaatagaggtgctgttatcaaaagaagaaagagtctggggaggacactgggctaactattacatctgaatacagtaaaaaatttaatggtcaggagaagatgaagagaggtcaattaaaagtacagtttggtggaagaactaagccctagtttttgccagatcattagagtgactatngtttagagtaatctattatntatttttaaaatagttaaaaaaaatttgaatattttttagcataaanaatagacaaatatt

SEQ ID NO: 16879 - DNA, 315 bp, Homo sapiens
  misc_feature 18, 287, 288: n = A,T,C or G
agtcttctagaattaatnaagggcggggggaaatggtctattttatactagaaagggatacatattcaagtgatgaattgtgttatccagcaccattaaggataagaatttataacaatggaaatattaagtttctgtagatatttttaaaagcctttagagaagcaacttttgagctctaaactggtttcaggtaggctcaagactatactttaggactattttcaggttatcagagtttctttgcattcaatgccagatatttccctgagtatcttgggccctannccaggaccatcctacccactcctaaaa

SEQ ID NO: 16880 - DNA, 415 bp, Homo sapiens
  misc_feature 24, 27, 30, 35, 47, 52, 61, 62, 70, 71, 74, 75, 79, 80, 82,85, 88, 91, 92, 101, 102, 103, 104, 106, 125, 139, 143,152, 156, 159, 165, 181, 190, 191: n = A,T,C or G
agtacttctagaattaattaaggnggnggnggccngtcatgagcatnacaanacccaaagnnagaaaacnntcnnaatnncnaantgnaannttctgtaannnnancagaaaaacctatgtattnacacatatataaantttnttccaaacnaaanatntcctcncctgggtttttaaagnaagccttannatctaacttaaaaaaatgaacttgactgacaaagtttcactataaccacatacaatgattttgggtttcagcaacctcctctactgaaaccgatataatttaagcatcatccgagcaaaacttcactcctttagatggttggtggtgtgaggggtttgttcccagtggataagaggatggccttaaggtttgctgagtccttctctctcaagaacctcttagag

SEQ ID NO: 16881 - DNA, 378 bp, Homo sapiens
  misc_feature 16, 26, 35, 42, 43, 44, 46, 48, 58, 60, 61, 63, 69, 73, 74,76, 79, 84, 86, 87, 89, 90, 92, 93, 94, 95, 96, 98, 101,102, 103, 106, 108, 113, 118, 120, 122, 123, 125, 127, 128,131, 132, 133, 134, 135, 140, 141, 150, 158, 159, 170: n = A,T,C or G
  misc_feature 177, 178, 179, 182, 185, 215, 253, 315, 316, 328, 342: n = A,T,C or G
cgtcgttttacacccnggaaaaggantttgcaccntgcattnnngncngcgcctttcncnnanaaaagnaggnnanggntgaananncnntnnnnntntannnccngngcaanagaangncnnangnnaannnnnaaaannacttataanaaatggcnnggggccttganccaccannntanggnaccgaaggaaagaaccccttattggggagnctttttaaatttttatttaaattggccaaaaccaggtnacccttaaaccaaaaacccccaccaggggtcccctaaaaacttaccccaaaacccttgggcnntttaaaaaaaantttttccggggttngggggggccgaacccctccggggagcccaaaaaacc

SEQ ID NO: 16882 - DNA, 257 bp, Homo sapiens
  misc_feature 2, 26, 30, 35, 41, 45, 56, 57, 58, 61, 99: n = A,T,C or G
cnggccgtcgttttacaccccggaanaagnggtanccatgntggntgccgggcccnnnctngagagtacttcgtaaaattaattaagggcggggccagngggtacccagttctgaaaaaaccgacactctggggtgacgaaacaatttgctcaagatcacagggctgtttactgtggagtacaattcaaacccaggtttgactcccaccaaaaccagttttaaatctccttccatacccattacaatctccagcatt

SEQ ID NO: 16883 - DNA, 332 bp, Homo sapiens
agtacttctagaattaattaaggcggggtaaccaccagaagatctaaaaagaaaagtagttagagtggttgctgtaaaaagtgaataagaaggaatgaaagattgttgcttttcattataaatctttctccattattttgcttttctagtacttgcatgtatgactgaccacaaaagggcctgtaggaacttttagggtgacagaaatgttctatatattgaagttgtttttagttacatggatgtagcatttgtcaataatcggctaactggacatttaaaatggttccattttctcacatgtaaattatacctcaaagttgattcataag

SEQ ID NO: 16884 - DNA, 407 bp, Homo sapiens
agtacttctagaattaattaaggcgggaagaggagaaatggaaatatacagctttaaggtcattgtgtgtgaaataggataattatacaaataaaccaggagagaagataaaaagaagtatcaacaaataatatcaaataatatagaaaaggaaaaaaagtaacaaaaaaacagatgtaacaaacagaaaaaaattggtaagctagtatccttaattgcatatacattaaaatataaatgatagaaacaacttaaaaggtaaggattgttggtccagcgcagtgactcacgcctgtaatcccagcactttgggaggccaaggtgagtggatcacctgaggtcaggagttcgagaccagcctggccaacatggagaaaccccatctctactaaaaatacaaaaattag

SEQ ID NO: 16885 - DNA, 346 bp, Homo sapiens
  misc_feature 328, 329, 334, 335, 336, 337, 338, 339, 340, 341, 342, 346: n = A,T,C or G
agtacttctagaattaattaaggcgggggaaagataatacttctgttgacaggaaatgaaaaaagcaaagacatgggctgtggaataggctgagatgtaagcagactatttaaatgaagttcttaggaaaataagttctgaaccctgatgaataccagcatttaagttatttggacagagagaagttaacataaattgttaaccaagtataaagtcattaacttgctaaatgaaagggtaatagagcctgaaagtttcatagagatcgcaactccagaaagcagctaccaccaccaggactgagggaacaaagggaaaaaaaaaaaannaaaannnnnnnnnaaan

SEQ ID NO: 16886 - DNA, 541 bp, Homo sapiens
  misc_feature 474, 534: n = A,T,C or G
agtacttctagaattaattaaggcgggcagcaggtagaggaatgaacagggagagttttaccaataaaagtaacctaatggcttctatagaagaacaaaagaactttcaaaaaggatcagggcagaaggagggagacaagaaaataaagaattaagtaggcaaaaacacacacacattttagcacaataaactaaagggcaaacattcagccaaagtgctgcattccacagtggaaggagtaagggattcagctcaaacatcaacaatatgctcctgagcaagtaactgtgctttttatttttgtcttcatttttaaattgggggcaatagataccttataggattgttataaagaacagaaataaaatatggcataaagcaaacattccatgaacactcatcattaagtaaatctagaggattctaacccagatactatttaaattaaacaataatttagtgattcgattaangtgataatttccatttgtttagaagactgaaacctcaagattaaataagaaccatcctgntttattt

SEQ ID NO: 16887 - DNA, 391 bp, Homo sapiens
  misc_feature 28, 39, 42, 49, 50, 59, 67, 68, 74, 78, 88, 89, 103, 104,108, 111, 112, 114, 116, 117, 121, 122, 124, 128, 129, 132,137, 138, 141, 144, 145, 152, 153, 154, 170, 178, 186, 193,194, 202, 220, 224, 239, 250, 290, 334, 368: n = A,T,C or G
agtacttctagaattaattaaggcgggnccagggagaancantaaagtnntggactttngctcaaannaaaagntaancaataatgannacaacaaaaaatannaagnggnncncnncccnngngggnnctncccannccncannaatttannntttttccccccccccntggggcanaattaaantattccnntcttcttncaagcagcccccacgctntaanggggaaaagactatntgagagtattntaaacaaaaatgtatttttgtctttataaaataaatgctncacagttggcagtattgggtatacttggcttatgaaccatcttnatcctctggcgaaacttattaacaataattaatnaacttctcaatctttttaaaaaa

SEQ ID NO: 16888 - DNA, 204 bp, Homo sapiens
  misc_feature 7: n = A,T,C or G
gtacttntagaattaattaaggcggggtagtcagtccagaagtagtagagatctttaagaaacagctgatgaagttccgttatcctcagtccattttcagtacctttgcttttgctgctggacaaactaccccacaaataattttaccaaaacagaaggaaaagaacacttcttttcgtaccttctcaaaaaaaaaaaaaaaaa

SEQ ID NO: 16889 - DNA, 261 bp, Homo sapiens
ctcgagagtacttctagaattaattaaggcggggaagggaatagcaagtgactgcaatggagtgctatttgactgacattttatcagagccaaatgagaagaacctagtcatagaaagacatagtaaagtgttttcactgtggaagcaggaggaagtttcccaagtatgctagtgaatttggtggggtcaaggaataatgagaagtccagtattgctggaacatggtaagcaaaagagaggtagtaggagagaggtctaaa

SEQ ID NO: 16890 - DNA, 295 bp, Homo sapiens
agtacttctagaattaattaaggcggggagagagcacattagaaaccactgagaaatacacctttctctattacctgtcgtcttaatcacatagcttcagctgttccttagtaaagataaaactactgaaccttcatggtggagatgaaatgttttatgttctaccttgaattagggaagaactgaataaattaagtatctttccagcttggaatcactgcctccatattacattgttagaaatatatttagtagttagattaaaccttattatattctcaggcaaaaaaaaaag

SEQ ID NO: 16891 - DNA, 368 bp, Homo sapiens
  misc_feature 31, 56, 130: n = A,T,C or G
agtacttctagaattaattaaggggggaatnggttgaaagtctaaataaaaggcantttaggtgccctgggtgccttagaacctacctactatatgtatagccaagtgactgccattgcccaaccctcanagaagacaccagtttaatcaaagttaaatagaacatggggacaaccaggcacagccatacaaaaacaaagtgatttagtgaaaacacattctcagaacagtaagatactgagcccccttctccagtgaacctctgaaaatgggcaccatgttatacactccaggtttgcggaggatatatgatttcattctgtgtcatgaaattaactgtcccaggacaatagacttataaatattaa

SEQ ID NO: 16892 - DNA, 433 bp, Homo sapiens
agtacttctagaattaattaaggcagggaaattttgctcaagaaacacattgcctggatggtggcaatagcacagaatgctgttgatcaagtggctgcttgcagcacagctaatcatcctatgttaggccaagtagatcactgaaccttttctcagaccaatcccggatgcgcctcttgctctctccagtgcttccccagcctaccaacatctcaactggccaccattccatcccaagtctttggcaaacccaggctgatatattaaccaaacggccagaaggggccactgttgaactagtctgggaagaaagctagcgttagccattcttttaccaagtggctattggccaggataaacacacccctgatttaatgtatgttatagtatatataatcatatttatataaattatatacttttaatataattt

SEQ ID NO: 16893 - DNA, 251 bp, Homo sapiens
  misc_feature 157: n = A,T,C or G
agtacttctagaattaattaaggcgggcagggcctccagggtaaggtctaggtgtttggagggcgggacaggatctccaggggaggctctaggtgcctacggggcagggctgggtctccctaggggttggagctgcatctccggggccagaattaanagcctggctggccgcggtggctcgcgcctgtcatctcagcattttgggaggtcgaggcgggaggattgcttttacccagttcgagacccatcct

SEQ ID NO: 16894 - DNA, 458 bp, Homo sapiens
  misc_feature 8, 23, 31, 32, 41, 44, 45, 46, 47, 56, 59, 62, 65, 74, 81,82, 98, 357: n = A,T,C or G
tttaaccntactaaagggaacanatcgctgnntaccgggcnccnnnnctgagagcnctnccnganttaattaangcagggnncccaggggtgcagttnaatattgggtgcgttcaggaaagtagttttgctactctatgccccaatttcctcctacagaacagggctaatatgctcatttaatccacagatccactattaatgctggtacccacctaataccctctaagggtcactcatctcccttggaatttaatctacactcctccccaaggcccctgctcagtctcccttgacatctgccctgttgtggttcactccattccagacaggctggcttcctgctgttctttcacangctcacctggctacatgaattttgccatttaagagctgctcccaaggccgggcgcagtggctcacgcctgtaatcccagcactttgggaggccgagacggg

SEQ ID NO: 16895 - DNA, 367 bp, Homo sapiens
agtacttctagaattaattaaggcgggcaagttctcaaaagttttttactctcatgttgcagttctcaactaaaagatgtgtttcactaaacaatgagaaattcaaaaaagggaaatagaatttagcaaaacaaaataaaccgaatttaaaaaaaaaagaaggagaagaaaaaaaaagcagtaaaggaattatctgaccagagtccaagagtatggtgaagggtacctccaagattacaactgtgcaccaggcataaaagataaccaattgagattggagcagtatgatgaatagataagcatgttgaggacttttagcctcatgactttgtcatcatggcatgatttttaacctacgatgatactt

SEQ ID NO: 16896 - DNA, 683 bp, Homo sapiens
  misc_feature 10, 29, 31, 34, 38, 39, 43, 45, 52, 54, 56, 58, 61, 62, 63,66, 68, 69, 70, 72, 77, 80, 86, 87, 93, 94, 393, 410, 466,479, 492, 505, 510, 511, 515, 518, 528, 541, 543, 547, 552,554, 556, 573, 576, 585, 586, 587, 595, 605, 624, 633: n = A,T,C or G
  misc_feature 639, 640, 653, 654, 667: n = A,T,C or G
aaacaggacnggccgtcgttttacacccngnaanaagnnatancnatgatgntngncngtnnnttncnnnanagaanaantaaaanncattanntgcgggacatgtggaagttaatagtatcaacttcttcgttggacaaagctacatttgggtcttgttcccaccaatttacagtgtcttgagattacatctgtctgtcttgggaagtacctctgtacttaagagtacctctgttttcttgtatatcaaagggagtaatatatgtactttttaatatgcctgatataaagttgaaatgagagaatgtatttaaagtctggcacatcgtgtggacaaggaggcctagaatttggaaaaacatatttccataagttatataggccaggcttganactaatatttaaaaaanaactggattggaaattctgtttgcataataggggaaaacaaaacagggtaaatgangttaaaccaaacngggggagcctttnttttccccttttnccaanntttnttnaccaaaaggnacccctggggaantngggngcccntnanaaaaaattttgaaaacnccngggggtttnnnaaattttnaaaagggganaaggtttttaaaaaaattngaaaacccnttgganngaaattttttttnntttttctaccccncctggaaagggggggg

SEQ ID NO: 16897 - DNA, 317 bp, Homo sapiens
  misc_feature 2, 31, 33, 43, 44, 46, 47, 48, 50, 61, 65, 67, 75, 85, 104,115, 117, 120: n = A,T,C or G
anactggccgtcgttttacaccccggaaaangntttaaccttnntnnntncccgccctttnctananagaaatantaaaattacnttaggcggggggtcttgcnttactttctgngnggnaaaatctctgtatatatctgtcagactataagctaagttgttagctgtactacataggactgtggctcattactcaaatactcatcatactcacatgcaacttaggataccacaagttttccattcagagtgtgttatccccaagaagtcatttttaaaaagaaatcacttttttcagtaaaacctactcccccatt

SEQ ID NO: 16898 - DNA, 440 bp, Homo sapiens
agtacttctagaattaattaaggcgggtggatcacgaggtcaggagttcgagaccagcctggccaatatggtgaaaccctgtctctactaaaaatacaaaacttagctgggcgtggtggtgtgcatctgtagctgtgtgggaggctgaggcaggagaatcgctggaacctgggaggtggaggtttcagtgagctgagatcgtgccactgcactcccgcctgggcaacagagcaagactctgtctgaaaaaaaaaaaaaaaaagttttatgcccatttatccaacagcagtgttatgataccccaaagtttgtctgtagtaggcagaaattttatttaattttcatgtgtttattaatgaagttgattaatatatttctagattttaaaaaattaagcttctcacattccctaaaactttgagtagatctattatcatttg

SEQ ID NO: 16899 - DNA, 365 bp, Homo sapiens
agtacttctagaattaattaaggcgggcgcctgtaatcccagctgcttgggaggctgaggcaggagaattgcttgaatccgggaggcagaggttgctgtgagccgagatcgtaccactaccctccagcctgggcgacagacactttctcaaaaaaaaagaaaaaaaaattaaaatgagaaatgtaaaattgtcagattaataaactttattaaacattcccaaggcaatgatgaaaataattaacagtgaattattctataaagatgtgtttccttgttaaacattggacttcttgataaacatggagaatgtctaccgtacatttatatcttctttctcttctgaaacatcattagaatgatag

SEQ ID NO: 16900 - DNA, 229 bp, Homo sapiens
  misc_feature 60, 70, 131, 138, 158: n = A,T,C or G
agtacttctagaattaattaaggcgggagtttgagtaaaactgacgtgtaattctagaantgcccaagcnggatttggaaaaggagtcctagaaattgagaaagaaattggggctagtgacagaggcatangattaantaataactgaatttattaanagtgaaataggcctccaagttgctgacttagaataaaatctcacaaaattaaggactgatttttaaaatta

SEQ ID NO: 16901 - DNA, 446 bp, Homo sapiens
  misc_feature 122: n = A,T,C or G
agtacttctagaattaattaaggcgggggtgttcaggagattgatttgacaagatatgctaaacagttaagtttaatcatcatttaattgataaccagcccctaagacccttgagttcaaanatcactaacatcaatggtattactcagtgcgacagaaataatatcactatttatcaagttttgatgcactgtgctaagcattttgagtgctcagcacaaaatctaatcctcacaacaaccctatacagcaagagcatacatcttttttgtgcaatgaaaaagctgagactaagtctggcatttttccaaaggccataatctagaaacaaccaggatacaaagtaccctgaccccaaagccttttttttttttttggtgagtatgctacaatcgaatagacctttaaattccacgtccttgtaaaaattcaaaataaaattgggg

SEQ ID NO: 16902 - DNA, 472 bp, Homo sapiens
aaagctgggtccgggccccccctcgagagtacttctagaattaattaaggcgggcagatcacgaggtcaggagatcgagaccatcctagctaacatggtgaaaccccatctctattaaaaatacaaaaaaaaaaaaaagaaagaattctaaaaacagtggtacctgtcctaggctgattcacaaaacgttaccaacttacgcagcagggacagggacagggacagaggaagcactgttgaaaacagcgcacacacaaagttaacaccacaagaaatgtttctcattattctgaaaatcaaatattaaggtttaggctgggcttggtggctcaggcctgtaatcctagcactttgagaggctgaagcaggcagatcaattgaggtcaggagttcaagaccagcctggccaacatggggaaaccccatctttactaaaaatacaaaaattagccagacatgatagcatgtgcct

SEQ ID NO: 16903 - DNA, 454 bp, Homo sapiens
  misc_feature 46, 315, 441, 442, 443: n = A,T,C or G
taccggggccccccctcgagagtacttctagaattaattaaaaatnaaatacagttaagtattttatacatgtacaaagcaattgcctataactattaatgtttttaataaatgttttaaattaatgtttttaaaataaattggattatatttaactctgtaattctcaatacatgcttacttcaagttaataaatgagatatgcttatttttttctcagtagtatattttctcattaaattaaatcattaatttattctcattaagctccaaacctggtttctctaattcgggcagtctgttctgctgatttanaaatgggaccccttccatgttcaatatcactctttatgtataaaccacaagactaggggaagtagagtgacactgatccttaaataaaatttctgccacaaaacactgtgaatgaatttgaaagtnnnaaaaaaaaaaa

SEQ ID NO: 16904 - DNA, 312 bp, Homo sapiens
  misc_feature 297: n = A,T,C or G
agtacttctagaattaaagcatgtacggtatcaacgcagagttaataaaggcggctctgacaaataagaaaaggtgctatcagcaaatcagaaatttacagtaattccaggaagatcaaaagtagataggactagaatgacagagtagaggaaatagattctatttaaaacatacataggctaggtgcgatggctcatgcctccaatcccagcaatttggaagtccaaggcgagaggatcgtttgagcctggagctcaagactagccccggcaacattgcgagaccctgtctctacnaaaaaaaaaaaaaaa

SEQ ID NO: 16905 - DNA, 411 bp, Homo sapiens
  misc_feature 32, 34, 388: n = A,T,C or G
agtacttctagaattaattaaggcagggtagntnttatcaggaagtctgatggagatcccaggagctctccctccaaacaaaagtaatttgcattcctgaaagaattgtcaaagaactgaaagatgcaaggattgcaattcctagcaggtacctacttaatacaactgtctggctaatacagaaaacaaatatttttagaggatgactgtgttttaatcttaatgactacaaggaagagctggtattcatatgtgatctgcttagttcagtacctgatatgcagctatcattctggcaaaggtttctctatctctacaaacagaatttcagaagcaatttgctttcatttggcttgtacagcagtacatcttcactatactgcctcangttaagtcagttttctggctttc

SEQ ID NO: 16906 - DNA, 184 bp, Homo sapiens
agtacttctagaattaattaaggcggggagccaagcccagactctcaagagggtagaaatggctactaggtataatcatgctaattatttttctttctactaaatctgcagtaggtgaattatttcaacagccagagtatcagaaccacagagcccattcgagatttttaaaaatcagtattac

SEQ ID NO: 16907 - DNA, 383 bp, Homo sapiens
agtacttctagaattaattaaggcggggggcctggaaacggggtgatgtggacagtgactgtcttaagggaattgaggatgttggttgagaatagttgaagtaattgatcattgggtccaggccaaattggaaaggaagcaaagctaatgaatatctgtggggtcaaatcataagaatgaaagatacttcctttcagtgtataaaaacttttgaaatttattgtaacaattttattttaaatatttaattatatgaagcaagaacaagctaccttacattttattctttaattgaaaactacatatatctactaattactaagtacaccgaatcaagagagttagaactaagtcccagatctgtactagtgaactatgtaacc

SEQ ID NO: 16908 - DNA, 347 bp, Homo sapiens
  misc_feature 305, 307, 318, 320, 321, 324, 325, 326, 328, 331, 332, 334,335, 337, 339, 340, 341: n = A,T,C or G
agtacttctagaattaattaaggcgggagaagtagattgaagatacaagaacaaagggagataattgacggagagcccttgaggatgatggaggggttgagattcatgagggattggccctagacaaggtacatgggttaaaaggcagaaagaaagaaagaaagaaagaaagaaagaaagaaagaaagagaaagaaagaaagaaagaaagaaagaaagaaagaaagaaggaaagaaaggaaggaaggaaagaaagaaggaaagaaggaaagaaggaaaaggaaaagaaaagaaaagaaaagaatngnggatgaaaaanannctnnntntannannanannnagcggc

SEQ ID NO: 16909 - DNA, 294 bp, Homo sapiens
  misc_feature 249: n = A,T,C or G
agtacttctagaattaattaagggggaataggaaggaaagaaggaaggcagggaaagagaggaaatgcaacaggacaggtgtcatgctgagaatctgagaagagctgcaacaacagccagcaagaaaacagacctcatggcccggcgcagtggctcatgcctgtaatcccagcactttgggaggccaaggcgggtggatcacgtcaggagatcgagaccatcctgactaacacagtgaaaccccatctntactaaaaataccgaaaaaaaaaaaaaaaaaaaaaaaaaaaaaaa

SEQ ID NO: 16910 - DNA, 277 bp, Homo sapiens
agtacttctagaattaattaaggcggggtttgttggagggcagattagaaagagtttacttgggaatcaaaaaactcaagaagcaagtgattaatatacttgaacctaagttttgctcaaatcatcaaaaacaaaggtataatacttaaagctagaaatgtatatacatcctacaaactgagggtcttcttcgggacctgatggatgaactaacttctatagggaacaattggaagtcatgtctttgcctgagtttctagcaacatagtaaaaaaaa

SEQ ID NO: 16911 - DNA, 207 bp, Homo sapiens
agtacttctagaattaattaaggcgggagccaccgcatgagtccttttaatcaattaattgctttttctctataataattgtagacagctgaagagggatcaatttaaaaaaattcaagtttacttcagtaatcattctagattacagaattgtgctttaaaatagctacattgtatatatcagtactagaaacatccaagaaatag

SEQ ID NO: 16912 - DNA, 415 bp, Homo sapiens
agtacttctagaattaattaaggcggggcaaagcttcttaaaataacattcttcttaaatcgcatccatatgatttagcaaattgatacggccaaagtcaataaatcatgatgccgggtttttactttaatgtataactgcttttattttattttttgctttgagccaactccttataatttttagcccaaagttaaatgtatattcttgtctaggcaaaacaagctacttctcacataacgggttcctggttttcaatgtcaaaccaccacgaatgcaggaaatcttcccccagcggttcaacaggacacagagctggctgcctctggttgcaccaacatgcaacccattaactgcttttcagttggcagtatttgaatttgtagattttttcaccacttttcaatgtgtaagt

SEQ ID NO: 16913 - DNA, 222 bp, Homo sapiens
  misc_feature 8, 86, 132, 135, 198: n = A,T,C or G
agtttttntagaattaattaaggcggggggatagcaggaggagttatcttcttacaaggtcactgccctatctaattagacccctncaccctttgaccctcatttaaacttaacttctaaagaccctctctncanatagttacattgggggttgggcttcaacataggactttgggggaggtggaggacacaattcanttcttaagtatatattaaactttt

SEQ ID NO: 16914 - DNA, 277 bp, Homo sapiens
agtacttctagaattaattaaggcgggattaccatacccagctctgggttcaagtctcaactcagctactgtctggcttaacaacaactggacaggccctctgacctctcaggtctcatttccaccagatttcctgggaaacaagccactgtctttattagtaaactacaaaatgtattttgcatgagtacaaaatgtattttgcaagtgagtaagtatgtaaataaataagtcatcttttgataataacatgaattctggtttgtttgtttttttt

SEQ ID NO: 16915 - DNA, 151 bp, Homo sapiens
  misc_feature 5, 22, 96: n = A,T,C or G
agttnttctagaattaattaangcgggtcatcgtagttctcctgagaaaggaagcaaaaacaagaattattttcttgctgtacaagatgacacccnactggcctctgtgctgttgtagacccagtcagataaaacagttggaggtcatccg

SEQ ID NO: 16916 - DNA, 327 bp, Homo sapiens
agtacttctagaattaattaaggcgggaccaaacctattagtaattggttaattttggatacagactgaagcagaagagggacttacatttttaaatctgtgtgcttttgtactgtgtgatgtttctaaaagcatacacctatgtattatgtaatttaagcattttaaaagtattttcctggccgggtgcagtggctcacgcctgtaatcccaacactttgggaggccgaggtaggcggatcacgaggtcaggagatcgagaccatcctggctaacatggtgaaacctcatctttaccaaaaaaaaaaaaaaaaaaaaaaaaaaaaa

SEQ ID NO: 16917 - DNA, 383 bp, Homo sapiens
  misc_feature 21, 34, 40, 41, 44, 54, 57, 58, 61, 69, 74, 75, 91, 95, 96,100, 101, 102, 103, 110, 112, 129, 131, 138, 142, 143, 144,165, 172, 192, 194, 195, 196, 210, 213, 223, 224, 229, 234,235, 250, 260, 262, 269, 280, 284, 285, 288, 299, 304: n = A,T,C or G
  misc_feature 319, 328, 332, 333, 340, 354, 359, 360, 375: n = A,T,C or G
cagggaccgggccccccctcnagaggcttcaagnactaannaangcggggaggngtnnttnacaggggnaaacnnacaacaaaaaaacccngacnnaaannnnacacccnanaaaaagggcaggaccananagggaanaaannnagaggggaaacagaaaaccanaaaaaancaggagaaacaggagaaaancnnnggcccccagggaancangaaaagggcnnggcangaccnnaaaagggggaggcanagaaaaaaanancaacacnaaagaaggggnggcnncangaaaaaccccnagaangaagagcaacagaangggagaaangaanngcagccnaacccaagggacanaaaanncaaaccaaagagganggaaagaa

SEQ ID NO: 16918 - DNA, 390 bp, Homo sapiens
  misc_feature 52, 61, 69, 70, 73, 83, 84, 90, 95, 104, 116, 127, 128, 135,143, 177, 178, 184, 190, 207, 209, 217, 219, 229, 304, 305,368: n = A,T,C or G
agtacttctagaattaattaaggcgggagaatcgactgaacccagaaggtcnaggctgcgntgagccannatnacaccactgnnctccancctgngcaacaaancgagatcctgtntcaaaaacatnnaataaantaaaatantaaagtcagcagtcctgttcttttaataagtgcnntaaaanactttnatattatcaaaatttangnggccactntncctccttttntgcttaatgatttgtatatggaaaatgtatttcaaatgacaccttttttccccaagaaagcttaacatacagatnnggtgtttaccaaagtaagttaccaatggttaactccaagtgtcacacagggcactgacagttnaagttggtcttctatttctgaa

SEQ ID NO: 16919 - DNA, 344 bp, Homo sapiens
taatgttgatgattctgttagttgagtggtctcgttgtgacccctcctcacccccaaacacatgcatcttctgaactgtcctttagttcacatctcagaaaatgctggccaatagggcactgagtagaaacttgaattactatgtctccattatatgcataggtaccgtttgctacatattctcacatttagttagactattcctcatcaagaaggttccgaggagtattttgtaaaatggcaacctatatttttaataacataagccctgaatcttagttcttatttaagagatgcatcatttacagatatataagctccatgaggacaagagggaattttgt

SEQ ID NO: 16920 - DNA, 770 bp, Homo sapiens
  misc_feature 11, 18, 19, 20, 24, 27, 28, 32, 35, 37, 50, 55, 59, 60, 67,69, 88, 481, 698, 739, 743, 745: n = A,T,C or G
tttcaccccgnaaaaagnnnaaanaannttgnttncnggcccccccctcnaaagnactnntaaaatnanttaaggcgggagaatgccntgaacccgggaggtggagcttgtagtgagctgagattgcgccactgcactccagcctgggcgacagagcgagactccgtctcaaaaaaataaaaataaaaaagaagagaccctttaatttgtgcattcttgtggtgggataattttaaaccttaattttgtatgattaccctcaaattttacacatataaacaatggtaatcctgaacagaggatggcaaaaaggaagaagtgtttacaagaaaggcaaaagttaatcatcctcttccaaaactgaaaaaaaacctcagcatttactttgggcaggtgaaatgtctaagggcactttctaaagataaacgagacaaagtctcagtacgtatcaagcaaataaagtaacaaaggtggaggtcanaagacctagttatatatctctgccattaactgacctatacagcaaattagataaagtgaggataggataccgtaaaatagttattcaaatgaaataaatgtatgtctaaattataaaatgtctaaatcaataacttttaaataaatcaatttatttttaaatgcatataataattcaaatgaaggaaaaagtgttacctaataaaatttctggcccngcgctggggctcatgccttgtaatcccagcacttttgggangccnangcaggaaaatgctttgaccccccgg

SEQ ID NO: 16921 - DNA, 150 bp, Homo sapiens
  misc_feature 51, 85, 90: n = A,T,C or G
agtacttctagaattaattaaggcgggaggaagtgtctgttaaacacttanacaccgaggttcaaaagttggagaaaaggtggtntaggntcgattagtagagatatgggagccatgtgtgagtagatactaaagcatagggagaaagta

SEQ ID NO: 16922 - DNA, 268 bp, Homo sapiens
  misc_feature 1, 27: n = A,T,C or G
natctacaacgtatatacaggctttgnaacaatttttatatccattcattgtcccacgtgattcctctgcatatcccaggagagatgtgggtactctcatgccctgtatatggatagataaattgagggtgaggttatgaaacccagtgacagaatttgggactaggaccttgtgggacaaggatcttggtttgctgactcctgattcagggctctttctataatagctcataagaactctaactgaaaagaatttctcatgggttaa

SEQ ID NO: 16923 - DNA, 195 bp, Homo sapiens
  misc_feature 2, 25, 35, 41, 43, 47, 48, 50, 57, 75: n = A,T,C or G
anactggccgtcgttttacaccccngaaaaagggnaaccancngggnncnggccccncctcgagagtacttctanaattaattaaggcggggcgatgattcagtattaattgattagtcagataaatagtaataccatttaaacacagcaactgactttgtttaaaagttagattatacccgaaaaaaaaaaaaa

SEQ ID NO: 16924 - DNA, 555 bp, Homo sapiens
  misc_feature 553: n = A,T,C or G
agtacttctagaattaattaaggcaggctttacattacacaccccactggtatgttcaggctcacaaagatgcaaccaagaactatatgcggttgcaagcacatattacagaaggttttattttaatgttaaggctgatgaatcttgtcctaagcaggtaggacacctcacaagcactgagtctgaagcagtgaagatttttttttctttagtttaacaaactgcttaatcgctcatcaaattaccccatatatcatgaaggccccaaacatagtgaagcttcactagtttttcatttttaagatgtattcaaacatcaagtaatgcacaacttgccaaggaatatttgaaaatggttacttttttaaaatttaaaactccgttagtgcataactgcagggtttaatattacaattccgaaatccaatgttaagcactatttcgcagtgaattctatattgaatattgaggcatttctaagacattaaaatcaactagcatttttacacatttcttcaacataaaacattcagattccattttattttttttntt

SEQ ID NO: 16925 - DNA, 367 bp, Homo sapiens
  misc_feature 121, 151, 331: n = A,T,C or G
agtacttctagaattaattaaggcggggattttgatacacataaaagtttgtgatagctgctactgcagacagattctatgatagagttgagtttattttacaaagggagttctacttctntaatattttaaaaatttctattcatattgntacctcacaacctgaacttggcttcttgaattgttaagtcattcaaatattttttgtgttgttcctgagttggccaggtcataagagctcacccaaggggagagtgggtctatcaatggcaagtcaacctttggagacctgataattgtcaactgaggaggccttgggtgaacccagtangagtctgatctgtgattaaagtatagttgtatgaat

SEQ ID NO: 16926 - DNA, 491 bp, Homo sapiens
  misc_feature 5, 14, 121, 316, 318, 321: n = A,T,C or G
taatngcgggacantcaatcggcctgcagtgtcacctgccacctcgctgaacagttgacaatgcaattatccagtgtggaggcagggagttggcgtgtgtcaaacgcacttagccactttncgggcctcctcgataacgcgtttcactgcctcacgtcaggagagacgcagagagacagacgccgtttaaaaccattgatacttgctccttctgcctgcactccctctgtcctagcttaacaattgtgttccaaaaggcgattaaatcccatcagttgccacgggggacagaaggtgccttgctccttgccacctntnctnacccctcccaacaggcgacagagagaactaaagatggtagggagtcacaaggcagcagcccaaccctctccactccaagacccgctccagcagtgtgctgttccaacacctgtcactggctggaccaacagcagagctgcactggggggacatttttagcacctggggct

SEQ ID NO: 16927 - DNA, 437 bp, Homo sapiens
  misc_feature 33, 202, 373: n = A,T,C or G
agtacttctagaattaattaaaatctcattaangtatgtgaaactaaaactgacacaatttatataaaaaaaagtaagagaaagtatactggggcaactagtcaagtcacagaaatcagagatttttatattttatctgcatctattgctacctctacaagttgccttctatttttgaagagtttccataaagtgccatagntttcattttttacaacagttcaaaaataagcaatgataagtatagaaaaaaggtattgatatgctggaggataaataattatgacaccatatgaaatttatgaagcattatcagatattattacatgaatccctacaacaccatggcgtactaattttattattattatangataaggaaataactacagagaggtttactaacttgcccaaatttatatagctagtaaatgtaa

SEQ ID NO: 16928 - DNA, 383 bp, Homo sapiens
agtacttctagaattaattaaggcgggaggggagtacacaggctgtaaacagcagtgcccaagctgagacggagcaagctgggaatccgcccgggtttcattcagtcttccacaccccgcatggatactggttatacctgtgatcagttatgcctgtgatggttttttagaaaacaaaactattttatcactctgctttaaagatggccgagtggaaagacacagtcctggaatgtttaaattcaagctgaagagcttactagccacgtgactgagcaagttatggttccatctttctaagcctcacttcattctttgttaagacaggcctcagcatgctgttagtaggaatctaaggaacccagtgctgatggagaaagggg

SEQ ID NO: 16929 - DNA, 326 bp, Homo sapiens
agtacttctagaattaattaaggcgggcatttgacctgaaccaggccagcgggagtcttgtcattctttgtagattcttccctcttaggttaaagagtgggaatcagagactttcttaaacataggaaaatcttccacacgtgtaaacttaatatagaatttatatacttataaatctaacatacagtaaaataaaatgaacacataataaggaagcattaagcaatagggggaaatgaaatagtcaatacatgatgtagggagaaataatttttcaataattttagaagaaaataaatttaaaagaaaatgaagttctatcccta

SEQ ID NO: 16930 - DNA, 408 bp, Homo sapiens
  misc_feature 300, 363: n = A,T,C or G
agtacttctagaattaattaaggtgggaccagctgttgtagcaggtttctctaaaatgcagcaacattttagctgaatcccaaataatgaaaagtaggtaaacatattgaaatttgtggaatgagtttcaggaagaattaaaagcaagtccaaagggactgaggtttcaagtcttggtgtgttttaggaatgtctttgtgactgaagagtagtggacaaaaagggaataggaaacaaatgaattcagaaaaaaaaaaaaaaaagacagatttgggccatagaagaccttggaggccatanaaataaattttgacttatattgagtgtaatacaaaatatttaagaattgtaagcaggcctgtnttataatcagatttacattaacaaaatgattctattcatttgtga

SEQ ID NO: 16931 - DNA, 361 bp, Homo sapiens
  misc_feature 51, 109, 116, 121, 122, 123, 124, 126, 127, 156, 163, 172,173, 176, 194, 219, 237, 241, 331: n = A,T,C or G
agtacttctagaattaattaaggcgggaggatggctcgaagccaggagttnaagcttgctgtgatggtgccactgcactccaccctgggtgagagtgagactccatctnaataaanaaatnnnncnnggtcactatcctggattatttgggcaagnctaatcntatcacagnnctntaaaaccagagcattttntcaggcagaacttttcaggtcaganaacctgtgtgaaaagatntcantgtgccggcatgccagtgctggctttgagggtaacatgggtctctggcagcagagtggcctcaggtaacagcagcaaggaagcagatctnagacccaccaccacgaagagccagactcgg

SEQ ID NO: 16932 - DNA, 222 bp, Homo sapiens
  misc_feature 16, 29, 44: n = A,T,C or G
gttcccggcccccccntcaaaagtacttntaaaattaattaagngcgggagaagctaacatgagcttttctgtctataagatctcatcaaaagcttaaataacgaaggtaagagtcagtattctgtggacagcttagctctacacaagaccttctgtccatcttgctagttattttccagttaatggaaatcttatagacagaaaagctcatgttagcttct

SEQ ID NO: 16933 - DNA, 408 bp, Homo sapiens
  misc_feature 249: n = A,T,C or G
aacaaaagctgggtacccgggccccccctcgagagtacttctagaattaattaaggcgggacaacagcctgttgcagtgaatccaaatctgttaccagactgatttggttcaaaatggccaaaaagaataaagtaaacggcagtacatttcatagacagaaccctatgtctaggaaccaagaatcctcttgattcatcaggctacaatataactcggcctccagcaacaacttaatgtatcaaaatcanaaatatacgtacacgatgcagcgactggctcaggtgtgtagtattactatcattgggaacactatttcgtcaaactgtaaagtgcaagcaaactgggttcctgacctgaatttcatggaagtctaaacaactccattactgtcacaggagtcgccccaa

SEQ ID NO: 16934 - DNA, 474 bp, Homo sapiens
  misc_feature 4, 7, 141, 170, 171, 260, 358, 385, 430, 455, 459: n = A,T,C or G
agtnctnctagaattaattaaggcgggcacctatagtcccagctactagggaggctgaggtaggagaatagcgtgaacccaggaagcggagcttgcagtgagccaaggtacagccactgcactccagcctaggtgacagantgagacttcatctcaaaaaaaaaaaaaannaaaagtcttacggagtgctactccggtctacttttaattttgaaaaaaagttaaccacagagagagacttaagacttcaaatatatagnatattcagttttcttaatattttagcaaaaaattcacttggaatgacaggtttgttgccaccttatttttaatgaaacgtgacatttggaaaacattngcggaacagatagatgaggtggcacanatttcttaaagtggagcccatggcccatttatgtcataattaggngcgttataaaagtatagatacgtanactntgatttcaaacctac

SEQ ID NO: 16935 - DNA, 362 bp, Homo sapiens
  misc_feature 31, 33, 38, 39, 40, 47, 48, 53, 54, 57, 61, 63, 69, 71, 72,73, 75, 76, 77, 82, 87, 88, 91, 93, 94, 97, 98, 100, 105,107, 110, 114, 116, 118, 121, 123, 124, 134, 135, 142, 144,145, 147, 151, 153, 156, 329: n = A,T,C or G
agtacttctagaattaattaaggcggggcangntgacnnntgcttgnnaatcnnaantctntnggaggntnnngnnngtggntcatnncgncnnganntnaatancntcntggncngnacngnnaaaccctgtnnctactananncncgtngnttntctgggcatctgtaacccagctactagggagacagaggaagggaactgcttgaacctgcgaggcggaggttgcagtgagctgagatcgtgacactgtactccagcctgggtgacagagtgagattccatgtcaaaacaaaaacaaaaacaaaaacaaaaaacaatcaagaatnaataaaaaaacgctgaagaataaaaagtagtga

SEQ ID NO: 16936 - DNA, 367 bp, Homo sapiens
  misc_feature 343: n = A,T,C or G
agtacttctagaattaattaaggcggggaagctagggaatgattcgcagcactatgggactggcaaaagaatccagaagatgacatactaacacttgcagttaccaatatgttgttaaatattagtgtctggggatctgttaggtagagataaaacttaatgagataagacggaaaattggctatatctgacaagtagccacttcttacccactaaattttctatattctttctctagttcttaaggtgcctcctagtgatatgattcagcacaatataatgcactgttacttcacatttgggaatttattcacataaaatcctaaaagaaatttaatcaaanaaaaaaaaaaaaaaaaaaaaaaaa

SEQ ID NO: 16937 - DNA, 402 bp, Homo sapiens
agtacttctagaattaattaaggcgggagatgatgagatagaagttcagagaggttaggaaattaccaaagttatacagtcagtatgaagtagaattggcattcaaatctaggttgtttggtcccactgtttgtttttaaaaataatttattctctggggggacaggaggaaagaacttttaaaggagagaagtaatccgttgttcttaggagccaaaacattggcacaactccaaataaaagtaatacgtttattgtcctatcatcttaatctcacgattccttctaattttaccaattattataacttcaaccaatacttgcaaagacactgcttacctcaactatgtaaaaacttccattgcatacacttttactttcagccttaattatttcaaactg

SEQ ID NO: 16938 - DNA, 439 bp, Homo sapiens
  misc_feature 358, 399: n = A,T,C or G
agtacttctagaattaattaaggcgggggggaataggattaaaggtcagagaggtaagttatttttgaaaaagaagttcttccaaatttgtgtttggaatagaaaaaaagggcagataaagtaatcccatcctacctgacactaaaaagaagttaacaaaaggtattcttcccagtagacgggaaaagatggtgcatttattcaatagagcagtgatgcacagtttttagtgttcatgaaaattacatggagaactgatttaaaattcaaatttataggctttctattccactctcccacttgaagatttttattcagtaggtcccaggtatggccaaggaattcacattttaattanattattccagtgactctaatgctggtggggtctaaaatcangcttaggcatacaatggtacaaaggcagttctttttaact

SEQ ID NO: 16939 - DNA, 380 bp, Homo sapiens
  misc_feature 245, 304, 318, 319, 320, 323, 324, 346, 352, 353, 355, 364,367, 369, 371, 372, 375, 379, 380: n = A,T,C or G
agtacttctagaattaattaaggcggggttggggactaggaggacagtttcagggctggtgggccctgaggtctatgtcttccatgtacctaaggttattttgcatataaaagatggtgttgattaggaccatcttttttcacttcctgaaatctcaggactttacctgttttggattaagatatttacaatgctgaattccctgatactatgagattcctgaagagcccagcattgcccctcgnggagtgttcatgtccctggtatctttggaaatgtctggaagtgttctgtcccaaatganaaaactgtgaaaannnaanntcgccgccgccaccgaagaggntctccnngncgccctatnttnanannaantatnn

SEQ ID NO: 16940 - DNA, 327 bp, Homo sapiens
  misc_feature 301, 308, 310, 312, 313, 315, 319, 320, 327: n = A,T,C or G
agtacttctagaattaattaaggcgggatagaaagtccaaaaacgagcctacatatatgaggttgtagtatgtgatagcatcggaattgcaaatcaatatggaaagtaatacctagttaataaactgacggttagatattcataatttttaaataaatatataaagatatatctctccatagccacgcgcggtggctcacacctgtaatcccagtactttgggaggccgaggcgggcggatcctgaggtcaggagatcgagaccatcctggctaacacagtgaaaccccatctctgctcanaaatatnanannanatanntaaacan

SEQ ID NO: 16941 - DNA, 415 bp, Homo sapiens
agtacttctagaattaattaaggcgggacctatctgtccttcacggtagattcattgtattatttctgacgcaccgaggctgttgtgttcactggtttttggaagccaagatgtcaaacacttccgaagtatgaaaagaagattgcgaaagttacattagggttctgctgtccccaaaaagccctttgtgcacaagtcctcacagtcccgccccatgcattttgtgccacaagtgcaaattgaaggacttcaggcagatcgcgccagggaagagcaatttgaagttttttttttttaaagcttttaaatttcagttaccagctccaatgaaaaaagaaatccagtctagaacagccactctgaaagccaaaacaaaaagagctccaaaaaactgttgagcaaagttaagtgcctt

SEQ ID NO: 16942 - DNA, 615 bp, Homo sapiens
  misc_feature 546, 577, 584: n = A,T,C or G
agtacttctagaattaattaaggcgggggcaagtaagttaaagtaaatccttgccattctgttaatgataccactattctcagtcattagattggacaagaaatagcagttttggtattccacccttcttgggctccctgccatgttcaagcactttaacttgaggtcttagttctgtgattgtgagaataactctagacccatggtgtccctgtagtcctcagtgcgatcttatggctgtggtttggcctttcttctgactccttgagatatatcctgatcctgtacattagaaagtggctgttggagaacaacactgcaaatacaactttgcttatagttgtatttagttgcttatagagcaaccttgagattctgtcagggcagtgctagtgactttcctctccctttaatagattcggctgctgagttcatcagaagctggtaagtagtgcaggtcagaatctgttcttacttgtgcacatgcaccaccaccaccttatctcacaccagtgtggatgaacaagactagattttggtttaagntttacataatgccttacttccctttttctgntcaccanacattcagccacttataaaaaatactctttc

SEQ ID NO: 16943 - DNA, 400 bp, Homo sapiens
  misc_feature 27, 42, 106, 117, 127, 136, 148, 153, 169, 191, 193, 199,207, 216, 221, 222, 245, 250, 263, 269, 273, 288, 297, 332: n = A,T,C or G
tatgcctcatatctgtgattgaaaatnatcatacaatgtaancattttcggaaaaaaattcctaagtttatcagcatttaaaaacattgtgtcatatgcagagaanggtgatcatanctcatatgcngatgaagtnattgaaatactngattntggttctcaaaatatnaagcatttacattccaagtatntntgcagnggtagtgntatgtcgtntcatnntgcaattgatgctggataaaagntcttntaaaagagaaaangacccnttgncaaaaaacaaatganccaaaacanaacaaaaaaaacttacttccaaataagagaaaatnatagaagtcataagccaataatacttcctttcctttaatcccatttaacaagcaattatattaaaacc

SEQ ID NO: 16944 - DNA, 650 bp, Homo sapiens
  misc_feature 543: n = A,T,C or G
agtacttctagaattaattaaggcaggaagccaaagccaattattatctgagtgagagacatgtcaatccatcagccacagcatggtgtactgaacattgccttacgactttcaaatctagaaataggaagaaaggcccatgttggcaagtgtgaggaaatttccaccaatgtccaagatgaacaagtgttaccatttttcatttttctactattgataatctgttatctaatctcagctccctccactctttcttccatatgtaaactcattaactctgatactgggacttgctacaatatgacaaagttatgccatttttcaaagtgtgaaatatgtcatatacatgtacaatctgaaccccaagctggtagtgacattgcggcttctctgatggaaatttttaatataattcatagaaaaacagcataagaaacagtgtagtttttatggatcattttctttctttgtttttgaaacaaaagaaaacatcaaatactgattaatgtcctcatttcagaaatgctaccctcagtggaactnaaacaataagccagtaactgggagcttccagaagataaatattaaaatggtcttagaggaaaataaacaactttttcattattaaaagcaccctaaaggaaattttt

SEQ ID NO: 16945 - DNA, 432 bp, Homo sapiens
  misc_feature 15, 36, 91, 188, 192, 263: n = A,T,C or G
agtacttctagaatnaattaaggcgggagagggtanatgacaggcggtggcacttccctatacttgctgcccttacaattatgtgactaanaattacagccttactctttaccaaaacactttctcccttggtgttcatgaagacatcctatttccaaatgttttcaaacaaaaaagagaatatttantcangggcagagaatctcattcagaatagcttgtccaggtgatttatccagggtaactaagttgttgagtagcantttgaacgaatgataaggttttcaccataagttttataacctatcatgaagagctgtctttctgcattgttggtattgtctaaccctgataaggctgaggagtcattcatctgtttcaccaccaccttctaacatgttgttcttacatgttatccacagctggcttttc

SEQ ID NO: 16946 - DNA, 475 bp, Homo sapiens
  misc_feature 180, 251, 253, 463: n = A,T,C or G
gggtaccgggccccccctcgagagtacttctagaattaattaaggcgggggatggtggggtctgggggaaatactcaaattacagtttttaatggggtattgtggtcaggctagacctcattgagaagatttttttttcttcatacatttagttttaaacctcacatttgtccccagcanaacatttgggaatcaattaaaagtgatttcagctgggaataacctgcaagctgtatagtatctcttgtaananatgtggcactaagcggttttcttagtggtacaatagagatactgtataccacatgaaataacaatgttctgatacagtctttgttgcatatagtttctcatccattccttcaggacctatggactgcgtacaatatgcttgatactgtgtgggctctggagaaactgcaagtgacaaggtcaccatggtctctcttcccagagaccttanagtttagtaagg

SEQ ID NO: 16947 - DNA, 568 bp, Homo sapiens
agtacttctagaattaattaaggcggggtagctccttggatgtggcccttcatggtccagggacctgagaactgaatagccaagttatctgcctctcacaaacacaagttaaacagaagacacagggcaggaaattcccaacagacactcccattccaaaggcgcagaataaggagttacatagcaaccacactgctctacagtaattccaaacccagtcatcagctgtcgttggggtctcccattctgtaggaacacagatttgagcttcattctgctccatggaagtcattctctaatccgttgttctctatgcttagctccaccttctgagacatctttcaacaggaaatggaccatgtctgtagctaagtagctttcttagactactctcgttacataaaaatttggggttctggaagcttcttttcaaatgtttttgcctttttagtccaattgggccatgctttcattcatatgactctcttacaactttgtgggattcactctatgccccaaatttcataaccatacttatttttgagacagacttctttcaaattttggt

SEQ ID NO: 16948 - DNA, 412 bp, Homo sapiens
agtacttctagaattaattaaggcgggaaatcagtcctgctgaaccaatgaggcctgccactcttcaaggccagcagcccctctgacctctctttcaagcaccagcccatcctcaaaatattgtttttgctacttcctgcctcaagagttggggaagttgcaaagcatgcttctgaatgctttcagtcatgaatattgtatttataaaatgtgggcaaacatgaaggctaccaagagagaagcgtgggagtaaggaaaagaggaacaataaatgcctgttccccctttcctggagccattaagcacttctcccttgcctcttgtatccttgagtgtaagacaccacagagatcacttaggaaagccgacttgcaccctgaaatcaacgctgaccttcttcagttttccttgg

SEQ ID NO: 16949 - DNA, 420 bp, Homo sapiens
gaattaattaaattgctatagaagctaaaccaatacttctgccaaaaattgtctggataaaaataaaaaaagaaaagggaaagttgtttgtacacttaccttcacctgttccagctgcattgatgaataagcccagaatgatatttgtaataaattgccatcccttatatttgtttatgaatatatgaacctttatcacatttctcaccaggctaatgcttggcattaaggccttcatagatttgatttttaggattttctgtgatatcttctttattagtcactaaggtcattctagaattggtgatttttaaacaattaagccttgtgcttctccactgtatgaggaaaatattttacagtgttataaaaatagagaaaattgctaaaaagcaataatatttatttttttccttaaga

SEQ ID NO: 16950 - DNA, 382 bp, Homo sapiens
agtacttctagaattaattaaggcgggtggcctacatgtttaaattgattttcgaaattattttcaaatccctcgggttgcgtgagcaagggtggatttctatttctaagtgtggtgaccttttctaaaactgttttatgcttttcactcttctgtgattggtgccacctaggactgcacactgcattcatttggtgtgtctgagtgagctgtttaatccagaacaaggaaactcatcccttcaaatctgaattaaagaagcatctctctgggtacgatgaggttttctgatgtaaaactctcatctaaaagttagccattcttattaagattgaaaccttaggccgggcgcggtgcttacgcctgtaatcccagaactttg

SEQ ID NO: 16951 - DNA, 317 bp, Homo sapiens
  misc_feature 309, 317: n = A,T,C or G
agtacttctagaattaattaaggcggggcgagatcacaggaccataggaccgaggcgggatagcattaggagatatacctaatgctaaacgacgagttaatgggtgcagcacaccagcatggcacatgtatacatatgtaactaacctgcacattgtgcacatgtaccctaaaacttaaagtataataataataaaaataataataataataaaaggaaaatgaacaaaaaagtctctctggcctcaatgccactgaggcctattactggaaagtatacataaaagtttaaaaaaaaaaaaaaaagganaaaaaaan

SEQ ID NO: 16952 - DNA, 492 bp, Homo sapiens
agtacttctagaattaattaaggcggggggagcacctgaggaagaccccagcataagaatcaatgacataactcaatgactgcaggacaggcatagtgccaatcagcgggattttaccaatggtattaagataacctttctgccctcatgttaccgccctactctgtattagaaaccgaaatgctactaagcagtaattcatttaaattcacaagctcctctgttaatatgcaactacccttgaaaacactggggtgggttaagaattagcctttatctctcagaatgaatcaccttaatcagtttccttccctcttcctctcccttcctcctttccctaatacccttcccttccctttcttttcaacgtctaaccaagataaattcagaatacaacttaaggggaacaggtctgagtaaaattctctacacagccaggaaacagtctaaaagcttgggcaggggaagaccaaggaaagaaaaagaaaaatc

SEQ ID NO: 16953 - DNA, 351 bp, Homo sapiens
  misc_feature 287: n = A,T,C or G
agtacttctagaattaattaaggcgggcgcctgcagtcccagctactcgggaggctgaggcaggagaatggcgtgaacccgggaggcagagcttgcagtgagccgagatcgcgccaccgcactccagcctgggcgacagagcaagactccgtctaaaaaaaaaaaaaaaggatgatgtccacaaatcatacaaatcattctgtttatcttcctcccactgacacttcactttactaaagttatccattctcatactaccgttgttttgaacctcacccacacaactntccaatattacctattactaattttttcccattaaaaaaatttaaaagttagctttacccactc

SEQ ID NO: 16954 - DNA, 380 bp, Homo sapiens
aaagctgggtccgggccccccctcgagagtacttctagaattaattaaggcggggtaattttacaaatcactttttttaaattatagcatagggttcagatggaattagtaacagacgcaagctgccaacttcggtttcttatgtgaaagccacttgttctcaaagggtctccactttctaggcttgcttggtttttgttttctgagtctggttcaaactttaccatatgttcttaaaaaaattaactgcttaagagttgatttatcttgtctgcattgaatagcttattatctttaaccatgcatctacctggagtattcttttgatgaagttttaccaaacaaaaattctaactagactttcttttaaccttaacaaa

SEQ ID NO: 16955 - DNA, 594 bp, Homo sapiens
  misc_feature 144, 418, 449, 462, 506, 516, 519, 524, 529, 532, 533, 536,537, 543, 548, 550, 553, 581: n = A,T,C or G
agtacttctagaattaattaaaaaatatggtgggagaaaataatagcttgcaatgtggcaatcatttataatagtttgcaacgcggacaaattttttttttaacctcttcctcctagcactttctagggccctgagaagtcttnatttgtagggagacctctagtccttagaacctgaattctcattctggtttcacaaaagaacaaactattcatttgtgcaaactagcattgcgagtttctcagagccaggtaaggtactgtcaggtccactggccccagccctgcacacaccctaaataggtttgagtgtccagaggcagaaccgtgcaccaagagaagcccacaagagagagctgcatcccccagggtcccaagcccgggccagtgccctttctctaagtgcactgcctggaancaggtgcattcgtgatctgcactctccttanaacaagcttcaanggtgggaaagcattgtgaatgggacaaaagtcctaaaccttttngcaggcgggnctnggcangaaancanncannttaatnggttnanccnagggcacaagaccccttgaccggaccantttaatttttttt

SEQ ID NO: 16956 - DNA, 487 bp, Homo sapiens
  misc_feature 476: n = A,T,C or G
agtacttctagaattaattaaggcggggtattagagacagaggaccttttaatattcccttgttccactggtttcttaccccatccccaggactcctactatcctgaagtattagggtatcaggccctggccagggacagcttgggagatgacataattgtcttgcaagcttacttcaccttcagagtgatggtgacctcaacagagagctagacatgtgtggggggaggtagggcagcacctggaggggataagggggaatccctagacctacagggctggtcttggaaagagaagaggtcatgcccctttcacagcgaaagacatgtgcaggaaggctatgcaaaattaaataggcatggtagggctcagtggctcatccctgtaatcccagcactctgggaggctgagttgggtggatctcttgagcccaggagttcgagaccagcctaggcaacatgtcaaaaccctgtctntacaaaacaaa

SEQ ID NO: 16957 - DNA, 589 bp, Homo sapiens
agtacttctagaattaattaaggcggaatacttcataccctcaagatcagtgatcattaaaagtcactgaaggctgcctgcattaacaaagccaactggagaatggctactaaatggctagctgaagacttcatggacattaattatttttgttggaggtaaaagattgggcttcatttgaaaagctgccagatattccttttgttccatgattggtggcgcatagcacttcagttcaataactcagccatgccaccatctgcccagcactctcattctgttggttggcatgtcatttatttgcttttaacatgcaacccatataaaaatccctcataatctgccaaaattagaaatgcagctgttttaagtcttaaacagcaatagcactattcattatgccagtatggaggaataaaatagaaaaatgtatttggaaagagcaatgctacaccagaatgtatttgtaccttcacttttttaacattcaagacatctatagtctgctaccagtgctgacttcaggcttaaagttgacacataaatataccagatagcttctttagtacatacattttaataccaagaa

SEQ ID NO: 16958 - DNA, 565 bp, Homo sapiens
  misc_feature 520: n = A,T,C or G
agtacttctagaattaattaaggcgggggacattcagtgcaatcgtaataggaccaaaataggtttcaaagtgttctgaaaggttttcctgtgtattttttaagtttatatttatgtggccaggcatggtggctcacgcctataatcttagcactttgggaggccgaggcgggcagatcgcttgtgctcaggagttcgagaccagcctgggcaacatggtgaaaccctgtctctactaaaaatacaaaaattagccgggcgtggtggcatgtgcctgtagtcccagctacgtgggggactaaggtgggaggattgcttgaggccaggagttccagaccagtctgggcaacatagcaagaccccatctcttcgaaaaaattaaaatattttttaaaaaagaaaacatttcaagtcatggtttttgaatgttcattatgaatcattttatttaaaatattttcaataaaatcaataaattcacaaaaaaactgtacttttttaaatggaaaaggtttatctnctggcaccctacactaaaagcactttagtattttttctttccctc

SEQ ID NO: 16959 - DNA, 487 bp, Homo sapiens
  misc_feature 3, 181, 255, 300, 340, 351, 355, 378, 379, 380, 383, 405,410, 418, 419, 424, 425, 426, 446, 450, 457, 459, 473, 474: n = A,T,C or G
canactacactcccatagaattctagcattccatgaaataaacagtaaaaactgaacattcatgaaattttcccaattttctataaaatgttagtttaacttatacttctacccaatccaaaaaaaaatttttttaattgtatggaatttttttttaactgtaaaatgcactgtttcttgnctgctggtaagtgctatcaaagacaaatattggtcgcacgtggtggctcatacctgtaatcccaacaccttganaggctgaggtaggcagatcacttgaggtcaggaactcaagaccancctggccaacatggtgaaaactccgtttttactaaaaatnccctattcgtnaaanccctttatttaaaaaaaaaaacnnnccncccccgcggggggagcctccantttcncccttttnntaaannnagttttttactccgcccctnactngggcccncnttttttaccaaacnngggggaaatgggg

SEQ ID NO: 16960 - DNA, 453 bp, Homo sapiens
  misc_feature 66, 67, 141, 157, 171, 205, 300, 306, 310, 312, 315, 316,322, 350, 357, 396: n = A,T,C or G
agtacttctagaattaattaaggcgggggctcagatctgaaaagactggttttaggggagctgtanntaccactttatataacacttgacggcttccaagagcttagagctgaaaaaactcttttgagatgtacgcgtgtncataaaataattatanctgattttctaaanagaagacacatgttactttagtgagttttaaatntgcgcttaaaatacagtcaacaaatgaagcaccccttttctgctctgttgaatatctgaaaacctttggagatctaaagattaccttaccaaatnccactnaaantngtnnatttgnaacataaaaccaacttgccatttttaanagatggngatgtgaatggaatttatttattagaaatcaaagtttancccagctgatgtcattgttgaaaaaaaaaaaaaataaaagcaagaataaaatggttg

SEQ ID NO: 16961 - DNA, 192 bp, Homo sapiens
  misc_feature 179: n = A,T,C or G
taattaaggcgggaaatcaattatgtttcagcactggtaagtgctgttaacagtggtgaatgctattcgagtacagagaaataatatctaattcagcctgtggaggtgaaaactccactttaaacaggtaacccttgagcggacgagatctagaggtgtagctaagaagaaaagtagtnaaaaaaaaaaaaa

SEQ ID NO: 16962 - DNA, 418 bp, Homo sapiens
  misc_feature 301: n = A,T,C or G
agtacttctagaattaattaagggggcagataaaagaaaaatggatatttactgttaagaagtatgtacaacagcaatagagagggagttggtactgtttgagagaaaaatcaaaagtagatttgctctgctttattagaaataattaggggctgggtgtggtggctcacacctataaccccagcactttgggaggctgaggctggaggatcgctagcccaggggtttaagaccagcttgtacaacatggtgacacaggtgagaccctgtctttacaaatatatttttaaaaattagccanccatggtggtgtggacctttggttccagacacttgtgaggctgagatgggaggatctcttgagcccagcaggttgaggctacaatgagccatgattgtgccattgtactccaacctg

SEQ ID NO: 16963 - DNA, 413 bp, Homo sapiens
  misc_feature 6, 15, 17, 25, 35, 36, 88, 90, 92, 94, 99, 105, 111, 112,114, 125, 137, 139, 170, 180, 183, 201, 232, 273: n = A,T,C or G
gccgtntgtttcatncngaaataangggaaccctnnctgggtgccgggccccccctcgagagtacttctagaattaattaaggcgggngnantncagtngtttangaccgnngngaacaaagacncacctgtacatngntttataggacacaggattaagcgttgtttcnagggaaattnatntgcactaatgtgcccacnttgagaaagtgggaaagatcctaaattgacnccctcgcatcacaatgaaaagaactagagaagcaagagcgncacaaattccaaagctagcagaaggcaagaaataactaagatcaaagcacaactgaaggagatagagacatgaaaaactcttcaaaaaatcaatgaatccaggagcttgttttttgaaaagataacccaaaaaaaaaaaa

SEQ ID NO: 16964 - DNA, 680 bp, Homo sapiens
  misc_feature 24, 31, 32, 36, 42, 45, 47, 52, 53, 54, 56, 61, 62, 70, 73,108, 111, 112, 132, 142, 146, 151, 152, 153, 158, 162, 165,167, 170, 172, 175, 178, 179, 182, 192, 193, 194, 197, 199,204, 209, 359, 529, 577, 598, 654: n = A,T,C or G
agtacttctagaattaattaaggnggaaggnnaggnattttntgntnaaggnnntntggcnntgtctganctncatgcatgaggcgcatatgatcctctggaactgcntanngtgcgactatggtggatttntgggctgcantgantgtcnnnctctntccnttngngcntnccnggnnacnataaatggtnnntantntcctnacttnatttttccccttaaagaaagaaactgggttttaattgaaagaatggactgaatggaaaaaaagagcagcggttctttgtaaaatggttgaccttggccagtaacttaacctcgccgagccttgatttcctcacccttgaagggcgggaanaagggtgtctgtcaggcacccagcatactgtgtactcttaactacaggcccttcctctccccccatcatcagggtggcccttcattggtgattgggcatcatcaagttattttcaccagaaagcaaacactatgggtagggatcaaaattgagcttcaccaaaaaccatnaagcactctgtacgcacccctccaccccatttgctcgcagtatcctanaatctttgtgctctcctgcanttccctttggggttccatgttttccttgttcccttccatgcctaactggattgcanaattaagtttattattatgaaataaa

SEQ ID NO: 16965 - DNA, 413 bp, Homo sapiens
agtacttctagaattaattaaggcgggggatatttattttattctttgggaaaccaggtggcaatgagtcaaaacactacttccaagaactgtgtaagaattaaaataaatatccccccaaaagtggaataaatggctactttaccacaatgcaaacacatagcaatgttctcagtaacagtacaacagtttttaattcaactgtacagattttaaaggtaaatttgggacacaaaaatcacatagatatagttgtttaggcatttaagtaatctttgtatctatccctattatcacttggcaaatgtattacctgtcctagcccagtcaaaagtttactgaccatcacaatattcaacagtcttcaaaagcataggcatgatatcccggtaatttggggggaattctccttt

SEQ ID NO: 16966 - DNA, 453 bp, Homo sapiens
agtacttctagaattaattaaggcgggaagacaaattttagttatatcatgtatttacagaattctctattattaagattaacaccaaaatataggttctctatgccaaccttatatcctcttgaccaaagaggagatttgaattccatttgaattccagcttttagggaagacaagccttttatttgagctcaggttgcaactgttttcattcccacatacagtaagaattatggagagcccactaaaagctaggcactattttcttcagcttcctgacatcctagtcattgctctataaattctgcctcttacttttagaatctcttaaactcttgtctttccctggcactcagcctaggaggaagtagagtacttcaaaaactcttttgactcaaaaactcaatttcccatgacaagaaaaatatgcatgagtgagacaacctaaatatg

SEQ ID NO: 16967 - DNA, 341 bp, Homo sapiens
  misc_feature 123, 129, 137, 141, 153, 167, 180, 182, 190, 195, 197, 202,209, 220, 229, 232, 247, 252, 268, 273, 293, 304, 307, 310,311, 317, 319: n = A,T,C or G
agtacttctagaattaattaaggcgggaggattgctttgaaggtcaaggctgcagtgagctacaattgtaacactacactccagcctaggtgacagagtgagagcctgtctaaaaaaaaaaancccaancaaaagtntgtngttttttttacnccaaaaacaattanaaaataatgtttntnaaaaattntgccntnaaatnaaaggtnctggccaggcntaggggctnatncctataatcctaacnctttnaaaggctgaggggggnggatnacttgaccccaggaaaccancctggacaacntancannattccntntgtaaaaaaaaaaaaaaaaaaa

SEQ ID NO: 16968 - DNA, 225 bp, Homo sapiens
  misc_feature 1: n = A,T,C or G
nagtacttctagaaattaattaagggggttcccagtgtgctggctcagtttacaccaatgctcacttcatgagaattcattcactaattcattcatctcagtttttttcacttttctatatgtactgtatgtcataataaaatagatttaaaaagcaaaatgcagaatatgtacagaatgtcaccatctgtgctttaaataactagatccaaaaaaaaaaaaaaa

SEQ ID NO: 16969 - DNA, 431 bp, Homo sapiens
  misc_feature 98, 190, 373: n = A,T,C or G
agtacttctagaattaattaaggcggggtatcaggggatcacttttgaatgttgaaagaatttaagttcatcagcagtcaaggcagagaaaagagcantcaagaaaaggggcacagtgcaggtaagggcagatcctttagagcacagcatgattgtgtcaaggacctaacaagaaatgtggtctggtcanagcttgggaagttgagtgcacaaaggtggaaacctaatgaatcccagcattgaaggggtagagaatggagacgtcaaatttgagactggcctgggcaacatagtgagatcccatctcttaaaacaaacaaaacccatggtggcacgcacctgtagtcccagctactagagtcctggctattanagaggctgaggcaggaggattgcttgaggccagttcaaggctgtaatgagtgatgatt

SEQ ID NO: 16970 - DNA, 282 bp, Homo sapiens
  misc_feature 278: n = A,T,C or G
agtacttctagaattaattaagagcgggtttcttccactctgcaaaaactgctgtatgggctgtgtgggcacacctttgagctcttagatggagacgagctcagggatagtgcctttggagaaaaggttggagagattgcactgtgagaggcttcaaatcaagttaccaagtaaataatgagtgcagcacaccaacatggcacatgtatacacatgtaacaaacctgcacgttgtgcacatgtaccctaaaacttaaagtatactaaaaaaaaaaaanttaa

SEQ ID NO: 16971 - DNA, 141 bp, Homo sapiens
agaattaattaaggcgggtaatgatcattaacccctaaatggcaaaaagcaaattccctggatgcaggaaggtgggcacaaggagtcatgggacgggctttggaagcacaggggcctttgtcatctgaaagctcaggcctc

SEQ ID NO: 16972 - DNA, 280 bp, Homo sapiens
agtacttctagaattaattaaggcgggtgagagcctgcgctgaggctgagtggccggggtctgaacgtcgcccctcggctaagccactcacgtgacttcatctgggtcactctctgagcctcattcctcatatataaaaacagtctgggccaggcacgggggctcccgcctgtaatccagcactgtgggaggcggaggcaggtggatccactgaagccagaagttcaacatcagcctgcgcaacataacgaaacctcgtctttacaaaaaaaaaaaaaaa

SEQ ID NO: 16973 - DNA, 573 bp, Homo sapiens
  misc_feature 1, 29, 49, 464, 470, 480, 502, 517, 524, 531, 535, 540, 563: n = A,T,C or G
naatacttctagaattaattaaggcgggnaggattgcttgaggccaggnagcttaagacaagcctgggccctacaggcccaatctctacaaaaaagtttaaaaaattagcccagtgtgctggtgtgtgcctgtaataataccagctattcaggaagctgagacaagaggatcacttgagcccaggaggctgaggctgcagtgagctacaaatgtgccaccacactccagcctgggggacagggcgagaggccatctctttaaaaaaaataaaagaacacttaaaaacaagaagccagagttcagtgaggtaagaaactgccccatgccagacagaaaaaaggcttaactttcaaaccttttgctcctggcttcactgatctctgccaacaagtgaaaaaaatcagaccccaaagaaagaatctaacattgaaatcacatcactttttgttgacacttaaagaanaagtantccaaaacanatttcaccatctgaatgcccanggtgaaaatgacccngccactnggttctntttnaatcnaataaatcttttccccttttctnaaaaaaaaaa

SEQ ID NO: 16974 - DNA, 601 bp, Homo sapiens
  misc_feature 391, 509, 514, 534, 535, 551, 593, 598: n = A,T,C or G
agtacttctagaattaattaaggcgggctccctgaaggccaaggccaagtccctggccctggcccttatgctcaggatgggtctctgctcactaggcttcaaacacctaactccgggctctctgacaactggcccccccccgggacccactgtctgaactgcactttgcttcctaggtcttgctctgaagtccagctgcaaaaaatgaaagtgaaaatacaaagcacacaaacagttctggccttgagagcaataaccctgtttgcacaaaggataacaacttccatcctggaacaacctgatcattcacaacttaggtccttacccatttaatatgtcaagataatatccagtgtgggcagaaaaaaataaataatgcagccgttagaanaaccaatggaggtcataccatgccattcattaaagtagaatattatacagcagtgaaaatggatgaactatagcgacgtgcattatcatgactcattaccagaaatcatgtttagccncaaanccaagtccaaaaccccatcnngtaaattacatttatntaaagttatagaaacaggtaaattggaccatttattctttangggcnttt

SEQ ID NO: 16975 - DNA, 358 bp, Homo sapiens
  misc_feature 278, 285: n = A,T,C or G
agtacttctagaattaattaaggcggggaaccgggaatatcagaggagatcaaagagagagagagacttggcagaagcttggggaagagagttttgaggagaaaacaagtaccaagggttgacctgctgcagcattacagaactaatcactgtctttcaaattaggagttcgagaccagccggaccaacaaggtgaaatcccgtctctactaaaaatacaaaaaaattagccggcgtggtggcatgtgcctgtagtcccagctactcgggagaccganacagganaattgcctgaacccgggaggcggaggttgcagtgagctgagatctcaccgctgcactccagcctgggtgacga

SEQ ID NO: 16976 - DNA, 413 bp, Homo sapiens
agtacttctagaattaattaaggcgggatatttgcagggttattactgtaactcatttaccctcgcacaacaaagggagtgcaggaagggagggcccaaagatgcctgaaccaccattcagagtgcagacggaagtgtgatccttacaatggtctaactgtaagtatcttgtaaaagaccattaaagttgataagtgcttatataaaactttctacctgaaacctcccagagagttgaaccgtttgtggagatttccgagttgaggaagtttgtgatcatctctgtgtttattgacccttttatagttttactagagcacatggatgaaaatactaatttcagaaactcaagtaagtatttggcatttctgatagtataagtacatgttctgttctttacctagtaatgaagg

SEQ ID NO: 16977 - DNA, 346 bp, Homo sapiens
agtacttctagaattaattaaggcgggggagaggcttgggagtggggaactagcacccgctgtaaggtctgccataagacttaatgtttgtctccaatgggatggagtcctggcataagcaaaattaatattgataacgttattattatttaaaatttgtaaatattgtaaaatattttagaaaacatctactttgaaacatctactgggcgagaccaggagtgatggctcagcctgtaattctggaatttcgggaggccgaggcaggaagattccttgagcacaggagttccagaccagcctgggcaatgtagcaagacgctgtctctatttatacaataaaatt

SEQ ID NO: 16978 - DNA, 187 bp, Homo sapiens
  misc_feature 99: n = A,T,C or G
tgtccacatccactaaacaaagacataagaaatgtcatttgtgtaattttgtgacttcaattgtaatggcattcatttttatatttttagaaattttgngaaatatttgcccttttggctgaggaaggaatagttataaaaagtgctttcaacaagaactgaagggcacacagttgaataatgaaca

SEQ ID NO: 16979 - DNA, 413 bp, Homo sapiens
  misc_feature 2, 4, 14, 33, 70, 373: n = A,T,C or G
tnantacttctagnaattaattaaggcgggggnacctgaacaattctctaggcaaagggaatgacctggntaaaggtacagtggcaagcaaacattgctaaaaatagtatcctttgtaagctctattccttggtcctgagaaaataaaatgtatagctttatttatttctgtgagatgagttaccaatgggtactgctattcaaaaaagcaaaacagtgcaattcttttgacatttacggtgtcctacttatccagaaaatacctatgtttttaactaagctggctcttcattcatgttcctttataaactcccatttactctgtacttaaaagtacatgtcatataccacttataagaccaaatggcaattntagatatttatcaaaagacagcttatttaaaaaaaactaa

SEQ ID NO: 16980 - DNA, 678 bp, Homo sapiens
  misc_feature 1, 22, 27, 34, 36, 37, 44, 45, 48, 50, 59, 60, 61, 65, 68,75, 76, 96, 530, 620, 627, 640: n = A,T,C or G
ntgactggccgtcgttttacanccggnaacaagngnnacccttnntgntngccgggccnnncctnganagaactnntagaattaattaaggcgggnggatcataaagtcaggagattgagaccatcctggctaacacggtgaaaccccgtctctactaaaaaatacaaaaaattagccgggcgtggtgatgagtgcctgcagtcccagctaatcgggaggctgaggcaagagaatggtgtgaaccagggaggtggagcttgcagtgagccgagatcgcaccattgcactccagcctggggacagagcgagactccatttcaaaaaaaataaataaataaaataaaataaaataaaaactgctacttatctacaagccagaacaaaaacataattttaaaatggttacaatctagcaccagaggcctcaagacaattctggaaactaaataaaaagggctaatggaactgcaacctacagctttccccattacggtctttgcattcctgagactgaaaaaaaaaagttacntcactatttgcgatttgtctgaattgaaggagggaaagggaactcatcaagcatttaagcaggttaaatagtagtaactagggttaattntctttanaataccctgattntattttatggatctagtaaaattcagttttacccattt

SEQ ID NO: 16981 - DNA, 449 bp, Homo sapiens
agtacttctagaattaattaaggcgggcagatcacgaagtcaggagatcgagaccatcatggctaacacagtgaaaccccgtccctactaaaaatacaaaaaaattagcccgggcgtggtggcgggctcctgtagtcccagctactgcggaggctgaggcacgagattggtgtgaacccagaaggcggagcttgcagtaagccgagatagtgccactgagcctgggcgacagagcaagactccgtctcaaaaaaaaaaaagctttccgaatcatttttgaagaattcagaaacttgattgaaaagcttattccactatgatctgacactcaagactgtcagatttaggttgcttgttaattttgtcatgagaatgtaaaatactaaaatctctaagtgaaaaatttgcttctagtgcttgttataaaggataatgcaaaaataaacttg

SEQ ID NO: 16982 - DNA, 395 bp, Homo sapiens
agtacttctagaattaattaaggcgggaaatacatgctaaacaatactgaagcattcggaagtggcatgacacctgcaacctactgtcaaatggtacaggaaagaaaattttacatatacagtatatccatgtacgtaaacaattagaatgacaacataagttgacaaaaagcagttcatgagtgtaagagaaggtcaagtgggagtttctgtattattcttgcaactttcttggaagtctgaaagggtttccaaatacatttttgttcatgttttaataaaaaaagaataaaaactacacagaaaaaagattatacatctgactgtattcttctcaaaaatctagtcaaagactatttttttaagaaaacacatgccacagactgggaggagat

SEQ ID NO: 16983 - DNA, 396 bp, Homo sapiens
agtacttctagaattaattaaggcgggagcagaaaatattagaatcaaatattaaacctcctagagcaagctgtttcacgattcaaaagtatataagagaagcagagaaaacaaagaatatacaaatgcattattccaaagacaatgcactctctccattagaaaaaattaccatatacaactccagtaacaacataatacaaatttcaaagccacatttgaaactatcagtaaaatgcaaaatatgtactgtcttcactgaaaagaaaagaatgtcttcttggccaggcatcgtggctcatgcctgtaattccaacacgttgggaggccagggcaggtgggctgcttgagcccaggagtttgagaacagcctgggcaatatggcaaaacttcatc

SEQ ID NO: 16984 - DNA, 446 bp, Homo sapiens
  misc_feature 52, 54, 56, 59, 61, 63, 68, 69, 71, 73, 75, 76, 78, 79, 80,81, 86, 88, 90, 92, 103, 110, 115, 124, 129, 130, 136, 138,139, 140, 147, 149, 151, 154, 155, 156, 159, 161, 162, 164,165, 168, 170, 174, 175, 178, 189, 267: n = A,T,C or G
ggtaccgggccccccctcgagagtacttctagaattaattaaggcggggtgngnanttncntnggctnnanantnnannnnttgangncnanaggcgtgactnatatttnccctngagactagnctgannaagatnannntggcatntntncannngananntnnacncntctnnctnaccccatcgantgagtaatccgattttaggatactcttcttaaaagaaatctttctactaactcttgccacttgcctatgaacatatcnccaaaaaaattatggctatgacccctggtgctttcagtatatacaaaacatttctagtcagaacaaacagccagtgaaggatattaaaaacagatttttacagaatttgaaatagtatctgctttgtaatcattcttttaactgtactagtattagcatcctaaattatgtgaagtatt

SEQ ID NO: 16985 - DNA, 444 bp, Homo sapiens
  misc_feature 25, 27, 32, 36, 58, 59, 60, 62, 69, 72, 74, 77, 84, 87, 101,119, 127, 131, 132, 133, 135, 142, 150, 153, 154, 155, 156,159, 161, 165, 166, 167, 169, 186, 200, 203, 226, 237, 239,267, 269, 286, 317, 349, 363, 390, 410, 411, 412: n = A,T,C or G
  misc_feature 413, 414, 415, 416, 417, 418, 419, 427, 428, 431, 439, 440: n = A,T,C or G
tggccgtcgttttacaacaggaaananctttnaccntgattactggccggggttttannncnggaaacntgntnatncatgaantcntggcggcatggttntttaaggtaattaaaccntaaccggnctgnnntnggggctnatgcctgnaannnnaanantttnnnangctgaagcaggcggatnacaaggggcagganatnaagaccatcctggctaacacggngaaaccccatntntactaaaaatacaaaaaattagctgggngngggggggggcacctgtnggcccagctactcgggaggcttaggccgganaatggcatgaaccctggagacagagcttgcantgagcccagatggngccactgcactccagcctgggcaacanagcgagactccatctcaaannnnnnnnnnaaaaaaannaanaaaaaggnncccc

SEQ ID NO: 16986 - DNA, 592 bp, Homo sapiens
  misc_feature 17, 21, 25, 26, 37, 38, 61, 78, 81, 94, 102, 120, 122, 128,152, 156, 178, 189, 195, 196, 199, 208, 211, 216, 234, 237,245, 385, 409, 471, 511, 512, 549, 572, 578, 586: n = A,T,C or G
attaattaatttatggngggngggnnggcaaatgcannaatttcctgactacctacactgncctgggcaacattttantcnctgaaaatgaaantatactgngggcataggcggacttgncnactaantcctatttctaaaaatggctaacngctnactgcatatggcatattatggntaattatttanccattnnaanatgaatccnganggccnggcgcggtggctcacgcntgnaatcccanccccaagtatataacttttaaattaatgatattttaaattttttgaccaattccatagtttaactccttccaattgtgtacacactaaaacaatttcccagtgtaatttgtttttctaatacacataaccaagtctctanaatttattaatatcactcctaaangtcaaacacttaacttcttaataaaaatttggatttaaaggcagactcttatcttaaaaacnggaaaaatgttgagcttcactaattaaaagaataaatgannaccttggatttttttttaaaaaggaaacccaggaccngggcccaagtgggcttaccgttnttttgnttccccancccccc

SEQ ID NO: 16987 - DNA, 302 bp, Homo sapiens
  misc_feature 284: n = A,T,C or G
tgggtacccgggccccccctcgagagtacttctagaattaattaaggcgggagggcagccagggttgaaaaactacagggtactaagcttcgtatctgcatgatgagatcagtcatacccgaaacctcagcatggcacaatatacccgggtaacaaacctgcctagacatttgtgtaaaatgagatgattgcaaggtagttttaaaagtcattccccttatgaaaatatggaatgttgtgtacattatttcatagactttgtgcttagttaaaggtcttaaccnaaaaaaaaaaaaaaaaaa

SEQ ID NO: 16988 - DNA, 362 bp, Homo sapiens
  misc_feature 2, 8, 32, 33, 34, 35, 70, 76: n = A,T,C or G
gnacaaanctgggtaccgggtccccccctcgnnnntacttctagtaattaattaaggcgggagttcgagnaccagnacttaccaacaaggtagtaaaaaccgtctctactaaaaatacaaaaaaattagtcgggcatggtggcccatgcttgtaatccgagccacttgggaggctgcggcaggagaattgcttgaacccgggaggcagaggttgtggtgagccgagatcaagccattgcactccagcctgggcaaaaaagcgaaactccgtctcaaaaaaaaaaaaaaagcgtccaggcaagaggtagaaaagagactgctacaaaaagctatatataaaattcatcacagattttctgctg

SEQ ID NO: 16989 - DNA, 534 bp, Homo sapiens
  misc_feature 35, 45, 49, 55, 56, 67, 68, 70, 74, 75, 86, 98, 99, 104,105, 115, 121, 130, 136, 148, 152, 168, 170, 181, 190, 198,205, 210, 215, 216, 235, 334, 343, 345, 362, 449, 477, 492: n = A,T,C or G
ctcgagagtacttctagaattaattaaggcgggangaaaccacanatcncttacnncagtactttcnnantctnnctgtacatcanaatcaccagatnngcttnnaagaaccaangatttnctggccatnaaccanacttattaaatnatantcttggagggggtcananctatcaatcantaattccanaagattcngccaggnttganaaccnntcagtaccatggtttttanagtatagacagatgtaagtttgaaatctggttctggacacttactacctgtcttgaatttcagcgtgcttatttaacacaccctggaaagaaagtaaangtaatacangntgtaaagcttttttttnttgaggtattttgagattaaatgaaataatatccatgtaaatgcttgctacataacaatcactcagtaaatcattgtttattgcttnacatgattgtattatcattttctgacanatggtatttccttangaaaaaagttagactaaatttaaattttaaatagaattcttt

SEQ ID NO: 16990 - DNA, 179 bp, Homo sapiens
  misc_feature 7, 14, 16, 19, 28, 41, 50, 53, 54, 56, 144: n = A,T,C or G
ctttttnccctttntnaanggtacaaanctgggtaccgggnccccccctncgnntntacttctagtaattaattaaggcgggggtatactgtaattttggtagcagtcatctgcaaattaacttatttggcagtataccaatgncaaattggtatgaaacaacaggtaaagtaaagcat

SEQ ID NO: 16991 - DNA, 321 bp, Homo sapiens
  misc_feature 1, 3: n = A,T,C or G
ngngtacttctagaaattaattaaggcgggataagcaatataatagtgggtgaaaaatagaaaaattggcagtagaattgaacagtccttccactcccttatagaaatttagcatgtaggacattaatagttggtaacgggagaaagatggtcgcaggaaatagtaatataaagataacagtggtcttaggagtcttcggttttaattctgactcagccatgtaacttggagaaagttacctaatccaacctttagttttcttcatatgtgaaatcaggatagcaatatctcctagatgttggatgtacatacttgtgcat

SEQ ID NO: 16992 - DNA, 308 bp, Homo sapiens
  misc_feature 24: n = A,T,C or G
tctagaaattaattaaggcggggnataaacattaaaatatttttagtactgcaatgctcttgctttggtcccaaacaaattcatctttcaaataattaaacatgccgtagttaggggacaccccaggtagtacatacacctagtcctctgaggaacagcattactacccattgccagtgatttctgtctggccttcagagctcactagtgaaatgttccccatcagatttttcatctcaattatattttgttaatactaaaataactttgctttcatgaaacaaattatactaagaaaaagaaataaa

SEQ ID NO: 16993 - DNA, 301 bp, Homo sapiens
  misc_feature 1, 3, 4, 14: n = A,T,C or G
ngnntacttctagnaattaattaaggcgggagatggaggttgcagtgagccaagatcacaccactgtactccagcctggacaacagaatgagactatgtctaaaacaaaacaaaacaaaacaaaaaaacctcagggataggacatgtttatagagaactataatacaaggtagaaagtggtgaattttccaagaaagttaccaacacaatgagataatggttcatgtttatggtctgagtatcaatttagaagaatatgtaattgaatgttttattttctcattctcttttcttggagttc

SEQ ID NO: 16994 - DNA, 613 bp, Homo sapiens
  misc_feature 533, 542: n = A,T,C or G
agtacttctagaattaattaaggcgggtgtggtggtgcacgcctgtagtcccagctactcgggaggctgaggcacgagaatcacttgaaccggggagggggaggttgcagtgagctgagatggcgccattgcactccagcttgggtgatagagcgagactccatttcaattaaaaagaaaagaaaagaaaagaaaaattctacaatgagacaataatggtctccagagggatctttgagaaagtccaaattcccagtcagtgttctagacagaaatggtcacattagcctaagtataacatgctataccaggccttccatgagttagttttaataagccctcataaggaaattccacatactgaaaagaccaatatatttccggctgggtgcggtggctcacgcctgtaatcccagcattttgagaggctgaggcgggtggatcacgaggtcaggagttcaagaccaacctggccaagatggtgaaaccccatctctactaaaaatacaaaaattagctaggcatggtggcangcgcctgtnatcccagctctaaagaggctgaaacaaaaaaactgcttgaaccccggaagccgaagttgcaatgaacccaa

SEQ ID NO: 16995 - DNA, 243 bp, Homo sapiens
  misc_feature 151: n = A,T,C or G
taatacagattttacaaagaataattgccgctcttggtatctttctgatgaagggaaagtgtgaggaagtagtcacatttattttgtttttgcagtttccagctcaggttaatgatagaacaaaatgaaaagtctaaaagcagtaaagcanaaggcatcccataaatcttcctctctaactaaataagagaaacccattctttccttctaacatcacccgacctaaaaaaaaaaaaaaaaaaa

SEQ ID NO: 16996 - DNA, 673 bp, Homo sapiens
  misc_feature 551, 651, 652: n = A,T,C or G
agtacttctagaattaattaaggcgggcaccctgcaatcccagccactcgagaggctgaggcaggagaaacacttgaatctaggaggcggaggccgcagtgagtcgaaatcgcaccactgcactccagcctgggcaacgagagcaagactccgtctcaaaaaaagtaaataaataaaaataaaataaaaaaataaataaatagaagtaaaaataaaaataatgcttaatggcaaacaattttaaaaattaagtcactaaattataagttattgtttggaaaacacaacacacctaatagttccagtaaaataaaataatttactttattctacacaattaatatacctttaaagtggccaatacagaaaaggggtttccaacgatacttgaaataatccagctacctatcttcagttccttggccttcagctggcagtgaaacagacacatcagctttaagactggcagccaaatagttaacgatctgtaaacatacaattacgcaagtagaagagttcctgttcaaacagactggatgaaagcccttccntaaagaaacccttttagggtgatggatgcctaaaattatttttctgaatatttttatctaaaatttgcatggtttattttactaaaaattttcttaaaannaagggcatatttttaaaaaaa

SEQ ID NO: 16997 - DNA, 233 bp, Homo sapiens
  misc_feature 66, 72, 77, 84, 103, 107, 116, 123, 127, 131, 135, 139, 143,145, 147, 149, 151, 153, 155, 157, 161, 163, 165, 167, 169,173, 175, 177, 180, 183, 192, 199, 202, 209, 214: n = A,T,C or G
agtacttctagaattaattaaggcgggggggaaatcaaaacaaaaacaagcaaacaaaaaaaaaancaaaancaaancaaaaantaacccaaaaaaaccttgntagngttttttcntcaaaantaantaantaantaantaantncntncntncntncccncntncntncaancntntanaantccccaaanaggccantantgacaanagggngaaaaaaaaaaaaaaaaaa

SEQ ID NO: 16998 - DNA, 649 bp, Homo sapiens
  misc_feature 29, 33, 36, 37, 43, 46, 50, 52, 66, 72, 83, 94, 133, 134,190, 210, 213, 214, 220, 225, 227, 234, 245, 250, 263, 273,333, 400, 463, 466, 578, 600: n = A,T,C or G
agtacttctagaattaattaaggcggganaaanacnnatcccngantgantncccaaatttacttntgcatnaggtctggctntaatatgtggnatttttattttttaataagcttggactataggaaaaaannaggttctgctttttatgtgaattctgtctcaggggaaagagattcaaaacaacacntgggggaaaggacaggctgntcnnggccangctgncntccatancacttaccctncgccnaggcgggttccancccctcccanaaggccaggacttcaccccagcagcatcctcctctttcatagaaggtgttggccatctanaaggctccctgccaacactggcttcctcagatcgctccactgatactgttctgtgtctgcccctaanaggggcatacccttgtctgtttttgtgtccatgaccctgaagcaatgactagttcagcagcanaanggactggatgggcagatgactggatgaataaattcaagctacctatggggaaacagataatgtggagaaacactgacttgtcacccttcaaatttcaaatatagtcaacttncaaatctttacccaagcaaaantacctggaaacagttttgaccttaacatgctaataaatactaattttac

SEQ ID NO: 16999 - DNA, 282 bp, Homo sapiens
  misc_feature 109: n = A,T,C or G
agtacttctagaattaattaaggcgggagaatgaggataggcttctgtgagaggctggggctcagtggaggctgcaatgatgggctaagacagggagaatgaagcctantatgtgtggagcatggtgtgtacccacagaagctaataacagcctagagaagaaagtggccttgctactggggaggatgaggcaggaggacccctgagctcaggtgtttgagaccaacctgggcaacatagtaagaccctgctaaagaaaagaaaaaagaaaaaaaaaaaaaa

SEQ ID NO: 17000 - DNA, 604 bp, Homo sapiens
  misc_feature 588: n = A,T,C or G
agtacttctagaattaattaaggcgggtacataacaaagccactgccaccgagtcacattcagcctctgtctctatttctttctctttgtttttaaaatagaaaggaaagaaatcctagctttcaaatcacctgtcttctttcagtcttttagaaagtttggaaaatttttagtatgtacttagttaaaaaaaaagtcattaaaataattttttaagctaaagttataaaattgaacatacttatattaaccttggaactgtctacctccagttgcgcctgtgtattctatcatgaggataggaaaagattttctaaatctaaataaaatacagcatgaactgcagaaggcagcattttgtagttgtaaaagctggaattttaaattaaatatgagttcaaatcttgcttaagtattttttctattttacatatctttcaattctcaaaacatcagttttatcatttgtaaaatgtaaagaataataccagtcagagttgctgtgattaacagatcagtatttgtaaataacctgacacacaataagcattaagtaataaatgggcattattcatgaatttggtgggnatatctggaaaaattt

SEQ ID NO: 17001 - DNA, 300 bp, Homo sapiens
  misc_feature 18, 157: n = A,T,C or G
aagctgcgataaggcctncagccaaggtgccttctcaggctgatcacttttaagaaaataagacttatggtggctgaggatgtgaaaatggattccttttaactcctcttgaaatgtcttatggtaatcgcgacagtacaaatattccagcctgaanactgctgttctatcaagaattagattactctatttctagagttgacagctattggaagaactccttaactagccataaacctgggaatcctgcactgttcttctacttagggtcagtgcagtcaatgtgaatccagagattgt

SEQ ID NO: 17002 - DNA, 429 bp, Homo sapiens
  misc_feature 209: n = A,T,C or G
agtacttctagaattaattaaggcgggggttataattgactgtaataacttgtaggtatcggatactatttaaagtttcatagatatagaaatctatgcctttggccaaagtagaaatgtgtgtccatctccaataatacttttcttaatatttcttcatttgacaaatcactttgctgcaagccttttgtgctattaagtacagctgnatttttttctttatttttcattctgttagttccaagtgttatttaactttacaggaggagaaaaggagtgcataaaagtcatagtacatttttttagagcatatctcaaaagatcgaaagttctcctttgctaattacccaggtattttattcaaataatcaatttaaaataattgtaagtattaataaaacctaaaaccatatgcttctaggacaaaca

SEQ ID NO: 17003 - DNA, 401 bp, Homo sapiens
  misc_feature 13, 373, 374, 375, 377, 378, 379, 380, 381, 382, 383, 384,385, 386, 387, 388, 400: n = A,T,C or G
ggccccccctcgnaagtacttctagaaattaattaaggcggggggggaggtgacagagagaggcagatctgagtgaggggtggctagagttgggctttgtcctgcagacagcagtgagccaacagaatttttaggaagagaagagatgtgattggattttcggttttatagactagtggtatctcaaaaagttaaaggtaagaaatgtattagatggtcaaggtactgtgtttaaggatagatttaaaagaatcttcatgatcttaaaagaatcaaggggacagtgtcagaaaatacagcattgagtagaccacaggtattatttagtgtggcatttcttatgttcttttagtaatgacaaaaaaaaaaaaannnannnnnnnnnnnncccccccccccng

SEQ ID NO: 17004 - DNA, 430 bp, Homo sapiens
  misc_feature 212, 415: n = A,T,C or G
agtacttctagaattaattaaggggggggagagcattaggacaaatacctgatgcatatagggcttaaaacctagatgacaggttgataggtgcagcaaactaccatgacacatatatacctaggtaacagaccttcatgttctgctcatgtatcgcagaacttaaagtaaaataaaaaaaaaaaagaataaaaagagctacaaaaatgtancaacaacaaatctcaaacatggacactcattattaatatatctgaataacctaacaacttctgtataattaccatataatttttgagcacagaattcccctaagtataataattcagatactgtgcatgttcctaaagaccaaaacacctggaactacgaacataaagcagttgcttgaacagtggtgccatgtacttctgtnggacaatccaaaaaa

SEQ ID NO: 17005 - DNA, 519 bp, Homo sapiens
  misc_feature 15, 57, 104, 105, 120, 171, 176, 182, 186, 202, 207, 231,232, 256, 257, 267, 271, 282, 284, 286, 309, 316, 404: n = A,T,C or G
ccgggccccccctcnagagtacttctagaattaattgaggcgggaggaacttttcanaagtcgataaaaaccaaaaaaagctgggtcgtacataggaaaaattnntaaagctcgaaacanatataggtatcatattctgcatatacaagtatattttcattgctgtcctanattantggctntcancactctctgcacattngaatnacttggggagcttttaaaaacaannctgatggctggctctatttccagnngatttgattngatnggtctggggtncntnggaccgaggtatcagtattgttnacctctnttcaagtgaatctatttgcagtcagaagtgaaaggcactcccctagagctttgttagctttgaaattgccttgttagagccattacanaaatcctgttcactgtcaaaaattcatatattacagtgaataaaaatataagcatttatgtatgcattataccgtaaataccactttctataatattttacacaacccttctttt

SEQ ID NO: 17006 - DNA, 427 bp, Homo sapiens
agtacttctagaattaattaaaattaaataaattcccaaagtgcaaaaattgaagtggtaaatgagaaccagagctgtaaggggaagcatacttcaactgtcctgaggacatttttagaccttggtggggctttcgtttaaaatggcctaacagagatggatgataggttgtttaatgcatacagtttaggatttcttagccccctgtataaagccaggatcctgcaaggatcataacctcagtgaaagcatagatgagaaaataaaacctctccactgacaaaaggagaaaataaggaagcttgtgtttcttggcttgggttcctgggaacaggggagggatgtgtgtgcatgtgtaggatgcctctcctgagaatttttaatcaagtgcctcctctcaagcaggtttcagtttttaatctgtatt

SEQ ID NO: 17007 - DNA, 304 bp, Homo sapiens
cttactagtaattaattaaggcgggtgaggagttgatttaggactgtagggacaaagtaagcacagggaacaggtaagagggccaactaagattccaagataagaccttcaatgtgcaaaagatatcaacacagcatttggctgagtaaacagtagtgataggagaaccacgtgaagtgagaaaggttattctgggtgatataaaaaaaaaggataaagtctagaagaagaaaaagaatggaagaatatagttcttcctcatctattctctctatgagggtagcaaaagatgaatgaaaaaggt

SEQ ID NO: 17008 - DNA, 259 bp, Homo sapiens
  misc_feature 22, 24, 30, 33, 61, 73, 85, 99, 108, 117, 127, 149, 158,161, 169, 247, 248, 249: n = A,T,C or G
tgaccgggtccccccctgcggngntacttnctnagaattaattaaggcggggtaggtatgnaaacaatttggnagaaagaatagnaagtttgaagtggnaaaactggnaagcacagnaagtacgggnaaggcgaaaaaaaaaatagagnaagtatagnagnaaattagnaagtataaaaacatacttttaggaagaaaaaagtataaatttaaacctgaaaaaaaaaaaaaaaaaaaaaaaaaaggnnncccccccccg

SEQ ID NO: 17009 - DNA, 245 bp, Homo sapiens
aattaattaaggcgggggtgaggaagggaggtgtcatatgatataaacattgtaaaacataatagcagaaatgtctatttatatgttgctctattttgtatatagtgctagggaatcatataattccaaaaattatgccatgtttttacaaaagtgaggtcctaaatattcacaaaagaatgactagactataactcaatgattagagtcaatggaatacaatgcattcttgactgtttctagaa

SEQ ID NO: 17010 - DNA, 481 bp, Homo sapiens
  misc_feature 28, 60, 73, 81, 96, 111, 120, 126, 128, 134, 180, 201, 207,246, 272, 284, 287, 360, 386, 392, 422, 441, 445, 453, 455,464, 465: n = A,T,C or G
aaagtctgggtaccgggccccccctcgngaagtacttctagaattaattaaggcggggangatcgctggatcncaggaagnttgaggccctcttgngcaacataggctccntctttttanaaacanantcgaancaaaacaaaaaccggataggtttcaaaggcttttgaagaggccgancacagtatctcatgcctgtantcccancactttgggaggccgaggaggacggatcacctgaggtcnggagttcaagaccagcctggccaacntagtgaaacccnatntctactaaagatacaaaaaaatagtcgggcgtggtggcacgtgcctgtgatcccagctactcgggaggctgangcaggagaattgcttgaacccaggangcgganattgcagtgagctgagatcgcaccactgcnctctagcctggtgacagantaanactccctntngaacaaccnnaaaaaaaaaaaaaaaa

SEQ ID NO: 17011 - DNA, 604 bp, Homo sapiens
  misc_feature 88, 128, 166, 216, 252, 257, 264, 268, 270, 285, 287, 288,289, 300, 301, 312, 316, 318, 319, 329, 334, 336, 338, 352,388, 444, 473, 474, 488, 518, 576, 585, 587: n = A,T,C or G
ttgaggcgggccgaggtaaggagattgagaccatcctggctaacacggtgaaactccgtctctactaaaaatacaaaaacaaaattanccgggtgtggttgcgggtgcctgtggtcccaactactgangctgaggcgggaaaatggtatgagcccaggaggcggancttgcggtgagccgagatcgtgccaccgcactccagcctgggtgacagancaagactccatcccaaaaaaaaattttaaaaagcanaaaanaaccacnggcncnccccccgggggggcncnnntttcccccctnntgtgaaatatntgcncnnccctgagagngccantntnctttcccacacttnttagatgccttccttcttcctgaaccccagaagaanagggcaccttgagcaggaaatctcaaggtgacttaatttttgccagtgcctacttntactgaagaactaggttttcatttcttgnnaaagaaaacttatnggaagggatgtgtttcctattcacaaggtntacattgcttaattttttttggttgaaaatttttctttgttgcgactttattgcccangttaattantnaaaggtttttttttttt

SEQ ID NO: 17012 - DNA, 414 bp, Homo sapiens
agtacttctagaattaattaaggcgggtcaatgaacaagtgtccaagccaaagacttagtactcagggtaagtgtccacataggctggtgcagctggttttccctctctactttcctttttcttctcccaatttacagcacaaaccaagctaaaatgctagctcaacttctctcttttcacttcaaaacaacccagctcaccagccgggcatggtggcagtagctcacgcttgtaatcccagcactttggcaggccaaggcgggtggatcacctgaggtcaggagttcgagactagcctgagcaacatggcgaaaccccgtctctactagaaatacaaaattagctgagcatggtggtgcatgcctgtaatcccagctacttgggaggctgaggcaggagaattgcttgaaccc

SEQ ID NO: 17013 - DNA, 393 bp, Homo sapiens
  misc_feature 1, 13: n = A,T,C or G
nagtacttctagnaattaattaagggggaaaggtttggccaaatcgattgcttttggttatggtgatgaaaaaataaatggaatctgatgttttatgttgagaatgtgtaaaatgctagttgattttatgtcttagaatgctcatattcatatagattcactgcgaatagtgcttaacattggatttcggattgtaatattaaaccctgcagttatgcactaacgagtttaaattttaaaaaagtaaccattttcaaatattcttggcaagttgtgcattacttgatgtttgaatacatcttaaaaatgaaaactagtgaagcttcactatgtttggggccttatgatatatggggtaattgatgaacgattaaccgttggttaacctaaaaa

SEQ ID NO: 17014 - DNA, 459 bp, Homo sapiens
agtacttctagaattaattaaggggggaaatttaaccattgaatttcttctttaaaaattcagataaaattttaagaactagaaatattactatgattcttataattctacctaagctgtcagttataaacagtttaagatacacattacctcttagtcaaaccatcatcttcatcttagggggaatgttcacctatccaaacgccccacaaccctctgcagtcccattcctgctcctcttcacaccatggcgttcaccagtcatttctaaacgcagcagccagcttttccctcatcctcattgctcttgacttttcctgcagcatctgatgctgttcatcatcgtcttttcgagatatttatgtatgctggcttcagggatataaatttattttattttatttttttgagacagagtctctctctgttgcccaggctggagtgcagtagcccgatctt

SEQ ID NO: 17015 - DNA, 516 bp, Homo sapiens
  misc_feature 45, 154: n = A,T,C or G
agtacttctagaattaattaaggcgggcggatcatttgaggtcangagttcaagaccagcctggctaacatggatataacaaaattttctatttcaaaagttcagtcgtgggcacaagttgattttgccttacagtcttgatagtgaaggtgcntactatttttaaagctgtattccttagatactaccatattatctaatgtttctaataatggaattagcaaaaaatgactacatcatccaaatttgactttgtactaacatacttggcgtactccatatccctgaaggttaacaagagataaatttggcctagactggtcttttcctgaattcatcacttaaaaaaggaaaaaaaagaatggggaggaaaagccacgttttacttttataatttttattccatcattaaaagtacaacttgctttatgatctgaagaaataccatctaagtctttctattaggaacaaaagtgagcctttcagggaaagataataaaataaaaaaggctaaaa

SEQ ID NO: 17016 - DNA, 277 bp, Homo sapiens
  misc_feature 1: n = A,T,C or G
naatacttctagaaattaattaaggcggggtagagatgagtttgaggtactgccttctatagtttgtgcccaatcccctttggcaccttatctaatacttggcgatcgtctcccttcctattttatgttaatatagtctgtcagttttgtttgtttggtgctgacaaatacaaaatgtgccattaaaaataatttatttttttcacattttgaaagtgatacatgattgtgcataaaatttagaaaattcagaaaatcacaaaaaaaaaaaaaaaaa

SEQ ID NO: 17017 - DNA, 373 bp, Homo sapiens
  misc_feature 24, 27, 32, 34, 35, 38, 39, 43, 45, 50, 65, 78, 312: n = A,T,C or G
cgcgtgcgttttccaccccggaancangggtngnnccnngctngntgccnggccccccctcgtanagtacttactagnaattaattaaggcggggaaggacagtgaagaattatggggctaacatacaagagaaaaaggaaacccagagatgtgagcctgacatatgaggctacttttcccctagatatatcttctagttcaagatagtagaaaggctgataagttttcaacagtcttaaaagactaagagggcttcctggggaggggtgccctggaaaacctcccacattttaggttaggatctttaaggnctgactacatcatgggagaaagggtgaactgggaaatagactagccctcacaggggactaa

SEQ ID NO: 17018 - DNA, 420 bp, Homo sapiens
  misc_feature 29, 31, 32, 36, 37, 41, 52, 53, 62, 64, 68, 69, 72, 73, 75,80, 82, 86, 87, 88, 89, 92, 93, 95, 97, 102, 104, 106, 107,114, 115, 117, 118, 119, 122, 123, 124, 127, 128, 132, 133,142, 158, 180, 192, 193, 213, 243, 256, 309: n = A,T,C or G
agtacttctagaattaattaaggcggggngnngccnnatgnggctaccgatnnctataatancncttnntcnntnccttncngtcnnnntcnntnantctcncnannccttctnntnnntannntgnntccnnattgataanaaacaagctaaatctntatcgtgcgaaataaacatatncacatattctcnnaaaaaattactacttgttgnatgcctattgtgcattaaacattaggctanacactttattgcngcataatcatttaattgtcataataatccctttggaaaggtgtggtggttcantttttgcagatgggggtgctgattgatattcagagagttaaataatttacttgaagtcagcagagtgtattagaacctattcattactttgggaccagagaggcagaagga

SEQ ID NO: 17019 - DNA, 298 bp, Homo sapiens
  misc_feature 5, 19, 23, 60, 66, 73, 80, 82, 91, 95, 102, 105, 113, 115,117, 121, 221: n = A,T,C or G
gggtnccgggccccccctncgtnaagtacttctagaaattaattaaggcggggggaatanaagtangaaaaanaggaagntngagaccacntctncacaaanacngtagaaangncngtanttcttctcttaaatacaaaaattagctgggcgtgattgcacacacctgtaatcccagctactcgggaggctaaggcaggagaatccctggaacccatgangtagaggttgcagtgagctgagatcacgccactgcactccagcctgggcaacagagcaacactcagtctcaaaaaaa

SEQ ID NO: 17020 - DNA, 416 bp, Homo sapiens
agtacttctagaattaattaaggcgggtatgagaaaatcttatgcaaacatatagaaatttagactgttcacatgtatgagtaatttttaaattaaaaagtacactatcattctattaccataattttttaaatgttttattatgctggcatgagtcactacacccagccctatcaccataaattttaacagtaaataaatattgaaaagaaagaaaggttaaaactagcctttaagtaaacgtgtcagaaatatatctaagaaaacaggctatttgatatcatgccctggattacaacccactgagaaacaggtgggggcatcataaattcaaaatgccaaaaagtcactataaaacactttttatataaatcatttaactattaagtaaacaattgcttatttaaaaatccaga

SEQ ID NO: 17021 - DNA, 249 bp, Homo sapiens
cctcgaggagtacttctagtaattaattaagggggggaaaatcaatcttgttcctttacagttgtacattattgaacagagtgatattcgttcaactcgggattttaaaaaagcaagaactcctttcttcataaaatcagaatattaagaagggccataaatagaattaaattaattcatttgacaaattttaccaagtctctattggctaataagtctttttctagggactttgaataccaaaaaaaa

SEQ ID NO: 17022 - DNA, 384 bp, Homo sapiens
  misc_feature 29, 30, 32, 34, 35, 36, 37, 41, 45, 50, 53, 55, 79, 355, 365: n = A,T,C or G
agtacttctagaattaattaaggcggggnngngnnnntatntatntccangcntnacacataattcaaaagctccagtnataacccccaaacatatccagcagaaagaaacccgttaccatttgtgtcttggaaaggacagctacttcccatactagtcactccctctgtacctcaacttctttcattattaacaatggctctgacctcctctaggaactggtgaaaattaagtaaaatttttctgaaattgtcaaattaaggtattatttgttggctggacacagtggctcacgcctgtaatcccagcactttgggaggctgaggtgggtggatacgttgagagcccaggagtncaagaccagnaggcaacatggcgaaaccc

SEQ ID NO: 17023 - DNA, 413 bp, Homo sapiens
agtacttctagaattaattaaggcggggaggaaaattacttcctattctaaatcactactaattagtgacagctagttagtagccatagacctgtaactgaagtttatgcaggtcaaagaaattttattcttttttaggcctttttattgagataaaaatttataattcattcaggtgttcaattcactggtttttagtatattcacaaggttgtgcaaccatcatcactatctaattccaaaacatttttatcaccccaaaaagaaaccctgtacccattagcagtcactccttatccctctcgttccccaggccctggcaactactaatctgctttctgtctctacagatttgtcttttctggttatttcatatagatggaattctatagtctgcagccttttgtgtctcg

SEQ ID NO: 17024 - DNA, 218 bp, Homo sapiens
gggtacttctagaattaattaaggcagggaaaattgaaggtgatgtgtttaataggaatgtaatgcaaatacttctgttttcaaagagagaaattattgcttatgaacattactggagcctgggctttttgtttttttacttaagtaaataggtaaggaaaaaatttcccattgattgggacccttactcaaatttcccagtggttacttctatttgg

SEQ ID NO: 17025 - DNA, 387 bp, Homo sapiens
ggtaccgggccccccctcgggggtacttctagaattaattaaggcgggtagctatcgttaagtggggacaaaaacgttcttcagttatagaaaatgcaaatcataccatttcatcatccttcaaataagaagaccctataatacataacaatttcactaatcaacaaagatttctccattacattacactagatccctgtgaagcattagatacactgctgctttaaacactggccttcctgcccaggcacagtggctcatggctataatcccagcactttgggaggctgagataggtggatcacctgagctcaggagttagagaccagcctgaccaacatggagaaaccccgtctctactacaaatacaaaattagctgggtgtgg

SEQ ID NO: 17026 - DNA, 411 bp, Homo sapiens
  misc_feature 31, 156, 158, 169, 170, 177, 178, 179, 191, 193, 194, 197,199, 203, 207, 213, 220, 223, 228, 241, 245, 248, 249, 252,306, 316, 319, 323, 324, 329, 331, 345, 352, 362, 375, 376,384: n = A,T,C or G
agtacttctagaattaattaaggcggggganaggggttgcaacatcttgaaaaatcaagcttcatcacctacttcggattcctagctctacccatttggctgtgatctggggtgacttttgtcacttgtcctacccctccttggtggggggggggngnatatcttgaannaagaaannntaagttccaatnannacntntttngccnccaatntataatntcncctanactatccatactnctgnacnnatnttatactttgaaacctgaactggccaagtgcaatggctcacacctttaatcccnccattttggnagnccanngcggncngataacgaggccancatttcnacaccagtcnaaccaattttgtnnaacaacgnctcttactaaaaatacaaaaaattaac

SEQ ID NO: 17027 - DNA, 424 bp, Homo sapiens
agtacttctagaattaattaaggcgggagaggattgagaaaagaaggaaagtagagcaagtgcaaagagtcagaatttccatgtaagcggaaagatgaaatattacaaatgtaggcctgttgactaaaatttgatgatgtagatgaaaggaaaaaattaagagcaaatatgctgacatttacatttctcatagtaaggaaataccctttttaagccgatggaagattacttattctttcatagttaaaaagataagcagttctataaaattatagagcttccaaaatattaaagatctgtatggataaaactaagaacaatatatgtaatggaaccttaaaaaatctgtaaagatcagtaagcataacataaaatatgacatatctaagaccagtcatgctgtcataaaaaataaatgtagaag

SEQ ID NO: 17028 - DNA, 342 bp, Homo sapiens
agtacttctagaattaattaaggcggggtcaaaatcataatcttacatagatcacttcaaaatatttaaaggcatacattcttacatttaaagaaaaaaaggaacacactcttgacttaaagattaaaaaacagacacaagtctctacaaacctggaggagctaaggctgacttggtctgataagagattaggctgttttagatgtggtaacccctggctaactaagatcactgttttatcttttaaaaaaaatctcagttcatagttgtccgtcctttttattctccaataaagtgaaaaagtgggcatttgtttgttaacacatttggtcacagaaaaaa

SEQ ID NO: 17029 - DNA, 431 bp, Homo sapiens
  misc_feature 296, 365, 373: n = A,T,C or G
agtacttctagaattaattaaggcgggggaactgactttactaaggtaagtaaaacttttactcaatttttgtatgatcagctgggatagattttatttccggaccaagactaagtggctaaaatttaaaatatgtgcattttgtaggtgggaacatattttagaaatttagacaattaaaaagatagagatattctacactttggttatggtgctttcattaattcgacaaatgtttagtgagcaccaaatgtctttccagtgccaagaatttaataatgagttacatgtttctncacttcaaagaactcctagggggagagttagtcatatacgtaactataaaacacaaaatggaatgagtnctatagcnaaatccatataaattgtttatctagttgacttaatttatatgcggagtaatttggtac

SEQ ID NO: 17030 - DNA, 434 bp, Homo sapiens
  misc_feature 10, 29, 44, 46, 62, 64, 67, 68: n = A,T,C or G
tggcccgccntttacacacagggaaacanctatgaccatgatgncngggacctaggtatctntnttnnataatgtctgagcgttacactgaaaacctatattaacttctgaaatgaaactatttttttctgtatcaatttaagcttttggtttaggtaagggatgtccaagggacacatataatgataacttctctgtttcactgccttttccatcccagcaagctcccaaatttcactttaaaaacctacaaaagtagtttaaaaaaattatagttagagccaggtgcagtggctcatgcctgtaatcccagcactttgggaggccgaggcaggcagatcacttcaggtcaggagttcctgaccagcctggccaacatggtaaaaccccatctctactacaaatataaaaattagccaggcatggtggtgggc

SEQ ID NO: 17031 - DNA, 426 bp, Homo sapiens
  misc_feature 14, 70, 74, 75, 138, 150, 155, 161, 163, 165, 195, 197, 203,225, 245, 253, 263: n = A,T,C or G
cgggccccccctcnagagtcttctagaattaattagcggcgggagggtagcaggtaccacaggaagtctnacanntacaaactgcaggactagtaggttcagaggcaaacttggatatgggggaaataatctttatanggcttttaagcnttgcntatttngncnaaaaagcatgtgatgcctttaaactggaananactganttcccatgagctacaaaatatnggagagtttctacctttacntgatcagngccacattanataggcagcattaacccaccgttctatgttctattctatattcaagactggggaaggaggcctggaagggctatgctttgatctactcttgtccacaaactcacagaatggcattttgatgtttattatttgtgctttcattcaactttggaattttacaaat

SEQ ID NO: 17032 - DNA, 443 bp, Homo sapiens
  misc_feature 5, 17, 18, 19, 20: n = A,T,C or G
gtacngggccccccctnnnnagtacttctagaattaattaaggcggggaaaagagaggctgcaaaagtaactgggacaaatggtaaagggcagttaataccaggctaagttacaggaagaacattttatattttatatgaaactgttgttgaagacattccatattatgctattcattattccttaatatgagtgactgcaataaatctcaaaacttactgttagggaaaaaaaatccccatcctagaggaatgccttttattctgcctttaatcagcaaggaaggactgtggaaactcattgtctttcccttcttgcccaggccaccaggaagcatgggcctaattagtgtctagttgcaataactgtcttatctctctggttcttggtaaaacatttcttcttttattccatttggttttcagccttcttgttttatttgt

SEQ ID NO: 17033 - DNA, 264 bp, Homo sapiens
  misc_feature 11: n = A,T,C or G
agtacttctanaattaattaaggcgggggagtagctaaatagtgttcaactgctctaaggtccttacattgttggagaagtggaaaaagtacgaacatacttcagaaatagtagtccacaatagttgagaataaatattatatcctctaggataactaaggtacttaaggtagtccacaatagtctagaataaatattctgtaggataactaaaagtactaaaaaggaattacaagtattttaataaaatgaaaaataaataat

SEQ ID NO: 17034 - DNA, 448 bp, Homo sapiens
  misc_feature 23, 24, 28, 31, 33, 35, 36, 38, 40, 45, 46, 51, 53, 55, 58,59, 65, 66, 67, 69, 77, 78, 80, 88, 89, 100, 102, 105, 106,110, 117, 126, 167, 216: n = A,T,C or G
ggatactggccgtcgttttacanncggnaanangnntnanccttnnttctngncngtnntttacnnnanagaaaaannanaaaccttnntggcggggagngncannaccntcctggncaaagtaangagactccgtctcaaaaacaaacaaataaaagattatttantatttgcctttgtttctgtacctaaagactgctgggtttgtgactttanaaacgtacacaaataattgagagcctatccagtataaatttttaactttttattaccatttaatattataaagtaaatattcctcatagtcataaatttttcataatcatgttttgaattacatagtaatccactgaactaatcgtatttagtttactaacttaagctttctctattggttaggctagaattctatagattatattatcactctgaaaaagaaaacacatta

SEQ ID NO: 17035 - DNA, 441 bp, Homo sapiens
  misc_feature 162, 182, 197, 204, 263, 282, 333, 334, 336, 353, 366, 375,403, 430: n = A,T,C or G
agtacttctagaattaattaaggcgggaagcaatatggcaagatttcttaaaagttctcaaaatgggtcgtctaatcaaatttagtgtgatggggcaaattgtcttctgtttttttttttacagttttttttactgtaaaagttttaaaagtccaatgaaancaatcaaaaaacagttcaanaaacttggctttgtntaacaanaatgttaatgatttatcacttactgattctactctagtcaatgaaaatggaagggtttngtttaatttttatttgttngttttttgaaacaggctttccctctgtggcccatgctggagttcacttggnncnatcatggttcactgcancctcaacctccanaaatcaagngatcctcccacctcactctcctgagtanctggaattacaggttcgtgccaccatncctggctaaaa

SEQ ID NO: 17036 - DNA, 465 bp, Homo sapiens
agtacttctagaattaattaaggcggggaagtgataagtggtaaaatgagacatttcctaggggtagaggtacaaagctaaaaaagaaggaaacccagactgaattttacgtttcttatttccaactcctctcgatgtctacctggaaacctttccaatctttaagcattcaactgcagtgaaatatcctctggggaccttctgggacatcccaagacagagttcatcacccttttttaatagtgtcctgtacttttcttatctttctattgttgcttttaaaacatattttcttgcaattaccttcacatgcactgtgaacacccgacaatttaatgtgtttttgtgcatgtgtatgcatgcacgctgaataagttccttgcatgctaaaaaatgtttcaacctacaaaataaatagtaatgtcattgcctggttcgtgaaaatttggtgataatagatttcac

SEQ ID NO: 17037 - DNA, 400 bp, Homo sapiens
  misc_feature 5, 14, 17, 18, 26, 50, 76, 130, 161, 339: n = A,T,C or G
ctttntaaaggganttnngctggttncgggccccccctcgagagtacttntagaattaattaaggcgggaggacanagggtcagccattgagcaggagacctatctcagtaataggagaaggaagacagngccaggaccgggggatgccaggatagatggngagcagctgggctctgaatatactttgaaagtacagatgaacacataaccacatctcttcacgtgggtgtttcaatgtctacttatttatatcaattctgaattcctcctaaagccatgataacagaaggcattatacttcatattccctgaaaaaaaatagacaattaaaacagcantcataatctccctgacctttataataaaaacaaccttctataatccttaagactttgagtt

SEQ ID NO: 17038 - DNA, 442 bp, Homo sapiens
agtcttctagaattaattaaggcgggtttacatacagatggcaaacttcatttcctttttctcttaatcaacaaggtcatcccaagatcaggcttccttcagtttctgtggtaagtagtgatggacacttacggagttttcagagacttatgcattgggtaacaaggcactgcaagaaaccccagatagcacagcatcatctcacatttacaccacatcacatcaacatcgatgctaggaggtctaaagctgatgccaccttcagagctgcaagtatccaaaagactccactcatgacaccagctcactcctgagtcacatcagcccctttcagagtcacagccccagaactaaggctatccatatgggttgattatacaatccaaaaagcagctccaaatattagaaacacttatttgtctggcagacacattccctaatt

SEQ ID NO: 17039 - DNA, 408 bp, Homo sapiens
  misc_feature 168: n = A,T,C or G
agtacttctagaattaattaaggcgggaaggaatagtaacaaattaaatactgcactaatgggttagttacagacatgaatttttccaaatataatctcacaggtctaatttaatcccctctgcacgagacaagtgcctcttgtctacaacacctgtaatggtctgtnccacgtcatgcagtcacattggaattactgcatgcactcttcactaaagcttaatgtacctgaattccaaatgaactgtatgactaatctggggaaaaaccatacacacagaatacatcaagttttctttcaaaagaaaagccagccataattccattatatccatggcaactatcacctgttaatgctaatgttagtgtgtaaaaatgtattcatcatatacagagagattatcaagta

SEQ ID NO: 17040 - DNA, 351 bp, Homo sapiens
  misc_feature 13, 262, 276, 291: n = A,T,C or G
gagtacttctagnaattaattaaggcggggacagtggggtagatctttaattttcataatcaatgaaacaaaataatatgggtgaaaactggggaaaaagtctttatttgagtgctagccataattatacagaagattttggcagtatgctagtttgctagtttaacaataaatgataatcacttttattcaaaaaaaaatagatgttcttttatgcttttgaatgactgtgtcacttttttggtgacaatcaatgcaaaanactacatttatgtntcagcgacacttcanaaaataaatctgtagctatggtttccaaagtattatggggtttgttttctttgaaataat

SEQ ID NO: 17041 - DNA, 519 bp, Homo sapiens
  misc_feature 6, 44, 53, 56, 86, 183, 508: n = A,T,C or G
gtgatngtagcatacactggactgaacagtgtgaaattatctangctctgcancanggaagaattagaaattatggcccaggtgtnagatagcgtataaccaagagggattggagttaggaagtcctgtgaaatttgcctaaatcaggtcgctagcactggaatcaaacaggagcacatgccnaagaaaaatcagcataattttcagtaaggaaaaacaagcagttcgcatgcctaggagacttctagttaaatatgtcatagtttctccaaatttaagcaaatcataagccaacagtaaagtaaatccgtaaacttacagtaaagtaaaacatgtatattggatattatggatatccaattatggataacatttttagaatacattttaatgcaaaaaataaattattttgatcaaattaagggaaaaactttcattcacttactaactggctttacatgggagaaaaatagggatgacttttctatgggataaccatttttaattnttgggataaac

SEQ ID NO: 17042 - DNA, 214 bp, Homo sapiens
  misc_feature 1, 5, 6, 19, 59, 167: n = A,T,C or G
nttcnngagtttttctagnattaattaaggtgggcaagcctgaagagggcttggaaggncctgtatctgcccccttttctttgctttatgcttctcttccatgggctgttcctaagttgtatcttttatatagtcaaaaagagttttgatataggttgtatgagtgntataagataaataaaagaaaaaaaaaaaaaaaaaaaaaaaaaaaaaa

SEQ ID NO: 17043 - DNA, 447 bp, Homo sapiens
gccccccctcgagagtacttctagaattaattaatttaaagtgataatttaaattcatttatttcctgagtacctacactgtactaggcaacattttagtcactgaaaatgaaaatatactgttaacaaaacagacttcagactaaattctatttctaaaaattttaacagtttactgcatatggcatattatggctaattatttagccattaaaatatgaatctgaaggccgggcgcggtggctcacgcctgtaatcccagcactttgggaggccaaggcaggcagatcacgaggtcagcaaatcgagaccatcctggcaaatacggtgaaaccccgtctctactaaaaaatacaaaaaattagccgggtgtggtggcgggcgcctgtggtcccagctactcaggaggctgaggcagaagaacggcgtgaacacgggaggcggagc

SEQ ID NO: 17044 - DNA, 394 bp, Homo sapiens
  misc_feature 22, 28, 32, 37, 60, 71, 73, 112, 117, 121, 127, 131, 133,134, 141, 142, 148, 154, 165, 185, 201, 240, 251: n = A,T,C or G
agtacttctagaattaattaangcgggnggangaccnaaggccaggaatttgaggctagnctggccaacantnaaaccccatctttattaaaaatacaaaaactatcccggngtggnggcngacttntatntnncaaattnntattantttctnaaggccaggtncaaacatcactttctctganggagctttcctctctntcaatctatctgctgaacttgtctttcaaactaaattgnagggcagctgncccactccaatcaattctagcactggcttaaatctctgctttcaccaaaagctttaaaaaataaaaataggccgggcgcggtggcttggcctgtaaccccagcactttgggaggccgaggcgggcagatcaactgaagtcagg

SEQ ID NO: 17045 - DNA, 399 bp, Homo sapiens
  misc_feature 20, 29, 34, 45: n = A,T,C or G
ggccgtcgttttcacccggnaataagggntaccnttgctgggtgncgggccccccctcgagagtacttctagaattaattaaggcggggggaggggagggaaggaacaggctgagctggtgataagcacctcacatccagtggagaacccacatggcatgagggctgtcataaatctagaaatggccaattatttttgccaattgaaaaatcagttatcattcccaacagagctatgaaaacagtttttaaaaaatcgtattaggggccgggcacagtggctcatgtttgtaatcccagcactttgcaaggccaaggcgggcggatcacctgaggttaggagttcgagaccagcctggccaatgtggtgaaaccccgcctctactaaaaatacaaaaat

SEQ ID NO: 17046 - DNA, 461 bp, Homo sapiens
ggtaccgggccccccctcgagagtacttctagaattaattaaggcgggaaatcaaagtattctgagtagtttataattgaaatacaaagtaattcacaatataagtaacatattagatgtcaattatatcatgttgacatgtaagagtcaaccatatacaaaacttttacttgtaaaaaacactttaatatttcatatctttttatttaaccaaattttgtagaaatgtttacattttatataatcctatttcttacatggttgagaaacaaaaaatgatactggttatggataaaacactagattggcaattggttagaatgataaattttcatttcactagattttcatttcactagattttcattatttatgtccatgattatttatctttttcatgcagttttaagcacttattgcaggtcaagtgtgatgaaagatctgaataaacaaaaaaaaaa

SEQ ID NO: 17047 - DNA, 276 bp, Homo sapiens
  misc_feature 239: n = A,T,C or G
agtacttctagaattaattaaggcggggttgactaaatctattagttagtgattaacaatttaactagggatgaggagctgatagtaaactctattcttaactagcctgtaaactcttaggagcattaactcaaatccaggagattctctttgcaaaataggattgtggtggctatagatgctaatagcaaacctaaagaagagtgatgattattccattgggtagtagccaaaccaantacccactagttatgggaaatatataattgaaaagcc

SEQ ID NO: 17048 - DNA, 307 bp, Homo sapiens
  misc_feature 25, 53, 72, 79, 85, 106, 130, 139, 142, 143, 144, 145, 146,147, 150, 152, 153, 154, 155, 177, 214, 219, 221, 232, 271,296, 298: n = A,T,C or G
ctgggtaccgggccccccctcggantacttctagaaattaattaaggcggggnaaaattaaaaacattaagnaaacttncttgtnaatttccaaccaaaaaaattnaaaatttggggaaaattttaaagntaaattttnttnnnnnnttntnnnnccaagacctttttaaaaggaangtttttggttaattttttttttttttaaaaggttggnaaatnanttccaaggttnaaaatttttaaattccccattttaaacccattttggaangggccttccttattttttcctgggncnttttttaaa

SEQ ID NO: 17049 - DNA, 419 bp, Homo sapiens
agtacttctagaattaattaagggggaatatataaaaaccctccaaggacccatagatttggaaactgaaactcatattttttcaaagaatttacagttcaaagaaaaaaatcacaacatagatttataagatatttagaactaaacaaaagtaaaaataccatataataattcacaggacaccaacacagaatttagaaggaaatgtcttatatgcatatactgaaaaacaaaaacaaagctataattccagcactttgggaggccgaagcaggagggtcagttgaggccaagagtttgagaccagcctaggcaacacagtgagaccctgtctctacaacaaaacaaaacaacaacaaaaaaactcacaaagataatgataatgagctaagcgatcaactccaaaaaaaaaaaaaaaa

SEQ ID NO: 17050 - DNA, 212 bp, Homo sapiens
  misc_feature 20, 21, 23, 189: n = A,T,C or G
gtgaccgggccccccctcgnnantacttctagaattaattaaggcgggaaggtttgtgtatttcttcctaacgtgtaaaaaagagactaaaaactggcctttcctttttcctaaaaattttaacaaatatttttaaaaatgtatgtagattgtgtaagttcatggaatttgatactaataatcaattcnttaatattttcactaaacaatgc

SEQ ID NO: 17051 - DNA, 547 bp, Homo sapiens
  misc_feature 432, 487, 542, 544: n = A,T,C or G
agtacttctagaattaattaaggcgggatggctgagttcaagctaaatagtatttcaagtttcaaattgtttggatttctttttggttacatagtcctaatatataaatcagctgccttctgaaaattggagttttaagcagaatctcactaagacttctcttgttatctaaatctaaataaaaagggatttacatactgtcagtatatactgaacagaaaaccttgtaaaacagtagtaaactggagggatgcattagttttaacacaaagcaaaaccttgtaaactcaggagatagataaacctgccaatagaatcacaattctaaatgtgaatctttatcgaagtggtaactcagtgtaaagaagggttttaaatcagttcattagtctttatggtcgcttccgttgactagaagtaaaaccaccagcngaaagggaagataaattaaggagtacccccagaaaagaaattgcaattcatggtnaataagaaaaccagaatttctctcgttaaaaaactaaaccaaaaccaaaaaattntntta

SEQ ID NO: 17052 - DNA, 392 bp, Homo sapiens
  misc_feature 385: n = A,T,C or G
agtacttctagaattaattaaaaaaaaacttaattcaggaatattctagctcacttggcctaggttccagtaacctcagtccgggaatcccttctgcaacataccaccttaaagtggaatattcagctgtatcatggtggcagtagttctcaaagaagtacgttgttagaatcagggtaacactttaaagaaaatacaggccaggcacagtggctcacacctgtaaccccagcacttagggaggccaaggccggtggatcacttgaggcagcagttcaagaccagcctggccaacatggcaaaaccccatcactactgaaaagacaaaaaatagccaggtgaggtggcacacatcttgtaatcccagctactcgggaggcatganaattact

SEQ ID NO: 17053 - DNA, 305 bp, Homo sapiens
  misc_feature 21, 51, 65, 79, 87, 92, 105, 126, 127, 138, 139, 141, 143,149, 152, 160, 165, 173, 176, 191, 209, 223, 224, 226, 231,232, 239, 252, 255, 256, 280: n = A,T,C or G
ggtggccgggccccccctcgngaagtacttctagaaattaattaatgcggnatgttactatgaanactactttgtcatnaataaaanaatgnatttccaatgtanataagttgtgtctataacagnntcaaaagcccnntnancgagangcnttctgaancctanctatttangangctcaaacggaaaanatcacttgcgcccccccngcgggagggcacannangctcnnatggtgngattgtactacanccnnggcaatagagtgagaccgtatctntaaaaattttttaaaataaaatttt

SEQ ID NO: 17054 - DNA, 297 bp, Homo sapiens
agtacttctagaattaattaaggcgggagaatcgcctgaacctgagaggtggaggctgcagtaagccgagatcataccactgcacttcactgtacttcatcctgggcaacaaagcaagactctgtctcaaaaaaaaaaaaaagcccatataaagcccatattggggaaaaatctatgcctaaaatatttttacagataagagatgggcaagcagaaacatcagaaacatcaaaaaccactagacgacaggactatttcaactttcctaaacatgtcatgttatttcaaacctttctt

SEQ ID NO: 17055 - DNA, 341 bp, Homo sapiens
  misc_feature 1, 35, 44, 52, 69, 74, 87, 97, 99, 100, 101, 104, 105, 109,123, 124, 125, 128, 129, 131, 132, 161, 322: n = A,T,C or G
naagtacttctagaaattaattaaggcgggctaancagttcttncacctagnaaatgagcaaaccaaantgttntattttccatggnaaggtagctngnnntcnntccnctgaaagtatattnnntanngnngcttatttggcttacccttactaggatangcaatttgtgagacagatcctcttaaagaggtataaatgttaggccaggtgcggtggctcacgcctgtaatcccaacgcttcgggaggctgaggtgggtggatcacgtgttcatgagatcgagaccatcctggctaacacagtgaaacctcatctctaatnaaaaaaaaaaaaaaaaaaa

SEQ ID NO: 17056 - DNA, 537 bp, Homo sapiens
  misc_feature 31, 64, 76, 95, 107, 126, 151, 179, 188, 189, 191, 194, 208,228, 230, 244, 251, 269, 276, 283, 291, 311, 327, 377: n = A,T,C or G
agtacttctagaattaattaaggcggggaanaaacaaattgtgttttgcaaggactgcctattncaatttattttnttgtgaaaatgcaatacgnatgaaactttcntgttttaatttttttaganacagtgtcaacctggtctgaacctntgaggttcattgtgccttttgtgaaaanaataatatnntntgnggtgcactgttcanttttattggaaatcgttttngnttcttattttttanaaacagntctcgcacttttgcccangctggantacacgnggtgcacncatagctcactgcagcctcnaattgctggccctaantgatcttcccaccttagtcttctgagtagctgggactacaggtgcatgtnaccatgcctggctagtttttaaattgtttttgtagagatgaggtctcactgtcttgcccaggctggcctcaaactcctggcctcaaccaatccccctgccctggcctcccaaaatgctagggattacaggtgtgagccacagcatcttggtcccttgaaa

SEQ ID NO: 17057 - DNA, 492 bp, Homo sapiens
agtacttctagaattaattaaggcgggcgcctgtagtcccagctacttgggaggctgaggcaggagaatggcgtgaacccgggaggcggagcttgcagtgagccgagatcccgccactgcactccagcccgggctacagtgcgagactccgtctcaaaaaacaaacaaacaaagtgcgcagcagtgtctggaacgcagtcagggatcaataagtgttagcaattatttccctggttaaccaaaagctgcctatagtttggtatggctgacacatgggaggtaggctagtggtggtgggaaaggctggaactgcggggtgactaggtaagcagtgaccagatcaggactttgcatgtcattaccaagaggatggactttaatcctcctggtcacaatttctgaagccattcctaatgggagacaagtgtgatcttctatctacaggagtgaggctatggcccaagaagccctccaaaaacataacattgtttt

SEQ ID NO: 17058 - DNA, 448 bp, Homo sapiens
  misc_feature 34, 38, 39, 59, 68, 72, 80, 363, 390, 401: n = A,T,C or G
agtacttctagaattaattaaggcgggctggcantgtnntttttttaaatctggcaccnattacacanatgngttcactngaggagcatgccacatacttcacaaaagtttactttaaaagtaatacacatgttcacttcagaactttttttctttttttagatggagtctctgtcgccccggctagagtagtggcgccatctcggctcactgcaacctctgttccccaggttcaagcgattctcctgcctcagcctcctgagtagatgggactacaggtgagtgccacgacacccagctaatttttgtatttttaataagagatgtggcttcatcatgttggccaggctgggtgttgaactnctcacctcaggtgatccacctgcctcncctcccaaagnctgggattacacgcgtgagccactgctcctggccagaaattttttaa

SEQ ID NO: 17059 - DNA, 473 bp, Homo sapiens
agtacttctagaattaattaaggcgggtcataaaaaacaagcaaagccacattttcaaatttgttcctcagattcattttcacacatcatcaaatctaagtcttcagtgaatatatgagtgttataaatatagtcagcatctcagcctgcaaagaatacactatgagaattaattaccaaagcacttaaaattcatcaaaatcacaacaaagctgacaactattatttacttccatatcagatcagttgaagattaatgtgaaacaagataaatgtatcatctgttctgaactacctacacagtaatcatctctggctcagtataatttccaaatttcactctaacatactcataaatacttaatattacatatagcctgtattttatctgaaacttttatggtgctttaccataaaaataatcgctttcaattatattttccaagccattcaaatgcccactaagaaatatc

SEQ ID NO: 17060 - DNA, 583 bp, Homo sapiens
  misc_feature 519: n = A,T,C or G
ggtaccgggccccccctcgaaagtacttctagaattaattaaggcggggtggctcacgcctgtaatcccagcactttgggaggccaaggcgggtggatcacaaggtcaagagttcaagaccagcctggccaacatggtgaaagcccatctctactaagaatacaaaaattagccaggcgtggtggcgcgtgcctgtaatcccagttacttgggaggctgacacaggagaatcacttgaacccgggaggcggaggctgcagtgagtcgagattgcgccactgcactccagcctgggtgacagagcaagactccatctcgggggtggcgggaacaataaaaaccaaaaaaaccaaagtgatggttataaaagcaatatataaatgtgaaaaatgcttctgatgtaatgtcaaagaaatcagaattttacaatgagtctgactgtagctatataaaaattcatacacataagaaaaacaaaataaatactaataattttcttttctctactttctatactgncataatgcaataatacgcttatttttatttttaaaagaatgaaagtgaatttttaaaaaaagtc

SEQ ID NO: 17061 - DNA, 468 bp, Homo sapiens
  misc_feature 147, 252, 430, 431, 433, 441, 443, 445, 456, 457, 458, 459: n = A,T,C or G
agtacttctagaattaattaaggcgggggaggtagatggtggtgatggctgcacaacaatgtgaattttttatttgatatatattttaccatatttttaaaaactctattacaaaaaaaagaattggtctagcctagataatcttantagccatgttttattgctattcaacttgtcactcatcaatttatataaactcaccagccttttaccacttagctgtctatactccacatcagttcttctctcagngtttcttccagttcactgcaatttgagactcagaagtttttctttgagaagtcagtatgctgtatccattaaggaacattctgttcaggaaagacatctaagtattccaaattgataagggaggtaaagacaaaacagataagtgatttttaaaatattattggcttaaattacaaannanaaaaaaanananaaaaaaaaagnnnnccccccccc

SEQ ID NO: 17062 - DNA, 385 bp, Homo sapiens
  misc_feature 1, 130, 142, 173, 178, 185, 192, 193, 197, 199, 201, 202,204, 228, 275, 288, 302, 363, 380: n = A,T,C or G
ngcgggggtggtggtatgcacctgtagtcccagctattcgggaggctgaggcaaaaaaatcacttaaacccgggaggcagaggttgcagtgagccgagatcacgccaccgcactctagcctgggtggcanagcgagactacntctcaaaaaaaaaaaaaaaaaaaaaaaattnggggnccccacnggggggnnaccntnanncncgactctcaaattatggacaggancacagcaaaccgttcacttgatggacgcagctaagatgaacactcanctgctcacattgngttcaggttctggngcattttgaacacttcgtaagaaaaattactgaagctcttaataacaaacttgccttccanaacagaaaggttttatnaaaaa

SEQ ID NO: 17063 - DNA, 415 bp, Homo sapiens
agtacttctagaattaattaaggcgggggctgcaataatcacatgatagccctcctccttctaaatcgagctcctaaggacaccagattaatcaccactagcccattctcaagagtacccacagtgagtctagtgataggttacaacaacacattgcactatcaagacagatttttaaaaaattcttcaatgtaatgcaataacatctgagcagctggtatgcagcagacactgtgctaggtctttcacatacctagaaaagcaaccatcagtcctcatttcataaatgagaacactgaacctcaaagagtttcagcggtgcttatcagagctctaggaggctgaggcaggagtcgccccaaaggcccgcagatccacctccatggctggccaggctccaaccagcaaacaaggc

SEQ ID NO: 17064 - DNA, 432 bp, Homo sapiens
agtacttctagaattaattaaggcgggtgctatgataaactttttttttactatgattactcaaggaattccatacattaagccttataattgacatcgcacttcccacacttcaatttcaagtgatagcatacatggcctgtgtcactgcttgatcaaatgcaaagtgtgactgaaacaaaacttacttttataaaatgtaaaaatggcagaagttcatcccttccttgacagactaatctaatgagtccaaatttcaaaattagagtgggtcagtttgcaagactttatataaaatagaatccaactctcccctcaattctacacagctgatgttacatcaattccatatctaaagtgaaacactagactggagaaagtggagaaagaaaaaaacaagaatatctctgacctcagaagattataatgaag

SEQ ID NO: 17065 - DNA, 723 bp, Homo sapiens
  misc_feature 323: n = A,T,C or G
agtacttctagaattaattaaggcggggacagttctggagttaaccccccgtgtataccaagggacagctacgctttggaaaacaatttggcagcttgtgaaaaagttaaacatacacctatcaaataacccagccatttcacaactaggtgtttacccatgaaaagggaaagtatatgtctatacaaagctttgtacatgaatgttcatagcacctttatctgtaatagccaaaaccgaaaaacaacctaactgcctcttaaccagtaaataaacaaactagtatggccatacgatagtattctattctagaataccagccngtaaaaaggaacaaactattgatacataaaacaacatggatgaatttcaatataattatacagagtgaaagatgccaggccaaaaacagagtacctattgtacaattccatttatataaaactctagaaaatgcaaactacatttctactgtgggaaaaggacaggaggaaggaattacaaagggccaggagaaaactgtttttcattaccttttggtgaccagtctatacgtggatcaaaatgtaaattgaatactttaaatatgcaccagccgggcacggggggctcacgcctgtaatcccaacactttggggaaactgaggtgggcagatcatgaagtcaggagtttgagaccagcctgaccaacgtgggggaacccccgtctctactaaaaactac

SEQ ID NO: 17066 - DNA, 355 bp, Homo sapiens
agtacttctagaattaattaaggcgggaggaacggacgcaacaaggagaaaggaagcaacggaaggtcttcggctgctaaaaaatgtaactgacaaagagtccagggctgtttgtatttttcttcctctgtgtctcatattaaacacttcgggtctgatgactgagtttctccagccgacatagcattcatttatttttttctcattcattcagcaagtcctccttgagctcttattatatgccaagacctgtaccaagtccttttcatcatttaattcttatctagagccttaagcaaatgactcaagtactgtgattagcttgccttttgcagatgaaaaaaaaaaaaaaaaa

SEQ ID NO: 17067 - DNA, 276 bp, Homo sapiens
  misc_feature 63, 65, 70, 71, 81, 95, 99, 103, 105, 106, 118, 120, 121,135, 146, 147, 152, 173, 178, 180, 183, 185, 187: n = A,T,C or G
taccgggccccccctcgtaaagtacttctagaaattaattaaggcgggggggaacttctgggncnagganntgtatatggnacctggagccacancacntagnanntccgtttatatngnncaccatggaaaaangttatcagctnngcctngagattgactcattaaggtcntagantntcncnangctgaggtgggaggatcacctgagcccgggaggtcaaggctgcagtgagctgtgattgcgccactgcttttcagcctgggcaacacagt

SEQ ID NO: 17068 - DNA, 411 bp, Homo sapiens
  misc_feature 66, 69, 92, 200, 269, 283, 372: n = A,T,C or G
gccccccctcgagagtacttctagaattaattaaggcgggtagagaagggttctcatgttgcccanggnagtctcaaactcctggcctcaanccatcctcctaccttgacctcccaaagtgttgggattaaaggcatgagccaccatgcccagcctgtgtttagtttttctgtgaactattcataacctcatgttacttntatgtagatttctttataatagtcacactactgtgttccatttgatttattaatggtaatatttctcantacgtctatattgncatattttagtatctggcaatcttctctttttattattttttaactgttccattgttgggcatttaatgtttgcttttttgtttgctgntttaggtaatcacctaataggggtttgggtggaaatttt

SEQ ID NO: 17069 - DNA, 446 bp, Homo sapiens
  misc_feature 11, 14, 18, 22, 29, 36, 39, 43, 44, 45, 46, 62: n = A,T,C or G
ccgtcgttttncancccngaanaagggtnacactangcngggnnnncgggtccccccctcgngaagtacttctagaaattaattaaactgtaacttattttaagccagtatcagaaggcaagttaaaaaattagaggactgtaacttctaagtagtataacacgcacattagcattcacccacgtgcttccacttttgcagacatggagcaaaagcagccctcctgctagtgagactactccaagaaaacccctcccccggcacagtggaaaaacccacgacagtctcagaagaagagcgtctatcccaggattcaaggttaattcctttgctctcaccttctcagaaatatcacttcatcattaataacccttttgcccacttatctttaaatcttcatctttgctggctcacacattcaaatctcttcaaaaaaaaaaaaaaaa

SEQ ID NO: 17070 - DNA, 308 bp, Homo sapiens
  misc_feature 4, 25, 30, 35, 38, 40, 47, 48, 57, 60, 61, 62, 65, 67, 68,69, 76, 79, 80, 85, 93, 94, 96, 103, 109, 111, 141, 190,225, 238, 241, 267, 286, 287, 291, 292: n = A,T,C or G
attnatactggccgtcgttttacanccggnaacangtntnacctttnnttctggccngtnnnttncnnnagagaanaannaaaanccttaatnntnggggccnccgttnanggaaactctgaataggggaatgatatcatnacatttccctgttaggacaaataggagaagtttaatatcaagatgtaanaaagttaatggagggagacaattcaggtgttccanccaagggatgacnatncctattttgaaggcagggataggganaaagtattaagggaaaatnnttcnnaaaaaaaaaaaaaaaa

SEQ ID NO: 17071 - DNA, 246 bp, Homo sapiens
agtacttctagaattaattaaggcgggggtggagtgaatgtgtgtatgtgtgtgaggaagacatagttccttgcagattttaataaaagaatggagaggagttcccaagattaataaagaatggttccagactgggcataactcaggccactaattccagcactttggaaggctaaagtgggaggatcactcgaggagcttgagactagcctggtcaacataatgagatcccatctttacaaaaaa

SEQ ID NO: 17072 - DNA, 408 bp, Homo sapiens
agtacttctagaattaattaaggcggggtaaaatacatataacataaaattttccatcttaatcatttttaagtatacaatttgatggtatcaagtatatgcatgatgttgtgcaaccatcatcgccatccatctccagatctctttttcatcttataaaaccgagactcttaccattaaaaaaaaatgggactgggatttttaacaaactactaaaaaagaaaaagctataaccttcactttttttttttccacagaaagacaatgccttggcaaggagctaataagtagaagatcatcgctcaggtgtcaatttaccttagatacaaaataaatacgcagcccaggtgcggtggctcacgctgtaatcccagcactttgggaggctgaggcgggtggaacacgagg

SEQ ID NO: 17073 - DNA, 452 bp, Homo sapiens
ggtgccgggccccccctcgagagtacttctagaattaattaatcctttaggtaaatacagggaattgtgcaactcaagaaagcaagcccttagaacagttatctagctaatggagacgcagtgtagacatgcgtacaaactcactgagctatacactttagtattttactgtctgtatgttgtacctcaatcacaatttttttaaaacattaaaaagcacatcttcatatgaaactagaacatgtgtttgaaataatccacataccatgttattcttgaaggaaacaatgtaaatatcccatgcagacttctaaaaccatccatactcatattatagaatactccgtacctgtagagtactgctacagaatcatctccaagatatgttaaatacaaaaagcaagctacataagagtatgcatagattattacaatttgtgtaaaaaatgaga

SEQ ID NO: 17074 - DNA, 382 bp, Homo sapiens
  misc_feature 28, 31, 33, 34, 39, 40, 42, 43, 46, 47, 50, 52, 54, 57, 58,60, 65, 66, 74, 77, 78, 80, 81, 82, 84, 91, 93, 96, 97,99, 100, 102, 108, 111, 116, 117, 119, 120, 122, 135, 147,168, 170, 174, 184, 185, 187, 188, 189, 194, 204, 213, 215: n = A,T,C or G
  misc_feature 216, 222, 223, 229, 232, 235, 236, 239, 242, 243, 245, 247,250, 252, 255, 258, 261, 263, 264, 266, 268, 283, 352, 358: n = A,T,C or G
aaccctactaaagggaacaaaagctggntcncnnccccnncnncgnnagnantnctnnanttaannaacgctgntgnncnnncncagctgncnttnngnntncaaacnctnctacnngnntngcttggggccctnaggatagacctnagttactacagtgttataacntngacncaaaaaaccnncnnnatacntatccgggancctggaacngnnatccannggagtncanagnnatnggnntncnaantnacnctntgngnntnanaggttacaaagttanaggcaaaacttggtcctgaggcaataaaggcctttctctccctatagtgggactcaggagtctctgtgnggctgncttgaacccgctgcaccaaggggt

SEQ ID NO: 17075 - DNA, 586 bp, Homo sapiens
  misc_feature 398, 516, 524, 577, 578: n = A,T,C or G
agtacttctagaattaattaaggcggggccctgaatagtgtaagaatccaagttcatagtgattggttctggagacaatgagatatgaggaaatatatactgaaggctttggcaataggaagcttcctactcttaaggcagagcccaatgggaagacatttcaggctcccagagaatgagagtatatggaggcttaagtgctatgagcaacgattccattaccacaggaatgaagccaataaacttcattattgtttaggccgggcttagtgttacttgtggccagaagcatcctggttgatatatgatacatatgcaggatactccatgaaatttaaaaacctaagtaatttttaagcaattactacttataaggaaaaagagataaaacttaaatncattgtgggataaaaatgtgactttccatcctgtaataagtaaacataaatgcatagtaattacataagacacctatcaatatttcagaggaagatcagggaatatgctgtccttcanattcacanggaaatattcccctgcatcaacattgtaagccctttggtttattttgctgggnnggtttttt

SEQ ID NO: 17076 - DNA, 312 bp, Homo sapiens
  misc_feature 23, 295: n = A,T,C or G
agtacttctagaattaattaagngcgggattcatccaatattaactataaatcagtaagattataatatgattcaaaaattacttatagatagaataatcttggtcccaaacatatctacacatactaggtaataatgtaaatattaagtagagtgaaaaatgtcattgtggatggttcaatattgttactcaaatgcaaaacaataagcctttttgttattgcagtagcatgtcttatctttccctttgccctccctctaaattgataaaaagctatatgtaaaatctcataanaaaaaacccaaaaaaaa

SEQ ID NO: 17077 - DNA, 413 bp, Homo sapiens
agtacttctagaattaattaaattcatgtaaataattttctgaaagaactctccttttttatctcataggtttcaaacagtctaatggtaaaaaggtttagtctcagaagagattctctaattaaaactagaaatctggtataattaataagtgtcagcctgcaatctcaaccacttagtaaaggcagagaaatcaaatgctgatgttttgtaaaaaacctaataaaatctccaagaaaatgaaatttttatagggtctacttcccatcaatacaataggtgtcccagatgggactagaaacttcttaaagtagataaatattttaacacttacaattcctatatgccagttttatttgtttttcttttctctttggagttgtaactcaacccaaaagaaagctttcaatgat

SEQ ID NO: 17078 - DNA, 187 bp, Homo sapiens
agtacttctagaattaattaaggcggggaaacgccatatcgggagtcattgacatctgggtggtatttaaagctgactctgaatgagaacatgagtgtagctgaaaaactgaaagcatgcctatgtttacagtcagaaagatgaagaagaaaagcaaaagagactaaggtacaaaaaaaaaaaaaaa

SEQ ID NO: 17079 - DNA, 493 bp, Homo sapiens
tccgggccccccctcgagagtacttctagaattaattaaggcggggtatagatctttctgaaggtaagttagcaggtcttgaaagactcagacaatagttgatcccttagaagagtgaagactgagttagtggataggacagcagagacaaaaacatccttgtagagttctggctcctgcaacaaggagagcatattgtagaggaggcgaaacaaagaaacaaggaaaaaagagaaacaaattgcaacttggtgaagaatcttcactaggagtcactccaaggactacttcagagatttgctcttctaggagagaaacattcatctagagcagaaggtacactggtgagagactatccatgctactctcaacttacttcctgcatgtgtgcttttattaatgcttaaactagggttagcacacaaaaagtcacacatagagaacttagcagggatcaaatatgccacctgcacatggttaccatggcatttcc

SEQ ID NO: 17080 - DNA, 319 bp, Homo sapiens
  misc_feature 37, 50, 51, 56, 57, 61, 84: n = A,T,C or G
agtacttctagaattaattaaggcgggggtcttagancaaatatgaaaannaaaanntttnctatgtatagtttaatgaccagnatataataacaaatatctaaatctttcatcaacagatgtctgaatctgtggcctgttataaagtaaggtttagacgaaaactttcagtttttaatacaacagcactaaatacttggtatagaacacataagtaaactcaagaaaaaggaaaaatacataaagaaattactagaactcaagcagaccaatagaataagaatatttattaaaagtaaattctagttaattgaaaaaa

SEQ ID NO: 17081 - DNA, 428 bp, Homo sapiens
agtacttctagaattaattaaggcggggatgtctaacagtatagaatagtttagttcatccatggatgcagtgagccaagatcacgccactgcactccagcctgggtgacagagtgagactctgtctcaaaaaaacaaacaaacaaacaaaaaacaaaccgaaaatattagtctgtaaagattgatcttgagcctaaacttttagatgttttctatcctttgaacaaatgcttctgtatcttaagcttggaaggacactgggaaactaaacacttttaaaaggcacttttctttcaatagcccacttataaagtttgctttatctaccagtacaggggaaaaaaagaataaagttggttttattccatttaaagtagttttggtatttctttgctccataccaaagtcttcctcccccaaaataaaca

SEQ ID NO: 17082 - DNA, 430 bp, Homo sapiens
gccccccctcgagagtacttctagaattaattaaggcggggatgttctgaaatctgaatatgactctaaagaaaaaagcaatatgaatgttaaaagatagtctgttctcccaggaacagatgtaacattccaagtcttccagtttgtatctttagtgaactgaacaatttctgtgaaaaattattcactatgtacagattttcaggggaacaattttatataaaagttgtttctctgtatgactacattaaccaagtaaaatactgtatttgaaagtagaatactatttattgtcatcagcaccgagaagattgttttgtctaatcctaaatatttacatgacattctgcaattcaaaaatggccgacaggtacatgtgtccagaacaaactaatgattttgaagtgaaaacataataccattaccttgt

SEQ ID NO: 17083 - DNA, 311 bp, Homo sapiens
  misc_feature 8, 299: n = A,T,C or G
cttctagnaattaattaaggctggatttaccactaggtaatgggagagggagagagaatgaaagaaagagctaactccagagaatctatttgtaccagaagctgaaggaggagtggagtcacaaatgtccaggcagatcttgtgtcacctttgccttggaaatacagatgagagaccttcacttaattcagacttcatcgttatttacttatttcctcatatctctctaaccttggtgttgttagattgggtagaacaagaagctggtctagctgggtcaaggaagaattataactttnaatttactcttt

SEQ ID NO: 17084 - DNA, 256 bp, Homo sapiens
  misc_feature 1: n = A,T,C or G
ngagtacttctagaaattaattaaggcaggcaaaactaataaatatttaaagaagtcatatactggttaccactgagagtgagtattgagtataaagacacaagaggaaacctcctacatattaaaaatgttctagatcttgatcttgagagtagttattcaggtgtgcacaatattttaagattagcacactttacacattttaatgttaaataaatgattaaagtgttttcttaagttagggtggcaggggaaa

SEQ ID NO: 17085 - DNA, 263 bp, Homo sapiens
  misc_feature 29, 39, 119, 126: n = A,T,C or G
agtacttctagaattaattaaggcggggnacagaagaanagcaggtaccagcagagaattacaacagaaaaagacagtactgggcagaatggcattcttgccaaagttaccagcagcantggcagncataaagcaatacctcaagaggcgttcagggagtagactccaataaggaggctggagcagaacttggcttatttctgaacatgacagacaattcctgaaaactaaattcctacaacattaatactggttctctaaga

SEQ ID NO: 17086 - DNA, 188 bp, Homo sapiens
  misc_feature 159, 182, 183, 184, 187, 188: n = A,T,C or G
cctttccttatgagcatgcctgtggcagtttgaggagcttggagaagacttgaaatagttgtagaaaatgagagtaagtgttactggggaaatgtggaattatatattaagtaaaacaagctggttgtagcaataactagttattatttttacagatcngaaaaaaaaaaaaaaaaaaaaannnaann

SEQ ID NO: 17087 - DNA, 278 bp, Homo sapiens
agtacttctagaattaattaaggcgggaaggtataatatgttaaggccctcttcatgttcaagaggaagataaaaatattaagtaattcagactcttctagcaaaatgtataattaaatatatgtaatgaaaaaaactgaaaagatttaactaaaataatggaaatacaaaccattatagctctcaaagcagcagaagggcaaaagagaatattgaaaacttaatcagttcagtaaaaggatagtttaaaaaagttaaaaaaaaaaaaaaaaaaaaaa

SEQ ID NO: 17088 - DNA, 314 bp, Homo sapiens
  misc_feature 17, 18, 20, 22, 28, 32, 37, 118, 254: n = A,T,C or G
aaaattaaggcgggtcnnangnactgtntgcntttgngtgtatgtaccccttaattatcttccctttagcatttacagtttcaagattttataacataacttctccagcaggcctcancaaggctgaggcacaagaatcacttgaatctgggaggcatttataaaatcatttataatacaaacaatatagtatgtcaaatttaaaataatgcacctaagactgcttatatgcttttcattaaaaacacatttanaatctttgaaacatcacgaagcagttttagtatctctaatacaagtctaaacataagttc

SEQ ID NO: 17089 - DNA, 473 bp, Homo sapiens
  misc_feature 20, 21, 25, 29, 39, 40, 44, 46, 48, 52, 65, 78, 96, 99, 360,375, 377: n = A,T,C or G
cgcgtgcgtcttttcatccnngaancaanggtaacactnngctngntngccnggccccccctcgngggtacttctagnaattaattaaggcggggngcngaatgggttgttgtaaatggatgttttctagttttctgcttttcctacagtgttctcacagaaacaaccatttccatcatcattatcatactctttttaagtgagaaaagttacatccagtagaggaactatccccaatccagtaactgggaccatcacggcaatcacataacaagtttaggaaacggcttaaggaaatgagctaataacatgactgcacacaagcagattatctctgattgctacaaagaatgctattanggggcaccatgtttncnagtgatcattttttccagcctgttacagaaaaggttaatctgccgtcctattcataaatcaatttaaaatcttgcccaaaaaaaaaaaaaaaaaaa

SEQ ID NO: 17090 - DNA, 243 bp, Homo sapiens
  misc_feature 133, 174, 181: n = A,T,C or G
ggtgcccgggccccccctcgagagtacttctagaattaattaaggcgggtcttagaaatcgaatgtagtgattatctaggacatttttttttcttgtcatattcactagttagtaactccaaccataaagtanccctaaacttgtattcaaaactaaacatgatataaaacttnatttcanaagacttgaagtcaattactgaagaattaactacatggccatatgacattttcctatttatt

SEQ ID NO: 17091 - DNA, 264 bp, Homo sapiens
  misc_feature 73, 80, 244: n = A,T,C or G
agtacttctagaattaattaaggcgggacatttttacgtaaataattggcccttctagaaataatgatatatntgtcagntcctttttaatctttttacctttttttccctgaaatttgtcttatgtaaatttgataagttttagtgctacttttctcatttctaccaagtttttgtacttgcaaagccagtatatttatttatttgagacagcctgggtaacaagagcgaaactccgcctcanaaaaaaaaaaaaaaaaaaaa

SEQ ID NO: 17092 - DNA, 186 bp, Homo sapiens
  misc_feature 23, 24, 30, 41, 64, 83, 84, 95, 97, 99, 114, 115, 119, 126,127, 136, 140, 142, 143, 146, 148, 154, 156: n = A,T,C or G
agtacttctagaattaattaagnngggatngtgtgttgaangataaaggttgtcgctataaaanagttcataaggaatccttnnggtgatggaancntnctgtttcttagctgnntcanggtcagnntactgttgngatntnncancntttttnanagatgcctccattggaggaaactgaaaaac

SEQ ID NO: 17093 - DNA, 536 bp, Homo sapiens
  misc_feature 24, 36, 37, 41, 45, 47, 54, 56, 57, 58, 62, 64, 65, 66, 68,70, 76, 82, 87, 92, 93, 95, 97, 120, 123, 131, 374, 410,482: n = A,T,C or G
tgatctggccgtcgttttacatcnggaaacaagtannaccnttantnctggccngnnntttncnnnananaaaaanaaaaanccttnattcnngncnggggtttccccttaaaaaaaaanganaaactganatccgagagatcagctgattaggccaagattacagaaaagagtaaggccagacatgaactcatatctgagtctatgtccagtggtctttaaaaagatcaactctattaaaaacacacaaaaaataagtattacatagacaggaggatgagtagctgtatcaggcaaataataataataatgatgaaagtttgatagtgattttaaaaactgaaaatagcatctctatacctttagtgactcanagtctcagaataaaaaaataatagaatggccaggcncggtggctcacacctgtaatcccagcactttggaaggcgaaggtgggtggatcacgagatcaggagatcganaccgtcctgactaacaccgtgaaaccccgtctctactaaaaaaatacaaaaatt

SEQ ID NO: 17094 - DNA, 301 bp, Homo sapiens
  misc_feature 260, 289, 290, 291, 300: n = A,T,C or G
agtacttctagaattaattaaggcgggagatacatggccccacatatgatagaaagcccgggggatttgctttctatttctaaaattgcttatttgactcaatcactgaacctaaattagcgaaagcagtggtagagactgtaaataatttttttcattaaaactatcattggaaacttctgagcaacatttaaagattgtattagttctaacttgcttgttgttacttaattcctactacaaagctaaataatataccnaaaaaaaaaaaaaaaaaaaaaaaaagggnnnccccccccng

SEQ ID NO: 17095 - DNA, 414 bp, Homo sapiens
agtacttctagaattaattaaggcgggaggatctcttgagcccaggagttcaacactaacctgggcaacaaagcgagagcctgtctctacaaaacattaaaaaaattagccatacatggtggagtgcgcctgtggtcctagctgaggtgagaggattgctcgagcccaggagtttgaggctgcagtgagctgtaattgcaccactgcattccagcctgggtgacagagtgagaccctatctcaaaaaaaaggaactatctggcttcatcctaagagtagttgcattttaaactctcagtcagcttcttttactgtaaaatgggaataataattaacagtctaaattcctaaagtgattatgaaggctgaacaggtgatgcctgttcctcaggcccctcccttggggccccttca

SEQ ID NO: 17096 - DNA, 387 bp, Homo sapiens
  misc_feature 296: n = A,T,C or G
agtacttctagaattaattaaggcggggctttggatcaggtgaatctgaatttaagccctgggtcatttatttttaggagtgaccctaccaagccacataacctctctaagctatattatttcattatctgtataactgagataaaaatattatttttagagttctgaaagtggaaacgaaataagtattaaataagtgagtttttaaaagagacaaaatagctcttccaagaaagttggtttaaaagagaaagtgagaatgttaagaaataccaattcccagtaattttttttgnattatgtgtcacagcttttaataattgtagtttttttcactttaacattttgtaaaaatgctcctttataatttaagtttaattggagttt

SEQ ID NO: 17097 - DNA, 351 bp, Homo sapiens
  misc_feature 31, 37, 66, 152, 200: n = A,T,C or G
agtacttctagaattaattaaggcgggtacnatttgnatgctttggttgttcttaaggtaatttanagtttatactattttttaataacaaattactaaatttgttattaaagtgcaaagctcaaatgaagaaaatgaaaaacatttgttgncttttatgtatgtatcctgaattcatattactgtatgggaaaacctantactataaatatttcaatccttaccttcaaatgtatattattgtgcacttcacggagttagagtgagaatgctatgttcagcagggtgtcttaagttaaacattcagacttagaaaaccgttagtccacatttggcatattcacttagaaa

SEQ ID NO: 17098 - DNA, 349 bp, Homo sapiens
  misc_feature 30, 32, 33, 34, 36, 37, 40, 42, 48, 50, 53, 63, 64, 65, 69,70, 71, 81, 87, 90, 92, 93, 95, 96, 105, 131, 132, 134,137, 183: n = A,T,C or G
agtacttctagaattaattaaggcgggcangnnngnngangnctgtantnttntatcaacatnnntatnnnggtctcatancctaanaantnnannggttcatanggaaaagaagagaaaagagtagctcnngngtntcctgggattggaggtcatttccgggttaaccttatttcactgccntcttctcagtgggtttttaaaaggtagagctagtggcctgcataaaagttgcgtttttcggctgggcatggtgacgcatgcttataatcccagccctttgggaggccaaggcaggcatattgcttgagctcaagagtttgaaaccagcctgggcaacatggcaaaa

SEQ ID NO: 17099 - DNA, 373 bp, Homo sapiens
  misc_feature 9: n = A,T,C or G
acttctagnaattaattaagggggaaggtggttagttgtatttgagacgtgtgaggtactgatacttttccgtaattccagttttcctgccaataaaccaatgaagcaacatctcaatatatgagacagattttgtaagaatacgcaaaggattttattaacactttggaaagaatacattcatgtacgacaacttcctagaagtaaaatacggccaaagagatcagctttcacataggtttttataaaactgcctaacacaaaaatacacatatatggagaacttcagactgagaattacatcaggactggtttctttgagtttcgcctttggtctcaaaattaattaattaattaattggttaaaaaagcg

SEQ ID NO: 17100 - DNA, 289 bp, Homo sapiens
ccccctcgagagtacttctagaattaattaaggcgggagggaggtataaccttggaagaagtggttcttttcagaaatgggcaattcctaaagaggaacttagtcaccaagcatttgaggaaatgagtgcttttgttccaaagatggtggggattggcataccacaacatgcactatggtgtgtgacattttctgagatttaaattctactatatgtcagtatcattcttatatttatatattgtatgattcatgtgggtaaatcatgtttaataagagaattattgga

SEQ ID NO: 17101 - DNA, 380 bp, Homo sapiens
agtacttctagaattaattaaggcgggggatgtatatttgcttgtacatacataacatacctctggaatgatagataggaaattagtaataccagccacattttgagtgggtaggggccagagttagaagaaaactttaccctatataccctatatttatactttatgtagtgtaaaccatgtcctgtttaaaaaaaaaaaaagaaattaaaaacaagaatgaatgctcttcattattctggtaaatgcaggctcattttacttttgtgcattttaattgaatgtactgccatttaacttataagaattaatacttagggctgggtgcagtggctcacacctgtaatctcagcactttgggaggctgaggtaggtggatc

SEQ ID NO: 17102 - DNA, 398 bp, Homo sapiens
  misc_feature 236, 292, 326: n = A,T,C or G
agtacttctagaattaattaaggcgggcacctgtaatcccagctacttgggaggctaaggcaggagaattgcctgaacccgggaggcggaggttgcagtgagccgagattgcaccatttgtactgaagcctgggcaacatagcgagacaccaattaaaaaaaaaatagtatctaaaaaacaaatccttcaagtgttataatcattttaaagacattttccatcattttagcccctntttatttaaggataaaagtatacaggttttgctcttaggttgacttgggaattctnttaatattgtgaaaatccaagctaggtctttganaatgtgctaaaaaagggtttgaaattattttcccccaccaaatacttcgttatttcatttaaaatgtgatat

SEQ ID NO: 17103 - DNA, 347 bp, Homo sapiens
agtacttctagaattaattaaggcggggtggaggaagtaaataagcagataacagactaacacactgctatttcagagagacaaataatttgggtcagaccacaaatagggtcataccacaaatcagacaaataagctacaaattagcttcacttaacagatacaaattagtaaggttaatgtccactcattaaacatttcaatctctcaagtcaagctacccatataaacacttggtatccagaagatgttgatcatagtagctataaaacaggtttagtcagaaaagctattaggatcaaaaattggcagtcacacatcttggcttgggtattccttacactatt

SEQ ID NO: 17104 - DNA, 708 bp, Homo sapiens
  misc_feature 85, 205, 256, 274, 296, 359, 371, 374, 389, 431, 433, 444,446, 472, 479, 488, 494, 503, 509, 525, 532, 574, 585, 598,600, 604, 620, 633, 653, 660, 661, 663, 675, 679, 692, 695: n = A,T,C or G
agtacttctagaattaattaaggcgggtggatcacgaggtcaggagatcaagaccatcctggctaacatggtgaaaccccatctntactaaaagtacaaaaaattagccaggcatggtggcaggcacctgcagtcccagctactcgggaggctgaggcaggagaattgcttgaacctgagcttctcgggaggcagaggttacagngagcctgatattgtgccaccgccactcccagccctgggggtggacaagagnaggaggatcttgtctcangaggagaaaaaaataaaaaaangaggaatataataaaaggggcggcccgcccaccccgcggggggggaggcctcccaaattttcngccccttattangtngaggttccgttattntaaccgccggccgccttcaacttgggccccgtgcgggttttntnaccaaaccagntncagttggaaccttggggggaaaaaanccccccntggggccgnttttancccccaaancctttnaaaatccgggcccctnttgggcnaaggccaacaaatacccccccctttttttcggccccaaggcnttggggccggntaaaataaagccngnaaanaaagggggcccccccnccaacccggaaanccgggccccccttttccccnaaaccanntntgggccgccaanctcnttggaaaatgggncgnaaaatggggaaaa

SEQ ID NO: 17105 - DNA, 445 bp, Homo sapiens
  misc_feature 30, 31, 42, 69, 97, 401: n = A,T,C or G
agtacttctagaattaattaaggcgggatnngagaatatatnatttattccagctgaagttactacttnattgtaactgaaattccccaaaagattngatcttaactatatccttaaactctaaattattataatgaaaaaataggacaataattattgcaaagtatagtgtttttccagcattcaaaagcccatttcgtttttttcaaatttctttttatttttcatcatttaacagaaatgaaggacatttaaagcacattaaaagacaaaggaaatggcagcttctgtagtaacatttatctaaatgatgaagtatcataatcaatcacagaaagatcatactttgtccttagattctgcattggagtctacagataatggagaattattacagttgnagcaaatcttaagatgtacttaattttacaagttaagaaaataa

SEQ ID NO: 17106 - DNA, 321 bp, Homo sapiens
  misc_feature 21, 31, 43, 48, 69, 297: n = A,T,C or G
gtgccgggccccccctcgggntacttctagnaattaattaaanactangtagtctgagtccttagcggnttagtgcctagaatgagctaaaattgattgtgtttactaactgacaggctctcttatcataatcctctattagcttgttattattacgattatcgttcctttatccatgagggccatgagatacagggagtttaaataactaagattgtactgcttggaaatgagggtttgcatatgggacatgtccaaagcctagcctcttaccaggacatcaccttgccattcagngaaacagaaagggcttcaatatag

SEQ ID NO: 17107 - DNA, 436 bp, Homo sapiens
gggtgccgggccccccctcgagagtacttctagaattaattaaggcgggaatgacaaaagagtcaagacctctcctgtagatgaaagacatttgatctttttactacttactgggaagcaaccctgacccactccgtgaagtaaaggaagatgtactttgagctccccctaggggtgaagtgtccctgatcacccatttagaactgaaatatacagacaacatatatttgttaaccatggtgttaaaggcttatagacaaccagtactgctgtattaggtacgttatattgaacattctactttaaccattcttaccttcagcaaaagaggtaaaaatacctgttttcatggaacttatgttccaattagagtatatattcaagtatttaaaacttactaattttccattctccgtaatccattcttaaactttta

SEQ ID NO: 17108 - DNA, 351 bp, Homo sapiens
  misc_feature 330: n = A,T,C or G
agtacttctagaattaattaaggcgggtgaattcacagaaaatataaagatgtgaaattccccctccttgtctgtcactctaggaaaagcccaagtatcctgaaatggtggtccagcttctggaaattttgttagaagaatacaagggggctagaagcatgaaataggctagggggttgagaagttatattgtaagatgcagttggatattgccttcatagctttgattcaacttaataattattgaggtctactttgtgcaaggtactatgctcaaatatatgaagttataaaccaaaaatgaatacaaccaatacaaaagaatcttangtaaagacccttagtttaaaa

SEQ ID NO: 17109 - DNA, 636 bp, Homo sapiens
  misc_feature 616, 619: n = A,T,C or G
agtacttctagaattaattaagggggaagacaaaagaatctaattatcttttactatgcattagcaatgaaatcctacattagtgtgtcttcatgagagttcagtaatgatttaagttgtttttcatttttcaatgctttttacatataggctcctgttttatttgtttttaatatgaacatagttttatgagtctggccaaaagccatcttggctgtatatgggttacttctaatttctctagcagtactccagcaacctatgtatagtattagagaaagcagacatttgcattcatttataggagtttcataacctagtgagatagagagagttgatagtattgacaagtagtgttcaagataatggagatatatacatcatctcaaagtgcacatgtagatgtggaccatgaaataccagaagaaatttaagaatttgagataaatatgaaagatgcaaaatgttaacattgttggatcatcaaaaatagtttacaggctcagtaggatggctcatacctgtaatcccatcactttgggagggcctgtgtgctcaatcgcttaagtccaggagttttgagaccagcctgagcagcatcgtgagaccctcgtcnaanaagaagaagaagaaaga

SEQ ID NO: 17110 - DNA, 227 bp, Homo sapiens
  misc_feature 3, 6, 18, 25, 30, 33, 34, 39, 40, 41, 62, 64, 180, 199: n = A,T,C or G
aanagncaagacctcttntgttaangaaanacnntagannnttttactacttactgggaagnanccctgacccactccgtgaagtaaaggaagatgtactttgagctccccctaggggtgaagtgtccctgatcacccatttagaactgaaatatacagacaacatatatttgttaaccntggtgttaaaggcttatanacaaccagtactgctgtattaggtacgt

SEQ ID NO: 17111 - DNA, 405 bp, Homo sapiens
agtacttctagaattaattaaggcaggaaacatacacaagaccattcatcttgtcttacagcagcaatatagacagcaataaaaataaatacatagagctatgtagggcaaatcgaatatcatgaacattatatggagtgaaagaaacatatgtagtccatgaagcatatgtataaagttgcaaaataggcaacattaaatcatatattttagggctctgtataaggtgataaaactgtaaagaaaagtaacaggattattattttaaaaatcatacttctggataacttctttaagagggaaagtgggctttgggattatacagcagcagctggggagcttccaagatgctggtaatatcttattgttgacttcagtgatgattcaggggtgtttgctttatca

SEQ ID NO: 17112 - DNA, 300 bp, Homo sapiens
  misc_feature 38, 189, 285: n = A,T,C or G
agtacttctagaattaattaagggggaagaatattaantaaaaaatatttcatgaatcctaagggaggtatagaagaaggaaaaaggaaatcaaagcatcaagtgacaaatggtacagtgatagttttaaacccaaatatagcagtaatcatactacatgtaggccaggtgcggtggctcatgcctgtnatcccagcactttaggaggctgaggtggactgatcatgtggggccaggagttcgagaccagcctaaccaacgtaatgaaacctcgtctctattccnaaaaaaaaaaaaaaa

SEQ ID NO: 17113 - DNA, 387 bp, Homo sapiens
agtacttctagaattaattaaggcggggctttggatcaggtgaatctgaatttaagccctgggtcatttatttttaggagtgaccctaccaagccacataacctctctaagctatattatttcattatctgtataactgagataaaaatattatttttagagttctgaaagtggaaacgaaataagtattaaataagtgagtttttaaaagagacaaaatagctcttccaagaaagttggtttaaaagagaaagtgagaatgttaagaaataccaattcccagtaattttttttgtattatgtgtcacagcttttaataattgtagtttttttcactttaacattttgtaaaaatgctcctttataatttaagtttaattggagttt

SEQ ID NO: 17114 - DNA, 310 bp, Homo sapiens
  misc_feature 261: n = A,T,C or G
agtacttctagaattaattaaggcgggaatggaactaaataaaactcattggtgtttagatctttgctctcacgtatccgaatatggattgggagctcaattaaaaccttgatttccaaaaacagagagggtttagtagagtatatgaaagtacctcaggggctcttcagacgaattactataataaactatttataagaaggaaagtaaggcctggtgtgatggctcatgcctgtaattccagaactttgggaggctgangcgggtggatcccctgaggtcaggagttcgagaccagcctggccaacat

SEQ ID NO: 17115 - DNA, 498 bp, Homo sapiens
  misc_feature 2, 5, 14, 17, 21, 25, 88, 93, 114, 115, 120, 130, 148, 150,169, 198, 202, 207, 215, 227, 228, 235, 244, 245, 246, 252,254, 258, 259, 260, 261, 266, 271, 275, 276, 279, 282, 309,315, 317, 328, 329, 335, 354, 355, 356, 360, 368, 370: n = A,T,C or G
  misc_feature 373, 379, 384, 386, 401, 404, 420: n = A,T,C or G
gnctnttcaccccngantcangggnacccatgctgggtgccgggccccccctcgagagtacttctagaattaattaaggcggggaggnggganttcatgaggaaatcatttaannattgnatttttaaanatatgacactgctctcantnactaggtgctaataagacntacataacctaccatatagccaaggtttnaatnatcanatttatantttgaaactganngaacttnagttcatannngtgaanangatnnnntgaantccantganngtnaantattatctttgcttccttgattaaatntatagntntttttactaanntatganatatgttcccattattcannnacgnttagggangnttntaacangagananagagagagaaactantanagtttgatctaatgtncttgctaccaaataaagattttacctatagattgaaactaaattgtaaatgtcccaaatacttttcccaaaaaaaaaa

SEQ ID NO: 17116 - DNA, 633 bp, Homo sapiens
  misc_feature 16, 19, 21, 24, 27, 30, 31, 38, 43, 55, 66, 70: n = A,T,C or G
ggccgtcgttttacanccngnaanaanggnnacctttnctggntggccgggcccnccctcgagagncttntagaattaattaaggcggggtggtctaattgatgtgagctaatatgccttaatttacattgatagtaaattactctattggactatgtcatcatcatttaaccatttataaaattgtatttgctctgccagcctcaattctatcaccgcatacttttggttatagaaaagaccagttctaaaaataatggtaaacttatttggattaagggaatctaatcatctttatacttatcatgtatcatggtactcaagcttacatatttttctatcttcctaggctgtatttacacaacaccgatatataaataccaagcaatacacatgtttgggttatttaaaaactaataaaaaacaaggaatattttagatcttaaaaagccagtaagcaaatcaagaatttatttttagaaagctgatcaaagtttagataaagaaatgactgaggaatataaaatttggaaagtaaggaaaaatcattttaatctttatttggtacatatattaaagtctaatactctaacaacaatacatagtaccacaataactcaaaaaataaagttt

SEQ ID NO: 17117 - DNA, 412 bp, Homo sapiens
  misc_feature 60: n = A,T,C or G
agtacttctagaattaattaaggcgggtaggaaatgtctcaaaagatttagataaactanattagataatttctcttgaaaaatatattaagaaatgaaataaaaacaccactccaaaagcatcaaaagaaaatatagttcaaacacttacctatttttattgccaaaaccttaggcagtgaattctgcagttgaattgatcactttattgttttctgctttgcactgccctttaattgtttcatatgtgttcatgttgtctacacagtatactttcccatggtcctcacggtggccagaaaatgcttatttaatggagggatacttagtatttttaaaatgtgtactggctgggtgcggtggctaactcctatagtcccagctacttgggaggctgaggcaggagaatcgc

SEQ ID NO: 17118 - DNA, 432 bp, Homo sapiens
acttctagaattaattaaggcggggcggggcataagtctaggaccccagcatgactctcccaccctcctgcctgcacagtgaattccaatggcacagggttaagaaaagggagcagtggccaggtgcagggacttattcctgtaatctaatctcagcactttgggagactgaagctggcagatgaactgaggccaggggttcgaaaccagcatggtcaacatggcaagactcttgtctctacaaaagaaaaatttttaaattaggcatgataatgtatgcctgtagtcccagctactggggaggctgaggcaggaggatcacctgagcccaagactcagaggatcagtgagccatgatcaggccactgcactctagcctgggcaacagtgcgagaccctgtctcaaaaaacaaacaaaaaaaaaaaaaaaaa

SEQ ID NO: 17119 - DNA, 846 bp, Homo sapiens
  misc_feature 17, 22, 37, 40, 45, 48, 56, 72, 258, 263, 346, 354, 441,617, 660, 670, 672, 679, 683, 719, 758, 775, 798, 811, 823,829: n = A,T,C or G
ctggccgtcgttttcanccggnaacaaggggaacccntgntgggngcncgggcccnccctcgagagtacttntagaattaattaaggcgggagaatcgcttgaattagggaggtggagattgcagtgagccgagatcccgccactgcactccagcgtgggcaagagtgagactgtctcaaaaaaaaagtcattctttctttactttgtgctagttatcttcattgtgttacaaaaaatcaaattattttaggatttanaatanattacttttttgtaatgtgtaagtttccaccagagaaccactaagattagaggagtgtgaagtaagtgtcctctggacgtganacaaggtnttagtaagcaggacattgtaagtttcacattttatctttaaaaatgtgcctttatgcattttactccacaacatatctgtttatttnaatgcaaaagtgttacaccctcatccacaaattaaaaaccgctaaaactttcaaaatcatgctttgtatattctgttacttctggaatgtccctggtgccctgtctccttaccccagggacatctcaactgcttgtttgagaagtattaatacttgtttaatacactttttaaaanaaattttagctttatcaccataaaaaagggtgatttattttanaatctgttancnagactgntccnacctttttactttgcttaagtaaacttttggttccnaacccagggaattttttaaaaatattagttgggttctanaatgggaaacccatggnggtaagccccccttgaacattancctcaaaagtggngtttttcctttnaaaaangaaaaaaaaaacccccc

SEQ ID NO: 17120 - DNA, 374 bp, Homo sapiens
  misc_feature 341: n = A,T,C or G
agtacttctagaattaattaaggcgggcacaggagggaagcaaattgaggatgattatcacaaaaatcagttaagaaaacacaaactgcatcatccaaaaatacacctttggtccacggatgccactggaagacatctgaattttagacctccagagagaagatctgggtggctagctccagagtagaggcatgcttgctttttctttacacttgtgaagaggaatggatccggacatctgcaatctgggtagaggacggcaggcagcaagcttagccactcggccaggcttctcagcccttactctagacatgtgatccttcctccacgtgatatacttnacaactttcttacggctactcaaggcatcccaa

SEQ ID NO: 17121 - DNA, 445 bp, Homo sapiens
  misc_feature 4, 28, 406: n = A,T,C or G
ggcntggctcggtatacctgaagcccanaagagtatcagagtcttatccttcactcagagatggggtagcagtaggtagctgcagtggcgatggagatcgtaatcaattaaattaatatgtatattaaagatattgggatccagaattctcgctgttgaagaaggttgttaaaaataaggaaaggtaataggccgggcacggtgcctcacgcctgtaaccccagcactttgggaggccaagacagatggatcacctgagctcaggagttcgagaccagcttggccaagatggtgaaaccctgtctctactaaaaatacaaaaattagccaggcatagtggcacatgcctataatcccagctactcaggagactgaggcaggagaactgcttgaacccaggaggaanaggttgcagtgagctgagattgtgccactgcactccagc

SEQ ID NO: 17122 - DNA, 420 bp, Homo sapiens
agtacttctagaattaattaaggcgggtacataattctatttatattttatctatgatatattctgtgtgcattgaatatttaccttccattttgaattatgtgacaataaattacttcattttcctcgaatcatttccttatgtttacctttctccggtggctgtgtgatatgacagtgttaatatataacaagaaataattggaatttggagctagtataatatacaacttgatatatttagtttctgtgatgccaaatatattgactataatctcgatggtagcattctgtggtgtgaagctgaactcgatgaccaaactatattaagaggtgttttttccattgtcaacaaataaaaggaaaatgatattttaaggtaatacaaatatatttaaaattagacagttgaaatatttc

SEQ ID NO: 17123 - DNA, 313 bp, Homo sapiens
  misc_feature 53, 58, 67, 87, 89, 128, 132, 145, 288, 291: n = A,T,C or G
aagtacttctagaaattaattaaggcggggggagcatttgcttttaaggaacnggaancccatcctntccatcctccttgtgttctnantttagctcctaggaaatgctctgaaactataggaccggntcancattcacagcggntacttttgctggtctccttccttttaataagagtgacagctaacatgtactaagcacttaccatgttacgagccgtgcagttaacgctttgcatgcatgtcgccttttaatccttcccacatcagttttcagtttccgatttnatnagcgagtattggatttgcagat

SEQ ID NO: 17124 - DNA, 414 bp, Homo sapiens
agtacttctagaattaattaaggcggggccactaccgcatctggctaatttttgtatttttagtagaggcagggtttcgccatgttggccagaccggtcccaaaccagcctggtcttgacctcaggtgatctgcccgccccggcctcccaaaatgctgggattacaggtgtgagccaccacgcccaaactcttcgttttcaattaaacaaacaaacaaacaaaatctgaggcttgggatagttaagcagaccttgtttaaatgtggcagattttaacacatgcatttctgctgcttcctaaaataccgttaaaatgaaagtaagagtctctctcttttggacatacctttttaatgccatactgttactccaagatgtgatgagtgatgagaggtcctcagatatttgaaccat

SEQ ID NO: 17125 - DNA, 444 bp, Homo sapiens
  misc_feature 64: n = A,T,C or G
agtacttctagaattaattaaggcgggttttaggggtaacctgcagttttctctgatttttcanattttacggatgttgaataaaaatcagtgaccatttaaaaaatggtttagttgttggatcaaagtgctgtaacaaacaaaagctttttataagacatggcagctttagggagggtgagagtagtaagaaggaaatctgttagaaaatagaaaattttgctgagaaaagaatgatttttcaggactggaaatcctattactgtgctttactcagattttataaactaaaacataatttttagtaaaggattggggcagttgtaaagatagtcatacctcagcttaactttccccaaactcatgacttatttgactacatcattatgcagcattattgcaatatcaataatttacattgaaggaatttacaacccgttgcca

SEQ ID NO: 17126 - DNA, 480 bp, Homo sapiens
  misc_feature 24, 26, 33, 38, 44, 47, 51, 70, 132, 309, 370, 372: n = A,T,C or G
gatactggccgtcgttttcacccngnaaccagnggtanccttgntgnctgncgggccccccctcgagagnacttctagaattaattaaggcgggggaggggttgggtaaagaagagaagacgagctttccanagaaactcatgcgagagtccaggggggttcacatttggttcaggagggccagcattgcacactagaaatagcccccatccctggactggccaggacatcacttacccacccccctgacttcaatcagagctgggacgcacaaccccactgatgtgaggcctgcttggtgcaccgaanttcctcctgctgactcacactgaagtaccgccgcaatatggagaaattccatgacaaaaananagtattcctgacatttttccaagcactcagattttccagtagattgcactgagcacagtatttctgtcatccaaactgcgtaggaatagctcaatgtttccaaagtga

SEQ ID NO: 17127 - DNA, 313 bp, Homo sapiens
  misc_feature 6, 11, 17, 18, 28, 38, 47, 48, 58, 68, 70, 74, 79, 81, 85,91, 96, 98, 100, 101, 106, 108, 110, 111, 113, 115, 119,126, 127, 184, 199, 210, 217, 218, 220, 243, 245, 247, 264,265, 270, 272, 283, 286, 288, 290, 308: n = A,T,C or G
ttcccnagttnttctannccgggggaangaaaggggcngcccaccannaacccttttnttttttttcngncgcntgccnantgangaccancacancncnnaaaanananncntnaaanagctctnngattgcacggaaaagttttaccgcgtttgtcatgataatgcttcctgtgcaatattnggttatttaatattngtcacaatatnacgcccnncnaacattaaaaaaaaaaaaaaagncncnctatgttgcccaccccnnccccnancttctggcctnaancnancctccccctcctaccctncccac

SEQ ID NO: 17128 - DNA, 113 bp, Homo sapiens
  misc_feature 47: n = A,T,C or G
agtacttctagaattaattaaggcgggggagaggtgagttgtaaaangcaccgcgaagtaggtatcttttttgagaacaagtttgtgtaattgtgtggttgtggggattgagg

SEQ ID NO: 17129 - DNA, 409 bp, Homo sapiens
  misc_feature 377: n = A,T,C or G
agtacttctagaattaattaaggcgggacaaatccagagtacaaaagtgatggtgactagaggaacaaggcaagatggtttgccctgatttttaaggtctgactcgggtctgtgtgtcaaagcaggctcccatggcacctgacgtgacagccagcaccacggccacaggagaaaactctcagccatggggagctccaggcaaagcaggaggggaggaaaaaaaaacacataaaaatagcctttatgaatctttctcaatcagtgaacataatggctcaggaactccaataagtaagaaactgccacaagcaaaacaaaaatggagtaagctatgaagagaaggcaaccaaacaatcaccgattctcttcccgcaatnaggtctagaaacaaaaataacaaaaagcctgg

SEQ ID NO: 17130 - DNA, 354 bp, Homo sapiens
  misc_feature 6, 28, 29, 36, 39, 45, 50, 58, 60, 61, 70, 71, 72, 73, 75,78, 100: n = A,T,C or G
cccgtncgtttttcaccccggaaaaggnnttgaacntgntttctnggccngccctttncnntaggagtannnngnaanaaaactttaattaagttctccncattcaattaaagatcagtagaacagaggatactagacactggaaagggcaagggcaagaagaggacaaggagagatttgttcaaggatccaaattacagctaataagttctagtgttccattgtactgcaggatggctatatttaacaatcatatgttatatagtttcatagagctagaagaaagatattgaatgttcccaacacaaagaaataatagatgtttgagatgatgctattgagatgtgctaatta

SEQ ID NO: 17131 - DNA, 191 bp, Homo sapiens
  misc_feature 28, 30, 41: n = A,T,C or G
caggctgggtaccgggcccccccctcgngngtacttctagnaattaattaaggcgggcatttaataaatgctgtgtcaataagtgaaaatgagcataaaatattcaaatgtacatatcagttctatcataatgtacaaattttaaagtaatttcaaaatatctaattactaaaaaaaaaaaaaaaaaaaaa

SEQ ID NO: 17132 - DNA, 544 bp, Homo sapiens
  misc_feature 28, 30, 31, 32, 34, 38, 44, 52, 65, 70, 72, 76, 79, 80, 83,84, 87, 93, 100, 104, 110, 130, 136, 137, 161, 200, 204,213, 214, 223, 244, 247, 253, 278, 419, 476, 510, 518: n = A,T,C or G
agtacttctagaattaattaaggcgggngnnnanactncacctngataaggncgttcaagcaggnaaacngntatngcnnctnnggngccgcnatgcccnggancacctngagcccttatgaactccaanacaggnnaacaaggatttccactccaacctnattgacatgttttgttcttttaaagatggactctcactntgtnacccaggcnngagtgcagnggcgtgatctctgctcaccgnagnctccgnttcccggactcaagcaattctcctncctaaccctcccgagtcgctgggactacaggtgcccgccaccatgcctggctaatttttgtattttttgtagagacagggttccgccgtgttggccaggctggtcttgaactcctgaccttaagtgatctgcccacctcancctcccaaagtgctgggattacaggcatgagccaccgcgcccggcctgaactcttanttctaacgcagggattcaggaattgggctttcanactccttntgcagtgtcacaatccaaactttttt

SEQ ID NO: 17133 - DNA, 431 bp, Homo sapiens
gggtaccgggccccccctcgagagtacttctagaattaattaaggcgggggagtatttataaatacaaatgccccattcacaggggactttttaaaggtgcaaactactgtctatgatactgtagtggatataggacactatgcatttgtcgaaacctacataacttttcaacagagtgaatcttaatatatgcaaattttcaaaaaaattcatgtaggaggtcagatcttaggatgtaaaacagaatatgacatataccagtttttgtgacactcaggtgtacccattaagcttttcatcaggagtccctcaaaggccccaaaagtctagaggtcctagcacagtatacaaattttagtatgtgtggacattcatgcctttttctagggaaagggcctaaggctttcacaaaaaaaggctgagaaccact

SEQ ID NO: 17134 - DNA, 449 bp, Homo sapiens
gggtaccgggccccccctcgagagtacttctagaattaattaaggcggggtatgggtggtaaaggcaagggctcctggaagtaaatatagaagtgccagcggttggtgttggcattagctttttggctgtaacataaaccccgtcagcatgtctatgcatgcctatatgatgcaaacacatgtttgcaatagaggctagtttgagattttcacaacagtaagtctaaagttgtagttctcaggccgggcgcaatgcctcacatgtgtaataccagcactttgggagaccgaggcaggcggatcacctgaggtcaggagtttgagaccaacctagtcaatgtggtgaaaccccgtctctactaaaaatacaaaaattagtcaggcatggtggcgcacacctgtccagctacttgggagactgaggcaagagaatcacttgaacccaggag

SEQ ID NO: 17135 - DNA, 715 bp, Homo sapiens
  misc_feature 32, 38, 55, 148, 149, 150, 151, 152, 161, 168, 169, 174,183, 185, 186, 187, 188, 190, 191, 192, 199, 208, 209, 210,211, 215, 216, 217, 223, 229, 230, 231, 233, 234, 240, 241,242, 243, 246, 247, 249, 251, 252, 254, 255, 256, 257: n = A,T,C or G
  misc_feature 258, 259, 260, 261, 262, 263, 264, 265, 266, 267, 268, 270,271, 272, 273, 274, 275, 276, 277, 278, 279, 280, 283, 286,287, 288, 290, 291, 292, 293, 294, 295, 296, 297, 298, 299,300, 301, 302, 303, 304, 305, 306, 307, 308, 309, 310: n = A,T,C or G
  misc_feature 311, 312, 313, 314, 315, 316, 317, 318, 319, 320, 321, 322,323, 325, 326, 327, 328, 329, 330, 331, 332, 333, 334, 335,337, 338, 339, 340, 341, 342, 343, 344, 345, 346, 347, 348,350, 351, 352, 353, 354, 355, 356, 357, 358, 359, 360: n = A,T,C or G
  misc_feature 361, 362, 363, 364, 365, 366, 367, 368, 369, 370, 371, 372,373, 374, 375, 376, 377, 378, 379, 380, 381, 382, 383, 384,385, 386, 387, 388, 389, 390, 391, 392, 393, 394, 395, 396,397, 398, 399, 400, 401, 402, 403, 404, 405, 406, 407: n = A,T,C or G
  misc_feature 408, 409, 410, 411, 412, 413, 414, 415, 416, 417, 418, 420,421, 422, 423, 424, 425, 426, 427, 428, 429, 430, 431, 432,433, 434, 435, 436, 437, 438, 439, 440, 442, 443, 444, 445,446, 448, 449, 450, 451, 452, 453, 454, 455, 456, 457: n = A,T,C or G
  misc_feature 458, 459, 460, 461, 462, 463, 464, 465, 466, 467, 468, 469,470, 471, 472, 473, 474, 475, 476, 477, 478, 479, 480, 481,482, 483, 484, 485, 486, 487, 488, 489, 490, 491, 492, 493,494, 495, 496, 497, 498, 499, 500, 501, 502, 503, 504: n = A,T,C or G
  misc_feature 505, 506, 507, 508, 509, 510, 511, 512, 513, 514, 515, 516,517, 518, 519, 520, 521, 523, 524, 525, 526, 527, 528, 529,530, 531, 532, 533, 534, 535, 536, 537, 538, 539, 540, 541,542, 543, 544, 545, 546, 547, 548, 549, 550, 551, 552,: n = A,T,C or G
  misc_feature 553, 554, 555, 556, 557, 558, 559, 560, 561, 562, 563, 564,565, 566, 567, 568, 569, 570, 571, 573, 574, 575, 576, 577,578, 579, 580, 581, 582, 583, 584, 585, 587, 588, 589, 590,591, 592, 593, 594, 595, 596, 597, 598, 599, 600, 601,: n = A,T,C or G
  misc_feature 602, 603, 604, 605, 606, 607, 608, 609, 610, 611, 612, 613,614, 615, 616, 617, 618, 619, 620, 621, 622, 623, 624, 625,627, 628, 629, 630, 631, 632, 633, 634, 635, 636, 637, 638,639, 640, 642, 643, 644, 645, 646, 647, 648, 649, 650,: n = A,T,C or G
  misc_feature 652, 653, 654, 655, 656, 657, 658, 659, 660, 661, 662, 663,664, 665, 666, 667, 670, 671, 672, 673, 674, 675, 678, 679,680, 681, 682, 683, 684, 685, 686, 687, 689, 690, 691, 692,693, 694, 695, 697, 698, 699, 701: n = A,T,C or G
aatcccagctacttgggaggctgaggcagganaatcgntagaacccagaaggcanaggttgcagtgagccaaggttgcaccactgcactccagcctgggcgacagactgagactccatctcaaaaaaaaaaaaaaaaaaaaaaaaagnnnnnccccccccnggggggnnccccnattcccccntnnnngnnnttttttnccccccccnnnngggnnntttttnaaaaannngnnaaaaannnnttnnancnntnnnnnnnnnnnnnnntnnnnnnnnnnnganaannntnnnnnnnnnnnnnnnnnnnnnnnnnnnnnnnnnnannnnnnnnnnnannnnnnnnnnnnannnnnnnnnnnnnnnnnnnnnnnnnnnnnnnnnnnnnnnnnnnnnnnnnnnnnnnnnnnnnnnnnnnnnannnnnnnnnnnnnnnnnnnnntnnnnntnnnnnnnnnnnnnnnnnnnnnnnnnnnnnnnnnnnnnnnnnnnnnnnnnnnnnnnnnnnnnnnnnnnnnnnnnnannnnnnnnnnnnnnnnnnnnnnnnnnnnnnnnnnnnnnnnnnnnnnnnnannnnnnnnnnnnnannnnnnnnnnnnnnnannnnnnnnnnnnnnnnnnnnnnntnnnnnnnnnnnnnnannnnnnnnnannnnnnnnnnnnnnnntannnnnnatnnnnnnnnnntnnnnnnntnnntnttttttcccccccc

SEQ ID NO: 17136 - DNA, 423 bp, Homo sapiens
agtacttctagaattaattaaggcgggggggaagcttgagagggataaaagactatatattgggtacagtatacactggtcaggtgacaggtgcactaaaatctcagaaatcatcactaaaaaacatctatgtaaccaaaaacccacctgtaccccaaaactattgaaatattttaaaaaataataaattttaaaaataaagtaaaacttgaatggaaaatgacaggtatgctgcatatacttgtccctcctgaaccattctattaagtttcccacgactggaaggaaaacatgtattatttattttttaaaaaacagggcagtgggagggatatttctttgttataaagtactggaaattttgagagctatattatacccatattcatctcttcttgatgtaccctggctgaaactgtcaac

SEQ ID NO: 17137 - DNA, 243 bp, Homo sapiens
ggtaccgggccccccctcgagagtacttctagaaattaattaaggcggggtatgggtggtaaaggcaagggctcctggaagtaaatatagaagtgccagcggttggtgttggcattagctttttggctgtaacataaaccccgtcagcatgtctatgcatgcctatatgatgcaaacacatgtttgcaatagaggctagtttgagattttcacaacagtaagtctaaagttgtagtttctcag

SEQ ID NO: 17138 - DNA, 378 bp, Homo sapiens
ctcgagagtacttctagaattaattaaggcgggggggaggccagtcattaggagatatacctaatgtaaatgacgagttaatgggtgcagcacaccaacatggcacatgtatacatatgtaacaaacctgcacgttgtgcacatgtaccctagaacttaaagtataataataataatacgaatttcatcattctgaatagctcaaaatgttcctctaagtctcgatagtagcaatagatcacagaactaaactgagttgcctgattgttgtgtatcaataatgagtatgctagtggggctttggatcattaaaaaaataattaaataaagcataaaaataaataaaataaaactggccttgggaaaaactataaatta

SEQ ID NO: 17139 - DNA, 420 bp, Homo sapiens
agtacttctagaattaattaaggcggggggcattaaacagttggctgaatgtattcagcatttgttagattaatttagccatctttctttgaaaggaaatgctctccccagggcttttttgtcttctttttctttcttttttagttttagtttttagcaggttttttaaatgcctttataccaacactactaaattatgagagcgagatgtccaggcattgtttttccaaacagcacactaattgctttggaaacaatgataacgctagcatgttttgagttaacatcactcacatggcttacgtctgcataatgcaaaagtaataggttaactaaacaagtccctccctaaaactgagtcatttcaataaaccaactagttgaaattatcattgctatcttatagaggcaaaagaacta

SEQ ID NO: 17140 - DNA, 704 bp, Homo sapiens
  misc_feature 608, 626, 635, 685, 696: n = A,T,C or G
agtacttctagaattaattaaggcgggttgaataggagaggaatagaggagggggtgctatttcaagaaattgactaggaatggtttcattcatgtggtaatatttgagcagatccctaaagacattagagcatgagacatgcagatatctgggggaaagcataccaggcagagagaacagcaagggcaaatgtgccgaggcaaaggtgttcttgatcagtttaagaaatagcaaggaaaggagtaagaagaagaaatgcattcatctcttgaggttgtagagggtggcttatgagctctgctgggaacttcagtttttagtgtgttacatgatttgatatagaaggatccatcaggcagctgtgtgtcgaatacactgcagggaaggcaagagtgagaaaaccaataagaaggctacaacgatatggctattgttgtgaaaaatcttaaataaattgctaccatataaaatccatcaggattaaacaataatgcatatccaagaagctttattttaggagtatagagatgagttaatatcagaaaaactattagagcagtatccatattaacaaattaaaaggttaaaaaagcatttagtttaaganaaccatagttttcaaaanaaccactgncataatttgatgcttattatatataaactcttctcaagtgaggaagaaantgaacttcttntttaagga

SEQ ID NO: 17141 - DNA, 358 bp, Homo sapiens
  misc_feature 45, 61, 133, 170, 184, 266, 335: n = A,T,C or G
agtacttctagaattaattaaggcggggtatactaattctgtagnaaggtcacaacttatnattaaactaagcctatgagaaataactcaaaatatctcaacagatcaaaatatctactttaaaaatctggcngaaaataactatgatgattttcataacattttaattntagtttttattgtntaacattactcacctttctactctgtgccaagctctgtagctgagcattttctcaaaaccctccagtttcctaatgcatacnagaaagcaaaaatcctaattcctcatggtctattatgatctgcctcctaactctctctttaaaaagaanaaatattgaacataatttttatt

SEQ ID NO: 17142 - DNA, 659 bp, Homo sapiens
  misc_feature 563, 607, 620, 633, 652: n = A,T,C or G
agtacttctagaattaattaaacatttacttattgcccataagtttggcaagagttaaattatatacatacatacatacatatatctatattttaaaattttgcaaaatatagagacaaagtctcactatgttgcccaggctggtctcaaactcctgggctcaagcaatactcccaccttggcttcccagactgctgggactccaggcatgagccaccatacctggcaagagttataatgaaaagacacattagagaccattgagtcaaataccttatttcacagggaaaaaaaaaaagcccagagtggttaagtgacttgagctcaaagtagttaagtgacttgctctaaggtagcacataaacagcagacctaaaactaagtatttaattatttccattcacttaaacatctattgtgtacctataggtattgataatcatctaggagaatctcttataaagatgaacagaactaattattcataaatcagtaaacagtacaaaaccaatatcatgggtcctggaagtccttcattctcatctttcttacagagacatatnccaaatatattttatgggggattcagtatccaaaaaacagctgncaaatattaagtngaaactgaaaggnttggttaaccaaattcatnttttttt

SEQ ID NO: 17143 - DNA, 440 bp, Homo sapiens
  misc_feature 348, 397, 401, 429: n = A,T,C or G
agtacttctagaattaattaaggcggggatcaaatgacaattctaagattgtctaggatatgaaagatatagttgcatctgcttgaaaggtagcacaatgttagttgggtaatgagaagaacttcctgtgaagaatgagagatgggaacttattgagggtaatctgcttagggcaaattactactcaacaaatcttataatagcaaaaagaatatcttatccaaaaagtgctttctagttctcattaactgcccttaattaaggcgggcggatcacgaggtcaggagatcaacaccatcctgcttaacacggtgaaaccccctgtctactaaaaatacaaaaaatcanccgggcgtagtggcgggcgcctgtagtcccagctactcgggaggctgangcangagaatggcgtgaacccaggaggcggancttgcatgagc

SEQ ID NO: 17144 - DNA, 191 bp, Homo sapiens
  misc_feature 191: n = A,T,C or G
attaattaaggtggggttgggtaaagtagattaggtgaagtagaacataaaattgaatagtacccaattaaagttcctcagtaagaaaaaaaatgtgtttttgtaggcaaaaagaacatttctaaagtctcaaggaatagcttcctaaagtgctgagtaaagaggctaaataaaatgagactagtttaatn

SEQ ID NO: 17145 - DNA, 395 bp, Homo sapiens
aattaattaaggcgggattacacataagaatttctgccaccatcggaaataggaccctagagtgagaattgactttcttccgtctgccacagctgtcagtctgtgaatggatttccactagggcaatgttgtctgcctgtatttctgcctgtttttgttgtgagtgataggatgaggacacaacaactgacaaaaatacggagagctgatgggcttcttcgaagctgcctgcaagcctgtttcacgtgacgtgttccgttgttgaaatgacaccttcccttatctgccagctctgttaacacacaagatgaccttggcttcagcctgtcttgaggggctggctgttttactttactaaatgatttggtttaagtcagaagtggttatccctgatc

SEQ ID NO: 17146 - DNA, 474 bp, Homo sapiens
  misc_feature 35, 38, 42, 43, 44, 47, 50, 53, 54, 58, 74, 80, 86, 89, 97,99, 101, 105, 108, 112, 115, 127, 134, 137, 138, 139, 145,149, 155, 160, 173, 174, 185, 197, 201, 202, 208, 266, 277,285, 292, 314, 320, 323, 352, 354, 365, 371, 372, 377: n = A,T,C or G
  misc_feature 427, 438, 455: n = A,T,C or G
agtacttctagaattaattaaggcggggaatatanctnatgnnnaangtntanntttntattggcaaaatgtcntaatgntcaccngtntaaaaccncncngtgngtntaanaancatccataagtnttgacgnatnnnatgtantatnacgtgnccatnctatggttgtganncgtttcttatncgatgacctggntctnntgccanttaattcggcccacctagggctgcattcattctatggattgcaaagcagtaccatatntgcgttcaccntcacagancgcatgngtcccccaaggaaatattcccnaaagtnggnttgtcccaaaaaatttaaaattaaaattntnttaccggcgcnttaaannttggntttaaagtaaattcaatattcccgcttggtatttatttggttttcattanttaaacctggngactcaagttttaaacnaaagttcaccgttccctta

SEQ ID NO: 17147 - DNA, 323 bp, Homo sapiens
ctcgggagacagaggttacagtgagctgagatcatgccactgcactccagcctgggcaacagagcgagactctgtctaaaaaaaaaaaaattactaattatgtttgtttcaggatatgcttctctttctcactaacacaaaaaaagaattgtcatcaaatacagatatatgaaattatatccatttcacaataacagaataaaatctatattttaaagaataggaacaacatatttctcctaaatataatcaatatatttcttcaaagccttatgaaaactattaactgacatattaatttaacattataaaagtttcaaaca

SEQ ID NO: 17148 - DNA, 441 bp, Homo sapiens
  misc_feature 4: n = A,T,C or G
gggngccgggccccccctcgagagtacttctagaattaattaaggcgggcaaatcatttgaggccaggagttcgagaccagccggggcaacacggcaaaaccccctctctgctaaaaatacaaaaaatagccaggtgtcgtggcacatgcctgtaatcccagctacttgggaggccgagccacaggaattgcttgaacctgggaggtggaggttgcggtgagccaagatcgtgccactgcattccagcctgggcaacagagtaagactctgtctcaaaaaaaagaaacaaacaaacaaaaaacatgtaattaataaaagcagtagacttgaaagcaaaactttacacatattttttgaataggtaaagttcccatggttcaaacattgaagaggtaaaaagatacacagacataccttactttattacacttcactttact

SEQ ID NO: 17149 - DNA, 313 bp, Homo sapiens
agtacttctagaattaattaaggcggggaaaagtggctgctgacaattaaggggagaagcattcacaaattcctgaaattgtgcctaaaaacaagcaatacattcactagttcctcatcaatcagtggtttagtcagaatagatgccaatgaactagtgaagggtgtatatttttttccttttcaccaaaataagttgaacaaaattcctgtgtgattgcatattttaaaatctaagtttcatgtttgccaacattgctaagctactatatcaattgtctggcttaagccaaataaaacctttcataactttg

SEQ ID NO: 17150 - DNA, 408 bp, Homo sapiens
  misc_feature 8, 75, 79, 82, 83, 85, 86, 218, 219: n = A,T,C or G
agtacttntagaattgattgaatacacttttaaaaacacctgtgataatgacttacttgctttaatgcctttgtntcanttnntnnctaaggtcttaacgtaagatttagcaatttaaattacgttattttatggacaaaatatataataatgacattaagggaaaataaactgtaaggcaacctttcctaatctaatgatggaattgagtgaacagnnggttacctgtaagaagagcaaccaagttaaaagaataaaacgttcaaaggccataagccataaggtttttatgaaaacctcagaaaacctcattgaaatgccatgaaattaaaaagcacaccaaaaggaaaataaaagttataaaataagcattcaataaacatataaacttatacttcacttgcagtt

SEQ ID NO: 17151 - DNA, 437 bp, Homo sapiens
agtacttctagaattaattaaggtgggtggaggagggctgcaaaggctattcagttgcttaacctactctaggctctatcccaacagtaagtgcagatactctaaaataacagttgaaaatacagtgaggttttgagataacaaagccaccctagaacaatgattctccaagtgttttaagaggatcactggcacagaagcaactgggataatgttttaaattatccaggtttctgggccctgcctcatccttaatctgaacctctatcggtgtgatctaagaatctgcattttatagcaagtacttcaggtgattcctacaatgccaaagtgtaagaaccactgcactagagggtattaatatttttccttcaaggcccagaattctcaccttgaaatctgtcacatacatacataatatcatatttctcaattaa

SEQ ID NO: 17152 - DNA, 387 bp, Homo sapiens
  misc_feature 17, 18, 74, 188, 229, 249, 279, 284, 287, 289, 290, 298,301, 304, 310, 312, 314, 315, 333, 334, 342, 348, 349, 357,358, 359, 362: n = A,T,C or G
ccggtaccgggcccccnntcgagagtacttctagaattaattaaggcggggggggaatggggggcatgtttcangaactggctccccgggctccgccctcctgtgagcccaggagaggctgtgtgaggggtcttccctcttcatccaagctgctgcctgcctttcccttccctcaagaggcaaggcantgggaggggctggaattttttttttttttttttactttttntttttttaattttttttatntttttttttttttttttttttttttttttntttancananntaaaaacnganaantttctncncnnagaaaaaaaaaaaacccnntaaaaaanaaaaanngggggaannnttnccccccccaaaaaaggggggggggg

SEQ ID NO: 17153 - DNA, 384 bp, Homo sapiens
  misc_feature 5, 29, 37, 44, 56, 69, 227: n = A,T,C or G
ctggnccgtgcgttttccatccccggaancaagggtnacacttngctgggtggccnggccccccctcgngagtacttctagaaattaattaaggctcattaaaagcagaaaagaaaaacgaaagggaaaacttggagacctggttacctcccgatcctgatactgatcccattctgtaagctattattaataacaaaatatgaagaagaaaaaaattatcaacaggnaaagggagttaaattgtgcgttaaatatacatttaaattttctgaaaaaggaaaacaaggcttccctgagaaatgagctggctggaaggaaggctggagccctgcagtatcaagaagcagatctgtcccagaggagggagggcacagaaaattcctg

SEQ ID NO: 17154 - DNA, 190 bp, Homo sapiens
agtacttctagaattaattaaggcgggataggtagactgaccctaaaaatacgctttatattttaaggtaagggaagagtttttcttttgtcccatgcttgaagctttctcctacagagggacgtttttttctgaattgtggcggtagctactttcctgaggctggttaccaaaaaaaaaaaaaaaaaaa

SEQ ID NO: 17155 - DNA, 643 bp, Homo sapiens
  misc_feature 622: n = A,T,C or G
agtacttctagaattaattaaggcgggcgaatgggctccacagggagtgttccctctcaggtgggcagggcagggtcctggttgttgattttaatgtcctcgataccgtacatgttacatacattctttggtgttgtacaatatttcacaagaaaaagatgatggaagacagtcgcccaccctcagccacagaaccgtcacccactggcccgggttctacacacgtactcccctcttccctccctcaaaccatgcctaccatctcagccttgacgaaaagcagctgtgaactaagtaaatgtcctttgctgaggggttccccaaggagggagtgagctaaggctgcttttgggggatgttaggattggaaagagcagttacaactgtccccaggttttgcccaccagtccagtaggttttcataaaaactaggtgtctatccaaatcttccaccaacatagctacttttagtttctttctactatttcaggtattgaatctattgtcccaaccagatttgggacaggtgggagcatctggggcacattcctgacagctgaaggccacgtagggtggcccgccatttccttctctgggagcaaacaagctgcttcagcaatancctggggggctagaatgccca

SEQ ID NO: 17156 - DNA, 548 bp, Homo sapiens
  misc_feature 31, 33, 35, 37: n = A,T,C or G
agtacttctagaattaattaaggcgggccgntncnanaaatgaaccagacaaagcacaaatgaaaggaacttttcctaaaatgaatacatcctgttagattcgaaaatatactatcctcatggataatcattttgtcagcctatccataattacttttcattaaaatctgtaattgtctttagcaggaaaaaaaagaccgaactaagtacatacgtaatctgtaacatagattttatattaaaatctatttgaaacatttaagatttttcacactaaaaaaagagagatcacttgaaaaatatatgacttaatagtcatttacttttgtttacaaaacaggaaagaaaactgactacaattccagaactagtaaatcgcaaagttaacatctaatgtctaatcatctaattccaaacttcatgcaactgtaatcattcaactaatcaagaatctttaaaccattctgacatactattaaattagcaattccacaaacattagccgtttttaaaatccaaaaatccagatttctttgtaattcttcacg

SEQ ID NO: 17157 - DNA, 364 bp, Homo sapiens
  misc_feature 345: n = A,T,C or G
agtacttctagaattaattaaggcgggggacttcaaaataggagcggttagagcaggaaaatagtatgttccattatgaattttgtacgatttgattttttatcttctttttccccttctttcagtttgttatactatacacaagcatcgttttgatagtaaaaaataaacataaatgccttgaacaggatttggtacatagtatgtgctcaatgaatatttgatgctgatgtttttgctactgtgatctttattaaagctgcaacactaaagtgagaatcaattcatattctgcatgacaaccctaagataagttcttttatacctctctgtttctccattcanaaaaaaaaaaaaaaaaaaa

SEQ ID NO: 17158 - DNA, 421 bp, Homo sapiens
ctcgagagtacttctagaattaattaaggcggggataatcggaggcagagcagaggctttacatgtggctcacagaatcgatctttttatgtctctgtagttacactgtatacatcatcctggatcacagcagagccaaagtgacaacatcccacagaaaggaaaggcaaaatccctccatatctgtgtacatttctgtttggaaagcctagaaacaaaatcttggaaccatataactcattctcactgcagtgttctcagaaatctgcccctcccaactacttgtcagcccacatagttaatacccagggagaaataatcagctcaaacaagatgattctggccatatgttcttttcaaagatgccaaaactatcaataatctctcattgaagtctctaaaccaaaaaaaaaaaaaaaaa

SEQ ID NO: 17159 - DNA, 373 bp, Homo sapiens
agtacttctagaattaattaaggcgggggaattgaagcaatattttagtagatagtcactggaggttttccaaaactgacatcaagccacagatgtaaagaagagttatggacccaaatgtgataaacacaaagaaaacttatatatgctgtcatcaaactgctgggaaccaaagacaagagaaagtcttaaaagcagccagagaagaaagacattccaccttcaaaggagcaatataagactgaaagcagcctctcagcagaaataatggaagctacaagacagtggattgacatctgcaaggtacagaaaggaaatatccaccaacccagaattctacttctaatgaaggagaaataaaattatttttata

SEQ ID NO: 17160 - DNA, 461 bp, Homo sapiens
  misc_feature 20, 21, 253, 302, 307, 330, 332, 333, 338, 356, 364, 366,371, 376, 412, 414, 416, 436, 438, 440, 443, 445, 446, 447: n = A,T,C or G
ggtaccgggccccccctcgnnagtacttctagaaattaattaaggcgggggtggaggtttccctccaggctgatgggacatgctcaaccgtttatttacctttgaatttggggagcagaactagccagggtgacactagtttctcccaataagcagtgttacagttttctaaatctgtggggtcagttttgcttccacacttaaaagtggccgagccattacttagtcagtcctaaattacaccgcctgtttngtttctttgggatacctggggaatccctgctgcctgctctggatgaaanagcantgggtctttaatcacccattggnannccccnaacatgtgcctgggattnaaaatttntnacttngaacntttcaacgggcttcttaaggttttttttggggatangngnctagggcttttttttgggancntnccnannnccccaaaggaaaaa

SEQ ID NO: 17161 - DNA, 398 bp, Homo sapiens
  misc_feature 30, 32, 38, 44, 50, 57, 58, 65, 85, 110, 127: n = A,T,C or G
agtacttctagaattaattaaggcgggctnanctactngctctncgaggncccttgnnattctancaccctagattatcctcccnggaagggcacactgtaatacagcantacccttcatgtctcangaactaaactctgtttacttctgaacaccagcaaaattatttttgtagttgcaaaagttttcaaggacatgttgaagacctggagcctttggatagggaggctgcgagaaggaaaagagaaataattaacagaccaaatggggttccgcattcctttaagcaaactcagtacaagaaaatggagacttatagaaaagcaaaattaggagctaaatgtttattttgatcaaggaatcttttgttaggaaaaccttcacttataggatccttt

SEQ ID NO: 17162 - DNA, 115 bp, Homo sapiens
  misc_feature 76: n = A,T,C or G
ctcgagagtacttctagaattaattaagcggggactcaatcctaaagcattttattataattaaaatattaatagncaggccgagcaaagaacaagaccttgtcttaaaaaaaaa

SEQ ID NO: 17163 - DNA, 497 bp, Homo sapiens
  misc_feature 201, 248, 356, 358, 430, 440: n = A,T,C or G
agtacttctagaattaattaaggcgggaatacagaatttggtttttttttcacagtgtgccttattttggtcctacatttctgagttctcaggacagagtgcatatacctggttaaatacaaaactgaaaaactgaatttaaaaataaacactatgaacatcagttactagcatttcaaaacacaataaatttacttttanagtgctacctgggttttaaacattttgtacagcttttcattttttanagattgtagatgtaaaaaaataaaactagagataaatgatgataaactggattttctccctacaaaacaaacatttggtttaaactttatttctggtaaacatgccancntagaacataaaattccttttgaagtaggttcctatgcttcatggtgaatgaaaagaaagcaaaaatttcaancaaaggcatntataagtaaaaacctttgagaactaataaaattaatccttacatgtgtgttccaatt

SEQ ID NO: 17164 - DNA, 307 bp, Homo sapiens
aagtacttctagaattaattaaggcgggggtgtggggggatgggccaggcatggtggctcatgcctgggaagcctaggcagaatgattacttgagtccaggagttcaagaccaacctgggcaatacagcgagaccccgtctctccaaaaagtttttaaaaattagcctccctctcctctcctctcccgtctccacgtcctgataaatcgacgccattgtttttccttcataacatgaactaggaatgtctgcttatcaatataggttacttagcctggtttttcatctttagcccaacagttcatta

SEQ ID NO: 17165 - DNA, 414 bp, Homo sapiens
  misc_feature 39, 70, 187, 224: n = A,T,C or G
agtacttctagaattaattaaggcgggcacaaaagtatntcccttattattgattatcccatagcaatanccctgtgagcataaacatgcaatcagtgttcaaaggacttatatgaataattgttaacacctattcggaatttgcatgccactgtggcttgatttctggattaccagagagtaagtngtcttcatataatgagttttattagagatagacaatntacttttaaattacatggtttcaaattttatttctattgaattttacattgttaattattaatattattaaatgttgacagcctattcttgggatttttccaagtgtttaaaatttcatttaaacaattccaattttctttctttttaaagaaaccgtatcctctttcagtgcactttaatgagttacac

SEQ ID NO: 17166 - DNA, 505 bp, Homo sapiens
  misc_feature 372, 453: n = A,T,C or G
agtacttctagaattaattaacttaaatgaacctattcagactggagtgttgggagtagtgaagtcaaaattgctgtagggtcaaatgccaacatgaaacccttatgcccactgccagatgaggaagccaaagctgagacttcaggatcctagaaagcaccttggagttgttagctccccatagccactagcagaaacaggaaaatggaggtactcgggatttccatagatttatgtcaacatatgatgagcttataaacaaaaactaccacacacacatgcatctgcatggaaaaagccaccatagaagagattcagcacaaactgtaagtagcaggtttaggttaccccatcctcccacgctcacacttnggatactgacttcagatactggaaaatcatcagatcagaattataaaataagttaatgcttaacaaaataatatttaaaangaaaaataagcaaccaaaaagtgaccgtcaaaaacaacaaggctacttgaaa

SEQ ID NO: 17167 - DNA, 450 bp, Homo sapiens
agtacttctagaattaattaaggcggggttcaatcttagggaatagacatttgaaagaaaaggaaggaacatgaggaatgaagggaacaaatgagaaacatgtgcctgctatcaacttagagtcggtgaagcaaattggtaaacattggcgaattttatggggttattgatgacccaaactctaagcttctttgtaaattgggaatttttcaaaataaaatgttctgggagatggtaaaacaaatgtggagaaagcaagtccagagtgcagagctcaagctaaaaaaaaagcatttgattttgtgtttgagaagataacacttgatatttaagattttcatgcctttaaagtgaagttgcaggcattgcattgaaaaaggtttatgcagctatagcattgacgtatagagttagaagttaaattgaaaaataaagttagaaagtgaaaat

SEQ ID NO: 17168 - DNA, 397 bp, Homo sapiens
  misc_feature 323, 341: n = A,T,C or G
agtacttctagaattaattaaggcgggatatctgtttcagtggaattttgaaaaaaaatagctgcctgagttgtaggtaaagtgttctttaaatgtataatatgacttggaaataagacatcatgtgaaatcatcaggtggactgaaattctgttcgaattctatcagtgttgcctgcctgaccctagctaattctgggaatctagatggctttttccccagtggatagaagtttgtggctaatacaggtttcattaacttttttgtttgatgttcaattctagttctcccagaggcgagctattgaaaaggtgggcattcantgtcgtgcattgcttcanaattagataccccattccaatccacttgagtcaaggatgctgtaggggaattttgt

SEQ ID NO: 17169 - DNA, 453 bp, Homo sapiens
  misc_feature 274: n = A,T,C or G
agtacttctagaattaattaaggcggggaacatagtaagtgctgatgatttggtaataaataggacagacaaggcgcttaccctcatggagtttatagccggtgttgcagtacagatactaacacttaaacaaataatatcataatttccggtcatgattactactaggaagaaagtaaaccaaggtaatagctgcaaaatgacaatggagtgaatgagaaagacggtgatgtgaaattaggtcagagagttgggcaggaagaaaattattcancaatttgtaatttttagctttaaaactttggatttaatttgttaaagacaattatccaaacttgggtttaaatacagctaccgtaaccattgggtagagtatccttatttgagtactgtcactcctgactaagacacaacatttttagaactctgtgaagttagagattaatttggggg

SEQ ID NO: 17170 - DNA, 364 bp, Homo sapiens
  misc_feature 22, 23, 24, 26, 31, 33, 46, 56: n = A,T,C or G
agtacttctagaattaattaannngntgggnanagttgctacgctnaatacaacanaattggatttccccttccttcctttgctttgagtcttacaacaagttgctttcattgatacatgagcaggccaggactagagaaattacgtttgtgcacattagtaaaaattcagaaatagctgttgatatttgggctggctctttccaaaacaattttttttgtaactgcctgtaagcacagaatatagtgctaagacttcttagaagcatcctaaaaatagatagaaaccttctcagctttctctacttcacaattcccactcaatgccacttttttcctcaaattaataaaacaaaaaaaaaaaa

SEQ ID NO: 17171 - DNA, 394 bp, Homo sapiens
  misc_feature 4, 9, 30, 57, 68, 70, 118, 244, 249, 268, 283, 321: n = A,T,C or G
gggnacatntagggaattcctggtgcatanctctgaattctgaattgaatttccatngaaaatgcagnangataaataagcgaatgccaagtggtctggatataagaaaaaataatcnttgcattggtcagtaaaataaaaactgagtcaaagtattattcttccttacggtgacaatatctgtgactaaacctaattaatcattttgattttcataggacgaactgcacagaagttaacagcnacggnttagagtcagacaacacangattgaaatttttangctgcaatttttaaagtggctgatttttggtcaaagtntcttagctttcccaagcttctattttcttaattataatataggaatatagctatatatgtaactgaattactg

SEQ ID NO: 17172 - DNA, 470 bp, Homo sapiens
  misc_feature 16, 19, 20, 22, 27, 34, 38, 59, 69, 147: n = A,T,C or G
ggccgtcgttttcaanccnnanaaacnggtaccnatgntgggtgtcgggccccccctcnagagtacttntagaattaattaaggcgggggatgccaacagaacaacctgaacccccctctgggtgacagtgacctcttttcatctanatttttttaaattgagaggttgggtgattctttgtcatttcttttggaaattagctttttaattcaagaccaggaatttttctcttaaatatacaaatataaagggcattaactgcttttaatttcaaaaccatggagttcctgtaatcagctgaaaaataagaaagtgatttggaggtaggccacaaaaatgattttttctttattttatatgtgaaatgcagtgttttaccaggatttaccatagaaaacaaggcccattgttttctctgcttctatagacattcaatgaataaataaaagttacagatgctataatgtta

SEQ ID NO: 17173 - DNA, 429 bp, Homo sapiens
agtacttctagaattaattaaggcggggggacaaccccaaactgactgatgcctcacaactgaagtcgttccttgcacctgcagtggatatacagagaaaaataccaaaggaaacgagcagtatttagaatgcaaagaattatttgtgcgtgaggttcttagttatcatttttattacttaaaaattattttgcaaaaaagttgaattagacatttatcacaatctaatatattattttataaatttagtatcttaatagataactttgtagattaatttctcactggcttgtggataggatttttgattcttaaaaatccaagtccttgtaggggcccgggtgtggtgtctcacgcctgtaatcccagaactttgggaggctgaggcgagaggattgcttgagcccaggagttcaagacgagcccgag

SEQ ID NO: 17174 - DNA, 387 bp, Homo sapiens
  misc_feature 103, 123: n = A,T,C or G
agtacttctagaattaattaaggcggggaatttaccattgcttgcttcatttacaaaattacttaaaaatatgaacattatggccctttggggggtttctcanacatttggaaagcagcgtanacagaactgttcatgtatgtatgtattatacatattcaaaagtgatacaatttgaaattgctatcagcaaggcatttctagaaagaccaggcttttttcctaatcccctgtgaaacctgttattgattaattgtcgttatcctaagatatattatttgtctttgtacctagtaattggcatagtatttagatggtaaaataaattctttgtttagatgaaatatactggaaacaattctggaatgtgagttgtttttttttttt

SEQ ID NO: 17175 - DNA, 475 bp, Homo sapiens
  misc_feature 23, 29, 42, 56, 73, 80, 85, 157, 158, 159, 179, 194, 203,273, 304, 307, 326, 336, 339, 414, 415, 428, 433, 440, 441,453, 455, 457, 458, 474: n = A,T,C or G
agtacttctagaattaattaagngggatnggccttatgctanaccatgaaacttcnatacgtttaaaaggatngaaatantgcanagtgcattttgtgaacataatcacaggattaaattacaaataaaaaatgggaacatttgaagaactcacaannnggaaattgaacaacacactnctaaatgaccaatanaccaaagangaaaacaagaaggtaatcatcactttgaggctaatgaaaattaacacacaagtaaactgtacggatgcanctaaaaaagtgcttagaggaaatttataggngtnaatgcctgtattaaggaanaaataaagcnatnacctttcttccaccttaagtcactgaagaaagaagaacatctaaacctaaagcatgcagaaggaaggaaataatnngaattagagcagntcaanactctgnntcaaaaaaaaangngnncccccccggggggggnc

SEQ ID NO: 17176 - DNA, 152 bp, Homo sapiens
  misc_feature 60, 101: n = A,T,C or G
agtacttctagaattaattaaggcgggggttggcggatatgagactcctggactctgcanccaggagccctcatcccaacagcccaagggcatagacgtangtactgaggagcacaggattagtccaagtcacattaatattctggaagctg

SEQ ID NO: 17177 - DNA, 441 bp, Homo sapiens
agtacttctagaattaattaaggcggggacaaatgcaaatgagaggcctcctggggtagctccttggatgtggcccttcatggtccagggacctgagaactgaatagccaagttatctgcctctcacaaacacaagttaaacagaagacacagggcaggaaattcccaacagacactcccattccaaaggcgcagaataaggagttacatagcaaccacactgctctacagtaattccaaacccagtcatcagctgtcgttggggtctcccattctgtaggaacacagatttgagcttcattctgctccatggaagtcattctctaatccgttgttctctatgcttagctccaccttctgagacatctttcaacaggaaatggaccatgtctgtagctaagtagctttcttagactactcttcgttacataaaaatttggg

SEQ ID NO: 17178 - DNA, 188 bp, Homo sapiens
  misc_feature 71, 86, 172: n = A,T,C or G
agtacttctagaattaattaaggtgggagatcacactgaatataattattcaatgccaggctgaggattgncaatctatttttctncctataataacgttagggtaaacaaaataaaattatttcaagaaacatatacaatgaaataataaaacataaatgaaaactaccanacaaggggaaatacaa

SEQ ID NO: 17179 - DNA, 708 bp, Homo sapiens
  misc_feature 537, 667: n = A,T,C or G
agtacttctagaattaattaaggcggggaagcaaaatgccttgtatattataaggttatatttatgctgtacagtcaatgatattaactcactatgagatttctgcctgtggggttttcaacatctgaaagcaggaaaatatttctgctaagttttttcaatgtattctcattgtaagaatctacgtgattagatccttatgatcagtgcacggtttgctgttgatcttaagtcttttttcctgtatcactattcaggatacaccgtcattttatatttaggggaaggattaatccatcctacatgcactaccttgcatttgttcttactgaattttatcacatttaactcagacaatttcttaacatttttagcatcattatgaattcttctcaaataagtctctgaacatttttgttatgttttgtgaggataacatataaaatagaaattctgtatggaaacatccagttttttagatttaaaggatctgaaaaaattaattacataataaaagccattttaatccaacaattnatttctatattatatactttgaacatttctttaatatcttaaattaaccaattaacctccaggacttctattaacacagcccgaaaagaaaatgaaatcataagtttatgttttcaaaactattccaaanttattggataccttttcaaaagcccctcttaaaatcttttc

SEQ ID NO: 17180 - DNA, 299 bp, Homo sapiens
agtacttctagaattaattaaggcggggggaaaaaacattttataatgaaagtatgtagggagtcaaatgcttactgtaaatgcataagagacgttaaaaataacactgcactttcaggaatgtttgcttatggtcctgattagaaagaaacagttgtctatgctctgcaatggtcaatgatgaattactaatgccttattttctaggcatataataatagtttagagaatgtagaccagataaatttgtttactgttttaagaaaactaccagtttacttacagaagattcttttttc

SEQ ID NO: 17181 - DNA, 284 bp, Homo sapiens
  misc_feature 21, 34, 58, 79, 80, 83, 89, 92, 97, 98, 148, 149, 170, 247,258: n = A,T,C or G
ggtggccgggccccccctcgngagtacttctagnaattaattaaggcggggctgattnacagaaatatctcaaagtatnntgnagtcgnttntattnngcttttttttcgcctaagtatacagaaatcatcatccccatccataaagnnagaagcatagtatttcaattncaatcacagtaatacaatcatgaaagtgatatttgactggtaaatcataacttatacgtatacttcacaaatcccantgagttacacnttcagcactcctaaaacaaagtagct

SEQ ID NO: 17182 - DNA, 311 bp, Homo sapiens
  misc_feature 28, 31, 34, 35, 37, 39, 40, 42, 44, 54, 61, 63, 64, 65, 77,78, 82, 84, 90, 95, 97, 108, 109, 115, 117, 122, 123, 124,128, 129, 143, 149, 165, 186, 200, 217, 218, 223, 229, 243: n = A,T,C or G
agtacttctagaattaattaaggcgggngancgnnangnntncntgcttaaaancagattntnnnctatgcataaanntttntnatattnggttntntgaacataatnngtgggntntgtannnttcnntttaacaaatgtanaactgnccatgtgacagggcanccgcctgtcatcccacgtttngataggccaaggcnggcatatcaccttaggnnaggantttganaccagactggcccncatggtgatacctagtatctactaaaaatacaaaaactagccaggcttggtggtgcctgcctgtaatt

SEQ ID NO: 17183 - DNA, 252 bp, Homo sapiens
  misc_feature 22, 26, 35, 41, 71, 73, 121, 127, 134, 139, 147, 171, 172,173, 178, 192, 216: n = A,T,C or G
cgcgtgcgtcttttcatccccngcantcaagggtnacaccnggctgggtggccgggtcgcccccctccgtnantacttctagaaattaattaaggcggggtaaaggaatagaagaagcatngacaanttaccangatantaaccatncttttaggaagcaagaaaaggatnnntttanactctgaaaaagtngggaagcagtaataaaaaagacanggctagggaaacaaaaagctaagggcaaaatgtaca

SEQ ID NO: 17184 - DNA, 360 bp, Homo sapiens
  misc_feature 32, 33, 34, 35, 40, 46, 48, 49, 54, 61, 64, 94, 104, 106,126, 127, 128, 136, 142, 148, 162, 184, 187, 188, 189, 190,345: n = A,T,C or G
agtacttctagaattaattaaggcggggacannnnagggngactgngnntcagnaatagtnggntaatggctccaaaaattacaagctagttangaaaaataantnctaaaagttctatggcactnnnggtgaccnctcccnaacagngaatttattgtgtntcttcagatagcaagaatagangannnngaatattccaaataaaaatcaatgccaaatgtttgagggggtagatatgcaaataacccttatttcatcattacgtgttgtatgcatgtattaaaatatcactccattgcccataaatatggacaattattatgtgccatttaaaaataattatnagaaaaaaaaaaaaa

SEQ ID NO: 17185 - DNA, 407 bp, Homo sapiens
  misc_feature 15, 22, 36, 46, 49, 50, 52, 83, 85, 101, 114, 118, 121, 130,143, 152, 193, 198, 214, 217, 221, 236, 240, 246, 248, 257,268, 271, 274, 286, 287, 288, 289, 290, 298, 315, 316, 328,329, 334, 335, 337, 348, 352, 353, 363, 365, 367: n = A,T,C or G
  misc_feature 379, 384: n = A,T,C or G
agtacttctagaatnaattaangcgggtggatcacnaggtcagganatnnanaccatcctggctaacacggtgaaaccccgtntntactaaaaatacaaanaaaaaattacccnggcncancggcaggcncctgtaatcccanctactccgnaggctgaggcaggaaaatggcgtgaacccgggaggcagacnttgcnttgagccaagatagcnccnctgnagtctggcctgggtnaaanagcaanantctgtttcnttaaaaaatanaanaanaataattcccgnnnnncccccccngggggggccccctttcnnccctttggggtnnttttnntncccccctttgngggnngttttttaantncnatatgtgtgcanaatancaacagtaatggacaaagccgcc

SEQ ID NO: 17186 - DNA, 379 bp, Homo sapiens
  misc_feature 13, 16, 20, 25, 104, 109, 115, 199, 202, 223, 227, 229, 232,239, 255, 260, 282, 288, 297, 302, 305, 313, 315, 316: n = A,T,C or G
ccgtgcgtctttncancccngcaanaagggtaacacaggctgggtggccgggccccccctcgaaagtacttctagaaattaattaaggcgggggattactgatntttantgtaanaccaaggaagttcattatagcaacatgcatggcatctgaaacaagtattgacagacacttattttttcctactcctgttgtttntgntcttcctctttcacttccctncttntnttnttttctnccttgccaaccatccntattnactcacctggcaagtattagtncaactnttatcttcnttggngcngaaatagngnntctctactgaaatgtgctgtttaaggactttctaaaaggtggcttttcacttattaaaattaa

SEQ ID NO: 17187 - DNA, 282 bp, Homo sapiens
  misc_feature 23, 24, 36, 275: n = A,T,C or G
ctgggtaccgggccccccctcgnnggtacttctagnaattaattaaggcggggcttatagtgagctgagtatcacgccactgcactccagcctgggcaacagagcaaggctctgtctcaaaaaaaaaacaaaaaaaaaaaccaaaaaaaaacttgttgaatagaaacagtattcctatattagtttcttattagtctgaaaatatggttattgctcatactttaaatatttcttggtaggaatcattacatcttacaataagggatttctcattntaaagtg

SEQ ID NO: 17188 - DNA, 379 bp, Homo sapiens
  misc_feature 187, 188, 190, 191, 192, 193, 196, 197, 198, 201, 206, 207,210, 218, 221, 225, 236, 242, 250, 251, 257, 262, 267, 269,270, 272, 278, 280, 284, 287, 300, 302, 303, 318, 319, 323,324, 328, 333, 339, 344, 353, 354, 357, 361, 363, 369: n = A,T,C or G
  misc_feature 370: n = A,T,C or G
agtacttctagaattaattaaggcgggcgtggtggcaggcgcctgtaatatcagctactcgggaggctgaggcaggagaatggtgtgaacccgggaggtggagcttgcagtgagccgagatggtgccactgcactccagcctgggcaacagagcgagactcttaaaaaaaaaaaaaaaaaaaaaggnncnnnnttnnnaanttaannttnaaaaaaanttnaaancccaaaacccntttggnaaaaaaanntttacnttttnaaaantnnangggttnantttnccntttttaaaaaaantnntcctttttttggggnngggnnaaanccccnttaaanttttnttatttaannaantggncntttttnnaaaaaaaaa

SEQ ID NO: 17189 - DNA, 442 bp, Homo sapiens
  misc_feature 4: n = A,T,C or G
ggtnaccgggccccccctcgagagtacttctagaattaattaaggcgggctacagctacatgtatctgtatcatttataattgtgaccctgagcttataacagatcctgttttataaaataaattatggtcagaatattctgtgcccgtcgtgtctagattatatcattctattagcaatctcagtattttaaacttttcatatatttaactataaagggtgcattctttacgcataaactgtttatttccttgacataatattagcatttctatgtgctaatatatagttacctaacaaaagagccaagcccttacatgagtttgtagtcgaaaaagttgatcgactttgctaaaaggccatgaaattagcatacaaagccatctatttttaaatgtatccagaaaagtattagttacttattataatgaaacacagatgc

SEQ ID NO: 17190 - DNA, 222 bp, Homo sapiens
ctcgagagtacttctagaattaattaaggcggggggcatacaagtatatttggggaaggtgaattgatcattcataaaattttttggcacttaactaataactcatggatataaaccaaaacaattgcagtcaaaaatcaatgaagttcaggaacacttttcactagttaactatgcgtaaagctctgtgataagttttgagggggaaaaaaaaaaaaaaaa

SEQ ID NO: 17191 - DNA, 418 bp, Homo sapiens
agtacttctagaattaattaagacgggatggctgagttcaagctaaatagtatttcaagtttcaaattgtttggatttctttttggttacatagtcctaatatataaatcagctgccttctgaaaattggagttttaagcagaatctcactaagacttctcttgttatctaaatctaaataaaaagggatttacatactgtcagtatatactgaacagaaaaccttgtaaaacagtagtaaactggagggatgcattagttttaacacaaagcaaaaccttgtaaactcaggagatagataaacctgccaatagaatcacaattctaaatgtgaatctttatcgaagtggtaactcagtgtaaagaagggttttaaatcagttcattagtctttatggtcgcttccgttgactagaag

SEQ ID NO: 17192 - DNA, 436 bp, Homo sapiens
  misc_feature 28, 31, 35, 36, 41, 42, 47, 50, 56, 59, 61, 63, 64, 65, 69,73, 76, 79, 81, 84, 97, 103, 107, 108, 110, 118, 121, 123,125, 126, 127, 128, 132, 141, 146, 147, 149, 150, 151, 155,162, 163, 165, 166, 167, 174, 184, 204, 211, 232, 240: n = A,T,C or G
  misc_feature 249, 264: n = A,T,C or G
agtacttctagaattaattaaggcgggngantganncaaanncgggngcnggatanctngntnnncaanggtnctnatncnccncaagttattactnacaatnaacnntngtttgatngcntntnnnntgcntataccaancacanntnnncccnttcgacnntnnntggcatnggcccacagngtgtaatgccaatggcctanaacaaanaagtatgcgaatcctgcttgngctacatncatgggatnagttctatgaaacanagacatttattaagaattcttcctcctgttcacaaaatagagtttttggatttgagaatttcctatgtgtcataggccacaaacatttatatataaaatataaaatatactgtttgttgctatttaaatactttacaattttctctatcatcttagtcgaatgttccatagc

SEQ ID NO: 17193 - DNA, 396 bp, Homo sapiens
  misc_feature 251, 388: n = A,T,C or G
agtacttctagaattaattaatttacagaaattctttttgaagaggggaagctaaaccatttcttaggaattttacatgaatttctgttatggtcttaccaccattatattttttttccaaatttcaagatttgatacacaaatgtaagtgtaagtccatgattttattaacttttaattataacttttttgagccttaaattttagaatatgaatttttaatttttttagtttgttctgttgaaggtccnctattgatttacttattgtttatagatggattgatttacccattcactatataagcatttatcaagaattcatttggggccaggaatcctgtgaggcactggggattgaaagactaatccaaaaaatctgctctcangaagttca

SEQ ID NO: 17194 - DNA, 302 bp, Homo sapiens
  misc_feature 29, 33, 34, 39, 40, 41, 43, 85, 89, 128, 184, 191, 215, 222,273: n = A,T,C or G
ctagaaattaattaagggggggatctgtnttannctctnnncnaaggcttgattaaaatcacttattgttttgaaatgcaaatcntatnttaccttaaatctctcaaatgacccatgaacatttttancccaccttcaaggcaatacagtatctggcagctacctgcactaccagcttcatatntacttcncactctttactctctaaactccanctatatnagcttaaaaatttttcaattgcaccaagcttattcctactccaagcctttntacatattttcttactcttcctccccaaa

SEQ ID NO: 17195 - DNA, 274 bp, Homo sapiens
agtacttctagaattaattaaggcgggtacccagttaacctttaaaaatgatgtagtaagtttgaggaacccagaagcaaaggctttgctaggcagagaagtggaagagtacaagaaattaacacacctgtaaggttcgaagtgttatctcccttggctagcagagtgttcctttataaagaagctactctttgattaatagacttattgaatcaggtgaactaacatagttttagtaattaaagaattgcaaaatgttccaagaaaaaaaaaa

SEQ ID NO: 17196 - DNA, 243 bp, Homo sapiens
  misc_feature 6, 31, 33, 44: n = A,T,C or G
acaaangctgggtgaccgggccccccctcgngngtacttctagnaattaattaaggcggggctgatttacagaaatatctcaaagtattttgtagtcgtttttattttgcttttttttcgcctaagtatacagaaatcatcatccccatccataaagttagaagcatagtatttcaattccaatcacagtaatacaatcatgaaagtgatatttgactggtaaatcataacttatacgtattt

SEQ ID NO: 17197 - DNA, 426 bp, Homo sapiens
  misc_feature 3, 324: n = A,T,C or G
ggngccgggccccccctcgagagtacttctagaattaattaaaaataaatttaaaaaataaataaaaattaaaaacatattaaaagaataattgtgggccaggcatagtggctcatgcctataaacccagcattttgggaggccgaggaaggtgtgagccgccgcacccggcccaacatttttttaatactaactttttttgcagccatttttacccccctcaactacaagcttttatcaaaattttgaaagagattttgaaaaaattccaaatactctctacttagattcaaaaattttaaatttcctaattatctttctatntacacaaagatttatacacacacacgtattttatgagccatctgaaaatgctgaggatatcatacctcaccctctaaactcttcagcttgcatctcccaaga

SEQ ID NO: 17198 - DNA, 343 bp, Homo sapiens
  misc_feature 9, 10, 40, 45, 302: n = A,T,C or G
ctacagagnncttctagaataaattaaggcggggacacanagccnaaccatatcacgtaactttaatctgagccaggcctaacatacgtaagccctcatcactttttccaactatgtatcttttgaaagtgtggctagtatctcagttaccaggcagttcataaggcaaggccctgctacaatagtgattgataatttattagctggtaaagcacatgtgtgctgtgtgttattgtttacaaatctctttttcatacattatctctttctctcactgccccccaccccctttttttggcagnttcacaacaaccattacataattagaccttaagacttaaaa

SEQ ID NO: 17199 - DNA, 430 bp, Homo sapiens
gtaccgggccccccctcgagagtacttctagaattaattaaggcgggcacctgcaattccagctacttgggaggctgaggcaggagaatcacttgaacctgggaggtggaggttgcactgagctgagatcgtgctattgcactgcagcctgggcgacaaaagcaagactccatctcaaaaaataaataaataaataaaaataaaatataaaaacaaaaaaaccattctgagctcatggccagacaaaaacaggccacacgaaatccaactcactggccatagtttgccaaccgcgatcttatctactgctgctaattcatatttccctcactttatgtgctcatgaaatactgtctttgtcctctggtgacagacactacctaaaagatcatcaatacctaagagacatggactccaatttcttcaccgg

SEQ ID NO: 17200 - DNA, 491 bp, Homo sapiens
  misc_feature 455: n = A,T,C or G
agtacttctagaattaattaaggcgggagatggaggttgcagtgagccaagatcacaccactgtactccagcctggacaacagaatgagactatgtctaaaacaaaacaaaacaaaacaaaaaaacctcagggataggacatgtttatagagaactataatacaaggtagaaagtggtgaattttccaagaaagttaccaacacaatgagataatggttcatgtttatggtctgagtatcaatttagaagaatatgtaattgaatgttttattttctcattctcttttcttggagttccatctactctcacattgcattgttatagtaagaacagccacaatgtcaactgtgaccttgtctccacagccacagttggacggcagacccaaactgagatgacctgagtttctttcccaagaaatgaatctaaaatagccacacttcaaaaacccanggtgctgtggaaagtcacaagacttaggataagggg

SEQ ID NO: 17201 - DNA, 414 bp, Homo sapiens
agtacttctagaattaattaaggcgggaggcatacattcaactcataaaaaaatttaaaaggacactattaattggtgattttaaaaacaataaaaattaacttttaaaaaatgtaccataacataatctgacaactggtgacaataattgcatttaataattaagttcaaggaaataaaaatggatttaataattccggcaaaactctaagcaaactgacaaaactcatatgaagtaatcttgaacgtattaatagagaaaattcaccaagacaggagcatgccatcattttatcctgacttaatattctattacagtttcttcacatgcctagaccaagagtaggcaaactatagcctatgggccagtcacccaattttgtacgtaagttttattagtttgcatattgcctg

SEQ ID NO: 17202 - DNA, 206 bp, Homo sapiens
  misc_feature 11: n = A,T,C or G
gtacttctagnaattaattaaggcggggcggtttcttaggggtaacctgcagttttctctgatttttcagattttacggatgttgaataaaaatcagtgaccatttaaaaaatggtttagttgttggatcaaagtgctgtaacaaacaaaagctttttataagacatggcagctttagggagggtgagagtagtaagaaggaaatc

SEQ ID NO: 17203 - DNA, 416 bp, Homo sapiens
agtacttctagaattaattaaggcgggagaatcatctgagctctggaggtcaaagctgtagtgaacccagatcatgccattgcactccagcctgggcaacagagcaagactgtgtctcaaaaaataaataaataaataaataaataaataaataaataaataaataaataaagagcgagagagagattttgattatctgttatgttgttatgtttacgaagtcagattttatagggagtactcaataactccatggatgctttctatttcttaaagtaccatctaaatatttatatgcacatgcatttgattcttttctcttttaccatgggagctagaattgggctattattattattgaactcaaagctttcatctccccactttcccttttagagtaagacctatttaaaatt

SEQ ID NO: 17204 - DNA, 338 bp, Homo sapiens
  misc_feature 173, 208, 211, 213, 216, 236, 238, 252, 306: n = A,T,C or G
tacttctagaattaattaaggcgggtgcctgtaatcccagctactcgggagggtgaggcaggagaatcacttcaacctgcgagccggaggtcgcagtgagccaagaatgcatcattgtgctccagcctgggtgacaagagtgaaactctgtctcaaaaaaaagaaaaaaaaantagagaaagaaacccttttgtccaccccaaacccntantnttnttccccagtgacaagctgtntnaccaacttccatanactacagtctttactgtttacctaatatgcccctgtcggaatatcatacagccnttaacacttgtgttttccagtttttttttttt

SEQ ID NO: 17205 - DNA, 193 bp, Homo sapiens
  misc_feature 53, 85, 102, 113, 117, 121, 122: n = A,T,C or G
gggtaccgggccccccctcgaaagtacttctagaattaattaaggcgggtgtntgtgagtcccacctactccaagctgaggcaanagaatgtgcttgaactngggacgcgganggtntccnnatagccacgatagcaccatgattctccatcctatgcgttaaaaatcgaaactccctttccccaaaaaaaaa

SEQ ID NO: 17206 - DNA, 449 bp, Homo sapiens
  misc_feature 350: n = A,T,C or G
tgggtccgggccccccctcgagagtacttctagaattaattaaccatagagttaaataaccatagagtcaccaatggtatgctgactggtttgtatccatttaagagttttccggccgggcgctgtggcttgtgcctatagcctgtaatcccagcactttgggaggctgaggtgggtggatcatgaggtcaggagtttgagaccagcctggccaacacggtgaaaccccgtctctactaaaaatacaaaaattagccgggcatggtggcatgtgcctgaagtcccagctacttgggaggctgagacaggagagttgctagaacccgggaggcagaggttgcagtgagccnagatcaccccactgcacttcatcctgggcaaaagagcaagactttttcttttttttgagacagttttccaagtcagtgattctccttcccctgcttaaa

SEQ ID NO: 17207 - DNA, 599 bp, Homo sapiens
  misc_feature 346, 596: n = A,T,C or G
agtacttctagaattaattaaggcgggtacataacaaagccactgccaccgagtcacattcagcctctgtctctatttctttctctttgtttttaaaatagaaaggaaagaaatcctagctttcaaatcacctgtcttctttcagtcttttagaaagtttggaaaatttttagtatgtacttagttaaaaaaaaagtcattaaaataattttttaagctaaagttataaaattgaacatacttatattaaccttggaactgtctacctccagttgcgcctgtgtattctatcatgaggataggaaaagattttctaaatctaaataaaatacagcatgaactgcanaaggcagcattttgtagttgtaaaagctggaattttaaattaaatatgagttcaaatcttgcttaagtattttttctattttacatatctttcaattctcaaaacatcagttttatcatttgtaaaatgtaaagaataataccagtcagagttgctgtgattaacagatacagtatttgtaaataacctgacccacaataagcattaagtaataaatgggcattattcatgattttgtgggtatatctgnaaa

SEQ ID NO: 17208 - DNA, 390 bp, Homo sapiens
  misc_feature 79, 145, 167, 175, 190, 240, 359, 374: n = A,T,C or G
agtacttctagaattaattaaggcgggtggggaggagagagctgggtgaagtgcggtctgcttgaaggtggaatcggcnggatttattgtgacagggaagggagcaacagggatcacgtgcaatgtccaggtttttggcccaaanccctgggaggatgtgaagtttncagaaganaatctggctcacagnggacatttgatcaatgcaaatttctttctccagctttcaaactgcagctnagcctgggaatggaatttctcaaggtcactctgtaagtcccagaactgctcgaccagcctaggctggaggatgtgggcacagccctagggcttacttcataggaggattttcttggctngactctttctctttntctttttttttttttt

SEQ ID NO: 17209 - DNA, 385 bp, Homo sapiens
  misc_feature 211: n = A,T,C or G
agtacttctagaattaattaagggggtttttaaaaattgggaatttgtttctgctgctttctgtaacagtcatgtcattctgctaatgtgagaaaataattaccactttctagggtattttagattttttcatgccaacttaaaaaagttgataatcttgactaccgctccggaacaagaatgatttatttttaattactttatgagtcanaaaataatattttggtagaacaaaactattctatcatttaaactcaaatcttatgtcattaataagcaacagtgacctactggcttccccccgttcatccagcatttggactgggggagctggatagagttggcttcagagaatgcctaacaacatcccctaaaaaatattgtt

SEQ ID NO: 17210 - DNA, 503 bp, Homo sapiens
  misc_feature 1, 2, 4, 14, 32: n = A,T,C or G
nngntacttctagnaattaattaaggcggggnattcacaatggaaactcaaaataacatttcaagtttccttatgtgcaaagactatttacaaatctaaactgaaaacagacaatctttcaatgtgttatcaaaatgtttatagtttctttttctggagatgccaaatgataattattgaataaaattctaatctgttgagcatttctgtaaataaaaagtgaataaaactatgatttgttgttttttataaatgttttataatgaatgataatacatttacatataatttaacaaattgtcctatcctgttctgtaaaataactggcctgaattacttttatagacttttgatacatagaaataatgtttttacattcttaggtgaattatatagaatattctgcaactagagttgtccaacctgttggtgatctattaatgggtcatgaaatcaactttgttggttaaacttggcattaccaaaaaaaaaaaaaaaaaaaa

SEQ ID NO: 17211 - DNA, 401 bp, Homo sapiens
gggtgccgggccccccctcgagagtacttctagaattaattaaggcgggttttatgtaatcacacttcaccagtctgaaaagccacaaaccaaaaccaaaagaaagaaaagtcctgttggatgaaataatttcttgctgagcacaatcccttagtctagaactctgagtatatttttcagagaaaatgttccttttcggctgggcgtggtgactcaaccctctaatcccagcactttgggaagctgaggcgggcggatcacttgaggccaggaatttgagaccagcctgaccaacatggtgaaacctcatcactactaaaaatacaaaaattagccaggcatggtggtgcacacctgtaatcccagctacttgggaggctgaggcaggagaattgcttgaa

SEQ ID NO: 17212 - DNA, 356 bp, Homo sapiens
  misc_feature 20, 74: n = A,T,C or G
ggtaccgggccccccctcgnagtacttctagaaattaattaaagcggggtaattccttaacgtaacaaaaggtnggaagggtcgcggggcctctgggtgccgagctgcagatgcctccactgcgagcacagccctgagacaagggcccaggcgcccagcggggctggtttcactcagtccagccgcacctacccgtgccctcaccagatcttaagatacagacattaaaacctccaccgggtcgcggcacaggacagcagttttactttctgtttttggcatcgcattgcctccatttcctagagtgcacgtaataaataccgctggtgattccaaaaaaaaaaaaaaaaaaaaaa

SEQ ID NO: 17213 - DNA, 364 bp, Homo sapiens
agtacttctagaattaattaaggcgggggggaggccagtcattaggagatatacctaatgtaaatgacgagttaatgggtgcagcacaccaacatggcacatgtatacatatgtaacaaacctgcacgttgtgcacatgtaccctagaacttaaagtataataataataatacgaatttcatcattctgaatagctcaaaatgttcctctaagtctcgatagtagcaatagatcacagaactaaactgagttgcctgattgttgtgtatcaataatgagtatgctagtggggctttggatcattaaaaaaataattaaataaagcataaaaataaataaaataaaaaaaaaaaaaaaaaaaaaa

SEQ ID NO: 17214 - DNA, 431 bp, Homo sapiens
agtacttctagaattaattaaggcgggagtgaaaaaaaagcatcactgaattctacagacattaaagaaataaagtaagattattaactctattcccagaaattgacaatttagatgaaattaagagattccttgaaagacaaaactcaccaaatgtaacaccaaacacattggaaaatataagtaacccatatcattaacattttttaattcaaaattaaatacccacaacaaagaaaactacaagccacaggtggctgcacttgttaatgctatcaaacatttaaggaagaagtacaccaatcttatgcaaattcttccaggaaataaaagaagaaggaaatctttccaactgtttgtctgaaaccagcacaatgttgataactaaaacttgacaaaggcagtacaataaaagtacaagtcagtctcat

SEQ ID NO: 17215 - DNA, 376 bp, Homo sapiens
  misc_feature 29, 48, 59, 97, 112, 125, 131, 276, 348: n = A,T,C or G
agtacttctagaattaattaaggcgggantactgcttgaagccagganttcaagaccancctgaggaacacagctgagatcctgtctctaataaatnaacaaataaccaaanaacttcacttatntccagncatccatctacctatcagccatccttctaggttggaacatatgcagcaacatggaacaagaaacagtagttatctctgggtagtggatcaagaaaatcttttcttttccgtattgctaatcttgattttcctctctttttttganaaagggtctccctctgtggtcctagctacttgagaggttgaggtgggtgtatcacttgagcccaggaggtcnaggctgtagtgagctgtgatcataccac

SEQ ID NO: 17216 - DNA, 288 bp, Homo sapiens
acttctagaattaattaaggcggggtatcaacatggatggatgactaaaaacaagactggggaatatggaaacagccatccattcttgattagagttcgcttccattaccaaaactatacatttactttactaatcaggataagaaaaatttggcttagcgcctctatttactttgcttttgtgaatgtgtacaatccacgtgactctaaatctcctaagatgggcactaattatgcttgatgaatatattctcatcttaaatgccagcaaaatgtacccccaagcaa

SEQ ID NO: 17217 - DNA, 521 bp, Homo sapiens
  misc_feature 479: n = A,T,C or G
agtacttctagaattaattaaggcgggtggatcacgtgaggtcaggagtttgagatcagccttgacaacatggtgaaaccccgcgtctactaaaaatatcaaattagctgggcatggtggcaggtgcctgtaatcccagctattagggaggctgaggcaggagcattgcttgaacccaggaggcggaggttgcagtgagccaagatggcaccatgcataggttttatgccaatactacaccattttatatcaaaggatgagtatacacctttccttactttcgaattttgaaccagacagatacgctgcaattcaacaaattaaaataactgaacctacaatcaaggagaaaaatatttatccctaataactaatggaccatcttacgccgtctataaaaatatcaattaagaaatcacggccgggcacagtggctcacgtcttgtaatcccagcactttgggaggccgaggcgggcanatcgcttgaggtcaggagtttaagactagcctggcaaaccgt

SEQ ID NO: 17218 - DNA, 273 bp, Homo sapiens
  misc_feature 259: n = A,T,C or G
ctcgagagtacttctagaattaattaaggccggggatcctgaaatgaaaccaattttatcctcactttcagagtactttagtgtagtagaggacgtatgcataaaaatgtactatggaaattcacaaaattaacggattctcaaagcagctattgaagattccacaactccagttagtccttgctggtcattaaaagggacaccagaaaaacaaataactaataaaaaatacgagttaaatggctataatgcccacctnaaaaaaaaaaaaaa

SEQ ID NO: 17219 - DNA, 383 bp, Homo sapiens
  misc_feature 23, 369: n = A,T,C or G
gtgaccgggccccccctcgtggntacttctagaaattaattaaggcggggaggtgcaagttgaaccatcttccagtaaaggtgtaatgaaactatcataatgcccctcccaccagcatacgtccttttgccacctaggcctcccctgatcataaaatcatttacttgcattttgactcttaaatcttgtcctccattttattagccccttcccaacctttgaagtatgttattaaataaatggcataatagatgtgagtgaaacttgtagaaaagccagttgcaaacgaagccttttttgggcaagtggaggcaaggttgtgacttcctctcgctggggccttctccttccacagacctgctgtgccgncagtattgtgcggg

SEQ ID NO: 17220 - DNA, 449 bp, Homo sapiens
  misc_feature 406, 407, 408, 409, 410, 411, 413, 414, 415, 416, 419, 420,421, 422, 423, 424, 425, 426, 427, 434, 436: n = A,T,C or G
agtacttctagaattaattaaggcggggaggaaaggagggggtcactaagagtgtaagacttgggtttggcgaggcggccaaagcgggaaacccaagagccttgaatcgcgaaggtatgcccaaagagttagcagcgagtcctatttgggaattaagacatctagcttctgttcagggtcagcgacctggtacaactcataccctttctggacctcacttttcccatgtatagaggactaagttgaaaggtgacttctaggccgggcgcagtggctcacgcctgtaactccagcactttgagaggccgaggcaggagggtcgcttgagcccgggaggtcgaggctgcggtagccgtgatcgcgccactgcactccaggtgggcaacggaacgcgactctgtaccannnnnnannnnaannnnnnnnnaaaaaangncccccccccgggg

SEQ ID NO: 17221 - DNA, 300 bp, Homo sapiens
agtacttctagaattaattaaggcggggaggttaggtaagactgaagtctgattcagattgcgaacaactctggaaatcatgccagtgattcacagacaattttagaaagtgtgggaagtatattaatgttttaaattgaatagtgatgtttgagacctccattggaagagtgcgatgtatcagaatgtggatgattgagcagagagagaacaaagggacagaaaaataagacgattaaaatacaattaaaaatgatgcaataagaaagtgttagaagcaatcttacagtagtgtctgtg

SEQ ID NO: 17222 - DNA, 351 bp, Homo sapiens
  misc_feature 44, 49, 50, 52, 57, 65, 70, 79, 202, 309: n = A,T,C or G
cccgccccccctcgagagtacttctagaattaattaaggcgggnggagnnanggggngaaatganaatanacttttttntcttccggggcatctgaatattcttaaaccgatatctacagttttccatattgttttatgcaattaaaaaataggtggcacaaataattcgtgtactttcttagtttattgttcaattatctntatgtcctttgttagatgacacagtaacatgtttctaatgctagccccttcaagattgaccttctacttcacaatagtatttcaaatcaaaacaaaagaaaatctcncttggcatctttagattagtcacatgtcagatctttttggct

SEQ ID NO: 17223 - DNA, 309 bp, Homo sapiens
  misc_feature 293, 294, 295, 296: n = A,T,C or G
agtacttctagaattaattaaggcggggtaccagttactgaaataaggaaggtaggagagaagcaaatttaagaatgaagattgagaatactgttttaaacatgtggaatttccagctcctctgagatatctaagttgaaatatcaactagacagttaaatacaagagtgtggggccaggcacggtggctcatgcctgtaatcccaacactttgggaggccgaggcgggcggatcacgaggtcaggagatggagaccatcgtggctaacacggtgaaaccccgtctctacttnnnnaaaaaaaaaaaaa

SEQ ID NO: 17224 - DNA, 460 bp, Homo sapiens
  misc_feature 39, 40, 41, 53, 62, 66, 119, 121, 241, 245, 275, 276, 277,298, 302, 312, 314, 317, 318, 319, 325, 327, 328, 331, 334,338, 339, 340, 341, 342, 346, 351, 353, 360, 362, 366, 369,371, 372, 374, 379, 381, 384, 387, 392, 394, 406, 407: n = A,T,C or G
  misc_feature 408, 409, 410, 414, 419, 421, 424, 431, 432, 437, 438, 439,441, 443, 444: n = A,T,C or G
ccccctcgagagtacttctagaattaattgggggggggnnnagactaggtcangaattcaanaccntcctggccaacatggtgaaaccctgtctgtactaaaaatacaaaagttagctnancatggtggcgtgtgcctgtaatctcatctactcaggaggctgaggcaggagaatcgcttgaacccaggaggcggaggctgcagtgagctgagattgtgccactgcactccagcctggganacanagcaagactcggtctcaaaaaaaaaaaaannntttttttgtttaaatgttggnaaantttttttttngnccnnncctttncnnaanccntttnnnnncccngaccnanttttttncnattntantnngngtaantnaanggntttcntnttaaaaaaattnnnnncctntttancnttnaaaaaannaaaannncntnnttaaaaaaaaaaaaaa

SEQ ID NO: 17225 - DNA, 441 bp, Homo sapiens
agtacttctagaattaattaaaccatgaggtgtttttatttcacaaaaatatttatgctgtgtactgtatatgtttatagtatttaaatttaactctttagtatacttatgtaactttctataaagaatgcacttccagtgaataatattagtacaatgtacaatcaccagttgttacaaagttttaatgtaaagttattttttaacagtaactatagaaatgtgcctttgcttttgccacagttaattgtttttccttgtttatacagtattaccacagagctatatatatcacaacctgaacaaaggtgcatcagaatactgtagataaagatataggctgggcatggtggctcactcctgtaatcccagcactttgggaggctgaggtgagtggatcacctgaggtcaggagttcgagaccagcctggccaacatggg

SEQ ID NO: 17226 - DNA, 441 bp, Homo sapiens
agtacttctagaattaattaaggcgggtggatcatgaggtctggagatcgagaccattctggccaacatggtgaaaccccatctctactaaaaattcaaaaattagctgggcgtggtggcaggcgtctgtagtcccagctactcaggaagctgaggcaggagaattgcttgaacccgggaggcaggggttgcagtgagccaagatcacgccactgcactccagcctgggtgacacagtgagactctgtctcacaaacaaacaaacaaacaaaaagtcccaaaaaagagaaggccaagatcagatgacttcacaggtaaattctaccaaacatttaaagaattaacaccaattcccacgcttccaaaaatcaagaaggatacaagatgtctcacccaccccattctataaggcctgcctgattttaccccccaattaaagtt

SEQ ID NO: 17227 - DNA, 298 bp, Homo sapiens
agtacttctagaattaattaaggcgggggaggaggaactgcttttcttctcgtggatcacagggcttccttcatagaggctggccaatacagagttgggcagctggaattgtactttcagaatatctatgctatcagcctagcacagagttttaaatactgttgcaatacccaccacatcccacccagaggagccctggaatcttcatgagagatagcagtgctcttcttgtggagtttattaaggcttactgactgcttttaccctcagactattgggaaccaaaaattaaaaaaaa

SEQ ID NO: 17228 - DNA, 424 bp, Homo sapiens
  misc_feature 391: n = A,T,C or G
cagagaggaagataaagtagggggagggcttaaactgttttggctgtttcatttcttaaactgggtgataagtacatgaatatacatatttcatataaaatcacttttttcaaaacaaaaaggacgcaattaccttgctgaaggtgacattgtatcctcttgcaagaaatggcagaaataacactttagtataatattattttagaagttgcctcacttaaggcaatcatgaaaaataattatgtgaaagaaatgtttcagctgtaatatttttaaacgtctgaatattttatctaattgcttcttttgaactggtaatttattctaagtagcaatttgggagacataataatctcattgtaagtttttctccgtacattacagacaagtncttataaataaacaaatagttctaacttaagtg

SEQ ID NO: 17229 - DNA, 394 bp, Homo sapiens
agtacttctagaattaattaaggcggggcatggaaataaggatagaaataagaaaagtaaccgaaatgaaatggaaagaataggtcaaaaaaaggatcagggagaaaatgacagatacagataaaaccaaggagaatcactaaacccataaatggagcctctgatgtagaaaattaaacaatggaacagagtaagtattttaacatgtaacctaggaaaacacatgaggaaaggatggtctttttaacaaatgttgcttgaacaactggatattcacatgcaaattaattcaaaatgaatcatacagataagtgtaagaggtaaaactgtaaaaactacaggtgtggccgggtgcggtggctcacgcctgtaatcccagcactttgggaggctg

SEQ ID NO: 17230 - DNA, 440 bp, Homo sapiens
  misc_feature 123, 400: n = A,T,C or G
ctgagttcaagctaaatagtatttcaagtttcaaattgtttggatttctttttggttacatagtcctaatatataaatcagctgccttctgaaaattggagttttaagcagaatctcactaanacttctcttgttatctaaatctaaataaaaagggatttacatactgtcagtatatactgaacagaaaaccttgtaaaacagtagtaaactggagggatgcattagttttaacacaaagcaaaaccttgtaaactcaggagatagataaacctgccaatagaatcacaattctaaatgtgaatctttatcgaagtggtaactcaagtgtaaagaagggttttaaatcagttcattagtctttatggtcgcttccgttgactagaagtaaaaccaccancagaaaggaaagataaaattaaggagtacccccagaaaaa

SEQ ID NO: 17231 - DNA, 344 bp, Homo sapiens
  misc_feature 203, 230, 232, 239, 244, 256, 271, 275, 287, 290, 292, 296,302, 314, 321, 332, 337, 339: n = A,T,C or G
agtacttctagaattaattaaggcgggggtggcaggctgctgtgaggacttggctccttctctgagttgggtgggattagcaggggatttaaacagaggaaccatgggatctcccttatgcatttctgccatggttggctcagctgaaggcacctgttgaataagacttggccttggacacccagaggcccttggttgagggnttacctcctggcatggccactgacacntncacgttnggctnttcacacacctnggcggccccgagacntccnctgcctgggctnggnantccntggcanttcccaagttantcccctntcaagtcatcnccctntngaaaa

SEQ ID NO: 17232 - DNA, 383 bp, Homo sapiens
agtacttctagaattaattaaggcggggggcaaggatggatttgctgattgtttagatgtgtcatggatgaaagagatggagaaatcaaagaagactctcaggttgtaattttaggtaactgggtaggattcccatgtagtcagaaacccagaaagaagagaaggctttgggaagatgacagtgtattcaatgtggctttttgtggttcaagactttggaaaatattgattagactgttgaaaagtacttataggtcaggaacctggtcagaaagtattgtgctaaaataatattgttatgacccaagcagttgtaaaaataacttttattgtctaactctcacagtttatcttgaactcttaacaggttgtcaggcaaatat

SEQ ID NO: 17233 - DNA, 375 bp, Homo sapiens
  misc_feature 5, 15, 17, 256: n = A,T,C or G
ttttntttttttttncncattcttttctaaacacataaaactaacaccttagatactgtattttgtctagactcatattgccataagttagaatgggtttatgacttaaaatgaataaagattagtcatgttagagttaaaagtataatatgaattggatttcctcctaaatagtgaatttgaggataaagtccttaattatcttggattttttgaaatatctgaagattttacttgctgtttactgatgaaatanctgaagtataaatttcagtcactgtacataagaaatgaaatatctgaagtatacatttcagtcactgtacataagaaaaaactccatttagattgggtaaaagcatgtggaaataagat

SEQ ID NO: 17234 - DNA, 399 bp, Homo sapiens
agtacttctagaattaattaaggcgggagggagagggagaaggcacacaggaagctgaggggaaaacaaggcagagaggaggtgagtggggaaaagagcccactagcaggccagggaaagaaacagtgggtaaaaggaatctgaagagccgaaaagaagggagaaatactagaaaaagctttcaggagtcttgagagaatatagagcaaaaaggcagaaggacacactactctctttggcagaagggctagatataactaaattgtgaagcagaggacggggaagttgaagttcattttcttagtccaaagggctcaaatgatacatcaaagggcacagaagctctggtctctcagccaggcctgcctttcattttatttttccagtgtgcaaagtcag

SEQ ID NO: 17235 - DNA, 425 bp, Homo sapiens
agtacttctagaattaattaagggcgggaggaaggagatacagctggtaaaattttgttctactcacagatagctaagaaacttcatgtgtctccataaaggagtaatataaaatttgtgcaaataagttgcaaattcaaaaggaactcatataaggaaacatatttgtgatggtatacactcctgaatatttaacattttgatcaccgtgaactataatatataatctgcattttatggttttctggatgcttggaaatttcaggagtatttaattttaaaaagattgtcaacatgcagataaaaaatcagattattttacatctataagtgaaaccttgttatccccttcatttgaggaaatccaaggagttttaaacagctctactttactggctatctctatacttaagccactagttggt

SEQ ID NO: 17236 - DNA, 459 bp, Homo sapiens
  misc_feature 13, 24, 28, 33, 62, 63, 66, 68, 70, 94, 97, 129, 145, 151,153, 214, 292, 347, 353, 363, 367, 368, 370, 371, 373, 382,384, 390, 395, 397, 401, 404, 407, 415, 429, 431, 432: n = A,T,C or G
caaaagctgggtnccgggcccccnttcnagagnttttatagaattaattaaggcgggagggnnttntntnatagataaacaaacaaggaaacangcnaaaagcaatgagaaaatttaaaacctaaacantaatctacaaacacangaaaanantatttatgatagatagcattttatatttataggggaaaagggtaaattttacataaatagntctgaggcaatttgttacttacctgagaagaaatgtaagtaaacagatacataattcaccaaatttacaaatttaagntggattaaggaattatatgtgtggatgtgaattggggaaataaaaaatatgtaanggatgngattgaagtnaaanngnnancaagctggnanaacccnaggangnatantanaancccaaaancccccaaagagaantnnttggaaaagacccaaaaccaaaaaaga

SEQ ID NO: 17237 - DNA, 416 bp, Homo sapiens
ccccccctcgagagtacttctagaattaattaaggcgggtgtggtaggtattacacaataggcactatcatcggtaaactccattttctctggtttgttagggttctctctataaactttctgttttccccatcttccattcagtgtactaaggggtaatcgattgttcctactcctgtcagttctactcagcaggacacaatatcaaacccaagatacagaaattggtctctgcctgcattggaaacatgggtgcctcactgtcttatcccatttagtgtcacaaaaagttccccccaaaaaaacatcattgatcgcatttcagaagtcgtatttcattggataaaacaacttgtgacctcccaaaataatgagaagaaaaataataggaaattagaggaaaaaaaaaaaaaaaa

SEQ ID NO: 17238 - DNA, 366 bp, Homo sapiens
  misc_feature 24, 32, 34, 47, 49, 63, 64, 67, 84, 89, 91, 92, 104, 112,122, 151, 152, 159, 352: n = A,T,C or G
ggatttggaaaaaaccgaacaaangctgggtntngggcccccccttnanagtacttttagaannaantaaggggggacaagacnaaaangnnataaaatatatnattatgancatgtaatgntttaatataaaatgtgaataccaagatcnnggatagngaagttgaattttaagaaaattatacttgggaggtcttataacaaacataaaagacttaaataagagagcatagctcattttgtgattatcgtagtcaaagatttatttaaagagaacctctgcagtacaaagaatgaatttagcttccaatataaaatgtgtaatgtctatattaatcatttcaaatcatantttccctctgaact

SEQ ID NO: 17239 - DNA, 324 bp, Homo sapiens
  misc_feature 18, 29, 31, 33, 36, 42, 43, 54, 55, 58, 59, 60, 69, 75, 81,85, 105: n = A,T,C or G
tggccgtcgttttacacncaggaaacagngntnacnttgatnnctggccgcccnnccnnnagaggactnataganttaccntgangcggggaagagtcaaagtanatgatttgctagaaaagctacgagaaacatgtttttaaaccagtagtgagcttttagaataaattaatagtataaaagtcaactatcttttggctactgtgaagatcaatcatcacaaaatttcattagtacttttataaacagtgccatgaattataaaacatttataatgatacccacacattgaatagtgttgaaaggaaaaaaaaaaaaaaaaaa

SEQ ID NO: 17240 - DNA, 264 bp, Homo sapiens
  misc_feature 34, 46, 51, 54, 56, 58, 59, 60, 64, 65, 73, 79, 84, 85, 87,92, 98, 99, 224: n = A,T,C or G
aagtacttctagaattaattaaggcggggagtanggaggaaatggnaggtnccntntnnngtgnngatatatntactcncaaannancatgnagggtnntgtgatctgcgtgagtttcctaagggagagaggggctctccttttgttcgtgttggctgcatcactgcatttcattaattctgaatggcaagtgagcaagaccctcgctgctgaaatctgatcanatgttattgatgaatcatggaattccagagttaggagctg

SEQ ID NO: 17241 - DNA, 370 bp, Homo sapiens
agtacttctagaattaattaatgagtgtgtctatcacctacagctacataaaaagcctctgaaatctgagagaaagccaacttagaaaaatgggcatatcaactgagttaaatataactatcctaactatatgaaataatgtttaactttgctcaaaataagataaattcaaattaaaactatactgaggtgctatttcttacctattagattagcaaaaatctagaaatttaacaactgctggcgagactgagcaatcaggcattctcacattgatggtgaaaatgcaaaattatgcaactgcttatgcagaagtatttgtcaatgtctagcaaaattatatgcacatgctctttgacccagcaattcc

SEQ ID NO: 17242 - DNA, 412 bp, Homo sapiens
  misc_feature 37, 44, 57, 69, 72, 75, 89, 92, 109, 110, 116, 121, 126,128, 132, 141, 145, 146, 151, 162, 163, 167, 169, 177, 178,185, 186, 189, 210, 213, 225, 232, 233, 345: n = A,T,C or G
agtacttctagaattaattaaggcgggggaactcttnaggccgnacaaaaacatgtntcatggtgattnganatntaccggggttatanatnttgtattccatttattnncggatnagtgntattngntgtnaatctattnaacnnggaangtttaagcaanntatntntaatggannggatggnnggnaggccataatctcctctattnctnctctataagatntgattannggaaagcacgttaaggataataattatttaaacataatcctttatgtcaaaattaatattgcatgaattttgaattctatatttacctgaaagaaacctgtaaaatctcggngctgtgtggacgttacaaattttagtgcattgaggtgtgagacagtgagtacagatagagggagaca

SEQ ID NO: 17243 - DNA, 389 bp, Homo sapiens
agtacttctagaattaattaaggatatcttttccacaagctctccccaaggggaagtgttcatattcccctaatgccacatttcccatcaaagcccacttctgggaccacatcacctcccttaaatccagcctccaccatctagacgtagggatttaaaacactaggttaattacgctacgcattaactgctcctcctaactactcacaacacagtacccaaattcctcagtgctatatccaaaggcttccatgacctatttgtctcatctcttgctaaactctgcatcacactgtctgtaccagctgtctgcacaaaactctccccacagttttcctccataattttgcttgtgtgagtcacttcactgaaacacctccccaacttac

SEQ ID NO: 17244 - DNA, 843 bp, Homo sapiens
  misc_feature 14, 18, 19, 22, 23, 28, 35, 39, 58, 89, 94, 97, 112, 114,116, 120, 128, 135, 138, 141, 331, 388, 509, 537, 577, 627,631, 650, 664, 681, 697, 701, 714, 721, 742, 752, 758, 762,771, 778, 789, 791, 793, 799, 805, 808, 815, 818, 831: n = A,T,C or G
gccgtcgttttcancccnnaannaaggnaacctangctnggtaccgggccccccctcnagagtacttctagaattaattaaggcgggcnggggnagnagggggaagttctgntnantacntttttgcntgagaanganttnaactacttactgaaatgatcatttgtctgagtaactcaaatatctatcagatcctgtagtcaaaataattttccatgtatacaaagatttagtttttatcattaaagaaaataaataaataaatgtccacatagaaaataatcactgacaataattagcattaatggagttgtatttggatagacattantgcagaaggaggaaagttcaacccctttctgaatagcagcagtcattggttctctantcctcatctgtattttactggtttaaaaactattaaattttcatcagccaagttatatgtaaataacagcagtaggtaatatgctatattttctccatgactgggggaaaaacatgcaggnagttcttgtgaacacaaagctgacacanaacagaaattctaatacctgccggtggtgtaagatgttancatctcccttttgttaactgaatgtctgttttccttaaaagaaaaaaaangacngtttttggccaaaatgtancaactcccctttgnaaattaaaaacctaaantgcctttaaaccctgnaccntttaaaaaatttntgccccnaaaatttccctttttaaaccntggaaaaaantgaatncctngaaccttgncattttntttccaaattngncnttttcnattttnccnaaaaaanatncttaaaaaaggangggggggaaaaa

SEQ ID NO: 17245 - DNA, 439 bp, Homo sapiens
  misc_feature 10, 17, 63, 87, 209, 325: n = A,T,C or G
agtccttcangatttanttaagggcgggaaaataagggaaatcataggtttaccttttgggangggtgggtaagggacccccagaanctttccttttacctgaaaattggtgaaataaagtcagggcttttctatctgtcaagggcgaaattaaaaaccgtcctctaaacttatagggtgggaaacctgggaatttgaatttggctcanatgatagatgcacatagcagtcagtcagctaaagctacagctgctcatctcttcatagaacccacgtaagtcagcacaattcaaggttcttaacctcagcactattaacatcttgncttgactagttctttaatataagggcccgcttcttcattgtaaaacatttagtggtatccctggcttctgttcatgagataacattagtacttttcttgtgtaacaactaaaaa

SEQ ID NO: 17246 - DNA, 468 bp, Homo sapiens
  misc_feature 32, 36, 37, 38, 40, 42, 43, 49, 64, 73, 96, 98, 102, 112,131, 134, 135, 137, 151, 194, 198, 234, 245, 300, 319, 345,366: n = A,T,C or G
agtacttctagaattaattaaggcgggaatgncagnnnantnnagaccnctcctgtggatgaangacatttgntctttttactacttactgggaancnaccntgacccactncgtgaagaaacaggaagangtnntntgagctccccctangggtgaagtgtccctgatcacccatttagaactgaaatatacngacnacatatatttgttaaccatggtgttaaaggcttatngacaaccaganctgctgtattacgtccgttatgtgcgaacattctactttaaccattcttaccttnggcaaaagaggtaaaaatncctgttttcatggaacttatgttccnattagagtatatattcaagtnttgaaggacttactaattttccattctccgtaatccattcttaaacttttacttggcaaatgtttattgagtccccacagtgtgctaatgcactaagggcta

SEQ ID NO: 17247 - DNA, 512 bp, Homo sapiens
agagtacttctagaattaattaaggtggggatcttcaaaagcagtcatggaaacagcaagagaaacactcgaaacaactctagaaggtccacaggaaccatattagaaaatataaagaagaactatagcaagaatgagaagtgggtttcagattggttcctgaagaggagttgatgctgcacagtgaattgagggccaaatcagcaatacaacctgggtcgcctggatttcagcgcatggcctttccaagataacatgctactctctcgtccacagattttgaagaaaaaaaaagatcacctaaagagaaaatagagaaaaactgtaagtattaatgtactattataagtctctattacaaagacaggtttataggaaataaaaaagcacataaagcatgacacaggctcattacttaaaataaatttttatggcagaattggccagacagacttttatactatcagataattaagtagtgatattagagttttttaaacaactttttaaaa

SEQ ID NO: 17248 - DNA, 516 bp, Homo sapiens
agtacttctagaattaattaaggcgggccgatactaaaaatgaaccagacaaagcacaaatgaaaggaacttttcctaaaatgaatacatcctgttagattcgaaaatatactatcctcatggataatcattttgtcagcctatccataattacttttcattaaaatctgtaattgtctttagcaggaaaaaaaagaccgaactaagtacatacgtaatctgtaacatagattttatattaaaatctatttgaaacatttaagatttttcacactaaaaaaagagagatcacttgaaaaatatatgacttaatagtcatttacttttgtttacaaaacaggaaagaaaactgactacaattccagaactagtaaatcgcaaagttaacatctaatgtctaatcatctaattccaaacttcatgcaactgtaatcattcaactaatcaagaatctttaaaccattctgacatactattaaattagcaattccacaaacattagccgtttttaaaatc

SEQ ID NO: 17249 - DNA, 191 bp, Homo sapiens
agtacttctagaattaattaaggcggggtagatttatttctctcattttatagaaagaatagaaggcttagtgagtttaagtaaaatcattgagatcttgacagttagagaggacttcctaaacaagacgtaaaaagcacagaccataaaaggaaaagttggtaaaaaaaaaaaaaaaaaaaaaaaaaaaa

SEQ ID NO: 17250 - DNA, 397 bp, Homo sapiens
  misc_feature 169, 226, 231, 252, 284, 314, 330, 367, 370: n = A,T,C or G
agtacttctagaattaattaaggcgggcagatcacgaggtcaagagatcgagaccatcctggccaacatggcgaaaccccatctttactaaaaatataaaaattagccaagcgtggtggcacatgactgtaatcttagctattggggaggctgaggcaggagaactcangagacagagattgcagtgagctgagatcgtcccactgcattccagcctgcgcaacanagcangattgtgtctcaaaaaaaaancacaaaataaaatatttaatttacccttctanattttacagttcacattttaaattttttantcaaatcataaaatanccagggatggagtggattcaggttgggagtggataanctntgcgccctactctgccgaaattaaaaa

SEQ ID NO: 17251 - DNA, 355 bp, Homo sapiens
  misc_feature 11, 340: n = A,T,C or G
ttaattaaggnagtacacatggagtcaacccataatgctggtaaaaccctgcaggtggtcactaaaggcctgaatgaggacagaaccaagactggccagcagctctttgcaggggcagaggagagctgggccaccaacagcctcgcatcattaggctgatctgcatccaacgaaatcaaatcagcaaacatattagacacctctaggtgcaaagccttggccaaatgctatgggagggctgggcacagtggctcatgcctgtaatcccagcactttgggaagccaaggctggagggtcagttgaagcgaggggttaagcagccaggccttactggacttntaaaattggacggta

SEQ ID NO: 17252 - DNA, 226 bp, Homo sapiens
  misc_feature 31, 34, 35, 36, 39, 41, 52, 56, 60, 62, 72, 73, 74, 75, 84: n = A,T,C or G
agtacttctagaattaattaaggcggggganatnnntantngttgaatgggnatanaatngnccatgataannnntacatctanaaatctgctacacagcaccgtaaatattcttaactctacaaaactgtatacctacaactggttacgatggtaaattttaaggtatgtgtttgttacgaaaattctaaataataaattatttataaaaaatgatctttgttga

SEQ ID NO: 17253 - DNA, 392 bp, Homo sapiens
agtacttctagaattaattaaggcgggttcctccctgtcagggaaggcattgtaaactcaaacgcctgtcagctgtgaacctggctcttcctggaatcactccactcccctagtcttcagtgtccagaagtctcacagattctcgtaggcactcctccagtgtccaagggtgagaagggccctaaaatcttcactcacctggtggaggaacagggccctgctgctgactctccatgagttgcttccatggagacagtttcatgtcggataaaattatttttcccgggccaggcgcggtggctcacacctgtagtcccagtactttgggaggccaagacgggcagatcacatgaggtcaggagtttgagaccagcctgaccaacatggagaaa

SEQ ID NO: 17254 - DNA, 194 bp, Homo sapiens
tctagaaattaattaaggggggaaacattattctacacacatggggaaaatagtcataataaagaagccatggaagttcttggtataagaactgagttactgtattgccactgtaggaatcattcagttgtaagaaaaagtattcaacctaaattctctatttttctaatttaaaaactgaaattccaaaaaaa

SEQ ID NO: 17255 - DNA, 405 bp, Homo sapiens
agtacttctagaattaattaatttaaattataatagattatttatattataataaattaatttaatttaaaaataaccaaaattcacctcttcaactttacagatgaaggagtcctagagatgtaaaattaaacttgccccaaaaatacaaatttagaagatgcaaagttaaaaacaaaaatgactcctaactcccaattcagcactctttccattataacacaccattttcagctgggcacagtggctcacgcctctaaccccagcactttgggaggccaaggcaggtggatcacctgaagccaggagtttgagaccagcctgagcaacatggtgaaaccccgtttctactaaaaatacaaaattagccaggcatggtggcacatgcctataatcacagctact

SEQ ID NO: 17256 - DNA, 729 bp, Homo sapiens
  misc_feature 117, 399, 432, 496, 529, 564, 575, 602, 604, 638, 641, 651,657, 658, 662, 677, 691, 695, 698, 699, 705, 710, 714, 729: n = A,T,C or G
agtacttctagaattaattaaggcgggaaactaatcttacaaaggaggcttcctctttccttttccagtggtattccaagcttcctttggagtgccctccctcctgatttacaaatnggcctgacgttatcggagtacaggctttttcctggtggtttctggcctaacaggagacagattagtaagtaccaggatctctaataggtcaactttcatgatctctgctaaattctcagctgtttagacttacaatttttaacagctaaaaggaaagacaaatgctatctaaaactgtcccatcagcccatttacagggagcacctcccccataccgccctaaaatcctttaaaaaatggctttagtcattttatctgccttgcatttaacgaattcagttnaagtgggcttcagtttctgaattcctggattanatcgaaaatgttgccaaatggcggtgtgtggggctttgaactccgtaaattttttggtgtgggnactaattcaagaacgatttgaaaagcagggttnggggatcattttaaaaaaagaagttcttcggcaangggtggtgggnggactcaaggcccctggtaattcccancnacttttggggaaggcccgaaggccgggccgggantcncctttaaaanggtcannggangttccaagaactaancccctgggccaacnattnggnngaaaanccccntctnttccttaaaaaaatn

SEQ ID NO: 17257 - DNA, 301 bp, Homo sapiens
cccccctcgagagtacttctagaattaattaaggcgtgagccactgtgcccggccagaaaatatgtaatcttaaaaatggatccattcctcctcctctgctttttactttttcggagaggggtcacaatttttcggttcttttgttatgtcactcttaaaatattattgaaacattaatgcagtctttatgacaaaattcccatgggtacattgtcatcctaatagatccagaaagtattaagtgtatgtcttttctagcttttgtctggtgatactaaacattattgtgtcttattcttg

SEQ ID NO: 17258 - DNA, 279 bp, Homo sapiens
agtacttctagaattaattaaggcgggaggagtgtgagtttctggggctggagtggggaagaggctgaggggaaagagggggccagggtgtgacccaaaacaggtgcctgaacttgcaggggctaactgatccctaagtatggatcccagtatctttcttgaccgggcgcggtggctcatgcctgtaatcccagcactttgggaggccgaagcgggtggatcacctgagatcagaagtccgagaccagcctggccaacatagtgaaaccccgactctac

SEQ ID NO: 17259 - DNA, 445 bp, Homo sapiens
  misc_feature 304, 309, 346, 363, 389, 401, 402: n = A,T,C or G
aagtacttctagaattaattaaggcgggtggatcacctgaggtcaggagtttgagaccagcctggctaacatggcaaaaccccgtctctactaaaaatacaaaaaaaattagccgggcttagtggcaggcgcctgtaatcccagctactcaggaggctgaggcaggggaattgcttgaaccagggaggtgaaggtcgaagtgagccaagatcgtgccactgcactccagcctgggcgacagagcgagactccgtctcaaaagagaaacaacaacacaccaccgcaaacaattacccggagtggngggcnccctgtattccacttctcggaggtgaacccaaatacntgacccggagggaggtncatgaaaccctggcttcactgggganaaacagactttnnttaaaaaaaacctgggaaaaaaaaatttttttaaaaaaaaaaa

SEQ ID NO: 17260 - DNA, 232 bp, Homo sapiens
agtacttctagaattaattaaggcgggcttgaaaattttcttcctgtaaatcttgtaagttttggtttcttaaatttatatatgaataaaatttatgttaaactagaaaagaaagtcaggttatatatactctgtgcccacatgaaaaccattaggtagacagactcaaaaagagaagctataattgtcaaccccatacttagaaaaaaaaaaaaaaaaaaaaaaaaaaaaa

SEQ ID NO: 17261 - DNA, 192 bp, Homo sapiens
agtacttctagaattaattaaggcgggaagaggagaaatggaaatatacagctttaaggtcattgtgtgtgaaataggataattatacaaataaaccaggagagaagataaaaagaagtatcaacaaataatatcaaataatatagaaaaggaaaaaaagtaacaaaaaaaaaaaaaaaaaaaaaaaaaaaa

SEQ ID NO: 17262 - DNA, 238 bp, Homo sapiens
  misc_feature 19: n = A,T,C or G
tggccgggccccccctcgngggtacttctagaaattaattaaaaacttctctgcaaccatagcaattttccacctttgctaatttaaagtttaaataccataacgggtttttcatacaggctttaatatactttaatgcattccctttcatttttcctgtcttctatttggggtcttgagatttaagatttttaatttatttgcttcacctattccagatgtgaagatacaaaagaag

SEQ ID NO: 17263 - DNA, 427 bp, Homo sapiens
agtacttctagaattaattaaggcgggcctgtttcttactgtaaaatgagagttggacctttgatactctcagtttcattccagctctaagagtataatgctataggcatccagtagagtgaaagcctctttgctccagagtagtttatttcctaacaaaacagagttctaaaaaaaattttatgttttttacttttttatttttatttttttgagacagagtttctgtcacccaggctggagtacaatggcgggatctcagctcactgcaacctcggcctcccaggttcaagtgattctcctgcctcagcctcccgagtagctgggattacaggcatatccaccacgcccagctaatttttatatttttagtagagacggcatttcgccatgttggccaggctggtctcgaactcctgacctcagg

SEQ ID NO: 17264 - DNA, 589 bp, Homo sapiens
  misc_feature 36, 39, 49, 57, 59, 60, 62, 63, 65, 71, 74, 86, 109, 129,130, 137, 156, 183, 186, 212, 224, 228, 259, 260, 264, 265,266, 270, 274, 275, 276, 280, 281, 283, 285, 286, 292, 297,300, 301, 316, 327, 397, 528, 589: n = A,T,C or G
agtacttctagaattaattaaggcggggagcaatanaanatactgattnctgttatncnnanncntgcctnatnggatcattccanaaatattatcaaggttggtattngtagtaaacccttttttaannaaatacnaataacccctggtaaaatnggaaggactttctaggcttttgtttgnaancttttgattaaatgctgttcctcacngatgcctgtcanatanacatgtgggagtagggagtggtctgtctccnnacannngggngaannnctanntncnnactttnaagangtnnctttcacgaattttnagagggttttngtatgctaaattttgtgaatttttcaagagaggaaatagactctattaaaatattctgaaaggtcactcntagcccagtttgggggtgaaaaaatcacaaaggaagtgacttttaaatttgatcttataaaaattatgtctgtttcaaaaacacaaaaattattaaaaggcaaatgaataaaaatatgacaaaactatcantatcatttatatagctctttttaaaatcagtaagaaacatttctattaggaaaattgggcn

SEQ ID NO: 17265 - DNA, 178 bp, Homo sapiens
aagtacttctagaattaattaaggcgggatgaattttataaaaataatgatgatagttaataattgatgtggtgagattatgggtgacttaggttctttttacttcccatattgtcaacatagattactgttgccatcaagagtaaataaataaataaataaaaaaaaaaaaaaaaaa

SEQ ID NO: 17266 - DNA, 545 bp, Homo sapiens
  misc_feature 30, 48, 51, 64, 95, 115, 274, 314, 315, 318, 320, 322, 343,354, 355, 356, 357, 358, 359, 360, 361, 362, 363, 364, 365,366, 367, 371, 372, 374, 375, 376, 377, 380, 381, 382, 387,388, 389, 391, 392, 393, 394, 396, 397, 398, 399, 400: n = A,T,C or G
  misc_feature 401, 402, 406, 413, 414, 417, 418, 420, 422, 426, 431, 433,434, 435, 437, 439, 442, 444, 445, 446, 452, 453, 454, 455,456, 457, 460, 462, 464, 465, 470, 472, 473, 474, 475, 476,479, 480, 481, 482, 483, 484, 485, 486, 487, 491, 492: n = A,T,C or G
  misc_feature 493, 494, 495, 498, 500, 501, 502, 503, 504, 505, 506, 507,508, 509, 510, 511, 512, 513, 514, 517, 518, 528, 529, 530,536: n = A,T,C or G
aagtacttctagaattaattaaggcgggcngcatcacactgaggtcanganttcaagtaccagnctggccaacatggtgaaactctctctaccanaaaatacaaaaattagccangacatggtggtgggcacctgtagtcccagctactccagaggctaagccaggagaatcgcttgaacccaggaggtggaggccgcagtgggccgagattgcaccactgcactccagcctgggtgacagagtgagactctgtctcaaaaaaaaaaaaaaaancggcccccaccccggtgggacccccaattccccctatagnnagncntnttaccccccctccttgcccgntttttaaaaannnnnnnnnnnnnntttnncnnnnaannnccccnnncnnnnannnnnnngggnggggggnnccnncntngggnccccncnnntnanaancnnngggggnnnnnnccntngnnttggnannnnnagnnnnnnnnncccnnnnnggnannnnnnnnnnnnnnnggnnaaaaaaaaannntttttnaaaaaaaaa

SEQ ID NO: 17267 - DNA, 451 bp, Homo sapiens
  misc_feature 377, 445: n = A,T,C or G
ctgggtgccgggccccccctcgagagtacttctagaattaattaaggcgggcatatacttataggagctgaccagaaaaaacaattttaaaatgctacaattctctaaagaggtggatattcaacagtatcactttttctttaaaaaaaataacaaacttcaggctgggcctggtggctcatgcctgttaatcccagcactttgggaggccgaggtgggtggatcacgaagtcaagagatcgagaccatcctagccgacatggtgaaaccacgtctctactaaaaatacaaaaattggctgggtgtggtggtgcactcctgtagtcccagctactccagaggctgaggcaggagaatcgtttgaacccaggaggcanaggttgcagtgagttaagattgcatcactgtactccagcctggcaacagagcgagattccatctcaanaaaaaa

SEQ ID NO: 17268 - DNA, 493 bp, Homo sapiens
  misc_feature 14, 16, 17, 21, 22, 23, 25, 30, 32, 43, 45, 48, 50, 58, 59,66, 77, 79, 82, 83, 96, 102, 105, 116, 135, 145, 182, 187,200, 202, 206, 207, 283, 365, 447, 466, 481, 482, 486: n = A,T,C or G
taattaaggcgggngnntctnnnancccangnattaaaggatncnctnanctatcacnngaccacnggactcaaacntnggnnaacacatcaaggnccaccnttncctttgacacngtgcaacaaacaaagaggnaactaactanttcctacattcccatcaacttcctaacaagcacatanctgantgtaggacctcantngaanngatttcatgaacgtacagcgggttatttttaataatacattggttgcatttaaatatttttaagaaacattattanaaacttctgttttatttcaggaaaagttatctattccaccttttcccctttcaaatccatctaaaagttaccaaaaccttanacttctttgtctgggatcactaggggggccatattgtgagaaatatgaaagaagcaggttgggaaaatgcctaaattgaaanggaaaaagaaaaaaatggngaaaagaaaaaattnnaagnaaaaaaa

SEQ ID NO: 17269 - DNA, 554 bp, Homo sapiens
  misc_feature 274, 283, 284, 285, 286, 287, 288, 290, 292, 295, 302, 307,310, 311, 315, 318, 319, 323, 327, 329, 335, 336, 339, 344,348, 355, 357, 362, 366, 375, 381, 417, 418, 423, 429, 431,432, 462, 468, 473, 487, 494, 498, 499, 500, 503, 507: n = A,T,C or G
  misc_feature 512, 519, 525, 529, 530, 531, 532, 546: n = A,T,C or G
agtacttctagaattaattaaggcgggcagatcacgaggtcaggagatcgagaccatcctggctgacacggcgaaaccccgtctctactaaaaatagaaaaaattagcccggcgtggtggcgggtgcctgtagtcccagctactctggaggctgacgcaggagaatggcgtgaacccgggaggcggagcttgcagtgagctgagatcgcgccactgcactccagcctgggggacagagcgagactctgcctcaaaaaaaaaaaaaaaccttaanctgggtacnnnnnncntntanccccacnttttnggnnggtnaanngggncccntnttttannccnaggantttnaaaccancntgggnaaantggaaaaantccttntttccaaattttccaaaatttcccccgccttggggnntttgncccttnanncccccttttttaaaagttttaggccgggangatccntttanccctgggggggttnaaggggnttcnnngancctnaaaanaaaaaancttggncttnnnnttttgggggggggnaaaaaaaa

SEQ ID NO: 17270 - DNA, 424 bp, Homo sapiens
  misc_feature 159, 169, 172, 247, 382, 416: n = A,T,C or G
agtacttctagaattaattaaggcgggaggcaataaaggcaatggagagctcatagtatttaaccattctgtgactcaatgtcttctataaatgggactaataatagtacccactcatcggtttttttgttaaaaaaaaaatctttgtacagtgcctanctcagttggnggngcatagtaggtctttaataatggaatttttattatgactaatactttttggttcttcgtaagttttgcttgctgngggcccccatagcttcaactctatatttttactcgatggctctcttgactccagggttttcaaacttctttcagttttacttcttgttgccccctgcctgatattcattttgtatctgaacaacattcttaacanaatcccctaagtgtcttaactcatgtttttgggngggaccat

SEQ ID NO: 17271 - DNA, 494 bp, Homo sapiens
  misc_feature 31, 34, 36, 41, 43, 44, 45, 46, 48, 49, 58, 62, 63, 64, 68,69, 70, 71, 77, 78, 79, 124, 132, 135, 137, 148, 154, 183,197, 228, 229, 231, 232, 234, 238, 241, 242, 243, 248, 256,444: n = A,T,C or G
agtacttctagaattaattaaggcggggaangantngccgngnnnntnntactttttntaannnttcnnnntcaacnnncctgtgtagggaatgaccagtactgggtaatactgacttgatggncgactgcncanantgggcacctgnaaaccnttccaatgtttaaacattgacccagcgcntgctcatacctganggggaccttctgggacatcccaagacagagnncnncncccnttnnnaatantgtcctgnccttttcttatctttctattgccgcccttaaaacatattttcttgcaattaccttcacatgcactgtgaacaccggcaatttaatgtgtttttgtgcatgtgtattgcatgcacgctgaataagttccttgcatgctaaaaaatgtttcaacctacaaaataaatagtaatgtcattgcctggttcgngaaaatttggtgataaatagatttcacagaaccaggagaaacttataaag

SEQ ID NO: 17272 - DNA, 375 bp, Homo sapiens
ggggggaatgaaggtgggctgaggaccgtgggggtatcacagaggagatgaatgccaaaaagtttggtggcagaattagtggaccagcagcttctcagtagctagagaatttgggatgctgttaaccaaagtgagggcccacgagaagtgcagtgttcattcctggaggaagaacgattaagtgttcagaggaggaaggctcagtcctgttcaaatgaaccgttactccactttccttagtccccacaattagtcctactcagagatcatcagaggacacaaccatctgcagaacaatcctgggttccatgagtcctcaaccagaagttttaatgccaaaccccaaagtattctgtgaggagaagctgcttttta

SEQ ID NO: 17273 - DNA, 448 bp, Homo sapiens
  misc_feature 146, 215, 233, 237, 252: n = A,T,C or G
aacaaaagctgggtacccgggccccccctcgagagtacttctagaattaattaaggtgggagggaatggatttggcagtttgaggagcttggagaagacttgaaatagttgtagaaaatgagagtaagtgttactggggaaatgtngaattatatattaagtagaaacaagctggttgtagcaataactagttattatttttacagataagcaangaaaaaaaccagaacaanccancaagcctttttaatncatctccttatgataccataaacttacaatgttgtttaaatggacatcagcagtgcataaataaaataaacctaaattgttgtttgcctttagtgaatagataaattgcttatctttaacatgtcatttattggaaataacaattcttataattcttttgtcaaggctgtcaaaattgtcatttaaaatgcatagc

SEQ ID NO: 17274 - DNA, 279 bp, Homo sapiens
agtacttctagaattaattaaggggggctcagaaaagggaaatgtactttatctaaagagatgaaattggactcaacttggagaaatggttctctgaccagatgtcatttaaaggcattggactttgggctccaggcgttgactgtttctcaagataaatatgcatctaggaaccaagaagggcattttcaaggattgctgtgagttggtattataatgtgctaagcacacccctgacgtctttggaggtctgagcatacaaatcagacataaatgctt

SEQ ID NO: 17275 - DNA, 319 bp, Homo sapiens
  misc_feature 30, 36, 55, 211: n = A,T,C or G
agtacttctagaattaattaaggggggctngaaatnaggatagtgtttatcttgngaagggctgattgggaggacgcatgaagatttttgaggctccttaaaatctttttttaaaaatctaggtggtagttaaattatatgtatttgctttatgaaaactgtcagttgtacatttgtgattagtgtacttttaaaaaatgttttcttaaanaggtggggagatgagtgaagtccattttaaaagttcttgaggtcttttcacccttatgaaaatgagcacggcctctggaggcagaacttatatggcttgatgaaaaat

SEQ ID NO: 17276 - DNA, 420 bp, Homo sapiens
agtacttctagaattaattaaggcgggaggaaaggactgcaaggcaattttatagatacattctaaaggccaccagcctggtaagtgtacactgccttaggtgcatttaaccaaaatacccctatctccaaccaccaccagcaccatcatctccacctctgcccaagtgctcttatcctcctgcttatcttaaaagttttcagccagttcctattttctatgacctgggatggaaatctacaaatattaatctacaaatatttatttgatacctactatgtgctcagtcgatgtataaaatacagtatcttcccttgacgagtttataatctagttaataagactaacaatttaaacactgaattatgccagagataatgtgattaagtgctaacttggatggcagagattaacaaagac

SEQ ID NO: 17277 - DNA, 287 bp, Homo sapiens
  misc_feature 13, 66, 71, 88, 249: n = A,T,C or G
aagtacttctagnaattaattaaggcggggagagcggtgaggacaaaggtggaagcaggggagcanataancagattctgcagacgtntccacccttccgtgactagctctagccaatggagaaagggcaagacctttcatacatgaccagggtgtatgagaacatgggtgttaccatttaatttcagggtctgtgtgcctcctgcagttcccaccggagaagtgactcctaggtttcaagctgggctngtccgtatcatatgagctggcagtttctgtttactcat

SEQ ID NO: 17278 - DNA, 390 bp, Homo sapiens
  misc_feature 5, 28, 43, 61, 66, 80, 107, 173, 196, 200, 206, 230, 233,243, 293, 297, 299, 303, 306: n = A,T,C or G
ctgantaaagggaacaggaagctgggtnccgggccccccctcnagagtacttctagaattnattanggggggagagagtnttccttgagaaattctaaacacaagcncatatttatatgagtttggggtcaaaatccatattatctctgtggcagaaacacccttcagtttantttaaaacagtttgggttattantatncacaantgcctggaagaactgacacaaatnttntttatagaanagtattttaaacacagacttcaaagaagtgtatatgagctcataatttanaatnantaanaanttaaaatgagatgccattgtgcacctgtaagaaagagtagcttaaaatctaaaataccgtcaccaccagatgctggcggggatg

SEQ ID NO: 17279 - DNA, 424 bp, Homo sapiens
  misc_feature 28, 39, 65, 71, 115, 117, 124, 344, 354: n = A,T,C or G
ccgggccccccctcgagagtacttctanaatgggggaangagggctctggagctgttataatttnttattntttctcatgccagcaaggtaagccagcagatcagtgacaccatntngaatctnccacaatgcctggcatcctacaccaaccttcagagtcaaaaaaatatgctgctgattcacttccagctcccaaatctcacacaaggtgtcttttgtaaaggtcgctaacccagaaccataccagaaagggtgaacgcagtacaatcccccacagagtctttggataaatttaaacatttgagacttgcatttgtttaaaggatatcacatagcatattanaagagcacanaagaggctgggcacagtggctcacacctgtaattccagcactttggggaggcagaggtgggtgaatcact

SEQ ID NO: 17280 - DNA, 431 bp, Homo sapiens
agtacttctagaattaattaagggggaaatacagagggattggttagtgggtacaaacatatagcatatagttgtaaaaaacaaaaatgccccaatattcaatagcagagtagagtcaccatagttagcaacaatgtattgtatatttcaaagtagctaaaagagaggacttgtaccaacacatagaaatgaaactcaagatgatggctatttcaaataccctgacctgatcattacacattttatccatgcaataaatattcacatgtacgccataatatgtaaaatattttgtttcaattaaaaaaattttttaagaaattcaactagtaatcaaaatgttcccaaaaggaaaacatcaggcctaggtagtttaactctcagatttatcaaacatttagaaaaaaataataatcttaaaacattcttcc

SEQ ID NO: 17281 - DNA, 356 bp, Homo sapiens
  misc_feature 341, 343: n = A,T,C or G
agttcttctagaattaattaaggcggggtatgggtggtaaaggcaagggctcctggaagtaaatatagaagtgccagcggttggtgttggcattagctttttggctgtaacataaaccccgtcagcatgtctatgcatgcctatatgatgcaaacacatgtttgcaatagaggctagtttgagattttcacaacagtaagtctaaagttgtagttctcaggccgggcgcaatgcctcacatgtgtaataccagcactttgggagaccgaggcaggcggaccacccgaggtcaggagtttgagaccaacctagccaatgtggtgaaaccccgtctcttccananaaaaaaaaaaaaa

SEQ ID NO: 17282 - DNA, 644 bp, Homo sapiens
agtacttctagaattaattaaggcgggggggcgggggtagattcctagctctttcccgagtctacttcaaaagaactcgggtaaagcctgggcatgcataattaacgagtactccaggggattctgagcacgtggtctggagactacacttttttggaacactcttctgcaaagctttcatcctttatcaagggagtcacctaggctcaccaacttcttccagcaggattctttctcccttgtcttctatagtacactcactgtgaaagcagggtaggttttgctgctgttgtttattcagggaaaaggggatgaggaagaaacaatattaaaaggagaaaggaaaagtggacattttgaagagctccctccattatttatgttgcaattaaagtatgaaatcttaaccttctttttaaaggtgtggcctttaggactataagcactcaattctccactaaataaatgcctttctccactgaaacccaaagctcccttaagggtttcaaaacctaccatttagccccaaatgtgggcaataattggcccgaaaagttcacagatctatcaaaccaatagtccttaccttgctggttctcctttcattttttagcccctcattaaaaaacaaaaatagggctggg

SEQ ID NO: 17283 - DNA, 429 bp, Homo sapiens
agtacttctagaattaattaatagatgccttcttttctcttgggtaaatgcttaggagacaaataacctggatcatggagaaactaccagattgttttccaaagtactacgattttacattcccatcagcagtattgtgaatattaacattcttccacattcttcccaactcatgctttccaagatggcactctttttaattttagtcactattaataggtttgtaatattatctcactgtagttttaattttcatttccctaataactaatgatgctgaccagctttttcccgccttaattaagcggggacttgatttaagaaaaattggctggatgtggtggctcatgcctgtaaatcctagtactttgggaggccgaggcgggtggatcacttgaggtcaggcgttcaagaccagcctgaccaaca

SEQ ID NO: 17284 - DNA, 682 bp, Homo sapiens
  misc_feature 22, 100, 104, 165, 358, 415, 444, 445, 500, 577, 580, 627: n = A,T,C or G
aaaataaattaaggtggggctnggggctgggactgggccggccccattggcttcacgccctgtaatccccggcacttttgggaaaacccgaggtggggtnggantaacccaggtcagggagaatcgagaccatcctggccaacattgaatgaaaccccgttcttntacttgaaaatgcaaaaattaacctgggcatggtggcctggtgcttgtaatcccagctactcgggaggcttgaggcagaacccgggaggcggagcttgcagtgaagctgagataagtgccactgcactccatcctggaagacggagctagacttccgtctcaaaaaaaaaaagtggctggacttgcccaaaanttggggttggcaaaaaaaaaccccatccaattttaaaatggatcaaggtcattgtanaacttttgaaaaaacctttattttctgtnnggtatacaatggtgaaactttaaacaatttcgtgaaaaattttgcaagtcagttntaaacttccaaattctcccttttttcaaaaaatgggaaaaaaaactttttttaatattacatattttttcttttaantanttaaggaagaccaatttaatttcctatttaaatcttaatttggaaantatttgttttgaatttgggggaaaaatttttaaaaatgccttgtttaaaaaaacc

SEQ ID NO: 17285 - DNA, 214 bp, Homo sapiens
  misc_feature 43, 53, 139: n = A,T,C or G
agtacttctagaattaattaaggcggggtaagattagagaatngaaacaaatntggggaatttccaataaatactacaaaattagactagaaaaatagctgttatgtaaataactttgttggaatatgctaattttagngtcttgaaagtttacaatttatctgattgctctgcagtacagtagcaactgagctgatcaataaaggtgaaatta

SEQ ID NO: 17286 - DNA, 424 bp, Homo sapiens
agtacttctagaattaattaaggcggggacacaaatctaagtcatgtcagtgcccctaagttatccagccacaaacccacatatttattcctttctctttgggactggagacttttactcattcaagtatttcccacgacatagttttcaaagtttggtctccagattacctgcatcagatgattaaaactgtaggctcttgagcaaccctccttaactcccctaacatggaatcacaagacccattgattatagtctatgaaattgcattcttaactaagtccctgggtgattattatgcatgctgaaatttgagagtagtgcagtgtggtattcccaagctttggacagagaaggattcactgaaaaataattaaagcccaggaaggactaaaaggataacagagaagcatcccaaaaatga

SEQ ID NO: 17287 - DNA, 384 bp, Homo sapiens
agtacttctagaattaattaaggcgggggttgcagtgagccaacgtcgtgccactgcactccaacctgagtgacagtgtgagaccccatctcaaaataattccaatgacatttttcaaatagtttattttagcggagctacagtgatttaatcttaaatatgaacctttatttatccaccatattatatttgatacatgttttccaacttactgggccatctactggtgtcctacattagttgaaaaagaaagttggtaatgctgcttcattttcatgttccctattggtctgtttagctttccttttattaattgcattcaaacttcacaagttgcaagcacgtttattagtgaaagttgcatccatctttctgtcttccatg

SEQ ID NO: 17288 - DNA, 434 bp, Homo sapiens
  misc_feature 6, 18, 29, 30, 31, 43, 49, 56, 103: n = A,T,C or G
ttctanaagggggggaangaagggatccnnngactacacattntttttnttttttntctgctcaggtgatgggtgcaccaaaatcacagaaatcaccactaantaacttttccatgcaaccaaacaccacctgttcccccaaaactagtgatataaaactacacacatataaaaacaaacacacacatatattcacctttatatcaatcatgtgggtggctataattattctagttcttcagacacagagaaaatcaagagtcagaaatcttactcaaggtcacgaagatatgcggcagggtcaaagttttgaaaaccaagttggtttgctctgagagctgtttacacagcaccaacacagaatttcagagacacattttgtgagaaagttatcaccagtgacagaaacacaacaggaggccctacaattcatt

SEQ ID NO: 17289 - DNA, 485 bp, Homo sapiens
  misc_feature 29, 30, 34, 37, 41, 45, 49, 54, 58, 59, 68, 75, 76, 77, 81,82, 83, 87, 91, 101, 102, 103, 105, 129, 140, 143, 147,151, 158, 161, 164, 165, 167, 180, 182, 191, 203, 206, 212,215, 220, 222, 231, 239, 243, 246, 247, 259, 261, 271: n = A,T,C or G
  misc_feature 278, 279, 300, 301, 316, 331, 353, 356, 358, 359, 363, 378,403: n = A,T,C or G
agtacttctagaattaattaaggcggggnntagngtnttcnttgngganaacantacnnataagtgcnctaccannnatannnaagnctgnaggtggctannngntgagtgctgacaatgttggcacanattgcgttaanacntttnaatntcataanganaanntngtaaaatctccancnccaaggaanatgctattgctnatnacttcncanctgcntnaacaaaacnaaaaaatnctantcnnaaagggaaatangngtctcacagngaaaacnncgaacagaacttactgaaggnnttgattattataaantacttctttgtacanaatggaggctatcttgatttanacngnntccncacaatcactcccanagggctttttgccctctaaagtcanaggtatcaaaatctgctaacttggtttagtttcagcttaagggcataaatgacaactgactgcagtaattaattatctcccc

SEQ ID NO: 17290 - DNA, 279 bp, Homo sapiens
  misc_feature 21, 22: n = A,T,C or G
gggtaccgggccccccctcgnnagtacttctagaaattaattaaggcgggcaacaagtcatttgacaagaaataactcacactaatagttatttccttcttcacagggaaaacaaaaattaagaggtagtattacattaaattgctgatgctttagaaagaggaaaggtatcatgcatgaaagtagtatttctggctccatttccacgcaccaaggaaccacagctttttattttattttatcttattttgttttgagacagggtcttactctgttgct

SEQ ID NO: 17291 - DNA, 396 bp, Homo sapiens
  misc_feature 326: n = A,T,C or G
agtacttctagaattaattaaggcgggtaggagcaaggactgggaaagtaacagtagggaaaaggaactaggagaaaactctgaagtagggtcaggttgcagagcagatttggtttttttacccactatggataaggttgttttgctggattcatgttaaccctttcttttgaatttccctaaataaactatattttcatcactccaaaatttcttcaaataaaaagctaagaactgttaggaatttccaggcagttttaacacaattacattataagatgtccaatgaatgaatagcacataggggttaaaaaccatcctgcatnttccccctccctaaagcattccctcctttaaaaggaagtaagcaagccaagtgagttgtaactatgcaat

SEQ ID NO: 17292 - DNA, 414 bp, Homo sapiens
  misc_feature 302: n = A,T,C or G
agtacttctagaattaattaaaattataaacttttggaaaattccattttatcgaggtaaacctgtttctatttagtattttgtacttgaaaccaagcgaagtacttggtgaacacaaaggagtgcattcctaggtactattaaagttagctacattaggccaggtgcaatggctaatgcctgtaatcccagcactttagaaggcccgggcaggtggaccacttaaggtcaggagtttgagaccagcctggccaacatggtgaaaccacatctctactgaaagagataaaaaattagctgancgtggtggcctgtgcctgtaatcccagctactcagaaggctgaggcaggagaatcaagttgaactcgagaggtagaggttgcagtgagctgagagaatagcgccactgcact

SEQ ID NO: 17293 - DNA, 416 bp, Homo sapiens
agtacttctagaattaattaaggcggggtaatgcctatagaggcagtgctgctcctgtatcatactggatggataaaagctcacgtctcatcctatctggagagaattttcagagaccatctatatgcttcttgggaggtttaagtagattgataccctgttatctttagggatgacattgatagttactactccttatattggcttttcttccatccccatcttaactcttcctgctcctgtaggtcattctctagacagactgcttttactcaggttcttacctcagccattgcttttgggagaacccaaactaagacagcagtcattagagtacttagtatttaaaaggtagataagagttcgggaattgaaactggatgatcaccaaaggtgtgagtatatatagaaaagaa

SEQ ID NO: 17294 - DNA, 353 bp, Homo sapiens
agtacttctagaattaattaaggcgggggagaggcttgggagtgggaactagcacccgctgtaaggtctgccataagacttaatgtttgtctccaatgggatggagtcctggcataagcaaaattaatattgataaccgttattattatttaaaatttgtaaatattgtaaaatattttagaaaacatctactttgaaacatctactgggcgagaccaggagtgatggctcagcctgtaattctggaatttcgggaggccgaggcaggaagattccttgagcacaggagttccagaccagcctgggcaatgtagcaagacgctgtctctatttatacaataaaatttttttaa

SEQ ID NO: 17295 - DNA, 451 bp, Homo sapiens
taccgggccccccctcgagagtacttctagaattaattaaggcgggcagattacttgagcctaggagtttgaaaccagcctgggcaacatggtaaaaccctgtctctaccaaaaatagaaaaaatagccagtctcataacccagtctcagaataaatagatagattaaaaattttaaaaaaacctcaaaatggataaatttgtgtgaaagtaacataactacctcctagaaagcgcttaccactaaagagagacaacaaaattgagcactctgcaatgtgaaattcaccatgtctgagtatcaataaaaattattatacagaatagtttatattttatacagaaaataaaatttatacagaaattttatttacttatataaaatgttcttttatacaaaaaaattatacagagtaggaatctgaaaaatgcaatccatacctgggagaaaa

SEQ ID NO: 17296 - DNA, 621 bp, Homo sapiens
  misc_feature 19, 20, 192, 196, 215, 221, 224, 231, 237, 244, 246, 282,289, 292, 307, 325, 350, 356, 374, 387, 388, 389, 393, 407,408, 424, 439, 448, 449, 462, 472, 481, 486, 496, 498, 501,506, 513, 520, 523, 527, 545, 551, 553, 562, 563, 565: n = A,T,C or G
  misc_feature 566, 567, 572, 578, 579, 582, 583, 594, 616: n = A,T,C or G
gtgccgggccccccctcgnnagtacttctagaaattaattaaggcgggcgtggtggtgcactcctataatcccagccacttgggaggctaaggtaggagaatcatttgaactcgggaggcggaggttgcagtgagccgagattgtgccactgcctgggcaacagagtgagactccgtctcaaaaaaaaaaanaaanaagggaatttttgaaaatncttaanggngaaaaancaaaancttaacncntcaaattgtttggaatgcaccaaaagcagtcctganaaatttntanttacaaacataaacncctcctttaaaaaataanacaaattttatgggccaggcccggnggcttnccccctgcaattccaacncttttggaggctnnngccncaaatattttaggnnaagggtttaaaaacancccgggccacatggngaaaccccnnttttttctaaaanaaaaaattanttggccttngggcncttccttttntnccnccttntttgggnggggganaanttcntttaaccccaaagggggnggtggncnccggttaannannnccctntttttnnccnngggaaaaaagnaaaacccccccccccccccccnaaaaa

SEQ ID NO: 17297 - DNA, 135 bp, Homo sapiens
  misc_feature 60, 61, 86: n = A,T,C or G
agtacttctagaattaattaaggcggggggaggcactctgggagctataagagaacaaannccttatttgccatttgcagaaaatntgtaatatcaaaaatagatgaatcaagcaattgcaagaaaagcttatta

SEQ ID NO: 17298 - DNA, 415 bp, Homo sapiens
  misc_feature 397, 408: n = A,T,C or G
agtacttctagaattaattaaggcggggtaaattagtaacagcaagtttaggaaagagaaagaacttgtaggaactattggagggaatgagtctctttggggggtcctagtaaggagaatgtcaaattaaatccttcccagctggttgctcaggaaaagattctcctgtttagcagttaagcacacacaaaaaagtcatgcaatggccttccctatagtggtgagatcacattaaatagctacttcaagtgtcactaaagcattataactgctcttaagtgtatgtagaatgagattactttagaaaaacatttcaaaaaatcatatgcttttcccatatgttcagtatttaatgttgttggacaatgactgcctaaaacttcatacgcagcaaaanaaaaaaaaaanaaaaaaa

SEQ ID NO: 17299 - DNA, 269 bp, Homo sapiens
agtacttctagaattaattaaggcgggacaagatagtttgggctagagtgaaatgccttggaaggctgcatactgaacacattttaaaggtagagcagtataatttccagaaagacagaatgtgggatgtgcctcagagaaccatcgagattgaaaaaactacctattagatactatgtttattacctcagcgacaaaataatctatacagcaaacctctgcaacacataatttatctatgtaacaaacctgcacatgtactcccgaaa

SEQ ID NO: 17300 - DNA, 428 bp, Homo sapiens
  misc_feature 22, 23, 24, 194, 199, 205, 206, 212, 228, 233, 257, 284,334, 344, 347, 349, 373, 384, 392, 399, 410, 415: n = A,T,C or G
tgggtaccgggccccccctcgnnnagtacttctagaaattaattaaggcggggtgcttgtaatcccagctacttgggaggctgaggcaggagaatcgcttgaacccgggaagcagaggttgcagtaagtggagattgcgccattgaactccagcctgggcaacaagagcgaaactccatctcaaaaaaaaaaanatgtntgcttnnttttgngacttacaaaaaattnacttnggtttttgcctgctcatggttttnggcttttggcaaaaccatttcctgtgnggcttttcctgatgtgcctttcttgttcctgtgactgtttgggggaactnttaaaggagngtntnttcccgtccccctaattaaaatcnctgaaaatgangcctaaangggtttnttttaaaccanccccnaaaaaaaaaaaaa

SEQ ID NO: 17301 - DNA, 306 bp, Homo sapiens
atgtcttcccaccgaggggtaaagagagttttccctttcccatctccttcctatttccttttgaggttcaggtatccctgggagcttaatcccacattttctgggactaccacaggttttcatagatgtttactcctttaaggcagtcctctaaccttcaaatcacaaacaataaagaattaaatttttggctttgtcacttcagtaaaattggacatttttcacacctggacttattaaattttcccctgcagaatattttgccactggagtgagaagagggattaataagtatcagtttttagt

SEQ ID NO: 17302 - DNA, 286 bp, Homo sapiens
  misc_feature 13, 35: n = A,T,C or G
gagtacttctagnaattaattaaggcgggcacagnaccattaagtacaggaagatctctccagctctgtggttgaagtgaatgagtgagacctgcttaaagaacaagacaccaattctgtggtcctcagcaggcacagacagcaaggctttgaaaggaaagaaatcaactctgcaccagttttgggcgatcaatggattaagataaaactttaacttctaagaattcaaattacctaatttgttcttacgtttttaaactaaaacacaaaaaaaaaaaaaaaaaaa

SEQ ID NO: 17303 - DNA, 390 bp, Homo sapiens
  misc_feature 11, 15, 27, 30, 33, 40, 41, 45, 46, 47: n = A,T,C or G
actggccgtcngttnacaccccgaaanaanggnaaccctnnctgnnngccgggccccccctcgagagtacttctagaattaattaaggcggggaaagctgttgtgagcattgggtggtggtgctggtggtgactctttacctgcttctctgattagaaagcaaacttccccaaaacaggcagaaatctattctatcaactttgatatctctccaggtttttaaaacagtgaccagcatctggttggtgctgaatgaatgttcctagaattaatggttaagtgagtaggaaatactgttccagttccattttctcctgtatttggagactctgtggttctctctctctctctttctctctctctctctctctctgtgtgtgtgtgtgtgtg

SEQ ID NO: 17304 - DNA, 756 bp, Homo sapiens
  misc_feature 15, 508, 527, 604, 605, 611, 622, 649, 655, 675, 688, 689,690, 699, 728: n = A,T,C or G
tcccgggcccccccntcgagagttcttctagaattaattaagggcggggggagtgttttaaaaagctatgtgcatatgattgccttgatgaaaatgaattatttaaaaataaagtcaggcagacgtaacacacacagaagtttctctggcaagatgttccctgctaccaacactaggtatttctgagtagtacaatttgggatggtttcttactttcatctctttcctaaataattggaacctttaaaattggttggaacacaaaaatagtcattattttacattaaagttaactataggtatctatgggtgccagagtttccatcttccttcttttgtcctgactttacctaattaatgccaaacctagaagtgtgggacagaaattagaaaaagtacatcttaaataagtccacttttctacttttcagatctgctaaaagatcagcttttatggccagatgtggtggcttacgcctgtaatcccaacactgggaggctaaggcangaatgtggcttaaagtcangagttcaagaccagcctgggaaacaaagcaagaccccatctctaccaaaagttaaaaaaaaaaaaatcccccggccnnaggggngttacctttantcccaacttttttggaaaggcttaggnggggangatcactttgaccccagganttcaagggctgcnnnggagctttnatcattgcccctacaatccacccctgggngaaagaatttaaaaaaaaaaaaaaaaaa

SEQ ID NO: 17305 - DNA, 417 bp, Homo sapiens
agtacttctagaattaattaaggcgggggacctatcaggactagcttcaggttcatggtgaattttccagttaatacttcattttccagtggtgtcagataaatgaggtacagctatatttttgaaagattacctgtttggcatttaacatcattcctctgggattttaccctgttttgaatggaaggtagcctttttgaaagaagatgagccacttttgtaaatttagtatgaaacattttgagctcctcaagaaatttctttataatttctaaataaatgggacctaattaaactaaaaagcttctgtacaccaaaagaaataatcagcagagtaaacagacaacccaccgagagaaaatattcacaaactatgcatttgataaaggactaaaatccagaatccacaaggaatgc

SEQ ID NO: 17306 - DNA, 346 bp, Homo sapiens
  misc_feature 34, 232, 253, 273, 278, 285: n = A,T,C or G
agtacttctagaattaattaaagcagggagactncttgtaaatatagttttaagaaggaatgctgtcaaagtattcaagaccagatgagataaaaacagcaaaaaaaaaaaatcttgcctttgggtggatcgcttgggcttaggagttcgggaccagcctgggcaacatggcgaaaccccatctctacaaaaaatacaaaacttagtggggcgtggtggtgtgagccggtantcccagctactggagaggctnaggtgggaggattgcttgancccanggagtcnaagctgcagtttagccgtgttcacgccactacattccacctaggccacagaggaagaccct

SEQ ID NO: 17307 - DNA, 434 bp, Homo sapiens
  misc_feature 33, 36, 42, 49, 50, 56, 62, 63, 65, 66, 71, 72, 81, 88, 90,91, 106, 107, 114, 126, 128, 133, 138, 142, 145, 147, 156,160, 163, 196, 200, 211, 221, 224, 225, 235, 243, 250, 284,333, 339, 342, 344: n = A,T,C or G
agtacttctagaattaattaaggcgggcggatnatnaggtcntgagatnnagaccntcttgnntnncacgnngaaaccccntctctantnnaaatacaaaaaattnncccggcncggtgaccagcncntatantcccngctnctntngaggctgangcanganaatagtgctggctccgggaggcggaccttgccntgancccatatatcnccgctgttanccnncctgggtganagagctanactccgntttgcaatgtgaaattcaccatgtctgagtctcnctcccccttatggggcccaatagtttatattttatacgggaaaataaancccctnccnangttttatttacttatataaaatgttcttttatacaaaaaaattatacagagtaggaatctgaaaaatgcaatccatacctgggagaaaaa

SEQ ID NO: 17308 - DNA, 523 bp, Homo sapiens
  misc_feature 1, 3, 14, 45, 270, 272, 281, 287, 289, 290, 296, 306, 307,308, 309, 317, 320, 326, 332, 335, 336, 339, 340, 343, 357,372, 393, 398, 399, 406, 407, 408, 431, 437, 445, 449, 452,454, 455, 457, 459, 466, 473, 479, 480, 482, 484, 492: n = A,T,C or G
  misc_feature 498, 502, 503, 505, 506, 507, 510, 511, 515, 518: n = A,T,C or G
ngngtacttctagnaattaattaaggcgggagtagagcagtaganaaaacacttaggttatttatgtaaccttacacttattaatacagatgcaaaaattctaaataaagtattaataaaaatcaagttatataataataatatactgctatagagtattttaattatgccctattctatatatttcaggtgtacaggctggttcactatcaagacatctattaccgttagtaatgaattatgataatactatgaataaaaacaaacaancnaaaaacaanaagggngnncccccncggggggaannnnaaaacccntantttganggcttnttnnccnnccnccccctggcccgtntttttaaaaaaattnggggaaactggggggggggcnaattnnaactaannnaaaggggccggggggggcttttnattttnaggccctnaaanttntnncntngggttgnttttccnggaatnnancncttatttncccccnttcnnannntanngggnccnttttt

SEQ ID NO: 17309 - DNA, 474 bp, Homo sapiens
  misc_feature 41, 47, 49, 65, 74, 75, 77, 82, 101, 102, 165, 177, 194,197, 208, 231, 256, 264, 302, 309, 319, 322, 327, 351, 375,390, 396, 401, 407, 413, 414, 419, 424, 429, 453, 461, 472: n = A,T,C or G
agtacttctagaattaattaaggcggggctgttattgcatntaaacntntcacctatgtcacggnccggagtcnncntttanggcagtaatatcacttgtnnaaaaatactgctgccaggatggcctggaaactcaatagcgccctaatcaggaaagagtagaancagagggaccanttagcagactcttgcantantcaaaattaantgtaataagggccagaggtggcntggtagaaaaaagactattggggtngacacaangaagattcaggagaaaaaccctccttaaaaaaaaaaanttttaangttaaaaccnttnctttngaagcaattgcatatgttaggcantttctccaaaatttaagtgctaancgatagattctgaanctgtcntgcanggaagntcttgnnccctnagaanagtcnttctctcactgacctggttgctgnattatcanctcaaatgccntt

SEQ ID NO: 17310 - DNA, 288 bp, Homo sapiens
  misc_feature 17, 28, 48: n = A,T,C or G
tggccgtcgttttacancccggaataangggaacccatgctgggtacncgggccccccctcgagagtacttctagaattaattaaggcgggcactggtttgagagaatgctgggattatataaaccatgagatttgacagaccgaattcaggtcttagtaaagggatcaaggacaataataatatttacacgttgatgtttcgatcgggctcagggtaaggtagttgtcagaccagtgttcatagaccctaggcaccagaggatttaaaacaaaaaaaaaaaaaaaaa

SEQ ID NO: 17311 - DNA, 622 bp, Homo sapiens
  misc_feature 34, 82, 96, 112, 127, 136, 147, 150, 156, 188, 222, 224,261, 263, 266, 449, 493, 529, 551, 576, 582, 607, 610, 613,622: n = A,T,C or G
cagctatgaccatgattactggccgtccgttttncacacaggaaaacagctatgaccatgatgccggggccgaggttttacncccaggaaacaccntctgaccatgattagntcagcactttgtttncccccctgnaagacgaatgnttncatatntgcgcctgttgactaaaatttgggtgatgtangatgaaagggaaaaaatttgggagcccatatgcngncgtttacatttctcatagtaaggaaataccctttttnanccnatggaagattacttattctttcatagttaaaaagataagcagttctataaaattatagagcttcccaaaatatttaaagatctggttatggataaaaacctaagaaacaattatatggtaaatgggaacctttaaaaaaatctgtaaaggatcaagtaagccataaccataaaaatatggacntatctaagaccagtcatgctgtcattaaaaaaataaatggtagnaagcttttataaatcaaccctgtttaagaaaaaatnccccccaatttggatcacaagntaaataaaaaccccagtttcttatntgcccnggaaaccataccaaaaaaaaccccnaanggngggttttgn

SEQ ID NO: 17312 - DNA, 267 bp, Homo sapiens
gtaccgggccccccctcgagagtacttctagaattaattaatgcgggtaggaagaaaggtctcttttaagaaccggaacgaaccctgggcctgcaacccacatagatttgggcttcaaaattatactttcaattataatatctgaatgttccaggcactccaaaccaaagaattaacataaaaattggcccaggcaagagcatctagaaaaagcaaattcatccccactttttaaaaccaggtcatataagatcacaccacagataa

SEQ ID NO: 17313 - DNA, 427 bp, Homo sapiens
  misc_feature 30, 38, 39, 48, 66, 67, 69, 72, 73, 79, 87, 88, 89, 94, 95,99, 102, 105, 106, 107, 108, 109, 112, 116, 118, 126, 128,133, 135, 136, 139, 151, 152, 159, 160, 181, 190, 193, 194,207, 210, 212, 216, 217, 219, 233, 249, 254, 257, 258: n = A,T,C or G
  misc_feature 273: n = A,T,C or G
agtacttctagaattaattaaggcggggcncatggggnntgaggaganattgaatatcacgtctanngnctnntgaatnatgaactnnnaacannaaancgntgnnnnnttncatntncttaactntnctcancnntgncctcagacactnnacgcccnnttggtatgcacctccccatancccctcctnctnnccccagggaactnccntnctgnntnctgtgtgtgattcngactaagctaagtatntcttncanntggaatcacacggtntttttctttttgtgaacggtttatttcatttggcataatgtcctcaagattcattcatatctttccatatgttagaatttccttctttttaaaggcagaataatactccattgtatggatatgtcacatttggtttacccattcatctgtttct

SEQ ID NO: 17314 - DNA, 382 bp, Homo sapiens
  misc_feature 1, 3, 14, 319, 328, 342, 350, 351, 358, 366: n = A,T,C or G
ngngtacttctagnaattaattaaggcgggtcatgaaaaactaaaacttaaactctttgtagcagagcctatctggcaggatgcgctgatttgagaaacagttgttgacaacaaactttcatggctctgcaccatttgagttatatttctctctgtgctctcagccaagagtctgtcttttcaataacagcaagtcttggcaaaccagtaatgattttgcttcccactagatacatttggatgttttcaagaagcctaatgttttgctttttttttttacttgttttcaaggggactgatttatttcctcttttaattngcttttaanaacataaaacaaancaaagtcnncccagtnttgctctnttacactcctgaacaa

SEQ ID NO: 17315 - DNA, 349 bp, Homo sapiens
  misc_feature 21, 33, 293: n = A,T,C or G
ggtaccgggccccccctcggnagtacttctagnaattaattaaggcgggtcagatagtggtataatgtatttccagccccagaagcaagtgattaaggttatcaattacattaaaacaaaaacaaaacataggctaaaatgaactgaccacttttggaatagaatcctatcatcctgtggtgatactttcagagttacctggctaggtgtggtgcctcacgcctataatcccagcactttgggaggccgagccaggaggatcacttgagcccaggagttttgagactaggctngggtgacatagtgagacccctgtcctacaaattaaaaaaaaaaaaaaaaaaaaaaa

SEQ ID NO: 17316 - DNA, 273 bp, Homo sapiens
  misc_feature 18, 19, 48: n = A,T,C or G
tgccgggccccccctcgnnggtacttctagaaattaattaaggcgggnattataatgctttgtcaccccatgcaaaaaatatttaagttggaagagacactatcaataactacagtgatcatcacaggcatagcctgggactccctggggcagcctgagatatatggtcactctatctttctcaccttggatagtccaatcattgtttcagaccgtaacatcttcaattacattaaagtcaaattctctattttaccacagacttaccttcag

SEQ ID NO: 17317 - DNA, 590 bp, Homo sapiens
  misc_feature 1, 14, 38, 349, 353, 358, 373, 386, 415, 419, 426, 442, 445,448, 449, 451, 458, 490, 506, 511, 532, 551, 567: n = A,T,C or G
ngagtacttctagnaattaattaaggcgggaaaagatncagcacaagatttaagagctaaaactataaaactcgtagaataaaatatagtagatcttcatgactttgggttaggcagagtcttctcagatatgataccaaaagcacagttaacaagagaaaaaatagataaattggactttcagaaacttaaaagctcttgtgcttcaaatgtcaccatcaagaaagtgaaaaaataactcacagaatgggagaaaatatttgaaaatcatatatctgacgagacttgtatctagaaaatataaagaattcttggccaggcatggtggcttacatctgtaatcctagcncttnggganaccgaggcaggcctntcatctgaggcangagttcagaccagcctgaccacctggggnaatnccctctnttctaaaatttaaaantanccnngnggggtgnccccctttattccacttcccggaggctaggcnaaaaattcctggattngaagncaaggttcttgaaccaaattnccccggctccccccggggnaaaagggaacttttcnaaaaaaaaaaaaaaaaaaaaagg

SEQ ID NO: 17318 - DNA, 405 bp, Homo sapiens
agtacttctagaattaattaaggcgggtggaacacctgatgtcaggagttcaactccagccttggcaacagagcaagactccatctcaaaaaaataaatagatagatagataagatacagagaagattggcatggcctctgcatcattatgaatactaacataacagtgctaacttgataggtatatttttgtcctgcagaatgctattttcaatgacatgacctctcaaattcagttttttaaattaaaccttttattttgagataattgtagattcaaatgcagttataagaaataatataggccaggcacggtggctcacgcctgtaatcccagcactttgggagactaaggtaggaggatcacttgagcccatggtgtttgagactagtctgtacaacata

SEQ ID NO: 17319 - DNA, 394 bp, Homo sapiens
agtacttctagaattaattaagggggttggaagataagtaatctgctggagatggggtgtggacagaggtcctgaatatatggagaagctctgaaatagcgattaggaaaaagggataaatcagacactgaagtgcttaaggtttgagatatgaattttctccagcagtcctcagcaaccagcaggtaggagtaaataactgaatgattccaggatggaaggtggagccccagtaatgaggaggtcctagatgtgagcctcacgcttaaatagaatgacacagtcaagtaactgagctatatgtattatctgacaaaacatttatagcttattttgtacaatttttatgtgatgaaaagttaatttgagagaaaagacctaattagctggaatt

SEQ ID NO: 17320 - DNA, 484 bp, Homo sapiens
  misc_feature 1, 3, 378, 408, 423, 444: n = A,T,C or G
ngngtacttctagaattaattaaggcggggacaggaaacaatatagatgtagagctgcacaaattctcttctctagctggaaaagtaaccaaccatgtgtacctttccaagatgggttgaaaaaatagttctactgaacacatacttcaactctgtattttctgatttcttgccctctgaactggtatataacattaaaaaaggatttctaaaattcatatttaaccttcccttcaaactccaaacaggcacctgaggtcaggagttggagaccaacccggccaatgtggtgaaaccctgtctctattaaaaatacaaaaattagccgggtgtgttggcgggcacctgtaattccaggtacttgggaggctgaggcangagaattgcttgaaccccggaggtggaggntgcagtgagctgaanatcatgccaccgcactacagnctgggtgacacagccaaacactggcaaaaaaaaaaaaaaa

SEQ ID NO: 17321 - DNA, 401 bp, Homo sapiens
agtacttctagaattaattaaggcgggaaatgacactgatgatcttaaaactgcattggaagcaagaaagagaaataacaatgtaaaagcctatgaatggagaacaggcttgagaatatcataccattcaaagaatgtgactgaatagacgataatcaaaattatagaaagtaatagaaatccatcattgagataatagtcatgctggaataggaaaagaagaacacatgcaacagacaaatattcaaagataaaatagaataaaccattcctgaattgaatgaggacctgaaactatagatcagggtttatcatatagaaaaaactgtattaaagaacaaccaacattcagaaacatcctagtgaatttattgaactctaagaataaggaaagaacactt

SEQ ID NO: 17322 - DNA, 608 bp, Homo sapiens
  misc_feature 11, 15, 21, 26, 32, 40, 41, 44, 45, 47, 49, 68, 71, 75, 442: n = A,T,C or G
actggccgtcngttnaccccngaaanaagggnaaccaatnntgnntngncgggccccccctcgagagnctnctanaattaattaaggcggggaataggattctaagtcaaatgggtttgagaaatgttgtgtaaaatacaagtgtaacatatatcatagcatgtgccactactgcccagagatgtacttgcattttagtatattgaagaccataacaagtactcttataaatttaaaatccattatattctatttaactcttgcttgtttaaacttattcaattacataatttcttttttcctatgtaatctctttatatctggctgaactcttatcactaggacagaatttgggaaatgctggcataaaactattttaaagtttgatatatcacgtgtacaattttcaatattgtttcctgcaattgttctactatcttanagattgtgtttactgatgtagtgggtatactgtactctgtgatctcacaatgcattatttaataatagtcaaaatggaaaattaaattaagactgctagactgtttcacctagtggtttctgtgtttcgtccattatcagtctttctccccccactcccaccacct

SEQ ID NO: 17323 - DNA, 307 bp, Homo sapiens
gggtaccgggccccccctcgagagtacttctagaattaattaaggcggggtgagggggattctgaggccccagccccgtcggggcagctggagcacttgcgccacatctgggcagaaggcactgcacacatgggacagcctcgttggtggcttcatctcagtcaggtgaaaggcgaagcatctgatctccttgtaaatctgtttagaccttgtgttgttaaccagacatggtttttcttgtgtgtggaactatgatccagtgaaaaaacaaagcaaatattctactgttgctatacttttttttttt

SEQ ID NO: 17324 - DNA, 223 bp, Homo sapiens
  misc_feature 32, 216: n = A,T,C or G
aattaaggcgggttactcatcaggacactgcncaaagacttagtcacattcctcttaagtctacaaatttaccagtacatttccacatttttctaaaactatctttttctatataagtgaattgtgacacttatgaaatagtcatccaatgcctacatttattttattttcaaatttattttggtaaaatagtttagaaaacattatatattttgnaatattt

SEQ ID NO: 17325 - DNA, 363 bp, Homo sapiens
agtacttctagaattaattaaggcgggtggatgacttaaggccaggagtttgaggctagcctggccaacagtgaaaccccatctctattaaaaatacaaaaactagccaggtgtggtggcagacttctatctggcaaatttctattaatttctcaaggccaggttcaaacatcacttcctctgagggagctttcctctctctcaatctatctgctgaacttgtctttcaaactaaattgtgggcagctgtcccactccaatcagttctagcactggcttaaatctctgctttcaccaaaagctttaaaaaataaaaataggccgggcgcggtggcttggcctgtaaccccagcactttgggag

SEQ ID NO: 17326 - DNA, 468 bp, Homo sapiens
  misc_feature 28, 36, 39, 66, 68, 69, 73, 82, 91: n = A,T,C or G
aaacagctatgaccctgattactggccntcgggccncangaaacaagtctgaccataattaactgncnntaantaaattccnaaagtgcanaaattgaagtggtaaatgagaaccagagctgtaaggggaagcatacttcaactgccctgaggacatttttagaccttggtggggctttcgtttaaaatggcctaacagagatggatgataggttgtttaatgcatacagtttaggatttcttagccccctgtataaagccaggatcctgcaaggatcataacctcagtgaaagcatagatgagaaaataaaacctctccactgacaaaaggagaaaataaggaagcttgtgtttcttggcttgggttcctgggaacaggggagggatgtgtgtgcatgtgtaggatgcctctcctgagaatttttaatcaagtgcctcctctcaagcaggtttcagtttttaatctg

SEQ ID NO: 17327 - DNA, 318 bp, Homo sapiens
  misc_feature 23, 25, 36, 264, 294: n = A,T,C or G
tgggtggccgggccccccctcgngngtacttctagnaattaattaaggcgggaatactgaaaaaaagagaaaaattaatgaaaactaaatctgattctctgagtaaataagtacaattaataaacctatattcagaatagttggaacaaaaaaagatgacacaaattaccaatgtctaaaatagaagagacctcacaggtattaaaaaatactaagagaatattttaaacagcttttagtccataaatcttaccaccttcaagnaatagattaattccctggaagaagtaactncccaatggccccccaaaaaaaaaa

SEQ ID NO: 17328 - DNA, 503 bp, Homo sapiens
agtacttctagaattaattaaaatcaactactagcatgattacattggaatggcaggaaatgacatctcagccatttgagggcttccctcacaagacatgactcaggattctaggatcttgcccaatgtgccaaagcatggagagtgcctgtcctgtcatctctcttccgtctgcatgagtatctgcgggatgcccagaaaagcttactctagatggggctgctccatggcttctgtctgacctacaatgccaaaaatatttgagaggttaggagaacacagtatctcaagctatacctcaacacatagccctcctgtctgagctttctcttctggccactataccaagggtattcaagatcacaggaatcctgtcatcctcacacaccccctttttagtgatagggaggtatttgtctcatccttcttgttgctctcaacgtgtctttctcctcttctgggaacacctagcagaatctagaagagtttgaaccattacataa

SEQ ID NO: 17329 - DNA, 414 bp, Homo sapiens
agtacttctagaattaattaaggcgggttacgcttaaaccatacgacggctgtgcggcatcgttttcttttctgcctcaatttatctcactagcagtaaccccgagttcaagtcagccacacagggaaggtggatttccctgcagtcagggcaccacaggctccacttcagaagcaacggcacgcagaacccaaaacaaagaacacacagcatacacctgccctgggcatctctgacatggttggtgctcctgataatctgccttttaaaaaagtgaagactagctaggtgcagcagcacatgcctgtaagcccagctactcgggaggccgaggcaggaagatccagagcccagttcaaatccatcctgagtaacagcaagacctcgtctctcaaaaaaaaaaaaaaaaaaaaa

SEQ ID NO: 17330 - DNA, 269 bp, Homo sapiens
  misc_feature 14, 26, 33, 37, 44, 45, 47, 56, 59, 60, 65, 66, 67, 69, 70,79, 115: n = A,T,C or G
tggccgtcgttttncacacaggaaanagatatnaccntgatgtnngncgggaactntcnntatannnanngaaagtgtnagttggtacaatcgctttggaaaagtatatggccgnatccagcaaagttggaaatacatagttacattgaatcagaaacttctgcagataagcctaaggagatgtgtgctaatatatccactgtagcattgtttgtttgtgaggaaagcaaaaacaacttaaataaataataatatggtatgttagtagg

SEQ ID NO: 17331 - DNA, 245 bp, Homo sapiens
  misc_feature 76: n = A,T,C or G
gtacttctagaattaattaaggcgggctgaaggacagttctgcttattttaaggacaaccaagaagttgatggcantggctttatatgtgaacttcatcataaaatgtacttactgctttcctattccttaatagagatttgtctcttgtattttcttctgtttaccactcataaatggaatgtgaaggacaatgatcacagctcacttgcgtcacattcctccctcttgctgtgctaagccctt

SEQ ID NO: 17332 - DNA, 684 bp, Homo sapiens
  misc_feature 515, 555, 595, 596, 602, 607: n = A,T,C or G
agtacttctagaattaattaaggcgggggaagaaaagatactctcattgaagcattatctgcaaagtgaaagaattaccaaccaaatattaactgggctgaaagatgtgtatcattaacaggaagcttaccctgatttttaaatgctgtataaattttccttttcaacccaattctttactttctctaactgggacaaggcagaagcaaaagatagacagcaatggaatcagagataaggcaagaaggcaatatactcaactgtgttttcctatcacttctggcctattttgaaaacagtactatttatctttgttctatttattaacccagaaaacatctgagtgatgatgccagtaagcactgccctcattgagttaaaaatctaataaagacaaagtgtctttataatagctacaaggcagaagtgaaaaaccctacgaaagaggtaaaacatgatacgggaggcacaccaggtactaaaaagtatgtacaactggtgaggatgaagctaangttgggtggggatttatgatgtcaaaagtattgagttacnaaagaactaaaggtgggttttgagtaaaatttgaaattcnngggaanaaaangttcaaagaagtggaggggcctaacttaaatgaatctgcttagggtaaggtttttaaaaaccaaaccaaaccaaaaa

SEQ ID NO: 17333 - DNA, 267 bp, Homo sapiens
  misc_feature 5, 20: n = A,T,C or G
taganttaattaatgggtcnggacctataaggtgtacaattttaaaatttttcttcaagatcccttgtaaatttttaagttttattttcaatgatgcccagaagaataacttaccaaatattttttatcaaagattatttctgctgtgaatctgacctagctggaacaaacatatagtatagaaaagtttttatttctatattgctattaacataaaatcatgtgtgcacacaactcacaggaaggaggttgaaaggggttaaatat

SEQ ID NO: 17334 - DNA, 397 bp, Homo sapiens
agtacttctagaattaattaaggcgggggagggaggacacaggaagctctaaaaaggcgacttaaaaaacccaaattgcattctggggtcacttagtttatgggacctctgttctttacattttaaaagccctcgagggatttcctatattatcatcccaaagacaatccaaaatttcccccaaagaaggtcaaattacatattctacgtaggcgccttagacagagaaatgtctaactttccatatgaaagggtaagctctaattatatggaaatgttctctctctggccgatgccagctaacggagcccttctatagctatttttatgtttcaaagacaaagcgcttgactatgtggcccgggtgctgggcttctggaaaaaaaaaaaaaaaaaa

SEQ ID NO: 17335 - DNA, 211 bp, Homo sapiens
  misc_feature 1, 23, 27, 33, 36, 37, 49, 50, 52, 58, 59, 62, 71, 89, 98,112: n = A,T,C or G
nactggccgtcgttttcaaccgnaaanaaccgnaannaaaggctggctnncnctgccnnccntgcccagtncttatagaattaattaangcggggctnggtagcacaggatntgaggccaggagcttgaggccacagtgcagtgcactatgattatgcctgtgaatgtgtgaatagccactgcactccagcctgggcaacatagcaacatc

SEQ ID NO: 17336 - DNA, 336 bp, Homo sapiens
  misc_feature 22, 47, 50, 59, 70, 86, 101, 110, 142, 158, 165, 295, 296: n = A,T,C or G
gggtgaccgggccccccctcgngagtacttctagaaattaattaatngtnttttatcanggggtaatgtngcttagttttgataantgtaccatgtctatntaagatgtngatactaagcaatcctctggcctatttagcantggcttctaggaaatntataatnacttcaaaataaagtttttctaaacgacaactaatccagttatttaacttattgtgaaaaaggaatggctgaacattagctggaggaattacgtctgacagcagcactcatatcccaacattcaaccatnnagtgttaacactttacttcacctcctttcaattaccaaaa

SEQ ID NO: 17337 - DNA, 357 bp, Homo sapiens
  misc_feature 132, 333, 336, 343, 346, 347, 348, 352: n = A,T,C or G
agtacttctagaattaattaaggcggggaagaaagaattcatgaggaaatcatttaaatattggatttttaaatatatgacactgctctcaattactaggtgctaataagacatacataacctaccatatanccaaggttttaattatcagatttataatttgaaactgaaggaactttagttcataaaagtgaaaaagataaaatgaagtccaatgaaagtaaaatattatctttgcttccttgattaaatctatagttaatttttactaaagtatgatatatgttcccattatttagttttgtttagggaagtatataagatgagagaaanaanaaaaaanaannnaaanaaaaa

SEQ ID NO: 17338 - DNA, 316 bp, Homo sapiens
  misc_feature 129, 136, 141, 143, 145, 161, 169, 171, 174, 175, 176, 177,178, 179, 183, 185, 193, 194, 195, 204, 205, 207, 208, 211,213, 219, 220, 222, 223, 224, 228, 229, 231, 234, 240, 241,242, 245, 246, 251, 252, 253, 255, 258, 263, 268, 271: n = A,T,C or G
  misc_feature 276, 277, 279, 290, 297, 302, 303, 306: n = A,T,C or G
agtacttctagaattaattaaggcgggggttgcagtgagccggggtcgtgccattgcactccagcctgtgcagcaagagtgaagctctgtctcaaaaaaaaaaaaaaaaaaaaaaaaaaaaaagggggnttaattnccccncngnttttttaaaaaaaaantttttttntnccnnnnnnaatncnagggcttnnnccccgtttnntnnaancncccccnncnnntttnngnaantttttnnnccnnaaccnnntnaanaactnaaaanaanggggnntnccccccccccngggaaanttttnnaantttttttttg

SEQ ID NO: 17339 - DNA, 435 bp, Homo sapiens
agtacttctagaattaattaaggcgggaggaggaaaactccaggcattctcaaaaaaggtattggcacaaaaaggtaagttcctcggatagcatttctctaaattcaaatctagatatggcttgttcagtctcagactggccttcactgatagagaccactgtgtaagaagttagtgtacttaggcagttttggcacctgtataatgcccttaattcattccttttgaaagataatttgttgagtgctttccgggtgccatgcactgtgcttaattgctcacatccgttacctcctttaatttaatcttcaaaatgatcctctattttgcattggaagaagcaggtacggagaggtcacttgatggaggtccccctaattaagtgtcaaaataatagttctaatatttatatctcattcttctaattggcagtgg

SEQ ID NO: 17340 - DNA, 323 bp, Homo sapiens
  misc_feature 23, 307: n = A,T,C or G
tgggtaccgggccccccctcganagtacttctagaattaattaaggcgggggaaagggttgagaacatgataagaggtagtggagcagaggcttgcagtaatgaagacggctgtagtggaaaagggatgaaagggtagttggttctgtcttcagttcacatctctcactgttccacggcctcagcatcctcaatcacttcctcagctttaaggtgtttccctctcaggcatctttctagtcctcttctttctcttgaattccagaaccatgtaatgattgaggaaaggacccctgggcctggtaganaaactgggttcaggtt

SEQ ID NO: 17341 - DNA, 419 bp, Homo sapiens
agtacttctagaattaattaaaaaacacacacttgtaaagattttttgtaagagaagaaggtaaattctgttgcagacttactaaactgagtttcctgtgagccattaagaagtggagttatccagtaggcaatcagatacacagatctgaaagttcagggaggaaatcaggttggaggtctaagataacagactcttcgggccaggcctagtggttcacacctgtaatcccagcactttgggaggccgaggcgggcggatcacgaggtcaagagattgagaccatcctcgccaacatggtgaaaccccatctctaataaaaatacaaaaatttgctgggcatggtggcacacgcctatagtcccagctactctactcaggaggctgaggcaggagaattgcttgaacccgggaggcgg

SEQ ID NO: 17342 - DNA, 614 bp, Homo sapiens
  misc_feature 47, 52, 187, 330, 354, 358, 359, 374, 375, 380, 388, 389,390, 391, 393, 394, 397, 401, 405, 408, 409, 422, 427, 469,475, 501, 503, 505, 527, 547, 555, 581, 586, 604: n = A,T,C or G
agtacttctagaattaattaaggcggggtgaaatgcaaaagtcacanaccanttttatttgttagcaagaggaatggcaacccaacaaggatttggagcccaccaaacctgggttggaatcctgcctctaccactgaactttgggtgaaataattaaggctctctgtactccatttgcctcatttanagttggaaatattttcaactctagacggcttttgtgagaattacaattacattaaataacatgtaaaagcccttgcctctgtgcctgccacatggtaggcacattgtaagtcttggttgccttaatcttttgtcttaccaatncaaaaaaaaaaaaaaaaaaaatgngggnnccccccccggggggnnccccnaacggccnnnngnnatnggantttnatnncccccccccccanggaangttttttcaaaaacacgagactttaacaagcttgaactttanaaaaanaaaagctctctgaaagaggaagccancntntgaaggccaaaaacaggaagtngccagaaggttttcccgtgnttgggctnggaatttttggaaaaatccagggaanttatnttaataaccgtgccctgnttttaaaaaa

SEQ ID NO: 17343 - DNA, 257 bp, Homo sapiens
agtacttctagaattaattaaggcgggattgtcttccttctaacataatcctctgatttttatttctttatttttttcagcaggtaaagagcttcaaatggcaacacagcagtctgagcttataattcagtggaaaatatgttagatcccctagtgaatgcattccttggaaaccattcttggtttccaaatttgtaggtgagccgaatgcagttgtgaggacggaatgtaaaaaatttgagattaggtaactgtat

SEQ ID NO: 17344 - DNA, 227 bp, Homo sapiens
  misc_feature 35, 39, 43, 45, 46, 47, 52, 55, 60, 65, 67, 71, 74, 152,155, 193, 194, 209: n = A,T,C or G
agtacttctagaattaattaaggcggggaaaggangctntgantnnntaaangantcacnttcananaaantanggtactagctgtgcaaccccagattcatctcacatcattcttatccttatggctgctctccaaacttccttttggctntgngagggatttccaggagcaccttattaaaaatggaagannttattataaaagatnagccattattgatcattc

SEQ ID NO: 17345 - DNA, 328 bp, Homo sapiens
  misc_feature 20, 328: n = A,T,C or G
ggtaccgggccccccctcgngggtacttctagaattaattaagcggggagatacagagtattttaatgaacagtagatggttataagagtcaagagatgtacagagaaaatgctagtgattagagtttttagattattttaattttggtaactaattataattcctcagttaagattttttggcttagtgggcccttagaattacttcttcctgttagaattaaaagtgaaaccagaaattaaagtgatttaatttttttattgtggcaaagatctagtccaaatatctttgatggactttttgaaaacagactttattgttaaaaan

SEQ ID NO: 17346 - DNA, 698 bp, Homo sapiens
  misc_feature 617: n = A,T,C or G
agtacttctagaattaattaaggcgggaactggagtgctaggagaaggaaacaggaaaagggaattactgatggaggaagaggatgactcaagatgctcatcacagtaggatagagatataagccgttttcattaggttcctggttcagacacacatagctgacagctaacttaagttgttaacacattttgcttatttgaaatcacagcctgccaccactgtaaccacacattctggcaggcatgaaatttggctagatttttgtgggagataagctacactggaaagaaaggaaaaggggaaatttcagtggacccatttctctttattccaattctggggtgtaacaatcctttgcataactgagacgtgcaaacaagaataatcaatttggcatactgaaatcaatagtattcataatgtatactgacatgttattatttttcccattataaataacaaagctgtgattaagaaatcattattttagagcaaagggttttcagaggtagaagctaggggtatcaggagttctacctacgagacaaagtaaggcaagattagggtggggtgcggcagcaacatgtgggttttataaacttcaggtaacatttanaataaagccattttccatatgattgtcttccagagaagaccgaaaaatgcatttcaattcaatgtatttttattacattaa

SEQ ID NO: 17347 - DNA, 450 bp, Homo sapiens
agtacttctagaattaattaaggcgggatggggactcatctaaggctctgtgtcctgaaaagtcaagtcgggtggagggcaggggtaaaaaatcctcaacaccctggaagaaccttctcaacacccttggcttgtcttcaatttctggaatctcgtggccatgccagccctgaaagccaatggactgtgctccggacccagccgcttctccttgtgaacacaagcctccgtgtgcctgagagttcacctataaacatgggcactgctcattcaccagtcaccactggcaaagagcttgaagacattgactactttgggaaatctttaaaaaataaatttattcatttggaaaaattatcaaatgattgcacaagaagaggtgcctttcctgaacaggtctgtgatctgggcctctgggcacctggataattccgcagagaaggaggttgg

SEQ ID NO: 17348 - DNA, 408 bp, Homo sapiens
  misc_feature 184: n = A,T,C or G
agtacttctagaattaattaaggcgggccgcctgtagtccaagctactcgggaggctgaggcaggagaatggcgtgaacctgggaagcagaggctgcagtgagccgagatcgcgccactgcactccagactgggcgacagagcgagactaccttccacaaaaaaaaaaaggcaacacattttcngacaaagaaaagcaaaaggaatcggtcactggtgagccacatttctaagacagtctttaggctacaggaacgtgacgcccgaggacagccagaatcggggggcgtaaacaaggcagaaagggtggatgtgtcggttgatattcaaaagaaaaattactgaaaaattccttgacagactcatgactaatagcttcttgtacggttttctgcataatagacgtgga

SEQ ID NO: 17349 - DNA, 450 bp, Homo sapiens
  misc_feature 104, 116, 220, 240, 346, 355, 420, 437: n = A,T,C or G
agtacttctagaattaattaaggcgggagaggcaggttaaccagcacaggccattaaagagctggtgacacaggtgtgtgatctttacctaactccaccaccanctatgataactncaaaccaaaggcactagacccaacaatttctctttaacgatattattagtggccagacatggtggtggctcacacctgtaatcctagcactttgggaggccaangcaggtggatcacttaaggncaggagttcgagaccagcctggccaacatggcgaaacctcatctctactaaaattacaaatattagctgggcgtggtggcgcatccctgtagtcccagctactcangaggctgangcaggagaaccacttgaggtggaggttgcaagtcagctgagatcgcccactgcactccagcctgngtgacagtggaagactncatcttaaaaaaa

SEQ ID NO: 17350 - DNA, 420 bp, Homo sapiens
agtacttctagaattaattaaggcgggcggatcatgaggtcaggagatcgagaccatcctggctaacatggtgaaaccctgtctctactaaaaatacaaaaaaattacccgggcatggtggcgggcgcctgtagtcccagctactccgggctgaggcaggagaatggcgtgaacccgggaggcagagcttgcagtgagctgagatcgcaccactgcactccagcctgggcgacagagcgagactccgtctcaaaaataaataaataaataagaactacagaactaattttaagacccaaagttcttgagcattttttgcttttttaaagcaaaacaaacagtttcattccacaatgttctctctaaaaaaactggtgaatactgaaaatgtattttttcatttatttctatcagtggctt

SEQ ID NO: 17351 - DNA, 284 bp, Homo sapiens
gtacttctagaattaattaaggcgggcaatgcaataagcagtttacacataaccctacaataaccttgagaggcggctactgtgggataccatttggtagatcacaaaactgagacattaaaaggttatgtgatttgaggcacggtagatctcgcctgtaatcccaccacttttggaggccttggcgggcggatcacttgagttcaagagttccagaccagcctgggcatcgtggcgaaacaccgtctctactaaaataataataataacacaaagttagctgg

SEQ ID NO: 17352 - DNA, 493 bp, Homo sapiens
agtacttctagaattaattaaggcgggatcgtctagtctgcaggcggaatctggaggacacagagccggggcctgaactggcttgggaaacaaaaccatctcacatcttgtctctgcagtcagcaaagcattttctttcaaaagttgttttaaatttacttttattttttagagacaagatctccctatattgctcaagggatcctcctgcctcagcatcctgatcagttgggactgtagggtgtatcaccactgcctgcaaagaattcaagtagtaactggcctcaggataaagataaaatcaaggttgtggccatatccattgttaaggccccagaaaagtttaccatgttggggctgggtgtggtggctcacacctgtaatccccgccctttgggaggccgaggtgggaggccaggagttcaaggctgctgtgaactgattgcaccactgcactctagcctgagtaacagagcaagagcctgtctcttga

SEQ ID NO: 17353 - DNA, 282 bp, Homo sapiens
  misc_feature 267, 270, 272: n = A,T,C or G
agtacttctagaattaattaaggcgggaactgaaaaaagaaatgaaggtatgcttacatgggaagtattttaacacaacaggtaatttttgagtgctcattatgtccaaacactgatgagcacttagatcaaagatattattcttgtcaacaagaaacttacttagggtctagctgttgaaaagataacaggaaatttagagtctagctgttgaaaaaggaaaataagataattcatgaataattaatgaggggaaaaaaaaaaaanaananaaaaaaaaaa

SEQ ID NO: 17354 - DNA, 415 bp, Homo sapiens
  misc_feature 20, 27, 28, 30, 31, 32, 36, 44, 57, 62, 67, 76, 80, 217,377, 380: n = A,T,C or G
agtacttctagaattaattnggggggnnannnaggngtatactnaaaattattattntcctntttangaggttgangacngaaataaaccgaaagatatcttatcaatagtatcaaaaatgggatgcatactatccaaagcaatctacagagtcaatgcaatccctattaaaattccaattacagatttttcatagaagtagaaaaaacaatcctanaatttgtatggaatcccaaaagatcctgaatagctgaaacaatctggagcaagaagaacaaagctggaagtatcacacctcctgatttcaaattctattacaaagctataataattgaaacattatggtacaaatagacacatagaccaatggaacacantanaaagtccagaaataaacttacacatatatggtaaa

SEQ ID NO: 17355 - DNA, 437 bp, Homo sapiens
agtacttctagaattaattaaggcgggagaaggctcagggacaccccacttgagatttgggattagactaagtgtctcatcacttagtagctgttatttacacttcctaaaccttactttccccatttgtaaaatcagtaataatcgagcctaactcgtagatttgatgtgtgaaatgaaagaggaaacatgtaaatacaatgctggcataatccatgttcggtaattagtagctcttgtcaccattattatgacacttacacatccctaaatattatgggactaaaaatccatcaggatgaataaaagataaaaacagtacactcttcttaaggtcctcattttgctagcaatatttttatagtcaataaactgttctctctctaggtaaagaaattctggcttaagcattttgcactatattaactactgtcttt

SEQ ID NO: 17356 - DNA, 386 bp, Homo sapiens
  misc_feature 1, 2, 7, 11, 14, 15, 16, 18, 19, 20, 22, 24, 26, 28, 30,31, 32, 33, 34, 39, 43, 44, 48, 52, 54, 55, 58, 59, 61,75, 78, 80, 94, 100, 104, 105, 111, 112, 116, 117, 118,119, 120, 122, 123, 124, 129, 135, 141, 151, 152, 154, 156,158: n = A,T,C or G
  misc_feature 168, 169, 171, 177, 180, 205, 208, 209, 213, 214, 215, 225,236: n = A,T,C or G
nnccccngcgncgnnngnnntncnanantnnnnnacagnggcnnaatngctnannccnngnatacataggttgtnatnanctaaaatctaaccnacatgntaanntaaatnngctnnnnnannntaggnaatganggccanaaccactaanngntncnacctttctgnncncactgnggnggcccacattcccttaacaggcttntgnncaannnaccaaaactngctggaaacangtgaacaaacccagtaagtgacgtgcttccgcgagcgcctgctccctcccagctctgccgagacaaaagtgcaccgaggagcttctgagagtcaccagtcccacctcaccgactcctcgcggtcaccgggagctgcagtccttactcagt

SEQ ID NO: 17357 - DNA, 211 bp, Homo sapiens
  misc_feature 45, 164, 188: n = A,T,C or G
agtacttctagaattaattaaagcgggggcagctagggagtcctncgggctctgccgagccccttccccagtgtgaagtccagcctgttctgaagtcgcacagggccagacacctgggctgccacctcccctctggaaacagtcctccttgcctcggtgggtcnacagctccaggctattttcttccnctgaggatctgaaagttggaggt

SEQ ID NO: 17358 - DNA, 416 bp, Homo sapiens
agtacttctagaattaattaaggcgggggaatgaaggccatcactctgattaggacaccaggtgaaggttccaaggaagtaacaccaaggagctgagtcttcgtacccagtactcagtgtgtagactaccatccattataccaagggaaacagggcagcactggttataaacaggcacaagaaacatttaagttatactcggcttaatttttttaaaatacaataaaaacactacagtaataatgctgttaccatttccattccttgtctttggaatagtacaatgggcttagcattctctctttactgtgatgagtgacatattctataacaggaaaatgcattgctattaataaggaacctagatcatggggccataagcttttgtggacaagccccacacccagtttgagctg

SEQ ID NO: 17359 - DNA, 314 bp, Homo sapiens
  misc_feature 56, 58, 151, 200, 202: n = A,T,C or G
agtacttctagaattaattaaggcgggtggggaggactactgaggaaattgctcantnaacaaaaatgatagtgaagatctcagaatctcaaaaatcatcttttgtgtgtgtattttaatgattaagatgtactataaattcatgtacagnatttgggattctgcattataggcatcgtatgattaatggctttttaggntngatgaagtatgataattaacattgagaaggacaaaattaatgtgaagggacagaatgatttagataatatgtttcaaaagcttttgtcctaaaaaatgcattattaccattt

SEQ ID NO: 17360 - DNA, 407 bp, Homo sapiens
  misc_feature 104, 110, 118, 391: n = A,T,C or G
agtacttctagaattaattaaggcggggaagaggagaatagagataagaataaggaagagcatatgggcattgataataacgactttataaccttcagatgcantgaagnaatgatgntgcctagaagttattttatatgtaggtaaataggaatttggagaaaaagaaaaaaattactaagaaaatattaatgtgtttattcttgactctgatttctgatcagttttagcatcatattttatattttttccagtttacaattagacctataaaaatttctttggggcatctttttttcttttctagattagaaaacccataatattgtctatatttctataaaatacttactaattactaaatcatatttatcaaaatatcttatgttgnttagtaacataatctg

SEQ ID NO: 17361 - DNA, 202 bp, Homo sapiens
agtacttctagaattaattaaggcggggaaaggccacagcacactggcgctccagcaaagccaaatcatgtctcctctggccactgcggtcctctccttggtacatgtcatcccccagaggagtatccaaagctattccactatgcactcatcaaccctggcttgtcagccttggggaaggtcactttattcataaaaatgc

SEQ ID NO: 17362 - DNA, 166 bp, Homo sapiens
accgggccccccctcgagagtacttctagaattaattaaggcgggggtgtaggtaacttgccccttcctcttcctgagcacagcacaaggattaataatattgttggtattattataccaagatcctgaaggagtgctaatatagaaattttaaaaaaaaaaaaaa

SEQ ID NO: 17363 - DNA, 156 bp, Homo sapiens
ttctagaaattaattaaggcggggcaagcgtgagcttttaaagtgtgactttaacatttgaataaaaatcttcagaattttctctggatataaaataaagtagtcttttggatgccaaataaatttctaattgggttatcaaaaaaaaaaaaaaaa

SEQ ID NO: 17364 - DNA, 383 bp, Homo sapiens
  misc_feature 239, 240, 250, 256, 262, 270, 275, 280, 290, 294, 296, 300,303, 305, 308, 314, 320, 330, 339, 347, 348, 361, 365, 368,371, 376: n = A,T,C or G
agtacttctagaattaattaaggcgggggagaacttggattaacagaaattcacattaagatgatactgatgttttaattgattatacattgcatgtagaaatattaaggactctgtgtataggagatgtcatttgtaaggcagggacatgtatacaatgtgtggcacatccagaaaaacacaatggtagtgtgattattgtcttcagagttgtcatgtggaaggtgtttttttttttnnggtcccaaanggcaancttttntaataaanggggnggtancaaaaaggtntttntngatncantnggnggaaancttttnctgtaacccngggcctttnctttcccnngcaaaaaaggtantttngtncanttttncaaaaaa

SEQ ID NO: 17365 - DNA, 453 bp, Homo sapiens
agtacttctagaattaattaaggcgggtgaagttttctagacaataaggaacaagagccagtaaacaaatagttttcccattctgtcttgcggtcatggatccaaccaatagtcacccatagcagtgggtcaaattgaagatgcatcctttattgtattctctttcgttcttgcttctttcctccaattcttattcccacctctgggcccacagttgtcagtaaaaagacttgtaaacaaggctttgcctctgtactgctttccgttgagcccaggctaagaggttaaatgatttagtttgtccaggataaaaagattacttatctagattacttccctacatgaacagggaagatcaatatttctaaggaaattatgtccagattaaagagtattgctttatatagtaaatccttttaaacacatgccacctttagttagttacaaaaaaaa

SEQ ID NO: 17366 - DNA, 294 bp, Homo sapiens
gtacttctagaattaattaaggcgggggtgtataaggtgagagatgaggatccagtttaattctcctacatgtggcttgccaattatcccaacaccatttgttgaagagggttcctttccctactttatgttttcgtttgctttgttgaagttcagttggctcaataaaagcttcttaaaacaccattttggcatttttttctgaaagagagagtgaaggaaaatctacaaaccgcattgtgatctaaacaagaccgtcgggactagagaagcatggccaggagaagggacagg

SEQ ID NO: 17367 - DNA, 331 bp, Homo sapiens
  misc_feature 225: n = A,T,C or G
attaattaaggcgggagggaaatgatttctccaaggccaggacatggagtggagcggtaggatgcacagatccaaccacaaaccagattcagaaagtgtcagaccagcattggggcggccataggaagccaaagccacacccagcaccacctttctcctttctgagaaaggccatcaaagcaatatgagagcagctggcacaatggagtgatcctcattcaatanagagttctagcctgggcgcttcagggctacagttctgcttagagaagacactgtcgaccaggtggggtggctcacgcctataatcccagcactttgggaggccaag

SEQ ID NO: 17368 - DNA, 450 bp, Homo sapiens
agtacttctagaattaattaaggcggggcagaagaaatgctgttctgaattacagcaatagtatctgagattgacatgaacagtgtttgatttaatcgttaattgatggacatgatgtgtacttcaaaatatcctgcaaaatctaatcaaaacattgctaacttaccagtggttaccacctaaagataaagcctttgtggatgtagaaaaatagacataccttagcgagtacttcttagattacagagtcatggatttttgaaactgaaaacaatcaattcccttcttttatagttaggaaaagaatacccagagataatcagtgttttccctaaggcacacaaataatcagaatctctttctattgcagtacactgactttacaatgtaattagaaagaaacctataaaataaggcagaaattggatgattaaaattggagactggaag

SEQ ID NO: 17369 - DNA, 327 bp, Homo sapiens
  misc_feature 28, 29, 30, 36, 55, 86, 97, 101, 116, 125, 149, 162, 194,198, 206, 213, 218, 227, 244, 298, 300, 317: n = A,T,C or G
agtacttctagaattaattaagggggannngtcatngcaaggaggggagggaatntttcaccataatgaaccactccataaattantaacataaaanacancagttttattttctnatgattctncactcaaggctaggctcacccgantagttctacttgncttgacagtggtcacttgttggctacattaangtantaccgttngctgcangctanactcattanggatgtccagaactctntatttagtctaaaggccaacatttccagagtcagacttccaatttgtactcttntntgtatgtgtcatacctnaattaaaagc

SEQ ID NO: 17370 - DNA, 468 bp, Homo sapiens
agtacttctagaattaattaaggcgggcagatcacctgaggtcaggagttcgagaacagcctgaccaatatggagaaacccagtctctactaaaaatacaaaattagtcaggcatggtggtgcacgcctgtaatcccaggtactcaggaggctgaggcaggagaatcgcttgaaaccaggaggcggaggctgcatgagctgaggttgcgccattgcactccagcctggacaacagagcgagattccgtctccaaaaaaaaaaaaagcacttcaatctgtggtgggcaatttgtggataatttgaacagatggcagaaagccgaacaagcagatgaggaaacccaccaataaaaaggagatggaaccaaagatggaaacaattttttgggaaaacaagtgctttgtttccatgtgacacagaaggcacccacaacgctgggagtgagggaccgtgtcacggccatggtc

SEQ ID NO: 17371 - DNA, 442 bp, Homo sapiens
agtacttctagaattaattaaggcgggatagggattagagcaaaaaattagccattgggagaaaagaccaggatggacagagtttaggtccaatggtcacatgcaagccctaaaaggaataaagagaaatagatcaaaatggaaactgagaaggagtcagggctgctttccctcaggaatacagaattaaaacttagtcatgcatggtctttcaggaaatgccgcagctgctaagaaaagaggtaggcaacaagctggcagcagcaacaccttgagcacaaaagcaaaaaggaagaaggcaccttttccacaccagtatcgttgagctttggaaatctcagacagagctgttgcagtccaagagtcacttctgtatcaggacattatagtgcctttaagccctaacctcataaccacagccagggctatgtttggtttctcc

SEQ ID NO: 17372 - DNA, 445 bp, Homo sapiens
  misc_feature 29, 48, 59, 71, 78, 85, 87, 95, 133, 137, 155, 164, 180,195, 218, 224, 230, 236, 259, 270, 276, 291, 294, 301, 304,312, 319, 320, 334, 344, 347, 387, 388, 393, 401, 409, 415,423, 424, 425, 433: n = A,T,C or G
accgggccccccctcgagagtacttctanaattatttaatgcgggggnggaaagagggncctgggaagcanaaatttnttttttntnacatcgcncactccactccagcctgggcaacagagcgagactcctncttnaaaaagaaaaaaaaaaancctccaatncatttaaatcctatgncctttatatgtatancccccccatatccccctaaatgnctttgngagtgncctttncccttctctctcaccctttcaanccaggacatcnctggcncttatccaggttgancancccaaanctnaaaatccnaaatccnnaatgccccaaaatncaactttctnacnctgccctggcccccaaaggaacttctcattggaacatttnnggccnccaaattnatggattngggatncccaaccnnntcctatantccaaaaaaaaa

SEQ ID NO: 17373 - DNA, 499 bp, Homo sapiens
agtacttctagaattaattaaggcgggcgaaaagcagagaataaaatagttgaaaattcacttgctgttttcaatgtattatttatgcaagagaatgtgtaatttgggaaaaaagtaaatctgaaaactgaataatttaatatacatgtctttgttaaagttttaaaatattattttccatggtaaccattattaaatagagaactatggaatggactgacagggctggatggatgtagagtggaaacatgtacaaatgccctttctttacgatccttctcctatgaaaagtaatatctgttttgatgtttcagtgatgtttctataaaatcaaatttatagaatttgattgtataaattctaaatgtatgtaagtgttggtacttcatgttttcaggagtaactctattttgctacaacaaccttctgctgagctaagattatagatccaggagctaagtggctactcaagatacattctagtatccatctcttgttt

SEQ ID NO: 17374 - DNA, 430 bp, Homo sapiens
agtacttctagaattaattaaggcgggggtgggaggactgcttgagcccaggggttcgagaccagcttgggcaacatggcaaaactccgtctctacaaaaaattaaaaaattagcccaatgtggtggcacatcgactatggtcccagctattcaggaggctaaggtgggaggattgcttaagcccaggttgaggctgcagggagcagctgtgtttgcaccactgtactccatccagcctgagtgccagagcaacactgtctcatttaaaaaaaaaaaattctatagtttaattttaagaacagaatttttaaaagaactgtaatataaaagtatggaacctattagaagcctttgctaagtaaaaatttccttaatccacatagcctctaggtggagtatacaggcatggcacctttttgaaagattcct

SEQ ID NO: 17375 - DNA, 235 bp, Homo sapiens
  misc_feature 1, 26, 57, 82, 134, 208, 210, 229, 231: n = A,T,C or G
nggggttgcaatgtggtgagcagaanttgacactgtcccggctcctgtggctcttangaatgtgactgaatgattaatgaantctgtcagtaaccacaaagtaaacaaatcaggactctccctcaccagatagntcacagtactcctaatgagaagcatgattgcctggtttaccattgtgtttcacctctaaaataaataggttgananaaaaaaaaaaataaaaaananaaaa

SEQ ID NO: 17376 - DNA, 430 bp, Homo sapiens
agtacttctagaattaattaaggcgggaaggtgatggtggtaaatttataaaagttgctgtggatagttgatacgtaatattgtaaagggttttccctcgaggcctctcaaaggacttagccaagcagtgtcactaatatttgtgtcctgtgtgtgaggcagatgattcagattacctaccagtttaccagtgaagaaggagaaagttgttactttgccacagtctgtagagctgatagaaagttgttataatggaaatgttttcttaattgagaaatgaaggttcttttcacacagtgggcttcatttaagaatacatcatacatataaaaggttaatttcattctgtaagtctgccaaattaattcttttaaattatttttagcttaacttttaaaaccgtatcatatttagcaaacttaaggtggaa

SEQ ID NO: 17377 - DNA, 627 bp, Homo sapiens
  misc_feature 26, 27, 56, 70, 74, 85, 89, 101, 118, 122, 130, 133, 139,141, 146, 149, 166, 196, 199, 208, 221, 227, 230, 231, 232,234, 237, 239, 241, 245, 253, 262, 269, 315, 326, 338, 342,365, 369, 374, 381, 392, 399, 403, 414, 423, 446, 459: n = A,T,C or G
  misc_feature 485, 487, 490, 526, 553, 564, 582, 587, 595, 601: n = A,T,C or G
agtctgggtaccgggccccccctcgnnagtacttctagaaattaattaaggcgggnaggaaggcaaatgncgcncatccctatanggangcagaggaggtngaatctatggtttgttnactntatgtacntgntcctgntntctancanaatcccatctgtactcntcccaaaagtttcttaaggctgataagcanctnacagcactntctgaggatacanaatcantgnnnanaancncnaccntttctatncaccaacancaggcangcagtgagccaaatcatgaatgaactcccattcacaattgctgcanagagaacaagncacctaggaatncagntaacaagggaattgaaggacctnttcnagganaactacnaaccactgctnatggaanttanagaggacaccnacaaatggnaaaacattccatactcatggatnagaagaattagtntgaaaatgaccatacttcaccaaagnanttnatagattcaatgttattcccattaaactaccattgnctttcttcacagaattaggaaaaactntgttaaattcntaaaaaactaaaaaagancctgntagccaanacaatnttaagaaaaaaaaaaaaaaaaaaaaa

SEQ ID NO: 17378 - DNA, 411 bp, Homo sapiens
agtacttctagaattaattaaggcaggataatcgcttgaacccaggaggcagagcttgcagtgagcccagatcgcgccactgcactccagcctgggcgacagagtgagactccatctcaaaaaaaaaaaaaaaaaaaaaaacaacctgttttctcccccaataatttttggtctgtactaggtatggtggcacatgcctgtagtcccagctacttgagaggctgaagcaggagaattatttgagaccagcctgggaacatgacaagaccccatctctatgggaggggaaaaaaaaattggtttgttaacctcaattgggaaaaatataaaattctgttttatattgataagtaaaatatgtatgattcatataccttttctttattctcactgatttttaaagcatgcata

SEQ ID NO: 17379 - DNA, 488 bp, Homo sapiens
  misc_feature 458, 461, 481: n = A,T,C or G
agtacttctagaattaattaaggcggggtaagatttgccgagttcctataaacttttctaaatctaaatttcttatgttgccaaatgtttccaagtttataattggttcaaaagaggcagttatatgtgtgtgtgtgtgtttgtatatgtaaaaaatacatccgtaaatatatgtgtatgtaaaaacacatgtaattatatataaaatatatatgtatgtcttcagtttcttggtatctttatttttacgataaatttaaattttctgaaagagcatattaaagctagactgtacaagcttaggctttattttcactttaaatgatggacttcctataccatcttcagtacccagccttaataaacatctaaatatagacaggcttttttcattaatcattttttgttcctcaggttggcacccctttatccctttctcctcagattattttaaaggnaangtattaaagatttatttttnaatccag

SEQ ID NO: 17380 - DNA, 361 bp, Homo sapiens
  misc_feature 56: n = A,T,C or G
agtacttctagaattaattaaggcgggggttggcagaggagctcgtttgggctcanacactgctgcctctttctgtctgaaggtgttatgaagtgtacctatcttttgggacatagattccttttactccttcctttgtatttgtcacaaaataaattatagaataaaataaagacatatcatgaaattactcataattgcattacttgggaaggtaaaacataggtatttaacaaacatcaaagttttgggaggaaaaggcatttcataaacctagacatacgcaatactgaaggccaggggacttgtaagtgaaggggccataccgtggagccaggtcttctaaatctaaatctcatat

SEQ ID NO: 17381 - DNA, 589 bp, Homo sapiens
  misc_feature 30, 33, 36, 37, 40, 47, 48, 55, 59, 64, 66, 68, 71, 73, 89,93, 102, 115, 137, 138, 139, 147, 163, 196, 224, 559, 571: n = A,T,C or G
agtacttctagaattaattaagacgggcgnccntgnnttncttattnntcaatgngtgnctatntntnttntnctgcaataaacaatanactntgaattggnggctgggggatcnagaaactgacttcttccatgtnnnctaatcanttatcacagttgaagntcacagtagtacactgtctggccatgtcactanccggatgacaggcctcctcacatctcantggccaccaaggcacactgtgccactcccaaaagacccagatggtgcctcctctctatgaccccacagccgatgctctgcctccaacctctcagcttttactgggatgtcttccccagcttctaactgcaatgcaaattgaaaccatcagaccagttatctctggccgggcatggtggctcacgcctgtaattccagcactttgggaggcaggggcgggtgaatcacgaggttaggaattcaagacttagcctggccaagatggtgaaaccccatctctactaaaaataccaaaaattaactggggcatggtgggtgggtgcctgtaaatcccanctactaagggangcttgagggcaaaaaact

SEQ ID NO: 17382 - DNA, 455 bp, Homo sapiens
agtacttctagaattaattaaggcggggggatcacctgaggttgggagttcgagaccagcctggctaacattgtgaaacccagtttctactaaaaattaaaaaaattagcctggcatggtggcacgcgcctgtaatcccagctactgggaagctgaggcgagagaatcgcttgaacctgggagacggaggttgcagtgagccaagatcgtgtcattgcactccagcttgggcaacaagagagaaagtcaaaaaaaaaaaaaagagagaaaagaaaataaagaaactcccccttttgttgtagtatgaagacttcaaactataataatactagggtgggacgagtactagtaaatttatttccttttatttttactacattttttgcaatgtacatttacttttgtctgacaataaaaagctacttacgagatactttttagtttcataagtgggg

SEQ ID NO: 17383 - DNA, 705 bp, Homo sapiens
  misc_feature 106, 174, 194, 201, 270, 493, 540, 595, 623, 638, 654, 660,672, 674: n = A,T,C or G
agtacttctagaattaattaaggcgggcggatcacgaggtcaggagatcgagaccatcctgaacaacatggtgaaaccctgtctctactaaactacaaaaaattanccgggcgtggtggtgtgcacctgtagtcgcagctactcgggaggctgaggtaggggaattgcttgaanccgggaggcggaggctgcantgagccnagatcatgccactgcactccagcctgcaagactccatctcaaaaaaaagttttttgacccttgatccanagtagagatggtggaggacagtgggggtgcaaggaacagggatctgtctgcctggcagtaccagccccaaaagaagccagtctagatttgcaggtcatttaatcctggctatttcacgcttctcagcctctcagctacaggcagagctcaagacgatattttaaaatgtaattaattcaagcactggttgtcaacaatatatgcatctcttgttttggggcancaatgagtggtaaaggctttctgaggtgatggtgctccctgtttctnttgaaagaacccaagttattaaaaacgtatctttggccgggtgcggtggctcacncttgtaatccccacacttttggaagccnagccggccgatcacnagtcagggaaatcganaccatnctggctaacacngngaaacccgtttttcttaaaattccaaaaaaa

SEQ ID NO: 17384 - DNA, 421 bp, Homo sapiens
  misc_feature 318, 339: n = A,T,C or G
agtacttctagaattaattaaggcgggtggatcacctgaggtcaagagttcgagaccagcctgggcaacatggcaaaatcccgtctctactaaaaatacaaaaattaaatgggcatggtagcacgcgcctgtagtcccagctactcgggaggctgaggcaggagaatcacttgaacctgggaggcagaggttgcagtgagccgagatcatgccactgcactccagcctggccaggtgacagagcgagactctgtctcaaaaaataaaaccaaagatattgttatgtttatcattgtggaacatgcacctgttccacanatacaaaccactagttggctngtattcagctaaaaaaataaatattctgtattatactttgggagcaatttaagtaattttttcaatgtgatttttagtctta

SEQ ID NO: 17385 - DNA, 265 bp, Homo sapiens
  misc_feature 164: n = A,T,C or G
ggatttgtctggagtactctgtaaagacactttcattctttcaatcttttctcattgtttccagtggctgaactttcttaaaagtagtctaggccaaggcaggaggaactcctgactgcctgatccgcctgcctcggcctcctaaagtgctgggattacaggcntgagccactgcacccagcccaatgttaatttttaagaatggaaaaatgctttttaacttgaaataaaactacggggaaaattatagaattgaatgaaaaat

SEQ ID NO: 17386 - DNA, 739 bp, Homo sapiens
  misc_feature 282, 284, 285, 286, 287, 297, 304, 311, 317, 318, 321, 322,323, 325, 327, 330, 342, 343, 344, 345, 346, 349, 350, 353,354, 358, 364, 365, 366, 367, 368, 369, 370, 371, 372, 373,374, 375, 376, 377, 378, 379, 380, 381, 382, 383, 384: n = A,T,C or G
  misc_feature 385, 386, 387, 388, 389, 390, 391, 392, 393, 394, 397, 399,400, 401, 402, 403, 404, 405, 406, 407, 408, 409, 410, 411,412, 413, 414, 415, 416, 417, 418, 419, 420, 421, 423, 424,425, 426, 427, 428, 429, 430, 431, 432, 433, 434, 435: n = A,T,C or G
  misc_feature 436, 437, 438, 439, 440, 441, 442, 443, 444, 445, 446, 447,448, 449, 450, 451, 452, 453, 455, 457, 458, 459, 460, 462,465, 466, 467, 468, 469, 470, 471, 472, 473, 474, 475, 476,477, 478, 479, 480, 481, 482, 483, 484, 485, 486, 487: n = A,T,C or G
  misc_feature 488, 489, 490, 491, 492, 493, 494, 495, 496, 497, 498, 499,500, 501, 502, 503, 504, 505, 506, 507, 508, 509, 510, 511,512, 513, 514, 515, 516, 517, 518, 519, 520, 521, 522, 523,524, 525, 526, 527, 528, 529, 530, 531, 532, 534, 535: n = A,T,C or G
  misc_feature 536, 537, 538, 539, 540, 541, 542, 543, 544, 545, 546, 547,548, 549, 550, 551, 552, 553, 554, 555, 556, 557, 558, 559,560, 561, 562, 563, 564, 565, 566, 567, 568, 571, 573, 575,576, 577, 578, 579, 580, 581, 584, 587, 588, 592, 595: n = A,T,C or G
  misc_feature 596, 597, 598, 599, 600, 601, 602, 603, 604, 605, 606, 607,608, 609, 610, 611, 612, 613, 615, 616, 617, 618, 619, 620,621, 622, 623, 624, 625, 626, 627, 628, 629, 630, 632, 633,634, 635, 636, 641, 642, 643, 644, 645, 646, 647, 648: n = A,T,C or G
  misc_feature 649, 653, 654, 655, 656, 658, 662, 663, 664, 665, 666, 667,668, 669, 670, 671, 672, 673, 674, 675, 676, 678, 679, 685,686, 687, 690, 691, 694, 695, 696, 697, 698, 699, 700, 701,702, 703, 704, 705, 706, 707, 711, 712, 713, 714, 715: n = A,T,C or G
  misc_feature 716, 717, 718, 719, 720, 721, 722, 723, 732: n = A,T,C or G
agtacttctagaattaattaaggcgggcggatgacctgaggtcgggagtttgaggccagcctggccggcatggtgaggccccatctctactaagggtgcagaaattgggcaggcgaggtggcacgtgtctgtggtcccggctgctcgggaggctgaggctggagagtcgcttgggcccgggaggcggaggttgcagtggaccgagatcgtgccactgcactccagcctgggggatagagcgagcctctgtctccgaaaaaaaaaaaaaaaaaaaaaaaaaangnnnncccccccccnggggganccccaantccccnnttnnngntnttntttacccccccnnnnnggnnggnntttnaaaaannnnnnnnnnnnnnnnnnnnnnnnnnnnnnncancnnnnnnnnnnnnnnnnnnnnnnntnnnnnnnnnnnnnnnnnnnnnnnnnnnnnnncntnnnntnttnnnnnnnnnnnnnnnnnnnnnnnnnnnnnnnnnnnnnnnnnnnnnnnnnnnnnnnnnnnnnnnnnnnngnnnnnnnnnnnnnnnnnnnnnnnnnnnnnnnnnnnaantnannnnnnnatngtnncccntcnnnnnnnnnnnnnnnnnnngnnnnnnnnnnnnnnnnannnnnggggnnnnnnnnnaaannnnanaaannnnnnnnnnnnnnngnncccccnnnggnnggnnnnnnnnnnnnnnttannnnnnnnnnnnnccccccccnccccccc

SEQ ID NO: 17387 - DNA, 347 bp, Homo sapiens
agtacttctagaattaattaaggcgggggtgctgggagacagggacggagtctagggatcagtgttccaggactgggcggtcatagaatgggctgtgggagcccaattgtgaaaccctgaggatggggaggaggtgtggcccgggactatgtgtggggcttaaggttgccattccaggaggagggtagtcacagccctgtttgctgcgctcaccttgggctaggcgtggtgtcatgtggaccctcagctgtgttgtgcagtagaggtaggccagagaggtgcagtgacctacccacagtctcccaggcagtcagagacggacacatgggcagcatgggcggcaccag

SEQ ID NO: 17388 - DNA, 710 bp, Homo sapiens
  misc_feature 129, 142, 156, 161, 163, 167, 170, 179, 184, 186, 200, 203,205, 207, 209, 215, 221, 226, 228, 230, 231, 233, 237, 238,241, 243, 249, 251, 255, 257, 266, 271, 273, 275, 280, 286,288, 296, 300, 309, 312, 317, 319, 321, 323, 337, 339: n = A,T,C or G
  misc_feature 346, 350, 364, 393, 400, 402, 407, 411, 415, 422, 424, 433,442, 447, 480, 485, 493, 496, 499, 502, 518, 531, 532, 540,545, 574, 575, 593, 594, 636, 649, 650, 654, 661, 680, 682,690: n = A,T,C or G
agtacttctagaattaattaaggcgggacaatcgcatgaacccaggagatggaggttgcagtgagctgagatcgtgcgactgcactctagcctgggcaacagagcaagactccatctcaaaaaaaaaancaccaaaaaaaangtaaataacctaantcccntntaangtntttacctcncagtntnttttcaatcaatanttntnantntccccnttaaancaaangngnntntaannccntntaaaantnttcntnaaaaaatanctaantntncctgnggaaancnggaaaaanttcncaaaggganatnaaatntnantnggatccaaaaaaanantccaaancttnccaaataaaaggtnggaggcccggaaacaattttaaatttttnccaaaancntaacntccntaangcatttngnggaaacggnggcaaaatnttcancaaaggcttactaaactaaatgcctttgggcanatttntactatanatntanctnttcttttaaaaggatntttttttgcaaannaatttaanctatnaaaggcaaaaattggtactttatttttgnnccccccacccctggcggnngccccttacccaaatttaggttctcaacaaacattttttgcnaaaaaaaccaacnnggtntttttgnttttttaaagcccttgaananaatttttncccccccaaaaaaaaaaaaa

SEQ ID NO: 17389 - DNA, 360 bp, Homo sapiens
  misc_feature 349: n = A,T,C or G
tgccgggccccccctcgagagtacttctagaattaattaaggcggggacaggcgggggacagttgaagtgattgatttcaaggcagattcagactctaaattctgaggctattaaaaggaaatgataagcacttgtcttgtaatgctaaacagtatgatgaaaggccaggataaatatttagaagaactactctaaggccctggataaataacttcagctttttcaatctcagtttccttatccactgaatacaaaaaaggattgaattatatgattgttagggtatcttccagtactgacattctacggtttatgattcatcaagactttaatctcagaagccaaaanaaaaaaaaaaa

SEQ ID NO: 17390 - DNA, 615 bp, Homo sapiens
  misc_feature 6, 17, 21, 27, 67, 112, 177, 418, 459, 469, 471, 497, 501,506, 507, 511, 513, 515, 535, 548, 550, 562, 567, 585, 591,593, 596: n = A,T,C or G
cgcgtncgtctttccanccgngcaatnagagggtaacaccaggctgggtggccgggccccccctcgngggtacttctagaaattaattaaggcggggggaaaaatggaaagnaggtgagaagacctccccttcctctatactaatatcccacacatagcttcaggaacgcacatggnaaagaggctgaagctgaggaggaaacaaagctttttcagtcaaacaatccaatttcctcattctaactaagcatgtatacaattcaatcaaagtggcttttgacagccctgccacttgaatcgtactttgtcctttttaaacctcaaaggaattctgttaaaagaaccttcacaaaataaattctcttaatttgtaaatagagactcaaaaaaaagtatgactgaagataattcctttccnttacatccaatttctcttcattctcaaatcagtcaccttanttttcctttngnccaggttcattcctttggagctaaangggntaccnnttcnancncctagtttccattcaataanccttggggattcnanacctttttccgngcttnggcctccccaataaaganccggtnanaancccaaaaaaaaaaaaaaaa

SEQ ID NO: 17391 - DNA, 312 bp, Homo sapiens
  misc_feature 1, 290: n = A,T,C or G
ngtacttctagaattaattaaggctggttaacaaataaaacaggcttataatccaaaaaataatgaatcattcaaaattatgtgtattatgttcataacccggctttttgggtggtgcataataccagggctggaggggagaaggaattactccatttcaaactgtcatctttaccacttgctactttgactatgcccacacttctatgcttctaaatgaacaaactggacaatgtagggtctattactacccagaccttttcccaacccccagccccgtctgatgtctnctaagcagcagatccttacttg

SEQ ID NO: 17392 - DNA, 305 bp, Homo sapiens
  misc_feature 21: n = A,T,C or G
ggtggccgggccccccctcgngggtacttctagaaattaattaaggcgggttacttacaaatctaagttttcacatctgtatctagagacaataatctcgaccttacaagtctttggtgaagataaaggtaaataatgtacatgaaaacctctatgagtatccatccatcagtaaacctttaatacacagtagctgaatctgagagccaggccaaacctaaccaaagctgaatctgagggccaggttgccaccaaaccttctgcttctgtatttaaaagaatccttattagaaaaaaaaaaaaaa

SEQ ID NO: 17393 - DNA, 434 bp, Homo sapiens
agtacttctagaattaattaaatatttatgtagctaattttaatagtgatattttaatacaattcttaattttactcctggctttcaatcattcatatatgtttttaaaaattgctttttccattgctttacttcttaattacttttatcaaagtcttaattgtgtgtggttgattttaaaagttaaatatttctataagatttataaagacaaactgggtacagtgactcacacctgtaatcccagcactttgggaggccgagggggtagaccacttgaggtcaggagttcgagaccagcctggccaacatggtgaaagcagtttctactaaaaatacaaagatatgcctggtgtggtggttggcccctgtaattccagccacttgggaggctgaggcaggagaattgcttgaaccttggaagcggaggttgc

SEQ ID NO: 17394 - DNA, 464 bp, Homo sapiens
  misc_feature 19, 43, 48, 49, 50, 53, 59, 60, 62, 64, 67, 68, 69, 85, 88,92, 95, 101, 102, 104, 105, 107, 110, 111, 113, 114, 115,117, 118, 120, 126, 130, 132, 137, 138, 140, 142, 145, 147,154, 165, 172, 175, 184, 221: n = A,T,C or G
ggtaccgggccccccctcnagagtacttctagaattaattaangcggnnnctnactgcnncntnttnnncatgcatagctattanctnatgnggnctcatnncnntnatnntnnntnncntcatantaantnaaccnncncnttngncaaatcnaccctgaggantatggcntgncaattttantggctaaccctgaaacaacagtggggtggagtaacantacacctgtggattattatacaattattgagccagagggtgaaaagcggttgatgttaaattctctcaccactctagaacgtaggtctcatgacacattcttgatttgtcagtcttcctcgactgctcatcaatataaaaggaaagactcaaaaatgttgtgtatatgcactgtccaaaaaggacatagaatgtgcaaaacagtgtagaaattgttttcccaaaagagaattacctcttaaag

SEQ ID NO: 17395 - DNA, 630 bp, Homo sapiens
  misc_feature 47, 106, 109, 199, 255, 267, 297, 350, 366, 371, 422, 426,472, 492, 525, 541, 548, 585, 616, 622: n = A,T,C or G
agtacttctagaattaattaagggggtctgttaagtcagtgtaccanctattcagcgctcgctgggaataataaaccttgtaccttgagagataaacaaaccgcancanaggcagggggctttttccctatgtacacttgggctgctgagtttaacatattattaatctctgaagtattaagttttagttgtttaaagngaagtgacttgtagaacttacagagccataggatctgaaggtgaaaaattcttgtngagttgcacccnttgtaattgcaccagatgagaaacattagnaggccttaatttaaaggccgggtgggattgcctgagtttcaagggagtttcanagaaccaccattgggncaacnacaagtgaaaaccccatcttcccacttaaaaaaataccaaaattatttacnccangccattggtgggcacacgccctgtaattccttaggcttacctgggngagggctggagggtggggangaaattcaactttggacccctgggaaaaggccnataaggttttgccaanttggagncccaaagaatttgccaccccaacttggccacttggcncctgggggccgaaccaaggaccccctggttnttcccnaaaaaaaa

SEQ ID NO: 17396 - DNA, 914 bp, Homo sapiens
  misc_feature 52, 76, 83, 96, 175, 377, 475, 571, 608, 641, 697, 706, 744,796, 821, 832, 834, 840, 841, 843, 845, 852, 853, 855, 859,868, 871, 872, 874, 876, 877, 878, 898, 899, 902, 903: n = A,T,C or G
ggtaacaagaagctgggggttaccgggggccccccctcgaggaagtaccttnttaagaaattaaaattaaagggcngggccgntaaacaacaggcnaggaaccgaagaaaggaaccccttattggggaggccttttaaatttttaattaaatggcaaaacaggtacccttaaccnaaaacccacagggtccctaaaaacttacccaaaaacccctgggcatttaaaaaaaattttccgggtttgggggggcgaacctcgggaagccaggaaaccccaaaccttcccggaagccaggttaccaatggcttaaaggaactttcaccccaagttccaaaaggccggaaaccttaccttattaccttcaaattttggaatncccaaattaaaccttttggaaccaaaccggggaaaaccaaaagggtttaacccccttaaggggggattaaaccaaggcggccaaaattccttaattcnttaagaagttccccaattaattcaaaccaaattaaggggggggttttaccggaacccttccggaatggtttttggggaattccaaagggggaccantcccccggaaatgggggttggccaaaggcccccgccnttatttaaaaaaaggggttttcccggttttttnggttttccaaaaccggaaatttaaaaaagggttccccttaacgggtgggaaatccntgggaaggntttccaaaggaaaccccggggggaaggtttaaaaattncccaagggggttccgggggtttttccttaattccttaacctttttccaaaanaattttcctttcccccctttggttnaccgggaaaananatatannantntttgggnnanaatntagtgaccnttnnanannnttttgggggccggggggccnnggnnccacccccggg

SEQ ID NO: 17397 - DNA, 490 bp, Homo sapiens
  misc_feature 27, 30, 35, 50, 53, 55, 61, 63, 65, 69, 72, 75, 77, 92, 93: n = A,T,C or G
atgatactggccgtcgttttcactccnganacagnggtaaccatgatggntgncnggcccntncnacanagnacnanatagatttacattannggcgggctgaagaacttccatcttatgtgctagtttcttgaaagttaaaatagaatattttctattcagtcattcatttatttcttaattcttagttgcctattatagatgaactaaattctgtagaaaatatatggagcacataatagggaaatgagtaacataggattgaattaatgagtacacaaaaacttacttaaaaacactctaacccttacaatcacaagggctctggaaaatgctcttgtggttagtacacagtaagtatccaaacacaacaagtaatacaaaatgatgtgaatttattgtctagagggcctatatgaaataaggatgttaaaattacgttaaaaataacttctgtttttatgtcctttttaagaaaaattttaattga

SEQ ID NO: 17398 - DNA, 400 bp, Homo sapiens
  misc_feature 8, 286, 305, 385: n = A,T,C or G
agtacttntagaattaattaaggcgggtaatggggaaaaagaatacaagttttcttcttctgtgactgagcaaaagatagccgtatagctcgtggaaagggagtaagtattttattattatatctcgtttaaaatctatacctataccttttaaagatatgtatgtcctttttctttgttttcaataaaaccagataatttgaaactgtgcttttttgtggaagagtaaaccatggtatatggcacatgatacatgtgcaggacaaaaaaaaaatatgtctactgntgtctcttttccacattancctacaagctttgaggtgactggaaccaattgccatcagttgccatggctaatcatctttcatggcatataaatactcantataaatggatgaac

SEQ ID NO: 17399 - DNA, 252 bp, Homo sapiens
  misc_feature 235, 236: n = A,T,C or G
agtacttctagaattaattaaggcggggattgcatggtacacctagctcttcggccacggggcgccggggagactcattggcttccagaggacaagctgactcgtcggtgcatccgcgcgagctgcggggagtcacaggggtgaaggccgcgtggcacagcctgtgtgcaaagccggtgaggtgctgacgcagcgagcctggcggaggcgcgggcggaggcagaggggcgctgcnnaaaaaaaaaaaaaaaa

SEQ ID NO: 17400 - DNA, 365 bp, Homo sapiens
  misc_feature 345, 346, 350, 354, 360: n = A,T,C or G
agtacttctagaattaattaaggcgggtatcaggataataatgatcttgtgttgtctactttttgggtaaacagtgtattgaagatattttctccttttatacagatgcacatttagatcagcatcaagaattctcaaagtgtattcaaagaattaatttcattagaaattaataggctaggcaccatggctcacgcctataatcccagcactttgggaggccgaggaaggtggatctcttgagcctaggagtttgagaccagcctaggcaacatagtgagacctcgtctctataaagaaaaaaaaaaaaagaaattaataggtatcttttcgggaaaaaaaaannaaanaaanaaaaanaaaaa

SEQ ID NO: 17401 - DNA, 312 bp, Homo sapiens
  misc_feature 292: n = A,T,C or G
gggtgccgggccccccctcgagagtacttctagaattaattaaggcgggatggctgagttcaagctaaatagtatttcaagtttcaaattgtttggatttctttttggttacatagtcctaatatataaatcagctgccttctgaaaattggagttttaagcagaatctcactaagacttctcttgttatctaaatctaaataaaaagggatttacatactgtcagtatatactgaacagaaaaccttgtaaaacagtagtaaactggagggatgcattagttttaacacanaaaaaaaaaaaaaaaaaaaa

SEQ ID NO: 17402 - DNA, 296 bp, Homo sapiens
  misc_feature 23, 24, 25, 52, 289: n = A,T,C or G
ctgggtaccgggccccccctcgnnngtacttctagaattaattaaggcgggnagtctggggaaaatttttacttatctccattctggggacatctactgcaaattccataatagactctcattcctctattatctgagctatttgaattacctcaataaagctgtttcctcctctttcttcactcaggaaatacagagttctcatgactgaacagggaaagtaagaggtttagaaagaataagatggatctgagagttttcaaaatcacttgataaccccattattatnccaaaga

SEQ ID NO: 17403 - DNA, 371 bp, Homo sapiens
  misc_feature 60: n = A,T,C or G
ccccccctcgagagtacttctagaattaattaagggggttttcatactcaagaaggttanaaactactggctcatgtcaatttaaagtttttttgaattgaaagtatatgccaatgaaataaatttatctcaaaagagatgtacagcttttcatattaattttcactttaaaaaagagaaggaaaggcaacttctgaaagggcctcttcatctgttaggagagttgaacaatgccactttggtgggtaacaacaaagacaataattacttctctctgtatttgttaagaacataagtcctcataataattctgcacattgtctgagttaaatctcacaataactttaaaaagtaatgaaaacaggccgggt

SEQ ID NO: 17404 - DNA, 439 bp, Homo sapiens
  misc_feature 31, 63, 115, 133: n = A,T,C or G
agtacttctagaattaattaaggcggggtgngtggactagattatttctaaggtggattgcantgtttaaaattatgattattcactgtccaaaatttgcttcctagaatatttnttctcccataaatatttngttaatctgcactttctatgtctgagatctaattataagtttactaaagtaagcatcaagttcactgaaatgacaggtatttcccttttaaactatggaaattatctgaactttttgcactacctggtattcacatctgtttagattttatgaagttactgcaagactcaaccagtcttgtccactttaatatttttcctaaaatgggccccaagttatgtgttttctagattcataattagactaccatcccttttcctacattcaagtgtgaaaacaagagtaatatttgaatcattatttctc

SEQ ID NO: 17405 - DNA, 488 bp, Homo sapiens
  misc_feature 447, 448, 449, 450, 453, 460, 461, 462, 465, 466, 469, 470,471, 472, 476, 477: n = A,T,C or G
agtacttctagaattaattaaggcgggcacccttaaaggctctgaatgttagaaacggtgctatgaatttgtgagtgtccaaaatcttttattgttgcagaattttctggtttaggacaacattgtttacaatccattaattagctggaactcaggaacctttttggtatgaagtaatttcctgtgccaaggaatttgacctgtttatcagtatttggggaagttcctggaatgtccgtccttccttctttgccctccctcactgctgtatctctttgtcacatttcttctcttccttcaaatcatagttcccacactgcctgtcatactgggttatcctgattggaattactcttcccaaaaagtatgcacagtgttttactttttctttattatcaggtacgtcatttgtccttttcccctggaattagtgggtatattgagccnnnnaanaaaaaannnaannatnnnngggnngcccccccccc

SEQ ID NO: 17406 - DNA, 353 bp, Homo sapiens
agtacttctagaattaattaaggcgggtacccaatttggtttaaatattctttccaccttgcttctcttcaacccttcttgtcttggcactcagactgtggaggaaatggaagctttttaaaaaactgaacactattaaactactaaggaaaatataaaaagcatacttttctttggagagataaaagatatttaactcatctgtgtttaaaattaagaatagaaaatataagccttactaaagcagttaaattataagggaaagaggtagggaaagaagagaaagagatgataaaagaaagcaggacaggaagagagagaaggagctcatgagaaaaaaaaaaaaaaaaaaa

SEQ ID NO: 17407 - DNA, 426 bp, Homo sapiens
  misc_feature 34: n = A,T,C or G
agtacttctagaattaattaaggcggggtactangaaaggtgcttttctttgatgtatttggaacttttgaactttagtacaatggacaacttacatagagacttctcttttcacgagttactggtagtatcttgctaatgaaaaggcagcagacatctccagctgtactagaggtctgaatttactagatatctgttagtcaagtactgtgccttgtaaaccttatcttcagataactcatcttagctagttggacacagggcgtcagttgttgcttgagtggtaaagcgaatcacgcatgcctagctttcctttaccaaattacgaagtactcagaaataactgattaacttcagagcaacctttgtgacagatgttaatttcatctactaatgtggaatgtcaactaggatgtagatcttaac

SEQ ID NO: 17408 - DNA, 367 bp, Homo sapiens
  misc_feature 29, 30, 33, 121, 135, 158, 160, 277, 350: n = A,T,C or G
agtacttctagaattaattaaggcgggtnngancttttaacaattcatttgggaagctgaattatctctaaagatatttaaataagtaaactattaaggtgataaccaaactaagacacanactattaatatgtnggttcttgacacatataaaactnancacagattttaatttcttcaaaagcatcaggtatcctaatagcttcactggtaaaaatctaccaaatgtttaaagaagaattaacatcaatccttcacaaactttaaaataaacttnaaaaaaattggaaaggagggaacacttctgaactcataagcccagtattactgtgattccaaagcctgttccnaaaaaaaaaaaaaaaaa

SEQ ID NO: 17409 - DNA, 560 bp, Homo sapiens
  misc_feature 142, 510: n = A,T,C or G
agtacttctagaattaattaaggcgggctgagattgagccactccagtctgagacagagcaagatcctgtctcacaaaacaaaaaaataccgttgaagcctagagatgctgtagttatttaataaaatctttgaaaaatagntttattcaggtaaatcactcacttcctttatagttacttttatctgaaatttttccactaattgatttgctaggttgtataatttggaaatttattagcattatttttcaaaggtagaaatgataacaggaacgggaagaataaaaacccctttcttctgcttatttctctttatctatgatgcagatatcacatacacaaggcctttgttttaaggtgtaatttcgtagataggggtgtatatctatgatatagtattacttgcatagaattttttctttacaaacatccataaaaacaaagaaaaatcttttaaagcaagagtcttcgaatagttaaacttgattaactggcgttctactaaccanggttatgggtagttacctgaaaattcacttgcattctgctaaaaaaaaaa

SEQ ID NO: 17410 - DNA, 397 bp, Homo sapiens
  misc_feature 29: n = A,T,C or G
agtacttctagaattaattaaggcgggcnctcacactgatctctatatcattgtggagagtcaatgtcaaggccctctgccctttaaagctatcacattgtatgtgccttagacgccacctgccagaagcaagccaggtttacctttggacaccaacagcattctttccattcattcgtcctcctgacttatcagaccctgctatgaatgacttgattgttcttcaacttccaatttaccctcaaaatttctagattttctaccccgttcaaaataatggattttgcttttttggaaagcagctcacaaagagatttctttgaataaataaaaattgatccatttttaggaagcatgtatttggatgtgtctgttggacatacctatcatttgttga

SEQ ID NO: 17411 - DNA, 419 bp, Homo sapiens
agtacttctagaattaattaaggcggggtaggtctgaaagtattctgaagagtacattgtaaactgaagaaacatatgtaggtcatgtgcaaattcttaggcaaacgtcattatgggatattctaaaagcttcatattgctaagcatgactgatgaacagggaagttagagaccactcttttttacttgtgactttgttttaagaaaactatacattttttatttttactttgtctatcaaagttatctaaactggctgctgttcgggtagttatagcctagtgcattaaaaaaggccaattctggccgggcgcaggggcttacacctgtaatcccactactttgggaggccaaggcgggcggattatcacgaagtcaggagatagagaccatcctggcctgcttggtgaaactccatc

SEQ ID NO: 17412 - DNA, 377 bp, Homo sapiens
  misc_feature 188: n = A,T,C or G
agtacttctagaattaattaaggcgggggtggaaattaaaattatacaattatgccactgaaataactgctattaacttttgttgcattttcccttacttattcatgcacatattttattttttactggaatttatagtatagacacttagggatgctgcttttaaaatttaatactgcagggcgcancggctcatgcctataatcccagcactttgggaggccgaggcaggcagatcacgagatcaggagttcaagaccagcctgaccaacacggtgaaaccccgtctctactaaaaatacaaaattagccaggcatggaggcacatgcctgtaatctcagctgctcaggaggctgaggcaggagaattacttgaa

SEQ ID NO: 17413 - DNA, 441 bp, Homo sapiens
  misc_feature 366: n = A,T,C or G
agtacttctagaattaattaaggcggggacaggaaacaatatagatgtagagctgcacaaattctcttctctagctggaaaagtaaccaaccatgtgtacctttccaagatgggttgaaaaaatagttctactgaacacatacttcaactctgtattttctgatttcttgccctctgaactggtatataacattaaaaaaggatttctaaaattcatatttaaccttcccttcaaactccaaacaggcaccttgaggtcaggagttggagaccaacccggccaatgtggtgaaacccttgtctctattaaaaatacaaaaattagcccgggtgtgttggcgggcacctgtaatcccaaggtacttnggaggctgaggcaggagaattgctttgaacccggggaggtggaggttgcagtgagctgagatcatgccaccgcac

SEQ ID NO: 17414 - DNA, 581 bp, Homo sapiens
  misc_feature 385, 411: n = A,T,C or G
agtacttctagaattaattaaggcgggcagatcacaaggtcaggagatcgagaccatcctggctgacacagtgaaactctgtctctactaaaactacaaaaaaattagccaggtggccaaaaccaccccttggatgcccattttgttcagagtcaaagtcatcatcatggcctaaagaccccatgatctactgctacccttgccctggtgttttttttcttgtggctcctgttactcttcccttcttacatttgcttgctctgttccatgcatcctggcttcctggctgtacctcacacccgccgggcatgcatgacttgctttctcacctcagcgaggcctcctcacctcaccacccgacttcaaattttgaatataagtttanattgcagttccttcaaccctgtactnatctttccctgctttgtttctgtttgcttttctgctcgtctctctctccatgagagggtagacaccatggaggacatacaatgttggctattttgtttattgggggttcccatcacctgataccatgccccgacaaaagctgggcactcaataaatattttttaaaaaaa

SEQ ID NO: 17415 - DNA, 456 bp, Homo sapiens
  misc_feature 31: n = A,T,C or G
ctcgagagtacttctagaattaattaaattngatagaatgatgatggggatagagtgtaaatttgccaaatttacccacgcaacagacatgattttacctaatacatgtgaattatgaagaataaactgatgaaaatagtttgggaatataaaacttaagaatacttgcgccgggcacggcggctcacacctgtaatcccagcactttgggaggccgaggcaggtggatcacgaggtcaggagttcaagactagcctggccaagatggtgaaaccccatctctattaaaaatacaaaaattagcccgggcgtggttgtgggcgcctgtaatcccagctactcaggaggctgaggcagagaatcgcatgagcccaggaagcggaggttgcagtgagccgagattgcgccaccgcactccagcctgggcgacagagtgagactccgtcccaaaaaaaa

SEQ ID NO: 17416 - DNA, 403 bp, Homo sapiens
agtacttctagaattaattaaggcgggggtgaggtgagccaggaggtctgtgaggcttcattggctgttgtccacactgttctgactgataattgccctgaaggccaatctctgactgccatgttgggtgagagaaggagagtggaagcagggagctcaggcaggggccaacggcaatagcttgtgagagatggtgatggttaagccacagaggttagcaggagtgctgagaggtggtcagaccagatatacactgatgatggagcccattggttttgctgaggaagtgaaattggaatataagagaaaactagttattttgctaaggtaacagtttggtttacacccatgaaataattacatagcaattcaatttaagtgactcctggattggtctaggtac

SEQ ID NO: 17417 - DNA, 411 bp, Homo sapiens
agtacttctagaattaattaaggcggggtcagtctttattatctaaggccatgtaacatatcacattccctagctattgtggtttatttaaaggtgagcaagtgaccagtccaataaaactctttgcttggaatgccagagaaatacattcactttatttttctatggtgtataaatgagatacctaaaattgcttttgtcatttttatatttcatagatagcaagtatacagagtgaggcagaacagataaaagggtcaagccttgggcttttcctattacgggtatcaataaaggatctttttaagacagtttaaattaggttttctgttacttagaacaaaatatctaaatgacacagaatctgaagtggtcattactatttgatttccactcttatatgcttctgtc

SEQ ID NO: 17418 - DNA, 444 bp, Homo sapiens
agtacttctagaattaattaaggcgggtggattacttgaggtcaggagttcaagaccagcctggccaacatagagaaaccccatctccactaaaaatacaaaacctacctaggcatggtggcaggtgcctgtaatctcagctacttgggaggctgaggcaggagaatcgcttgaacccaggaggcggaggttgcagtgagccaagatcgtgccactgcactccagcctgggagacagtgcgagactctgtctcaaaaaaaaaaaaaagaaagaaagaaattatacatcaatccacaataatgaggcaaagacaagctaactgaaacagttccttttcttctgcttaaaatttatcaactaaggatagtaatgggagtttatcatgctctgttcaattcctgattagcatattaaaatcttttattgaaaactccaggttcaaat

SEQ ID NO: 17419 - DNA, 310 bp, Homo sapiens
  misc_feature 221, 223, 224, 225, 226, 242, 247, 251, 256, 258, 259, 260,263, 264, 266, 267, 272, 273, 283, 284, 288, 289: n = A,T,C or G
agtacttctagaattaattaatgtccaaacaattttcatcttgaattattctaaggtaagatattagaacccatccaggcaagatggctcatgcctataatcccagcactgtgggaggccaaggcaggagattacttgatgtcaggagtttgagaccagcctggccaacatagtgaaagcctgtctctactaaaaaaaaaaaaaaaaaaaaaaaaaaaaangnnnnccccccccgggggggnccccnattnccccntnnnggnngnnttttnncccccccccnngggnngttttttaaaaaaaattattc

SEQ ID NO: 17420 - DNA, 425 bp, Homo sapiens
agtacttctagaattaattaaggcgggggtctggtttacctctatcttctatgcataattattgatagtggctacctttcattttcaaaagtgtctgattttgaaataaactacatgatcactctatcacaaactacacagagtagatttttctttttccagtctgagaatctgtctgttaatgaatggagttaggcaatttatactttttttctaataattgatatattggattttacttctgagtactcttttttgtttttattttctgtttcgtaacaatgtttcttgttaaatttttgcctcttttgttatgtagactatatttttctgtcttttcttcatcctctaaagatttccaaggttccagttttcctatcataattaccactgtgagttttaagacatactcaaatatatatttt

SEQ ID NO: 17421 - DNA, 447 bp, Homo sapiens
agtacttctagaattaattaaggggggtggaaagacatagaagagatccctttacaatggaaatgttctataccttgatttggatggtggttacacaagtgtatgcaagtgtcgaaattcattaaaataccatacttaacaactatttcttactgactgactgtaagttataaaatgaagccaaaatcccatagtaaattacagaagattacatctagactttatcttaaaaatccaactaaatgtttatctaactaaatctttaaaaatccaactaaactgcacccataaaccagtccttaataacttaacaaagaataaaaaccaagacacttttacaatataaattttggacaaaattatatgaccaaatagattatctctcattttataaacataacattaatttcccaaaggcctaaaaatctttaatatgtaaattaacta

SEQ ID NO: 17422 - DNA, 451 bp, Homo sapiens
agtacttctagaattaattaaggcgggtatgaggtagtatcctgttgtgattttcatttgcatttccctcccttgcatgatcttatgaggtaaaaaccaatccgtattcctgtttggtatacaaggaaactggattggaaaggttcagtgactgattaaagataaaagtcatatgcagattctgcactctccagagcccatttcaatgcacaactacaaggtctcacaaattctgagaaggctgtacaagccagcccttcaagattcttccagctatgacattctgggaccatgaatttatactgtttaaaaatctcttcttcagccaggtgcggtggctcacgcctgtaatcccacactttgggaggccaaggcgggcagattatgaggtaaggagattgagaccttcctggctaacacggtgaaaccccgtctctactaaaaatacaaa

SEQ ID NO: 17423 - DNA, 340 bp, Homo sapiens
  misc_feature 322: n = A,T,C or G
agtacttctagaattaattaaggcgggtaatgatatcaattggctcggtcattttagaaagtagtttgatactggctaccttaaaatgatcatgccatttgaaacatgatgttatagacttcctccaaagaagtgaatcctaaatattgaaatgtttttatttagaaatctgtcagttactggagttgaagtgttctttgatgagtgaattgtgaaatgatgatatgtttacccgatagaatattgaataattaaaaattgtttctttaatgattgcaataaaatgatacattaaatatttatattttattattactatgtnaaaaaaaaaaaaaaaaaa

SEQ ID NO: 17424 - DNA, 439 bp, Homo sapiens
agtacttctagaattaattaaggcggggaaaagtggctgctgacaattaaggagagaagcattcagaaattcctgaaattgtgcctaaaaacaagcaatacattcactagttcctcatcaatcagtggtttagtcagaatagatgccaatgaactagtgaagggtgtatatttttttccttttcaccaaaataagttgaacaaaattcctgtgtgattgcatattttaaaatctaagtttcatgtttgccaacattgctaagctactatatcaattgtctggcttaagccaaataaaacctttcataactttggaagaaacttctacacaggaaactgtagatttagacagccgaaatttgtctgaatatgcattgtttttgtaccagttcttaactatttaaattatatgatattccataacagccatagtggccata

SEQ ID NO: 17425 - DNA, 370 bp, Homo sapiens
agtacttctagaattaattaataaattttatattgaacatatacactgaaataagattttgaatatattacattaaacaatgtaatgaaatcaattgcctactagaaatgtaaaactacatatatggcttacatttacggctctcaaggcatgtcttctgaacagcactgcactttagccaatgcaatgaaaaaacaaacgacagttatgaatactgaaaaagacagaatcattattgtgtgcagataagtgcctgtctgacaagaaaatctgaaggaatcatttgaaaaatatccaaccagagggagaattcacaaaaatacttcgataccaagtaaataataaaaatagacagggtttttttttggtt

SEQ ID NO: 17426 - DNA, 375 bp, Homo sapiens
  misc_feature 15, 23, 26, 31, 34, 59: n = A,T,C or G
cgtcttttcaacccngaatcaanggnaacancangctgggctaccgggccccccctcgnggagtacttctagaattaattaaagcggggaagttgggagaatgaggatttgctttgtattaatggaagaggcaaagcataaaatggaaaaaatttgaaggcattgatgaaaccacacctgaattagtccattatagtgtctacaatagaaattaaaggcttgggccaggagcagtggctcatgcctgtaatcttagtactttgagaggccaaggcaagaggattgcttaaggccaggagtttgagaccaggctaggcaacatagcaagacctcatctctacaaaaattgaaaataaaaaaaatattaaccaggca

SEQ ID NO: 17427 - DNA, 405 bp, Homo sapiens
  misc_feature 5, 8, 30, 36, 78, 82, 104, 127: n = A,T,C or G
gtganaantggcccattaaccataataaanatactngtggggaaaggcaacttaatatatggaggctataaaaaggtntttncttttagatctatactgtttanaattgaactgcctgcttgtttcnaaagatcttttcggagtatctgttaccgggtttaggccttttcttggtaggagggggtcttccccactggttttacttgtttttagccaagtgatagccattgtagactcctatataccagatagcatgctaaaagaaaggacactggatttagagtccgaagtactaccttgtcgcctggtaaacatgagatttagggcaagtagcttcttcagaacctccaattttcatatgtggccccaaaatttcaataaaagctgtataggaaagccttttgt

SEQ ID NO: 17428 - DNA, 380 bp, Homo sapiens
  misc_feature 3, 6, 18, 24, 29, 31, 34, 37, 50, 56, 68, 94, 108, 138, 140,145, 147, 152, 162, 163, 171, 176, 189, 204, 233, 284, 286,287, 305, 330, 348, 353: n = A,T,C or G
agntcntgtagaattaantaaatnaatgncnatntgntagtgaatattanggagcnatactatcttanacacaaaatctgtacatgtttaaagnatttaccacctatnagcacactaccaatatgactattcacagantnattangntatanaacatacttnnaaaaatcnttgcnaaattacattttntgtattgaaggtcancatttggaaaatacttacatagaactctnagcataagacactgggatagaaataaatgtacaattccaaaaacacaagtnannggaagatggcatataatnttaatagtctgacttagataatctnacattctgcatgctggcntattntgctaactcgataaaactaatacaact

SEQ ID NO: 17429 - DNA, 410 bp, Homo sapiens
agtacttctagaattaattaaggcgggcatccaatatataagatctgagtagctgggcaccatcctataattatcatcactgtttacaactctataattcattaattccaattctgaatattaaagatacacatttttatatgtatataatagtgagagttaaagactatccaaggaataaaggaatttagttcatatttagtctcaaggtaaagcacgttaactctaggtttcttactggtgggaaaagctggggagaggtgcaaacagtgttgtggagtgctgcttcatttaaacaaaagtgaaaatcaatcatattttcatctggcccataatcaaacacaacagggaagatgataggagataggtggaatttgtggtattcactaaaataagcagcaaagaaatta

SEQ ID NO: 17430 - DNA, 349 bp, Homo sapiens
  misc_feature 49, 61, 75, 106, 119, 139, 141, 277, 280, 285: n = A,T,C or G
agtacttctagaattaattaaggcgggaagaactgaatgaggactacangggaacaaaatnctgcccttacactntaggtttcaaaaagaaaattaggctgcattntatagaatagctnacatttgtctctgacacatntncccatgctaaaattataatgatctatttctggaaccttccctacatgatcacttgactcagaatcctttgatgactctaagcatatcttctaatcctcccccaatctcttcacaactttaaaattatgaaacctancanataangttattgaatatgcaaaatgaccattatacacatgaaaatatgttcaatttactcataatacaa

SEQ ID NO: 17431 - DNA, 420 bp, Homo sapiens
agtacttctagaattaattaattagagttaatgttatttaagagtttgagatcttttctactgcatacttcttccggagggagatttttctttcaggattttaactttgtgaattacaatcttctctaattagcatgaacttcctcttgtaccagaattctagcatattataattcttggagtcagaaaacttttcctgcttggatattaaattttcatcagttatgggtcattcttgttggggataatgtgaaatagagggaacttgtgttctggaatagttaatagaggtaaaggtggagtaaattatctgcaggaaaaagcactgggggctgggcgcagtgcctcacctctgtaatcccagcactgtgggaggctgaggcgggcagatcacttgaggtcaggagttcgagaccggcc

SEQ ID NO: 17432 - DNA, 434 bp, Homo sapiens
  misc_feature 273, 275, 283, 285, 288, 293, 320, 325, 336, 375, 379, 381,410: n = A,T,C or G
agtacttctagaattaattaaggcgggtggatcacctaaagttaggagttcaagaccagcctggccaacacggtgaaaccctgtctctactaaaaatacaaaattagccaggtgtggtggcacatgtctgtaatcccagctacttgggaggctgaagcaggagaatcacttgaaccctgtggttggagatgacagtgagccaggattgtgccactgcactccagcctggacaacacagtgagactccatcttaaaaaaaaaaaaggaattttntnttcaggtntnttntgaancccagggaaaaattaaggataacctcnccganatgaaagctantatcacaaatgcctaaggaaggttcacttactgttccancaananagttaggtgttctccccattcaattttcnttaaaacaaaaaaaaaaaaaaaaa

SEQ ID NO: 17433 - DNA, 444 bp, Homo sapiens
  misc_feature 28, 31, 33, 40, 45, 47, 48, 52, 53, 54, 57, 61, 63, 65, 67,75, 91, 98, 99, 101, 104, 112, 114, 121, 122, 124, 125,129, 130, 131, 132, 139, 143, 156, 157, 171, 186, 193, 197,201, 210, 219, 220, 224, 226, 229, 232, 234, 237, 241: n = A,T,C or G
  misc_feature 243, 245, 250, 298, 422: n = A,T,C or G
agtacttctagaattaattaaggcgggngancnctatganccgtncnngaannngtnttangngntnagatatgnccaggggttattaatnttgcatnncnttnatttaccnancatgganntnngatnnnnatctatnaacnactggaagaggtnnaccatggatattgnatggaacccgatggngcgggangccntaanatcctatantactacttnntaananatnatngncgnaaancngntactngatcataattatttaaacataatcctttatgtcaaaattaatattgcntgaattttgaattctatatttacctgaaagaaacctgtccaatctcggtgctgtgtggacgttacagattttagtgcattgaggtgtgagacagtgagtacagatagagggagacaagataganaatccttgtctcccatcagtat

SEQ ID NO: 17434 - DNA, 557 bp, Homo sapiens
  misc_feature 236, 437: n = A,T,C or G
agtacttctagaattaattaaggcgggcgaatcacgaggtcaggagatcgacaccgtcctggccaacacggtgaaaacccatctccactaaaaatacaaaaaattagccaggcgtggtggcgggcgcctgcagtcccagcttctcgagaggctgaggcaggagaatggcgtgaaccccagagatggaggttgcagtgagccgagatcgcgccactgcactccagcctgggcaacanagtgagactctgtctcaaaaaacaaaacaaaacaaaaatatttaattcacctgaactttaaaaaatatataaatagtctaaatttgtatttttacatggggtttttaatggagatgtactgaattaaaagctcattttgtcatatataaggctcttatgtgtacttggatgtaattctagattccgtgctctattctctanatttgcttattcatgtgccagtgctatactattctattttttttaaaggtttaaaacatttatcactaaagatactagaatggttctttgaaaacctattaagacatttaactattcttt

SEQ ID NO: 17435 - DNA, 427 bp, Homo sapiens
agtacttctagaattaattaaggcgggatggctcagtaaacacagactcataatgacatgtggttaggatgacaattgagggagaagatatttttggatgaggagctgttatgtttatgaagatatttgtaccaaaaatacaattgttttgaagaagaaagtatgttatctcaataaagaaaacaaatatggctacttcatggacccataattgttaatctgtgtctaactacagagtactagctgggagtgtaattgctagtggttatgctttcagagctagctttgacatacatgttactttgttgattttggagtgtaagactggaatgtaatccttaccatcatgcagcttccattctgagagaaataatgaatattttaatgtaattattatttattttaaattttataatcagttgcctat

SEQ ID NO: 17436 - DNA, 426 bp, Homo sapiens
  misc_feature 1, 3, 50, 51, 54, 57, 66, 70, 72, 132: n = A,T,C or G
ngnccccccctcgagagtacttctagacttaattaaggcgggggggaggnngangcngaaaggaangaantntttttttttttttgtcgaatcagtatttcaaatattgaatgcaagtatctgaagcttganttattgtaattcaaaaataagaaggtaaatggatccctttgaagaaattctgctagagaaaaattctgaaaaggaatttgtattttaaagggtcagtatgcatatttgtatttttaatcaacaagttttttagcctagagttggttggctgttttttccaatttttatatggaactaaaattaggagaaaaattatggcggtggggaaattttcctgagattaaattagacaggatttggaagaataaagtcagttgtttatggccagagtatagataaatatggggaaagtgc

SEQ ID NO: 17437 - DNA, 710 bp, Homo sapiens
  misc_feature 54, 605, 640, 662, 686, 687, 688, 689, 690, 691, 692, 693,694, 695, 696, 697, 698, 699, 709, 710: n = A,T,C or G
agtacttctagaattaattaaggcgggctaatgtcagaactaaaactagaaccngattctgcatcccattttctagtctggtcacctaattactttaaagtaattactttaaaccagctggtgttcaaactgagaaactacatttgaaaaataatacagtttaacagtttaaaagagaaaagaggaacatattagaaagattacaggctactaattctggttcttataattacaagttgactagaaaatgtacttatcctctttgaatctgtttcttcatttgttaaataggggaaaataaagcttactaggagaagtaaatgaaataactgcctgggagcataacagttatcatcttccattaaaatatgtaattggtctctgagaataaggtaagataaggtcttttaaaaatgtaatgagaaatatggccgggtgcagtggctcatgcctgtaatcccagcaccttgggaggctgaggtgggcggatcatgaggtcaagagatcgagaccatcctggccaacatggtgaaaccccgtctctctaaaaatcaaaaattagcccggcgtggtggcacacccctgtagtcccagctacttgggangctgagcaggaaaatccttgaacccaggaggtcangttgcacgagccctggactccnctgcgacagacgagactccttctnnnnnnnnnnnnnnaaaaaaaaann

SEQ ID NO: 17438 - DNA, 571 bp, Homo sapiens
  misc_feature 462, 503, 543, 550, 555: n = A,T,C or G
agtacttctagaattaattaaggcgggagattttgtaggatttaccaaggaacaaataaatttcaagacaaaatagcgtgaattttataatgagccctatgagcagttaggaatttcattagcagtgtttggcagcgtgggctacctttgaaatgattattgttaatgcttttacttgaccatcttgttttatgttttatgtttatgtttttacaatttctttgaaaataactttgagactatacatacatgttttcacataaatggtagcaagagtactttttgtaaatgaagttgggaaggttgtttacagagtggtttagaagtcagaaagtttagttgggggtcagctaggtaaacggatacttttgggtttatcatcgtttatctccttgtagaatttagcaaaatctgaatgtatgtttattatatttgtattatctccctcctttcttcccgctntaaagtaagccccttgtaaaatttataagggaccttctgtnttttgttcaccactatatcccccagtggcctaaaaacagngcccaanaaatnttaaaaaagggggtca

SEQ ID NO: 17439 - DNA, 670 bp, Homo sapiens
  misc_feature 22, 25, 28, 31, 38, 40, 41, 43, 46, 55, 58, 59, 61, 62, 63,66, 68, 70, 71, 74, 75, 76, 77, 78, 86, 89, 90, 93, 100,103, 104, 109, 110, 123, 125, 129, 141, 166, 174, 175, 178,180, 182, 186, 194, 200, 201, 205, 207, 208, 213, 214: n = A,T,C or G
  misc_feature 217, 222, 230, 231, 232, 246, 247, 251, 285, 289, 294, 303,311, 329, 333, 347, 511, 566, 591, 627, 628, 629, 630, 631,632, 633, 635, 636, 637, 638, 639, 640, 641, 642, 643, 644,645, 646, 647, 648, 649, 650, 651, 652, 653, 654, 656: n = A,T,C or G
  misc_feature 658, 662: n = A,T,C or G
agtacttctagaattaattaangcnggnggntaaccangnntncanatcaatacngtnnannnctngntnnagnnnnnccggatgntgnngangaccggntanntatcnngcctggtgacagngnactngtagaatccacntccaggattgcctgatgcctggaanattgctannatncngngggncccagtancagctnncatnannagganntgncatcncctggctnnnggtccagagagacnncttntttacatattggtcatcttcactacctgacttcncgcncctcnctccagggnttgcctanttccctcctaacgccttntttntccacaagatccgntcctcctatgctgactgatttgttggccagatgcaatggctcacacctataatccttgcaatttgggaggccgaggcgggaggattgcttgagctcaggagttcacgaccagcctgggcaacatggtgaaaccctgtctctactaaaaatacaaaaattagccngggcatggtggcatatgactgtaatcccagcttctcagaaggcttgaaattgcantgaggtgagattgcaccactgcccntcgagactaggccaacagaagttagacttatcttcnnnnnnnannnnnnnnnnnnnnnnnnnngngncgcncccccccc

SEQ ID NO: 17440 - DNA, 355 bp, Homo sapiens
  misc_feature 12, 21, 133, 159, 166: n = A,T,C or G
ctaaaaaatcanaatttgtanaattaaagatagtcatttagtgccaaagacagaaccactattttaactaatttacatcctgtttgtctatcctgaacacaaatgatcctgaggtacaaatattcggaatatnttatttttcattattttaagattaantcaatanattcaaacggtaactatttaaaaatttttaaaaaactggaagggagaacattattttttgttttcattttatattaaacatttagtatatctgtacaaataaaaaaattatgttcaactatcaaactagaaatggcataaaatacactttcctacctatgattacatttccctttcactgcaaataatt

SEQ ID NO: 17441 - DNA, 500 bp, Homo sapiens
  misc_feature 24, 26, 27, 29, 34, 38, 39, 43, 44, 46, 47, 49, 52, 61, 62,63, 67, 68, 78, 79, 89, 238: n = A,T,C or G
atgagactggccgtcgttttacancnngnaacangagnnaccnntnntnctngccggtccnnncctnnagagaaaaannaaaattaatnaaggcgggggtctggtttacctctatcttctatgcataattattgatagtggctacctttcattttcaaaagtgtctgattttgaaataaactacatgatcactctatcacaaactacacagagtagatttttctttttccagtctganaatctgtctgttaatgaatggagttaggcaatttatacttttttttctaataattgatatattggattttacttctgagtactcttttttgtttttattttctgtttcgtaacaatgtttcttgttaaatttttgcctcttttgttatgtagactatatttttctgtcttttcttcatcctctaaagatttccaaggttccagttttcctatcataattaccactgtgagttttaagacatactcaaatatatatttttcaa

SEQ ID NO: 17442 - DNA, 382 bp, Homo sapiens
  misc_feature 350, 355, 360, 366, 382: n = A,T,C or G
agtacttctagaattaattaaggcggggggaagaactctgaaagaaatcaaagcccagactgtgtcccacatagagttcaagtcatttaacagcatcatgggggaaacccagagatgtgaaattagtataaaaattggccgctggcaagtgctatctctcagacacctgagaacaacatacacaacctcattctggacttagggacattttagtttcccggctacgtagatgtctatagaaaaactgagctttgattggatgcgcttacagtgagaaatagtcaaaacgtagaaggaaaccttccgccaccagcaaatcagcaacacataaagaggagcattagtttttnaagancttanttttancaaactcctttaaaan

SEQ ID NO: 17443 - DNA, 421 bp, Homo sapiens
agtacttctagaattaattaaggcggggccaggaaggaaggaaaaaagcttcgttgattggggtggcaggatcacaaattatttcttttacattttggttgctaatgaccttgttataaaactattttggggccgggcacggtagctcacgcctgtaatcccagcattttgggaggtcaaggtgggcggatcacctgaggtcaggagttcgagactagcctggccaacatggcacaaccccatctctactgaaaatacaaaaattagctgggcgtgttggtgggcgcttataatcccagatagtcaggaggctgaggcaggagaatcgcttgaaccgggaggtggaggttgcagtaagcccgagattgcaccactgcactccacctgggcgacaagagcgaaactccatctcaaaaaaaaa

SEQ ID NO: 17444 - DNA, 476 bp, Homo sapiens
  misc_feature 67, 141: n = A,T,C or G
gggtaccgggccccccctcgagagtacttctagaattaattaaggcgggggagatactatatactgnagaaccagacttggcaggcggcctttaaaataacctacaaagccactcctaattatgatggcttggtataattngatgttgttaccacatttggaaatcttggtaagtatagatgcttttagacaggggcatcttggaggaagttagctgaggaagaaaaaggtcttatgtacctaacaggtaagaataatatgtactgaggagcagcccatgaaaaagggtaccttgcactaagcttcttccaaacaaagcagtcagaagcaccgtttgtagccattactttgttctcagactctacaatcatggctacaaataattagaccacaggttgttatctggcttgaaggcaattatgacaccctggacccaaggaaaacctaacagtctttaaggaaacctagtacaagaa

SEQ ID NO: 17445 - DNA, 444 bp, Homo sapiens
  misc_feature 56, 58, 65, 72, 87, 90, 97, 103, 112, 118, 123, 135, 138,144, 162, 184, 202, 225, 232, 243, 277, 289, 295, 300, 308,328, 342, 387, 414, 416, 418: n = A,T,C or G
agtacttctagaattaattaaggcgggagaagcaaactttttttttttaacttaananacttatncaaagtntgaaacctaccaaanatntcatccntgggcnctggaagcnctaggngatanaaaaaacttaancanaaaacnacagcaaatgttaaaatntttttccagtcccaccatgttntttcacataccgattatnccattactaaatatggcctcctnttcccancatggtaggtnccataaatgtcatagcttactccccatatcaaancctgtaaaactngcgttngtttngatattgnaatttatttcacaacttttntagtagggcagctntaaattctagttaattttccctaaatatgtactcccttacacctnttcctgcttagtttccattgaggtctnancncgttttataactgaaccctgcgggga

SEQ ID NO: 17446 - DNA, 323 bp, Homo sapiens
aatacttctagaaattaattaaggcggggagcttgtccctgcatagaaagtgtttcatgcatactaggaggctgtctttgcagcattaaggaaagctctggcagataataaaatgcaaattgaaatttctggtaattaatgcccaatcaattttcatggttttccctattttttgttctcaaaagtttattcctgacatcttattaccttggaggcttttcttctgaaaagcctgctactgactggctgccaaaaagagtccagttcacacctttccttttccagtgtgctcttctgctccatagagatagacaatactcaga

SEQ ID NO: 17447 - DNA, 494 bp, Homo sapiens
agtacttctagaattaattaaggctggggtgcagggagaggagatggagccaggaggtggtgaagtttgccaggatgcaggcagagcgctactttttgtgttcccgggtctgctccacccaacgggtctcctcttgcacgtttctggagatgggttgtaaagtatgctggagcttcttagcagcaagtgccaagagttcctaattattaggctcatacaattttattttgcttttttgtttttaaccaaccatttaaaaacaataacatctctagatttccagtttatctggaaaaatctgaaggtctggcaacacggggcctgctttcccagttggaattgggcagtggtcatcctcttatctagggcatatgagcccaaatttgttccacctctccctgttgtaatatttgccccgccaccttcagtcatgggtgttacctgctggccctgcaggcatttggctgagtaatcactgtgctggggtgtgggtg

SEQ ID NO: 17448 - DNA, 864 bp, Homo sapiens
  misc_feature 289, 341, 346, 367, 417, 494, 498, 523, 524, 578, 594, 624,654, 664, 672, 675, 684, 708, 712, 713, 718, 722, 731, 739,741, 755, 776, 779, 781, 788, 799, 804, 805, 816, 821, 825,833, 835, 837, 841, 842, 844: n = A,T,C or G
agtacttctagaattaattaaggcgggtggatcacaatgtcgggagttcaagaccagcctggccaagatggtgaaaccccatctctactaaaaatacaaaaattagccaggcatggtggtgggtacctgtaacaccagctatttgggaggctgaggcagataattgcttgaacctgggaggcagaggttgcaatgagccaagatcaggccactgcactccagcctgggcaacagagtgagactccgtctcaaaaaaaaaagatgactactagacaaataaattttgatntgaaagatcactagaatttgtttctatctgttaaattttttaaagccagaangttangatggggaaaatttgtattantcactaacacattttttcttggctttaaaaagaaaatcctgtctcggatnatctcctactagcactactgaatgggaaacataaaaaaaggttcattctctggattcctgaaagaaaaatttttctncctntttccaaaaaagtaagtcacttgannaacattgagaccatgaaccaattatcttaccgataacctagaaccattccatcntttttcaaaaaatggngttttttattcacctaatggggggaaatgntaaaattaaccttttccttaccaaaagggnaaccgttggncttagaangtnttgtccaanaaaatttttcccccttgttttagnaatnnccaancttntttgggaanggttgaangncaaaaaaaatttcntttgaaaccttggggaagggnggngntttccantggaaaattanttccnnttgtcttccancctgngggnggcccaantnanaaanntnttttttaaaaaaaaaaaaaa

SEQ ID NO: 17449 - DNA, 514 bp, Homo sapiens
  misc_feature 42, 77, 277: n = A,T,C or G
agtacttctagaattaattaaggcggggtttgcatataatanagcttaatttgttcaatgaaggaacagttctgtanttggagataaaaggttgtaaaatggaaagcctgatctagataatttataaaacagctttaaatttttattcttaaatagatttaagcttaccaaatcagaaaggaaaagaattatttatagtagctcgaaatgacattgcttccttttctagaacaaagaataataaagaccacctgttttaaaaatgatatgctttaanatcttccatattttcatagttaatatacactgcacattctttaggatctcttaaaggtaatcatctatctgacagactttcagagatgaagcaacacctgccaggacagactatttcacacttggaaaaatacaatgatgtacaaatttctttcatgtttgaataaaacctattcccatacattttcacctatggagacaaagtataactttaaattttaaaaaatcctcaaaaata

SEQ ID NO: 17450 - DNA, 415 bp, Homo sapiens
  misc_feature 75, 93, 97, 101, 104, 117, 120, 125, 136, 152, 175, 182,191, 220, 225, 227, 230, 235, 240, 247, 251, 262, 268, 270,284, 308, 310, 316, 322, 326, 333, 338, 346, 349, 358, 360,381, 388, 392, 402, 411: n = A,T,C or G
agtacttctagaattaattaaggcgggaggagagaggagaggcagaaatctactacgagttctttttttttttancctaaaatcaaggtcaanggtnttancancattttaaataancanaatanagggctgggcntgggggctcacagggnggcagtaaaaagggaaaaggganatccggngggaggaanaaggaaaaaccaagacaagacaagacganatgananaancaccngaaanggaaatntcancttgccctacncacagnanggttaaactgtctnttataaaacttctgactttgaaananatattnattatncccncttatgngtttnttagatcncantaaaaaatntntttcttaatgtaggctgtagncaaaaanattntaatcccaangatctaatncatt

SEQ ID NO: 17451 - DNA, 391 bp, Homo sapiens
  misc_feature 29, 46, 48, 49, 51, 58, 69, 77, 80, 85, 87, 89, 91, 104,108, 143, 152, 157, 160, 164, 167, 191, 269, 288, 339, 341,344: n = A,T,C or G
ggtaccgggccccccctcgagagtacttntagaattaattaatggncnntncacctgngacatgtgacncgaccctnctnttacntngntncttaatctttaanatgngacatctgagatatgggccccaaattaataatgtnccattttangccanagntatnccntgactattgcctagaacgggagangtgaacaaaagaggtaggggctgtgaatgctttcgcaaaactgacaagcagggcgaaagggaaactctggaatatgancttccaggctgcacttgcntcttgtttatctcacggttctcaggggccaccaccttacctggcacaccgnangtncctgaggaatgcttgatgcactaaaccacaaatcagtgcaatggaat

SEQ ID NO: 17452 - DNA, 441 bp, Homo sapiens
agtacttctagaattaattaaggcgggcacagacaatgaatgactgtatgagtcattcctaccctccaggccctctttgagtgaaggcagctttgaaaaccaatcaggcaggtgacttttttaaaatggggaaatgggacaggcaggcatggtggctcacacctgtaatcccagcacttcgggaggccgaggagggcagatcacctgagcccaggagtttgagaccagcctggccaacatggtgaaaccccatctctacaaaaaaaaaaattacaaaaattagctgggtgtgatggcgcacgcctgtactcccaggtactctggaggctgaggcaggaggatcacttgagctcaggacttcaaggctgcagcaaaccctgaccatgacactgcactccagcctgggtgacagagtgagaccctgtctctaaaaaaaaaaaa

SEQ ID NO: 17453 - DNA, 416 bp, Homo sapiens
  misc_feature 245, 260, 334: n = A,T,C or G
agtacttctagaattaattaaggcgggctattcgaactggctatgctaccaaggtataaatgtcagtttctggtttctggaggtaaacgtgatcaaacaactatttttgtgggtgcactcaccatataagatattgctccaaaagacaaacaacatatagatgcactggcacctgtcatatcttttttaataataatctgtctgagacaaaaaaaaatggaaaaggggaattcttaacagctganataaacaaagctaanaaaaaaaatttaatggtacaaaatctgacagtcttatttatgactggctccaggatagagtgtgaaaccaaganaggtactgctatcaaattttatttgtaataggctagccatgaattttttggcacctacctcaatggcttttaaacagaaaaa

SEQ ID NO: 17454 - DNA, 403 bp, Homo sapiens
  misc_feature 30, 32, 33, 34, 48, 66, 68, 72: n = A,T,C or G
agtacttctagaattaattaaggcgggggntnnnaaggaagctctctnggattcatttttttttgnanaatnatttggaatccaaaattatcatctctgttagaggttcctaatccatggtttcttcacagtgcagtatgttttggataaattgtgattgctaatatagtacctaagtttgtcagtgatttctttccgaaaaaaagattgacgcacatttaagattattcattaatataattactccttttcatttgcattccatcctgctttttcatttgggaaagaaatgtgcagagggacagctggtgcctctgtaattacacataacccccagcctgtcttatctgtgcactcctgggagcgggtcacaaatgtcatcctctgtcttgcgtgtttcaat

SEQ ID NO: 17455 - DNA, 272 bp, Homo sapiens
  misc_feature 160, 220, 237, 243: n = A,T,C or G
gccgggccccccctcgagagtacttctagaattaattaaggcgggggaactgcttgagcccgggaggtggaggttgcagtgagctgaggtcgagccactgcactccagcctgggtgacagagcgagactgcatctcaaaaaaaatccttttattttccanttcttaaaataatgatttgttgccctaccatattccaatggtgaccttttaaaaatgttnaattaatattaaataantaaatntaaataaaaataataaataatggattaaa

SEQ ID NO: 17456 - DNA, 431 bp, Homo sapiens
  misc_feature 302: n = A,T,C or G
agtacttctagaattaattaaggcgggcacataacacctctcccaacctctttctcaaaacctccactgggacagtgggaaccgactgtctctaaacgctgatgtgcaaatggatcacagtctttgtggaaggcaatatctgccaaaattacaaatgcacatacctggacccagcaggctcacctatggaaattcatcttccagatacaccagaatgtgtagaaaaaaaatgtatatcccaggttactgtctgaaatactgtctcctaaaagataggacactacccagtgtctatctatcanggactggctaaataacctatggtgcatccataccgcatagctataaaaagaaaataaaagaacgtaccccataaatatacacaccaactttgtacccacagaaattaaaattaaacatttttaaaatgg

SEQ ID NO: 17457 - DNA, 723 bp, Homo sapiens
  misc_feature 506, 541, 553, 622, 707: n = A,T,C or G
agtacttctagaattaattaaggcgggtatcacaaaatattttattttatatctactgttcttacacaatattttgctttggcaagtatttttatgtggaaaatgatttatatgtcatacctatcagaatcaaattgctaccaggcaatatatataacataagtgaaagtattaatagtttatacacacatatacatataaatatgtatatgtatgtatctatatgtgtgtgttaatgtaaactaatgttagtattcagattatcttgaagtattggactgttgagaaaatggaattattaacatgcatttaaggatatacaaatataaatatatttttcttgaattagcattaaagaatgaaatagctgcattacatgcttcatacattttagtttattttggaatatgtcaaaatattttgcaatgtgattatactgttttccataataccagcagtaatgaaagtcacagtagctctacatccttgcatgcacttggtacggntagtatagtctttttaaccatagctcttctaatangtgtgcaagtgnatttcattggtgctctgaattgtatggggtctgagttctttttttggaagacatccccagtaaatgggngaatatagatcacagcttggagctctttctgtccattcaaattttgcaaatgggattttttttattgtttgcgaaaatttgggtntgataccgggaaaaaa

SEQ ID NO: 17458 - DNA, 337 bp, Homo sapiens
  misc_feature 20, 21, 22, 23: n = A,T,C or G
ggtaccgggccccccctcgnnnntacttctagaattaattaaggcgggggagggaaacacatttaagtgagcccaatgcactccaccacttttcccttgcgaccagggtcgagaggctggagagagagcaatgatgagggctttcaaggggctggagaaacaaggactgtgagcaaggattccaaggcagagagagtagaggggctaagaccccggggaaagagaaccatacaacagtgagtctgactttctgtacactattaccctttagtatttgcatggggcaagagaccaagaatccaagcagaaagtgagactaagaggctaagctttcagt

SEQ ID NO: 17459 - DNA, 412 bp, Homo sapiens
  misc_feature 37, 95, 131, 254, 336, 350, 389: n = A,T,C or G
agtacttctagaattaattaaggcgggcataaccttnctactctctctctctcacacacacacacacacacacacactgtctctctctttcattnccatattataatgcaagttattgaagttcttctctntgtcttttattcccctgctcaaacgtttttaatgattttcagaattttgttgcaagttatagattacacattatcatgtggactaccatttaataattactgtcttgcctcttatgagacagngaagggtgttcccaagttgtggtagacagggtgtgttcctctttgcttgtgatctaccagtactatgttttcattggcctanggtgcatattttancattgccgaaatccagaagtgtcttaaaattgctggcgnccaggtgtcagctgtgacgtatt

SEQ ID NO: 17460 - DNA, 407 bp, Homo sapiens
  misc_feature 395, 397, 398: n = A,T,C or G
agtacttctagaattaattaaacaaaagttgtctttcaaattctaatggagatgattagatttgtaggctttagtcttcctgctttgtcctaggcaacgtcccttcttgttaggaggcccctgaagatgattaatttcatccattatgcattaatttcaggaggttaactctcaaagggccaggtcctttctttttgtttgatactcactctagctctctactcagtatatgtgacatttaaaaattcttatttaaccacaaggtagaataaagcatttgctcattaaaataccttctccctaaatgggatttattactgaatgagaataatggacctattgttattatttctgctccattttcttgtaaagaatgtatttctttgtgttagccnannaaaaaaaaa

SEQ ID NO: 17461 - DNA, 236 bp, Homo sapiens
  misc_feature 9: n = A,T,C or G
acttctagnaattaattaaggcgggggacgatggccaggagcagtggctcacgcctgtaatcccagcactttgggcgcagatcactctgccacccacttggtggggtgacaagaacaagcttctacccatttggcaaataggagctttctttgattcgtcctgacaactttttttttccttcagacagagcaagactctgtctgaaggaaaaaaaaaaaaaaaaaaaaaaaaaaaa

SEQ ID NO: 17462 - DNA, 425 bp, Homo sapiens
  misc_feature 210, 230: n = A,T,C or G
agtacttctagaattaattaaggcgggggaggggtggactatttcccattcagtcagtgaagttagatttctctaatcccaaaattagacaaagacaatacaagaaatgtaaacaccaatattcctgatgaacactatcgccgaaatcctcaggaaaatgttggtaaatcttgtcaatatgcaaaaagaataatacctcatgcccaaatntgttatccaaggaagataanattggattgagatccgaaaatcaatttaatatatcgtattaatagattaagaaaaaatatgatcagggtcaatagatatagaagcgcacttgacaaaattccatatcctcttacgataaacactcttcatgaactaaaaataaaggggacttcttaaatctgatgaaatgcatctattgaaaaattacagataac

SEQ ID NO: 17463 - DNA, 386 bp, Homo sapiens
  misc_feature 30, 77, 171, 211, 239, 253, 314, 327: n = A,T,C or G
agtacttctagaattaattaagcctattgngcaggattctgtcggtgaaaacatctaacacacgtgaaagatattgngaacactcatgaactatatcaaaaagaaaaataattagggttaaaaagaaaaaaagccttggccaggcgtggtggctcaagcctgtaatcccancactttgggaggccaaggcgggtggatcacctaaggtcanaagttcgagacctgcctggccaacacancaaaacctcgtctntactaaaaacacaaaaattagctggacatggtggtgggtgcctgtaatcccagctactcangaggctgaggcangagagtcacttgaacctgggaggtggaggttgcagtgagctgatactgccactgcactc

SEQ ID NO: 17464 - DNA, 477 bp, Homo sapiens
agtacttctagaattaattaaggtggggtactttaagaaccagaaaacatgtttggtttatttaaaatataaataatacatctgcgaaaggtataccttcacttactccagataacttagcaaccctgtgatatttctatgggagaacaactgtagaatgtaggtcccttgaaagaatactgtgccattttttaaactgaatgcaattttattttattctcagattggtatgattgtgtctatgtgaccatgtctctgaaaaaagctatctcagactatgtgcattatcccaaaacttcatggtggcttcccaagagatgcagggcttctcaactttccatttgaaatatggccttgagacatacagtttgtattgctatgagcgaggaaatagagacaaatggaatcaatgcccagcactttgggaggccaaggcgggcagatcacctgaggtcaggaattcaaggccagcctggc

SEQ ID NO: 17465 - DNA, 384 bp, Homo sapiens
  misc_feature 361: n = A,T,C or G
agtacttctagaattaattaaggcgggtcttattcatatctcatattttagcacaattaaatattgcgaacatttagatgtgctagatctcaactctcttgatcttaatgactctgcttttggattgatattttaatccaatgagacatagattatttcttcataaagccaccaagtaatactatcactggattttacctgagcttttcagatataagctatggtttctgtagcatatattacattctaatacaaccctaaactacagattacagaatttaaatgttgatacattgttttgtaatgatatcaagagtcagtgtggtgtctctcacacgttatcaaaaaaaaaaaaaaaaanaaaaaaaaaaaggcggccgcccc

SEQ ID NO: 17466 - DNA, 371 bp, Homo sapiens
  misc_feature 1, 7, 11, 25, 52, 105, 199, 321, 348: n = A,T,C or G
ntaagcngggnaccgggcccccccncgagagtacttctagaattaattaagngcgggggaagtgtcctggcctcagcctcctaaattcaacctttttttaaagtnttcctcattaactgaattgggcacttccccccctataatctcttacataatttgttttaattcttttgacgtatgcattacataccacccttgnattggaactatgtatgtatctctttttcattcactcccctttccttccctgtcccattccttaagagaactgttatcttccatgagggaagcactcctgcaacttttacgtgtatgtgtgtntgtcaccatcttctaccatgttaattntctgaactgcacaatcacaattt

SEQ ID NO: 17467 - DNA, 326 bp, Homo sapiens
  misc_feature 1, 26, 45, 99: n = A,T,C or G
ntaaccctcctaaagttttcaaaagntccggtaccgggccccccntcgagagtacttttagaattatttaaggcgggtcttgaatatttacttggagtncacttcaagacccgcgaatcatgcttttcctgatagagaatcctttaaattctcttttctaaaatgtacccatctctctacagcatctgccttcaatggtagcatcattttgcacgttaatctttaatttttttccaaagctaatcaaggcattaccccggaggccgggcgcagtggctcacgcctgtaatcccaacactttgggaggccaaggtgggtggatcatt

SEQ ID NO: 17468 - DNA, 408 bp, Homo sapiens
agtacttctagaattaattaaatggaaccactacttatatacagatttacatgcaatccagatctttaattttgccttcacaaaagcctaatgtctgtaattaacctttaatttttatttctgtatgagacaaaagttgaggacttggtgaaaggaaatagcagttacagcaaaacctcagtgattacaattgaggaaaaagtcaaaattataaaatacctttaaagacatgcactttccatattttcaagtcaattttaactaaaaactaagataatgtttcctagtagagttgcttgaagattagactagacagggttgatttattattagcatgtcatttgtacataaactagtagaaaatagcagttttaaaagttttctatttcagttttgtttacactccta

SEQ ID NO: 17469 - DNA, 349 bp, Homo sapiens
agtacttctagaattaattaaggcgggaatttgccataagtgaggttttttcaaaccccaatttctggcattaaggtgtaattcagaagctctaaggaaaagggtgatatttgccattttttcagtaaatgaaattattactattattactatttgccaaagttagtaaataaaaccaatcagacatgaaaataactgactttaacagagcattttctaaacacttctaaagattctaagttttctaatcattcccaaatggatgacattggacacaatggtcgccaaacttctttgttgtttttctttgttgttgttgttgtttgtgtgtttttgagatggagtctca

SEQ ID NO: 17470 - DNA, 453 bp, Homo sapiens
agtacttctagaattaattaaggcgggcactgcagctgcctgcgcataacacccagaaggcacgctggctccaacaggcgatgcctggctggtggcaggaacccatggaagacgtatttccaaaatcaagagtccatccaggacctcaaattctggcccagggctgggcatggtggctcacgcctgtaatcccagcactttgggaggctgaggcggtcggatcacctgaggtcaggagttcgagaccagcctggtcgacatggtgaaaccccatctctactaaaaatacaaaaattagccaggcatggtggcgggtgcctataatcccagctactagggaggctgaggcaggagaactgcttaaacccgggaggcggaagttgcagtgagaagagatcacgccattgcactccagcctgggctatgagagcgaaactctgcctaaaaaaaaaa

SEQ ID NO: 17471 - DNA, 297 bp, Homo sapiens
agtacttctagaattaattaaggcgggagggaggaaaagaacaaggtagggtgggagacagcagggaaggaaagaaaaaaagggaagaaaggaaaaggaaaggaggaataaaagggaagagagtgattgtcaccaaagtttacttgacaaatatcctagctaacaatcaagggaaaaacagctgcccctacccaaattccgtctcaactttgaaaaccacctgtggggggaaagctatacactatgtaacttaacaagagttagtgaactgtcactgtcctgcctatgcagagcagc

SEQ ID NO: 17472 - DNA, 476 bp, Homo sapiens
  misc_feature 17, 24, 33, 35, 38: n = A,T,C or G
gccgctttttcaacccngaataangggaaccangntgngtccgggcccccccttgagagtacttctagaattaattaaggcggggggtagcagggtaggcaggcagcatattcatcctcaggggagaacagcaaaagcccagaaggaattttaatttctcttataaaacaaaaatctcaagacaaaaactttactgccaaactttacatggaaagcaaaaataaactatttgctttatacctgctgccacaggtatgaaatattttattagatgactgtccactcaccattaggctgactctcaaattatggacaggaagagagcaaaccgttcacttgatggacgcagctaagatgaacactcagctgctcacattgtgttcaggttctggtgcattttgaacacttcgtaagagaaattactgaagctcttaataacaaacttgccttccagaacagaaaggttttatgaaaaa

SEQ ID NO: 17473 - DNA, 440 bp, Homo sapiens
agtacttctagaattaattaaggcgggtcatatggtatttttatgtttaaattttaaagaaactgccaaactattttctacatcatgtccaagtgggacttatttcagaaatgcaaagatggcctagtgttaatattcatacgttttgtgtctgtttacctcagcctagtcccagacctgatattgggaaatccatcacatgactcattatgctactagtaatcaggagaaatatcagatcattatctacatacatggctctaacaaaggtcaacaccaatcctgatttttaaaactgccaataaaataggagtcaatggatattcctctatctatctatctatctatctatctatctatctatctcatctatctatctcttcccatcctaaagtcagcatctttcttaataggggaagtattagaggactttttactaa

SEQ ID NO: 17474 - DNA, 422 bp, Homo sapiens
  misc_feature 163: n = A,T,C or G
agtacttctagaattaattaaggcgggggtctggtttacctctatcttctatgcataataattgatagtggctacctttcattttcaaaagtgtctgattttgaaataaactacatgatcactctatcacaaactacacagagtagattttgtctttttccantctgagaatctgtctgttaatgaatggagttaggcaatttatactttttttctaataattgatatattggattttacttctgagtactcttttttgtttttattttctgtttcgtaacaatgtttcttgttaaatttttgcctcttttgttatgtagactatatttttctgtcttttcttcatcctctaaagatttccaaggttccagttttcctatcataattaccactgtgagttttaagacatactcaaatatata

SEQ ID NO: 17475 - DNA, 372 bp, Homo sapiens
  misc_feature 363: n = A,T,C or G
agtacttctagaattaattaaggcggggtttctctgtgttgcctaagctggtcttgaactcctgagctcaggagttccacttgccttggccttgcaaagtgctgagaacacaggcatgagccaccatgcccagctaagtatctttttgaataaaatttcttcatgcaattgagattttcagtttacatatcagtctcctatttcaggtgctaatcctatctgccaagtatgagactatatacaataaaaatttaaagttctcttggtaaaataagaaaaaccccaattaataaaaatggtaaagaggtattaaaaatcctcaaaaaggctttggctagctaccatagaaatattaaaaaacanaaaaaaaaa

SEQ ID NO: 17476 - DNA, 272 bp, Homo sapiens
  misc_feature 19, 58, 259: n = A,T,C or G
ccctcgagagtacttctanaattaattaaggcgggagggagcgaagggcctcactganagatgtggttggaaaacagaagtcctcccaaactccctgaaaggctctcaggaatcccccatgttccatggatcacactttaagaactgctagtctaggtcattacctacattgtctcatttagtggcattatttctagcatctcagaacatctatttcatgattctggcacactgagaggtgccatagtgaaattatcanaaaaaaaaaaaaa

SEQ ID NO: 17477 - DNA, 444 bp, Homo sapiens
agtacttctagaattaattaaggcgggataaaccaaatttggctagctgaactgtataattttaaaatatttccttttatctcttattctggctttacctgacatgatggcagcatgtgagcaaggacaattccaacatggccctgaaaaagtcagtaagacaaacaagttagctttggtccccacagcttttcctcattctgaaaccacaatcttgccaaataaaaacatgaccttgaatgtaatatagaaaagtctcataatcttagaaagactaaaaaggatgaaaggagagataaaataccccaccgctgcagaaatccacaattctgtcaccaggtttggcctgatttgttaccacatagacaaggttgttcaactgttgctgcttcctcaaagctcgatcactggacattttacctgaaaaaaaaaaaaaaaaaaaaa

SEQ ID NO: 17478 - DNA, 312 bp, Homo sapiens
  misc_feature 9, 39: n = A,T,C or G
acttctagnaattaattaaggcggggagaaatgtccagnaatctaatacctgctggagataaaaacaatacattataaacctctctttctttttcttagtcttagaattaggggctaaattcacatgaatcattttgtgtatgaactaaaaataaatataatgagaacatcttattgctcttagtgctgatgaccaggcttaaaactatttctgcatgtcacttagtaaagttaacttccttaaaaaaaaaaacacaacagctgaaatgatgtcactgcttccagtgtgctaactaaaagaaaaaaaaaaaa

SEQ ID NO: 17479 - DNA, 463 bp, Homo sapiens
  misc_feature 23, 39, 47, 55, 102, 104, 106, 111, 113, 115, 117, 138, 146,151, 159, 163, 164, 167, 169, 185, 186, 200, 210, 222, 233,235, 252, 255, 258, 289, 296, 302, 326, 333, 336, 367, 369,370, 371, 381, 388, 399, 401, 407, 408, 410, 411: n = A,T,C or G
  misc_feature 413, 416, 417, 418, 419, 420, 422, 428, 429, 440, 447: n = A,T,C or G
agtacttctagaattaattaagntagacatttgaaaagncttttttntatattgnagcaactctgaaaggatgtttaatgcctactccttaaaaaaaaaatnanantgcantntncncctgcaactcccgggttcaancaattctnctgtntgatcctnccgnntantngggattacaggagccnnccaccacgcccggntaattttttntatttttagtanaaacagggttncnccatgttggccaggctnttntcnatctcctgacctcgtgatccgcccgccttanttaaggngggggnggatcacctgaggtcaggagttcnaaaccanccngctcaatggggggaaatcccatcttttgccnannnaaaaaaaaanaaaaaantttttgggggnantttggnncnngnccnnnnngngggggnntttttaaaaanttttttnaaaaaaaaaaattttt

SEQ ID NO: 17480 - DNA, 273 bp, Homo sapiens
agtacttctagaattaattaaggcgggagaggagaggaaaaagtaactattgggtactaggcttagtacctgggtggcaaaataatgtgtaacaaacctgcacatgtacccttgaacttaataaaataattgtttgtgtgcatgtttagaggaattcgaagcctctgaaggattttaagcaaggacctaacttggtcttttttccctctttaaaaaaacacaagagcacggactatctagagaatggatagggggaaaaaaaaaaaaaaaaaa

SEQ ID NO: 17481 - DNA, 341 bp, Homo sapiens
  misc_feature 25, 35, 69, 111, 116, 120, 125, 156, 174, 192, 212, 220,229, 230, 236, 250: n = A,T,C or G
agtacttctagaattaattaaggcnggtatcaaanaatgtactgaacgttctcacctttgacaaaaatnttaaaagccattctaaaattaataccaacaaaatgttatatnctttntatncattncaaaaggcactctaacttgatgacttaattngatcttcacaacaacctngtgagttagggtgaacanatatttgcttatttgagacngacacaanaagactggnngaaatntcttgcctcccatntagaaccctaaactattactttatttcagtacatacaggcaagcattactatcttgatttcaccaaagaagaaacaagtacagagaagaaa

SEQ ID NO: 17482 - DNA, 490 bp, Homo sapiens
agtacttctagaattaattaaggcgggcggatcatgaggtcaggagatcgcgaccatcctggctaacagtgaaaccctgtctccactaaaaatacaaaaaattagccgggcgtggtggcgcacgcctgtagtctcagctactcgggaggctgaggcgggagaatggcgtgaacccgggaggcggagcttgcaaagagccaagattgcgccactgcactccagcctgggtgacagagcgagactccgtttcaaaataaataaataaataaataaataaataaataaaataaaattgcttttggaaagagaagagctatatatatatacattagtaaataaagtattaaaaactaaaatattgcactcataaagaatacaatgaaaacttgtactttttgatgaagtagatattagaataaaaggggctagttaagcatttgcataaatagtaaatactaatgctaaaatatgaacaccctaaataaaaagg

SEQ ID NO: 17483 - DNA, 207 bp, Homo sapiens
agtacttctagaattaattaaggcggggttgaggaaattatttcaaagtaattatgcagtgagtttttttaaaaccttataaactaagcatttagtagcactttggaaagtgtagtgaaactggcacatggagaaataaattcaatacagaaaatatgataccaggatcacatagcttagggtcttaaaaaaaaaaaaaaaaaaaaa

SEQ ID NO: 17484 - DNA, 227 bp, Homo sapiens
  misc_feature 204: n = A,T,C or G
acttctagaattaattaaggcggggccctgtttatatctttcggtatcagttaggaaatactttgatataaaatttggatttatatgtcaatcagcttggcaattgaggttcttttgttgctgatcagaaatcttggctggcagttaaatatgtcctttttataaaaaaaaaaaagaaaaggaaagaaagaaaagaaaaggaanaaaaaaaaaaaaaaaaaaaaaaa

SEQ ID NO: 17485 - DNA, 422 bp, Homo sapiens
  misc_feature 349, 358, 407: n = A,T,C or G
gtacttctagaattaattaaggcggggtcaaaacaaactactcaatagttactttaattgcctatagtggagaaaaccttcaaagatttagacttatatatatgacccaaacagcttattcaggtgatattttaaaccttaagaattagatgtaagtgtaagtaaaacttaagatttcatttttatttactaacattgctcctctacagggacaatttctcactttctctgaaggcactgacacagattttggtgattattgctgtatgctgggccatatgttacacggcagagtacagcatgtggcaggctaatttggagcaatgcaatttagaattttggccatttnccccatttntggaaacctttcaggtactggatttaccccggtggaatatttattttgngcccttaaaaacccc

SEQ ID NO: 17486 - DNA, 436 bp, Homo sapiens
  misc_feature 420: n = A,T,C or G
agtacttctagaattaattaaggcgggagaagggtaatagatttggaataaaccaaaatgcatacccttgtctagtccaacaaaagcttatgatataaaagaagctaacatttttcaaggtaaatatttttattgtttttacattcttttcaagagtatgtaggagaataacattttcaagtgtaaggaggcctaggaaaatattcatattgtttctggaagaggaagaattggttaaacaatagaaatggggctgggtgccatggctcacgcctgtaatcccagcactttgggaagcccgagctgggcatatcactaggttaagagatctagaccatcctggccagcatggtgaaaacccgtctctactaaaaatacaaaaaattggctgggcgtggtggtacatgcctgttgtcccanctgcttgggaggctga

SEQ ID NO: 17487 - DNA, 628 bp, Homo sapiens
  misc_feature 50, 51, 52, 93, 123, 582, 604: n = A,T,C or G
gggtgccgggccccccctcgagagtacttctagaattaattaaggcgggnnntattctttattattaattattattaagtaagttctcttaantcaaactcatataaagagtcatgagacttnccggaaaaggaaagaaactaaaatttactgagcacctcctctgggatagaagcatttaaaaaactaatagagaagagagaatcaaggaatatttcctgagagatgttcctctgagttgacaatactctggggcacctggcagccaggctatggcttttggggccacgtccatttcttcagcggaatcctggtaatgcagtgctgctggatgggcccctgtattaaaccattcttgccctgctataaagaaatacccgagattgggtaatttaaaagaaaagaggttggccaggcgaggtggctcatgcctgtaatcccagcacgttgtgaggtggaggcgggtggatcacttgaggtcaggagttcgagaccagcctggccaaaggggcaaaaccccatctctactaaaaatgcaaaaattagctgagcatggtgggtacgtgcctataagtcccaccnctccgggagcctgaggcagganaatcctttgaccccaggaaagcaa

SEQ ID NO: 17488 - DNA, 450 bp, Homo sapiens
  misc_feature 192, 418, 419: n = A,T,C or G
agtacttctagaattaattaaggcgggcggagggctcacaccctgaggctcggaaggcgggcggacggctcacacagacccacaaggaccaaagaggaacgtgcaggactccaacacaaacggaggacgatggcagaacagaagagctgattaagtttctgctgcttgtaccataaacttttcatcagccanactgtttgcctgaaagacctaatcaaggctgacaagaattcaaagccatttcaaagtgctcctcaggggtgaacgtggccccatgtccggcacatgctctgctctgaacgctctctcttccagcagggacggccccagacatcgagtatcacaaccaactcaaaaatagactgaaatgtcacagtatcgccaggatcaaaagaaggtctcttaaaaataaagggtnncttccattaataagtaaaacaagaaaaaacc

SEQ ID NO: 17489 - DNA, 363 bp, Homo sapiens
ttgcgttttggttttggaaatcacttcagacctataaccaatattgagtgagttgaaaagaattaattacttccaaatacaaggcactttacattcttctaaggagaggatgcaacacaaagctatttggtcagcttgatacaaaagctcttaggtgtgctcatgaagtaagtcaaatgtatacattttacaaccacatattaaatagaattagttttttctttttccttcccatttctttgaacagtcttattcagaatcttcatcattagcaactttgtcatcattggagcccttttctctagaacacatcagcctgggtgacagaatgagaccctgttaaaagaatcttttttttttttt

SEQ ID NO: 17490 - DNA, 339 bp, Homo sapiens
  misc_feature 32, 33, 39, 53, 76, 78, 85, 112, 127, 135, 143, 169, 181,188, 192, 197, 199, 204, 207, 210, 215, 220, 229, 230, 232,239, 243, 252, 256, 262, 267, 270: n = A,T,C or G
agtacttctagaattaattaaggcggggactnnttgaangaatgctgcccttncataatcaggaaaaagcaaattntnaacagtntcatattatcacatatatgacacatantagacatactatatnaactggcncatcccantttttaaatacctggatcaagactgnggttgggaacanagctggnactnttatncncccancancanttttncatantaacctccnncnaaatgcnttanattctactnattncacttnacttnctncaaaataaacttagcacttatagttgagaatgaagttccccagatgattctgctatactcccatttccc

SEQ ID NO: 17491 - DNA, 359 bp, Homo sapiens
  misc_feature 320: n = A,T,C or G
aaggcgggaggtttctaaaggcaaaaaaaactgtgcccttcctggctctgcaaccttcacctcttcccatccgtttcccagctgcatcaatctatagcctctttagaggactctcaactaactgcctcctttatcaaagggaggacttccagctccctgcctcctatctgcttggtgctctctgcctttctcttccttaaaaagggaaaaagagtgtgttgccgggcgtggtggctcacacctgtaaccccagcactttgggaggccagggcgggtggatcacgaggtcaggagatcgagaccatcctggccaacacggngaaaccccgtctctactaaaaatacagaaaattagcccg

SEQ ID NO: 17492 - DNA, 417 bp, Homo sapiens
  misc_feature 23, 28, 31, 37, 42, 44, 47, 52, 54, 56, 57, 58, 61, 65, 69,72, 73, 76, 80, 82, 86, 90, 93, 94, 95, 96, 97, 98, 102,105, 116, 120, 123, 126, 128, 136, 142, 144, 151, 162, 165,172, 173, 174, 180, 182, 193, 215, 253, 313, 316, 323: n = A,T,C or G
agtacttctagaattaattaagncgggnganagttanaaccncnttnatttntntnnngtncacntccnggnnctnccantngctntggngannnnnncatnaantcataggctgnactnganccntnaaaagggnccatgncncctacgnactccgaactnaanggcctgnnnattatnangagggcggtgnctctgtatctttggactacccnctgctcatgaaaagaagctgttcagcaaaaccatgaantttccagccacataccagaggaaaaacactattattaaatttcaaaacataaagaatgcnatnaaaacanactaccaaatctgtctaggcaatttttgtagaaaagaataaaaatagacatatgatgcatgaaaagataatttttatgaataataaatcaagaa

SEQ ID NO: 17493 - DNA, 326 bp, Homo sapiens
  misc_feature 33, 44, 66, 110, 162, 212, 220, 275: n = A,T,C or G
agtacttctagaattaattaaggagggcagaanatactgaattnaagatattaacaaagtgcccangtgttttcattgagtagccagtcaaacctctgggattgaagctnaggaatgaagttatagttagacatgtagacataaatcattcttgaactgatngtcatttaaatctatatatttcaaactttatccatatgagtgcaacttgnaagctttnttgtcatatttgcatgatacttttacttaatattttcaaatctattttaagttanctcactttttgaaagcgtagccccattctaaacaataatatcttgaatttg

SEQ ID NO: 17494 - DNA, 284 bp, Homo sapiens
  misc_feature 29, 49: n = A,T,C or G
acttctagaattaattaaggcgggcaggnagaatggtgtgaacccgggnaggcggaactggcagtgagccgagatcacgccactgcagtccagcctggtcaacagagcaagactccgtctcaaaaaaaagataaaataaataaattaaaacaaaacaaaacaaaactacccaggggagggattcagtaaattacagagcttccttggagtgaaatttcaggtaatcactaaagcaagtggaaccgtggaggtgtgggggagacaattttacctgagaagtaagc

SEQ ID NO: 17495 - DNA, 465 bp, Homo sapiens
  misc_feature 397, 425, 426, 427, 428, 429, 430, 431, 432, 433, 434, 435,436, 437, 438, 439, 440, 441, 442, 443, 444, 445, 446, 447,448, 450, 452: n = A,T,C or G
agtacttctagaattaattaaggcgggggaggtaattggtaaagaatgttttcccaatcttaaacaagtagtaaattaggtgatattttctatttataaccggtaaaaaccagacaagaatttctttctgctacaacttgctgaacagagcatttaaaacctttaatgactagatgagttcattttctttaaatgctgtgcttaatatttaagctacatcttatttgaaatggttagtttagggataaataaataaaacattccagatgcaatcttccagcaacgacattccagcaatttccctgagaataaagtcagaaaatattccaagttttgaacgtcaagtgttttcagatgataactagtaagttttcccaaacatctaaaggttcaaacnaaaacctttaaaaagccctttcccaaannnnnnnnnnnnnnnnnnnnnnnngngnccccccccccggg

SEQ ID NO: 17496 - DNA, 310 bp, Homo sapiens
ccgggccccccctcgagagtacttctagaattaattaaggcgggggtggtagaaataataataattatctgaagcttggacctgccactcattcattctcttgctgggtactctctgtacctcagtttcccccactgctctttgaacccccaggaccctctctcctactggctggtagctcagcccctcaactgcttgcattgtattcaaacggctttgggggtgctgcttccggtactgtctcctcactatctcaagggctctattatcagaaaatcaaaatctgttccaaaaaaaaaaaaaaaaaaaa

SEQ ID NO: 17497 - DNA, 425 bp, Homo sapiens
  misc_feature 18, 23, 24, 28, 31, 32, 38, 39, 43, 46, 50, 51, 53, 55, 57,60, 67, 70, 76, 84, 85, 87, 99, 100, 102, 118, 146, 170,171, 178, 180, 185, 192, 214, 256, 266, 270, 293, 308, 414: n = A,T,C or G
attaattaaggcgggcanacctnnttgntcnnagtccnnaacnatnctgnncngnancgngagaacngtnggtcancttacaanntntgaaaattagcnngncagtggttggtctcangcgctgtagctcctaaggtgctccctanggtctgtggcaggtagcaacctgnntgtaacncntgcangagggcntgcttctgagctcaagcgcgtngtatcatccaacggcttgttattcacagcctcttgtagtcanaaaactaggnggantactaactatactcagtaaacantctgccagcccgggncgcggttgctcacgcctataatcccagcactttgggaggccgaggtgggtagatcacgaggtcagggagatcgagaccatcctggctaacacagtaaaaccccatnttttactaaaa

SEQ ID NO: 17498 - DNA, 403 bp, Homo sapiens
  misc_feature 38, 49, 84, 85, 145, 263, 307, 308, 309, 310, 323, 329, 330,347, 349, 352, 354, 356, 358, 359, 361, 369, 371, 373, 374,385, 388, 390, 391, 392, 393, 394: n = A,T,C or G
agtacttctagaattaattaagggcgggcggagggtgngtcaaaaatantaatctttatctaaagcttggacctgccactcatnnattctcttgctgggtaactctatgtacctaagtttcccccactgctctttgaacccccangaccctctctcctactggctggtagctcagcccctcaactgcttgcattgtattcaaacggctttgggggtgctgcttcggtactgtctcctcactatctcaagggctctattatcanaaaatcaaaatctgttccaaaaaaaataaaaaaaaaaaatatannnngggcccccccccngggggnncccccatacccctttananaanantnannancccccccncngnncctgttttttnaantnnnnnaaaaaaaaa

SEQ ID NO: 17499 - DNA, 406 bp, Homo sapiens
agtacttctagaattaattaagggggggagtgttttaaaaagctatgtgcatatgattgccttgatgaaaatgaattatttaaaaataaagtcaggcagacgtaacacacacagaagtttctctggcaagatgttccctgctaccaacactaggtatttctgagtagtacaatttgggatggtttcttactttcatctctttcctaaataattggaacctttaaaattggttggaacacaaaaatagtcattattttacattaaagttaactataggtatctatgggtgccagagtttccatcttccttcttttgtcctgactttacctaattaatgccaaacctagaagtgtgggacagaaattagaaaaagtacatcttaaataagtccacttttctacttttc

SEQ ID NO: 17500 - DNA, 473 bp, Homo sapiens
  misc_feature 1, 25, 36, 56: n = A,T,C or G
nccgggccccccctcgagagtactnctagaattaantaaatttaataaagtcattnaagaaaacactatatttgagtggattctctaaggtttcatcaagacagagatgaggctatgggaagaatgaaaagtaagttgcaattcaacccaaaattcccattgcatatcacctttatcattctcttctatcttacggaaaaacagaatttaggccagaaacaatctttcagatcatgggtccactgctcttattttaaaataagtaaaaccatgcctagagaagtcaaatccttttcctttttcactccctgccctcaacctgtaataatgagaaattttatgggcttagtcttttgctttcttaaatcaatctttgtaattttcctttttctttttgtattgattcttatctaggtgatatcttagacattctgttcttaaagtatgatttaggtatatagtcacaatattag

SEQ ID NO: 17501 - DNA, 562 bp, Homo sapiens
agtacttctagaattaattaaggcgggacagagccacatttacatggcccgtgcctttcggcaaaggtatcaaagcaattgagtgaggaaatgaaactttttaaaacaaataatgttggaaaaattggatccatatggggagaaaaaggaccttgactcctacttcacacactgtatacaagtttgaaatggatcatagtccaaatataaaagttaaaactatgaagattctagaagaaaacctaggagaatatcttttagacctggtaggcaaagatttcataaataggacacagaaacaatatcataaaataagatttacaaattcaacttcatcaaaattaaaaacttttgctcattgaaagacatccttaaggaaataaatacgcatagattgggagaaaatagtcacaaagcattctgacaagggactggtatccaggattaagaaattccacgattcagtaataaaatgagaacccagtttttttccccccaaggataaagatttgggcaggtcttcacaaataaggaaacatgaatggtggccagtggacacctg

SEQ ID NO: 17502 - DNA, 269 bp, Homo sapiens
  misc_feature 238: n = A,T,C or G
cttctagaattaattaaggcggggggaaatatttattgagctcctattatatgaaaaaacttgagatatattcttaaaagttatttcatttttactttacataaatacaaagttgagaaagtagaagatattttggttagtctaattcatttttgaaaatcttacgtttaaattttatagtaaaatgtgcgacatacatcctatgtactgtggctttaatagggttttatttctattncatctctctatttattttctattcatctctc

SEQ ID NO: 17503 - DNA, 447 bp, Homo sapiens
  misc_feature 5: n = A,T,C or G
agagnacttctagaattaattaaggcggggaaatagtatattcttacataatagtaataaaatatgtgtttgatgatgtgtattaaaaaaacataaccactagtggagtgggaaagcatagtgtcattttgaaattataagaggaaacaaaggaataaattgtaacttgatcataccagtatatataaagaaaaggaaaaaagaaaattaatgaggtaagtttaatagtaaatataagcaagagagaaggaataaaatgaagaatatcagtgattatattaaatgtaaatgagcccaattttcctatcaacagacagagactatcagaatggattaaaaacaaacccagtgaatatgttgtttacaagaaacacacttagagtgataaagaagtatttaaagcaattggaaaagcaatactacagatatataaagagattaaaaatt

SEQ ID NO: 17504 - DNA, 409 bp, Homo sapiens
  misc_feature 184, 203, 234, 260, 272, 297, 325, 341: n = A,T,C or G
agtacttctagaattaattaaggcgggaggattgcttgtgcctgggaggtcaaggctgcagtgagccatggttgcgccactgcacttcagcctaggtgacagagtgagactgtgtctcaaaaacaaaaacaaaaaaaggggaaatctttatttttttttttaaacctcatactaaaaacaggtntcaggttatatgtaaatanaaactgccaggttgatcaattttaatttctnttttaatcacttatggatatcatatnaatgtcattcanctttttaattttgtcattaatcaanctgagtagtaaactgtcattttagtatnggttcaaatattcagnggataattgttaaaatttcagtacccactttgtaaattgaaaatcatgcggaaaaaaaaaaaaaaaaa

SEQ ID NO: 17505 - DNA, 520 bp, Homo sapiens
  misc_feature 4, 14, 15, 26, 64, 71: n = A,T,C or G
cctnctaaagggannaaagctgggtnccggcccccccttcgggggtccttttggattaaattangggggangggggggggatggcattagggaggatatacctaatgtaaatgacaggttaatggggtgcagtacaccaacatgggcacatgtatacatatgtaacaaacctgcatgttgtgcacacgtaccctagaacttaaagtatgataataaaaaaaataataaaagaaactttcaaaaacaactgagaggaatcactggtttttaatatatttttaatattttaaaaatatttcaaatttataataaagttgtaagaattgcacaataaaattccaaatacccttcacttcaaaaacaaaaaacaaaaagctagaaagatctcaagttaacaaggtaacatctcaactaaaagaactagagaaccaagtgcaaacaaaccccaaagctagcagaagacaagaaataaccaagatcagagagaagtgaaggagatagaggcataaaaaaaaattca

SEQ ID NO: 17506 - DNA, 285 bp, Homo sapiens
  misc_feature 271, 272, 274: n = A,T,C or G
cccctcgagagtacttctagaattaattaaggcgggaggctgactgtcgtaccagccctcacagctatggagaggcaggaccaagacgagaacccagactttctggctccaagtctagtgtgttttcactgcaccacagttacctcctcaaatgctcatttgtggcagagattatcaagatgaactttggtgatttctgattgcctaatgaattgagcagtataaaaaccattttctaatgctggaaaatcagcgttcaccaaggtctttnnanaaaaaaaaaaa

SEQ ID NO: 17507 - DNA, 271 bp, Homo sapiens
  misc_feature 256: n = A,T,C or G
gtaccgggccccccctcgggggtacttctagaaattaattaaggcggggaatgttgcaaaaacagagcaagaaaaagggtgaaaaaaataatattatcattcacttagtcatcaagcctgaaaatgaagtcattttgaccaagttttccccattatgctctaaatatgtcaagttcacttatatatatataaactatttttaattatatatatttcagaagagagtatctggacccttgtctcaagaaccctgccnggggaccttaaaaca

SEQ ID NO: 17508 - DNA, 467 bp, Homo sapiens
agtacttctagaattaattaaggcggggtcaaaatcataatcttacatagatcacttcaaaatatttaaaggcatacattcttacatttaaagaaaaaaggaacacactcttgacttaaagattaaaaaacagacacaagtctctacaaacctggaggagctaaggctgacttggtctgataagagattaggctgttttagatgtggtaacccctggctaactaagatcactgttttatcttttaaaaaaaatctcagttcatagttgtctgtcctttttattctccaataaagtgaaaaagtgggcatttgtttgttaacacatttggtcacagaaaagatggtaaaaataaaataaaatgtaaatttctagccaggcgcggtggctcacctataatcccagcattttgcgaggccaaggcaagcggatcagtgaggtcaggagttcgagaccagcctggccaata

SEQ ID NO: 17509 - DNA, 382 bp, Homo sapiens
  misc_feature 50, 77, 178, 192, 205, 255: n = A,T,C or G
agtacttctagaattaattaaggcgggagagaatagatgttacagcagangaagagcaataccaagacctgcttctnattatggaacttcttactaacctgctgtcaaaagaattcatagatttcagtgatacagatgaagtgtttagaggacatgagccaggtcaagcagcaaacanatctgtgtcagcancggatgttgtgtngtatggagtaaacctaattctgcccttgatgtcacaggatctcttgaagnttccaaccctttgtaatcagtactacaaattaatcacatttatctgtgagatttttcctgaaaaaataccacagcttcctgaggatctgtttaaaagtctgatgtactccctagaattaggaatgac

SEQ ID NO: 17510 - DNA, 520 bp, Homo sapiens
  misc_feature 433, 508: n = A,T,C or G
agtacttctagaattaattaaggcgggcttccttaggtgacatctatgttgctaacctattcaaaacgcaacacaggctgcagaaatatgttacatacatttagtgttattcaaagatgctaacatgacttcaatatagaagtggaagaaatagtttaatgttcttagcattaataaagaattaacattgaaatcacttagcagatcacaaacatacaaataacccactgccaaaatattttaaacatttttaaaactcaaaaaattttaaattaaatttgtggaactcataaatctaaactcacttttagcttttgggggaatatatgataataaattagctatttaaagatttcagttactttttctggtaactctgtgactgcatacattaggctcaagctataaaacaaattaaacaaatatttattgnatttgacaattccatcagaaatttcccaactttctgtctattgaattataaattaacctaagtgctattatctgngtttttttaaaa

SEQ ID NO: 17511 - DNA, 310 bp, Homo sapiens
  misc_feature 29, 36, 38, 39, 40, 42, 43, 47, 49, 53, 78, 95, 99, 109,114, 115, 121, 128, 141, 143, 144, 151, 156, 165, 179, 186,189, 191, 194, 199, 213, 215, 216, 227: n = A,T,C or G
agtacttctagaattaattaaggcggggngttgggnannncnnaatngnaagngggagattctacaacctaaggaatnaccaatcttttattgtntctntaagaacctntactnnaatatnaatgaanccaaatgacatgntnntactgantaatngacttagtnatgcaatctcaaanacaattngantnatngaatntagcacattaaatntnnacagcacccanatggcactctgatgggaactccacaaatcattaaataaacaaataacagattgttcctaaataaccaaacctcctgggacaag

SEQ ID NO: 17512 - DNA, 339 bp, Homo sapiens
acttctagaattaattaaggcggggctgggagttgaagattaaatctagcatctcatcactttaacaagccagtagtctattcgaatcgtttttacctcctttgaaaccatattaagcaagtccattatttcttagcatttctcaaacagctcttactgtcccgtatatgaaatagtacaagaaagtggggaagaaaggccgggcggggtggctcacgcctgtaatcccagcaccttgggaggtcgaggcgggtggatcacctgaggtcgggagttcaagaccagcctggccacatggtgaacccctgtctctacaaaattaaaaaaaaaaaaaaaaaa

SEQ ID NO: 17513 - DNA, 408 bp, Homo sapiens
  misc_feature 6, 315: n = A,T,C or G
gcctgngcaccaaaagaagtagattcctaaaaaccaaaactggtcatttttaaagtgtcctagctgagtcttacagtttttacctctgtaccatgtctagtaatataaaaggaattaaatgatcagtatactaaaatgcctaatggtgaatcatttactctgagggcatgtgtcatatctccttaactcttaaatagttggtctgtcatctaattaagaacgatgactctcacaaaagtttatcgtatctggaattctttttaaatgaaaaaaggccggcaacagtggctcatgcctgtaatcccagcactttgngaggtagaggtgggcggattgcttgaggccaggggttgaaaccagcatggccaacatgacaaaatccaccttcactaaaaatacaaaaattag

SEQ ID NO: 17514 - DNA, 335 bp, Homo sapiens
agtacttctagaattaattaaggcgggtggatgctgtaaaagaaaacagacataagtagagggaaataaaaaataattccaacagtgtttaaccttaaagactccactgtaaatgaaagctacgcacctgacaaaaagtagacttgctgttcaatctacttgccacacaaacagcctcatttatataccaagtatactacaaagatagatcagtcaactaccttttgctcatttctattaggtcctttcattttgtgatatacttctttaaaagaaaagattgcgtgaaatttttccaactttccattcactaaaaaagattttttttttctttg

SEQ ID NO: 17515 - DNA, 365 bp, Homo sapiens
  misc_feature 23, 24, 26, 57, 63, 68, 75, 109, 142, 153, 164, 207, 249,257, 261, 262, 267, 290, 294, 345, 351: n = A,T,C or G
agtacttctagaattaattaagnntntgcactaaaagtaaaaagaaaattgggatanaaatgngcagngtgtgtntattcattatgtggaggcatctttcctatatccnagtttaactaatactggtcctctacctgcttanattaactggtnagaattttatnagcatttcttactatctgttataaaccaaaaatggcaatcttnccacattttgacgtaataattttgagcttattacaaattaanataaaaanttannaacanatattaccttataaaaattcaancggnatgtattgaatattaatttaaattactgttattaatattacatgaaatacncatgtngtaaaattttaaat

SEQ ID NO: 17516 - DNA, 701 bp, Homo sapiens
  misc_feature 67, 109, 119, 137, 141, 208, 234, 253, 324, 332, 334, 357,371, 493, 519, 553, 571: n = A,T,C or G
aaaagcctgggggttacccgggggcccccccttcggaggaagtaccttcttagaaattaaattaaanggccgggggggggttgaaaggcccctaattgaagttgcaagntgaggtggtnggaaaaaagcccttcaancccnggaagcttcaatattctttaattggaaacacccagaagaaatacaccacttagggggcccccaagtngggttttttaccgaaatattgggggnaaattgccccttgggaaanggggtcccacccttttgttggaggccccgttaaaaaaaaagggtttaaaattacctattaaaaaaggaaanaccttggnanttccaaatggttggaaaaaactngtggaaggaaaagnaattattttttaagggttgggccggtttcaacacccttaaaatttattaccaccccaaggaaggaaatttccaccaccccggggggggaaggaaaaggcccctttattaaaaatggccaaantggaccttgggggggccaaaaaagcnttttttaaattccggtaaaccttcaaaaggggcntttaccccccaaggccanttcaaaaaaaaaaaatttcaccaattggggggaattaagaaccccaccttttaccatttaattaaaaaatgggtgggtaattaattaattggtggaaaattaaaaaacccctaattaaggccccttttaa

SEQ ID NO: 17517 - DNA, 712 bp, Homo sapiens
  misc_feature 1, 17, 352, 398, 431, 464, 465, 509, 511, 529, 532, 549,557, 558, 578, 579, 590, 600, 607, 617, 620, 626, 649, 662,665, 669, 675, 682, 685, 687, 700, 701: n = A,T,C or G
naattaaggggggctangggtgatagaagtcaggctcccaccccagctcaagtggatcaccaaagttccaaccccaacttgttctgaaagaagtgcatagtttctaatcccagggcaatggtgaaagagatttgggcagaaggaaatattttttggagtggtagaggatgtacatttattcgtaaaacattaactaaacatccagtgtgtgcccagcactagcagtgacagttccagtgtactatcgtaagtaaatgcctccactatcttgtgtgtgttttcataaaggtgaaaacataggaaaagtcagtatttcttacctaagctgaactgttgggctaattgatagctntatactcacagaagaacattaactacttcaactccaattatatagnaacttataataaattccccagagatttaatccnttaagaaacaccttacaatgaactaaaaatttnnggttttcataagggattttttttttttaaatgaaaaaaataccncnccccaaaagccaggggtnttnccaaaggggaaaaaatngaatttgnntccccaaacccattcccaannaaaaaaaaaanaaaaatggcnaacttgnccccttttgntanggaaanaagcccttttttttgcaaaaaanatttaaaaaattntgnggtnttcatnttttccnatngnggaacatttttannaaaaaaaaaaa

SEQ ID NO: 17518 - DNA, 278 bp, Homo sapiens
agtacttctagaattaattaaggcgggtgggaagagttaagaccacaatggcacttgacggagccaattcaattagcccaaacataccatctgctcttaaaatagatacctctatatttaaaagttacttgatatatgaattgatgaaaaaaaattcgaagaactaacatggatctgcgaagtgaagttgtctcaggcacaggacagtagtttggggaacctgtctgtctctcacattctctattgttaaatttttacaaagaatgtgttttactact

SEQ ID NO: 17519 - DNA, 425 bp, Homo sapiens
agtacttctagaattaattaaggcgggaagaacaattaataattcctaattcaaagcagaggaagtcacaactcagcatgttcacagataaggatccagaaaataggaaagtggattgttcattcacacactgtagaggctaagacttagacaccaaatgccacacagtaaggagaaggaaacaaggttgaacgcacaggaactattcaaaattctgtatctggcactgtactcctttgtataatactccttttaataaagacagaagacaccagagtatacataaatggtgtgttaggtattgtagactgtactacctctgtactcttgttcaactctcctcttctcttttgcttccactattggggcatgaaaaattattcacccttctagcctctaatgcagtttcaataaccatgcatgaa

SEQ ID NO: 17520 - DNA, 416 bp, Homo sapiens
agtacttctagaattaattaaggcgggggtatgtaagtgcttaagactgaaattgtaggatctaaggttagtatgtacttaactctgtaagaaaatattcatgtcttacctcacatctctagggaatgaaagattttagatcagaatggtagggtagaggaaaatccattggggaaattgttcctttggtatttacttaatctgaacattttttaaatgcaattgtaactattgatgaaatgtgaatattgattgaaaaaagacgttgatgttaaataagactttacaagcttgtaaaagaaaatatagttacagaaggaaaacaagtttttaaaaacagctttattgtgatataatttatataccatagaattcacccatctaaagcgctcaattcagtgaattttgtttattta

SEQ ID NO: 17521 - DNA, 341 bp, Homo sapiens
  misc_feature 161: n = A,T,C or G
gggtgccgggccccccctcgagagtacttctagaattaattaaggcggggacaaagtaaagtggcctatatgataataagatgacctgaggaccacttgccaaagaacttaataactcttcatgttaggaagaagtcattaatattcaagatcaatgtttntaatatatctcacttaccctttctaggattcaaggtagtgttgcaggttagattctaataatggagcccttcttgcactgtcaatagtcacttgggaactttgcatagcaagtaattttccacaacccttagtttctcataccatttcttagaaaaaaactaatcatagaaaaaaaaaaa

SEQ ID NO: 17522 - DNA, 229 bp, Homo sapiens
acttctagaattaattaaggcggtccgaggggatgagggataaaaaggtgaaggaaaaaagaagtggatggagaattaaagaatgaaggagaattaacactgaacacccacccccatggagccagatcctggctaggtgtttgccatctgtgtttagtttaatgctcagcataatcctgcgtggcaggtatgttacccccatctataggtcaagaacctgaaacccaga

SEQ ID NO: 17523 - DNA, 367 bp, Homo sapiens
  misc_feature 146: n = A,T,C or G
agtacttctagaattaattaaggcggggtcccaggaggtcatctctctctccttaccctggagcctttggaatttggtttccaaatgtcctgaattcctgttcattaatatgtggctcagtacagtgcttgtcccggcagcaggancttggttggtgttagtctgctggggaatgggataaagcagagaaatgtcaagctttcccttaaaaacaaaaaacaaaagcaaaccctcacatctcccaccaataacacaccattgttatccctgtacttaagacatgttgttgccgggcatggtagctcacacttgtaatcccgacactttgggaggctgaggcgggtgggtcacctgaggttgggagttt

SEQ ID NO: 17524 - DNA, 494 bp, Homo sapiens
  misc_feature 3, 39, 251, 290, 296, 322, 329, 332, 347, 354, 359, 364,365, 367, 373, 376, 381, 388, 397, 398, 412, 413, 422, 450,458, 460, 478: n = A,T,C or G
agnctgggtaccgggcccccccttgtgggtacttctagnaattaattaaggcgggggttgcaatcctggtctctgataaaacagactttaaaccaacaaagatcaaaaaagacaaagaaggccattacatactggtaaagggatcaatgcaacaagtagagctaactatcctaaatatatatggacccaatacaggagcacccagatttatacagcaagttcttagagacctagaaaggagacttagactnccacacagtaatagtggggagacccttaccccccactgnccattnttaattgcttcaatgggaccggaaanttattanggnttttcaggcttgganttaactnttganccagnngncttatnaanattcncagaacnttcccttcnnataacagaaatacnnttttttagnccccattggctttttttaaatgggcccnttttgggngnaaaactctcccatatggncaaaaaaaaaaaaaaa

SEQ ID NO: 17525 - DNA, 422 bp, Homo sapiens
agtacttctagaattaattaaggcgggggatgtatatttgcttgtacatacataacatacctctggaatgatagataggaaattagtaataccagccacattttgagtgggtaggggccagagttagaagaaaactttaccctatataccctatatttatactttatgtagtgtaaaccatgtcctgtttaaaaaaaaaaaaagaaattaaaaacaagaatgaatgctcttcattattctggtaaatgcaggctcattttacttttgtgcattttaattgaatgtactgccatttaacttataagaattaatacttagggctgggtgcagtggctcacacctgtaatctcagcactttgggaggctgaggtaggtggatcacttgaggtcaggagtgcaagaccagtctggccaacatggcg

SEQ ID NO: 17526 - DNA, 656 bp, Homo sapiens
  misc_feature 492, 523, 575, 580, 612, 641, 653: n = A,T,C or G
agtacttctagaattaattaaggcggggtagatgtgttcagtttgagatgcctgtcatatacgttgggaggtcccataagtagtagtagttggacatgtgggtctggaacgaaaggaaaaagtctgagatgaagatagaatttggattaagcatttagtgattgaagttaaaatgtgatgattttctccagggatattatgtggaataagagggtaagagatagagccctgaagtatgcacattttaccttgtggggaggggctgattgtggaagaacccgtggagactaaagaccagtggtcagaaaagggagctgaaaatctgggaggattaatggaagagtacctactcctgaggagttcatgcattggcattccccaaaatgattatattttcctctagcccccgtagaacgcacaacacagttcatctattattgttttattaaagttcatgtaaaatgactacccatttactttgtttacaaccanaaaatcttgatattttattgttttaaaaaanatttttttttaaaaacatttttttaaaccaaaaattttttttagaattatangaagnccttgcctattgtttgcccctaaggcttgggntctgggaaacctccttggggcttcccttncccgcccttaanccc

SEQ ID NO: 17527 - DNA, 491 bp, Homo sapiens
  misc_feature 31, 192, 194, 224, 248, 329, 347, 379, 386, 392, 394, 395,415, 424, 431, 451, 465: n = A,T,C or G
agtacttctagaattaattaaggggggactnacaaacaggtgacttctccattcaccagagatgggacattatacactgacctacttccatattcactttccctgcttgattggaggtgagggagaaaaattagtgtataaggccgggcgcggaggctcacgcctgtaatcccaggactttagaaggctgangntacaggcatgagccacagtgcccagcccangaaaacttcttaaagatgtaatantaacgcaccttattattttccaagtacttccatagatagtggcccacttctgaggtatgaattaaatttccctttgtggcnctttgtttttttaatagnatcttcaattttctggggggacttaccaaacngggtganctttcncnnattcaccaagagaattgggncatttattncgacctnaccctactgtccatagatgnactttttcccctgnctttggatttggaagggtgaagggga

SEQ ID NO: 17528 - DNA, 314 bp, Homo sapiens
gtacttctagaattaattaaggcgggaagaggagaaatggaaatatacagctttaaggtcattgtgtgtgaaataggataattatacaaataaaccaggagagaagataaaaagaagtatcaacaaataatatcaaataatatagaaaaggaaaaaaagtaacaaaaaaacagatgtaacaaacagaaaaaaattggtaagctagtatccttaattgcatatacattaaaatataaatgatagaaacaacttaaaaggtaaggattgttggtccagcgcagtgactcacgcctgtaatcccagcactttgggga

SEQ ID NO: 17529 - DNA, 418 bp, Homo sapiens
cccccctcgagagtacttctagaattaattaaggcggggttgctgagaagataaaatttataccatatatgcacagtgtctgacatataacaagaatgttatcaataatatcatcaacactataattagtttgcatgaaagcttaaaatgcatatatatttttaaggcaggtcactgtggtaagggcacacacgatgaggatacaacaaaacttggtaaactgaagccagactttttgtttcaaccttcaaagattcatttagtctggatctctctctctcttctcagctaggagaaaacattctgtaagccttacaatgcaaagttaagttcataattaattcagtaaagtaagattaccttcagcggggaaaaaccgtgaaaaactgcgtatcgacattatttccttctcaatttc

SEQ ID NO: 17530 - DNA, 417 bp, Homo sapiens
agtacttctagaattaattaaggcgggggctttaattgtgaggttaggatctgaataagaatcctggagagctgactttgacaccaatacacactttttttttctcttatcctcatgctcaactcaatctcctctgaaacttgatgtccaacagctaggttttaagggttgcagattatctaccttatcacagtggccacacgtgtcagcctggtgatgatggtgtttcacgttcctcaaggacccctcacggtgcctggatgtcagtttgcataaagctttaaataaagctgctccgtatacatcagcccaagtagcagccacccataaacggtgtgtgctgtgcttttatgtcactttgacactttggtgacaactcttggaccatttcactcttctctaaagagtcataaaaac

SEQ ID NO: 17531 - DNA, 292 bp, Homo sapiens
  misc_feature 1, 262: n = A,T,C or G
ngtacttctagaattaattaaggcgggcagatcatttgagcccaggagttcaagaccagactgggaaatgcagtgtgactctatctttacaaaaaagatttttaatttaaaaaatttgagagcaaatcattaagagaaaaggagcctcccaatcctgtccccaaagccagcattactgaatgattttaacctcccttatcacatacaagcctctaggctattgtcatttcagaggatcatctgaccaagacttcagctgaanggaccatatgattcctaggtggaggaggac

SEQ ID NO: 17532 - DNA, 368 bp, Homo sapiens
  misc_feature 173, 235, 247, 323: n = A,T,C or G
agtacttctagaattaattaaggcgggttcagagcacgataatcagacaagtgtttttgattaataaacacttaataataagcagtgggtttttgattaataaaacaccacacaggtatcaaaggaaaagtaaaggggagggtaaagtaaaaagaaatgaaatttagtatcanacaacagatttcagagcaaaaaatattattagatattacccaggatcaataaaagtcatttnctaacaataaangagccaattcttaacagccctacaatgctgctcattccaggaaaaaaaatgggcaaatgaaaataataaatatctnctttgagtcatctttggtttatcgaattaaaaaataaatttttaa

SEQ ID NO: 17533 - DNA, 375 bp, Homo sapiens
  misc_feature 52, 122, 147, 164, 272, 329: n = A,T,C or G
agtacttctagaattaattaaggcgggaactcaggctctgaagttaggattnctggtttgaaacccaactcaacaaaatgcgcttggggtatcacctgcaaagggcatcagaagtctttgtntggtcgatggaaatgtgcttatgtngattgggatggtagttncatgagtatacatttgttaaaacataaaattggctggacagtggctcactccagcactttgggaggccgcggcaggtggatcacctgaggtcaggagtttgagagcantctggccaacattgcgaaacctgtcttctactaaaaatataaaaaattagccaggcntggtggcacacacctgtatgctgaaacaggagaattgcttgaaccc

SEQ ID NO: 17534 - DNA, 480 bp, Homo sapiens
  misc_feature 159, 224, 253, 254, 284, 336, 347, 384, 398, 402, 412, 416,425, 434, 435, 458, 471: n = A,T,C or G
agtacttctagaattaattaaggggggacttacaaacaggtgacttctccattcaccagagatgggacattatacactgacctacttccatattcactttccctgcttgattggaggtgagggagaaaaattagtgtataaggccgggcgcggaggctnacgcctgtaatcccaggactttagaaggctgaggttacaggcatgagccacagtgcccagcccangaaaacttcttaaagatgtaataataacnncaccttattattttccaagtacttccatanataagtggcccactttctgagtatgaattaaatttccctttgtggcctttgnttttttaatanatcttcatttctggggggacttacaaaccaggtgacntctccatttcaccnaganattgggaccntttntacactgancctacttcnnttattcacatttaccctgctttngatttgggaggtngaggggaga

SEQ ID NO: 17535 - DNA, 727 bp, Homo sapiens
  misc_feature 427, 432, 443, 457, 473, 487, 505, 517, 518, 536, 537, 540,545, 565, 570, 574, 584, 588, 598, 600, 605, 608, 619, 622,625, 626, 629, 630, 635, 638, 640, 645, 646, 647, 652, 661,662, 668, 677, 678, 679, 680, 682, 683, 685, 686, 687: n = A,T,C or G
  misc_feature 688, 689, 690, 693, 696, 697, 698, 699, 700, 701, 702, 703,704, 705, 707, 708, 709, 710, 713, 726: n = A,T,C or G
agtacttctagaattaattaaggcgggagaagatggttaagtataagggttgttaattcagtagaattgacatatttcattaccaaatgagaagaaaaaggcgatattttaagtaactctaccatgtgtcatgcatacattaatctaagaaggtaatatagaaaggaaaattaaagaagaaaaaaaattaaatattaggtattggaagtacctgttaaaagttcagaagttctcagtagacagatgtatttgtagaagttttaaagaaataagtagtaacaaaagtgatgtgtgataaccaaagaggaccaatttcagaacactggtaaaaataatgtttaatgagcgaatcaagcaactgaaatgtatatgttctgcaaagacttgtacaataatggttcataacagttttcattttgatagaggnaatanttggggaaacnacccaaaattttcnttcaaaaagtagaaanggggataaataaantttggtgttttctccctncccaaagaaggnntagaaaaaatgaaatggnnctnttaantggattttttaaccattggnagccnattntttcccaacntttntcattgcctngngccanaanaaaagccattncanttnnaannaaacnccntncttgnnntgganaacattttnntttttnaggctccannnngnngnnnnnngangannnnnnnnnnannnnggnggccccccccccnc

SEQ ID NO: 17536 - DNA, 414 bp, Homo sapiens
agtacttctagaattaattaaggcgggctttagctcacccaggaacatgattcccttcctcctctcccacattcactgtcaaagtcagcaggctgttttcttagcaggaagagtgtaaaatccagggcggcatttgatttttcttggatttttcattcaaatttaccctcaaggataagaagggaagcaaggagggagagaggccaagcttgggccacgcacagcgtgagcagtcctcagttccactcctgctcactgcatccagactgcagtcatcgtacgtggagctgggcttcacacaaccagatgaccaacctggttgagccaccgtgagatccacatgtgggagggcacagccccatgtgtaggggccagggagtcactggaggctggtgcctggagcacccacagttc

SEQ ID NO: 17537 - DNA, 361 bp, Homo sapiens
  misc_feature 5, 32, 38, 302, 308, 315: n = A,T,C or G
agttnttctagaattaattaaggcgggggaangattanaatagcacaggaatgcctcaccctgccagaaatagacacacagccgctgcctacctgtcctgtcttgtcgttcccaggagcacagaacaactagaacccgtcatcttcgtaatgccaacagacatgttttataggttcatgtagataactaggttttatatagaggctgaggcatgagaatcgcttgaacccagaaggcagaggttgcagtgagccacgattgcacccgctgtgctccagtctaggtgacagaacaagactgtntccaancaaacanacaaacaaaaaaactcgtttacaattcataatctcttgacaacttc

SEQ ID NO: 17538 - DNA, 754 bp, Homo sapiens
  misc_feature 161, 309, 322, 342, 376, 427, 442, 458, 464, 475, 482, 483,485, 495, 496, 503, 504, 512, 520, 524, 541, 552, 570, 571,576, 590, 601, 610, 624, 627, 632, 633, 634, 635, 642, 650,657, 661, 664, 665, 667, 668, 671, 673, 679, 687, 691: n = A,T,C or G
  misc_feature 692, 695, 699, 702, 720, 722, 742: n = A,T,C or G
agtacttctagaattaattaaggcggggtttgcagtaagccgagatcatgccattgcattcagtctgggtgacagcgtgagactgcatctcaaaaaaaaaaatttttttttttaaatatcaaaattgaaaactagtattgtggtcatctgcctcaaattgngttaccacacgggagacttagcaactcaagccaggattcttctaaacacattttttataataaaaagtggtaaaaactaccatttacccaaaaaggaaaatagttaaaccttacctaaaaatccactatggcttaaccccaccctttnttttttttttttnggggagacagccttcacctntttgccccggaagggaagttggttgccgaatctnaggctcaactggcaggcctcgttcccttccccggggccccaaaggcaaaancctcccccggttttnaagccccccccttttnggtaancctttgggggnaacttgnnanggcccccttnngggcccnncccaatgnttcccccncccncgggaatttttttcccnaattttttttngggaaaaaaaaaaacccnnggggnttttcaaaaaaaanaaatctttggnccttggccnttgggggccccccnaanaaaannnnttttttnggggggantttgccngggngcnntnnaangncctttnctttttcncccnnggncccnttntaaaccatttttttaacngnggggatttcccccccacggngggggggggggg

SEQ ID NO: 17539 - DNA, 417 bp, Homo sapiens
  misc_feature 19, 20, 22, 24, 28, 31, 33, 34, 38, 41, 42, 44, 55, 59, 61,62, 64, 67, 73, 78, 84, 86, 96, 97, 100, 105, 114, 157,285, 384: n = A,T,C or G
actggccgtcgttttacanncngnaacnagnannaccnttnntnctggccggtgntttncnntnganaaaaanaaaancccttnantgctgggccnnggnggggngaaaaaaanaaaaatattgtgttgaatgctggcctggagcttattaaatganatttgggctgtgatatggattttagtcactggagtgaaaaagattattaaatttatgtatgtggaagatatctagggaaaatatttgaagagaaacagctccaggaaagcatattaggaaaaaacacntgcataactactattgaaggaatgtaaatctatacagccaactttaaaaacacatccagaaaagctgaagaagagaagaatactttacagaaaaaaganaaagaatttcaagaaagtcaaagtcatttaaga

SEQ ID NO: 17540 - DNA, 543 bp, Homo sapiens
  misc_feature 9, 46, 354, 460, 487, 492, 504, 541: n = A,T,C or G
tgggtactngggccccccctcgagagtactagtacaattaaaaaangcgggggcgggaggtgctgaaagggaatagtttgtgttatttttgtttctcgtttcttcagaagtagaagtgtgagttgtatcagcaacatattcactgtagcatattaattcctcatgtttgcaagacccttttcaaggtgcctactttcacagatgtgaaatctcaaatgcctacacaacagccctgtatgacatgtaatcctatttctggatgagaaaatagagacttaagaagataagtgagcaaccttgtagaggtaccgctgcttaaaaacagcaagaacgttgaaactggggtgtgctganttgggcatacttcttcactgcaatgcctctcggggttttgatatcattgtctccaaagactttctagtttctctttactggagcggcctgtttgggatttttagtncttgaagtcctatttaatcttaaagcnaaaanattttctttttnttcaaaaagtgggaaggttttggcttgcccaaaatancc

SEQ ID NO: 17541 - DNA, 387 bp, Homo sapiens
  misc_feature 32, 33, 35, 37, 38, 40, 44, 49, 51, 68, 77, 79, 84, 89, 99,101, 105, 107, 109, 112, 113, 126, 145, 163, 172, 225: n = A,T,C or G
agtacttctagaattaattaaggcggggtggnntncnnancctntgtcntntgtgtcctggctagggnatttgatgngnaactntcaanttcaacaacngnagangntnttnnctattaggctggncatatactccacaactctnacaatttccttctgaganaagtccganggtgggcaatgaatagatggatgacaacactccatatgcattcattcccacantccctatcttcaacacagaaatgtggctctcgctaggcgtggtggcttacacctgtaatctcagcactctgggaggctgacttgggcagatcacctgaggtagggagtttgagaccagcctgaccaacatggagcaatcccgtctctactaaaaatacaaaa

SEQ ID NO: 17542 - DNA, 254 bp, Homo sapiens
ctcgagagtacttctagaattaattaagcgggctcagaaattaatcttggctttaggaagtctaccataaacccgcaaaaggaaataagtgaaaatctaaataaatgtgttgaatatatgcagtgagtgtttgcaatagtgttataagttggttccaaagatttcaatatagacggatgtttccttttgctgagctgcactccagcctgggcgatggagtaagaccctgtctcttaaaaaaaaaaaaaaaaaaa

SEQ ID NO: 17543 - DNA, 550 bp, Homo sapiens
  misc_feature 489, 493, 515, 525, 527, 528, 529, 530, 533, 535, 536, 540: n = A,T,C or G
agtacttctagaattaattaaggcgggagtgaaactggaagggggcacaaggctttctgaggtgtgctcacaattttctacttcttaagcaagatagtggaatgcagaggtattcatttgtgatcattcatcaagctgtacatttacaatttgtgcccctttctgtatgcatattacactttttttaaaaaaaatattaaaatatcaggtcacgcaagggagctcaatcctgtaatcttaacactttgggaggttgaggcaggagtatcacctgagcccaggagttcaagaccagcttagacaccatagcaagactctgtctctataaatttttttttaaaattagccaggtgtggtagtgcacacctgtggtcccagctactcgagaggctgaggtgggaggactgcctgagcccgggaggtcaaggttgtaccaagcttgaactcctgggctcaggcaatcacaccactgcactcccagtctggganacanaatgaagactgtcgcaaaaaanaaaaaaaaangnnnnganannagancccccccccc

SEQ ID NO: 17544 - DNA, 209 bp, Homo sapiens
accgggccccccctcgagagtacttctagaattaattaaggcgggagggaatggatttggcagtttgaggagcttggagaagacttgaaatagttgtagaaaatgagagtaagtgttactggggaaatgtggaattatatattaagtaaaacaagctggttgtagcaataactagttattatttttacagataagccaaaaaaaaaaaa

SEQ ID NO: 17545 - DNA, 490 bp, Homo sapiens
agtacttctagaattaattaaggcggggttagtgagggaacggagggcaggacatacggctgctctccagaatgggagcaaaacacacagatttggatactaacactgtttttaatatcattttgtcttattacaagtaacagctactgctggaggagacagttctgcccagtgggtaagagttagatggcctgagcctgctgcacacagctgtgtgttattgggacttgagtttcctcatctgtaagtggggacaactgacagtacctcccatgtagcattgtcatgaggattatatgagccggttcatctccacagcttaaatcagtgcctagcacattataggcacctgataaaataacatcttgcaattctatttttaatttttttttaatttatagagatgggtcttattatgttgcccagcttggtcccaaactcctgggctcaagggatcctcctgcctcagtcttccaaagtgctgggatta

SEQ ID NO: 17546 - DNA, 486 bp, Homo sapiens
  misc_feature 15, 18, 26, 35: n = A,T,C or G
ggccgtcgttttcanccnggaataancggaacccntgctgggtgccgggccccccctcgagagtacttctagaattaattaaggcgggtggatcacctgaggtcaggatttcaagaccagcctggccaatgtggtgaaaccccgtctctactaaaaatacaaaaatcagccaggtgcggtggcacacgcctatataatcccagctactcaggaagctgaggcaggaaagtaaaagaaaaaattataaaaataaaaagaatttttttaaaagtttaaacaaacacatctttaagaactaaaatgatgacaacaacaaaggacaaaaagacaatgaaaataatgaagaaatacaactaccaaaaatgggaaaggttctactttgacaccaatccaaaaaaaccaattaaaacaagctaccattttagattactcaattagcaaagaattttttgcaaatgataataccaaatgctgaaagggttttag

SEQ ID NO: 17547 - DNA, 372 bp, Homo sapiens
agtacttctagaattaattaaggggggaggttagagtcagcgacataaataccactagatggtatttaaaattaggagaatgaaagactaactgggagtaagtgtagagaaagaatataaggttatttcatatggcttcttgaggaatcccaccctttgaaaggtgggatgtgtaagccagctgcagtagtgtgcatctgtagtccagttactcaggaggctgaggtgggaggatcatttagcccaaggagtttgagcctggcctggacaacatatagggattacatctctgaaaaaaatatttaaattacatttaaaacaaataggattgactgtgagaggaagaccaggcaaataaaaacagaaattagc

SEQ ID NO: 17548 - DNA, 337 bp, Homo sapiens
  misc_feature 23, 56, 127, 129, 239, 262, 326: n = A,T,C or G
tgggtgaccgggccccccctcgngtgtacttctagaaattaattaaggcggggcangaaagaatgtcatgaggcaaatcagttaaatattggatttttaaatatatgacactgctctcaattactangngctaataagacatacataacctaccatatagccaaggttttaattatcagatttataatttgaaactgaaggaactttagttcataaaagtgaaaaagataaaatgaagnccaatgaaagtaaaatattatcnttgcttccttgattaaatctatagttatttttactaaagtatgatatatgttcccattatttanttttggttagg

SEQ ID NO: 17549 - DNA, 293 bp, Homo sapiens
  misc_feature 1, 14, 293: n = A,T,C or G
ngagtacttctagnaattaattaaggcgggtgatttgatatatcattaatgttttgatatactcactatacaaattttaatgtcttggtagactcatttttatgttttgatatacaaaattaatgtttgatatactcaactttctcttttagaggtcaaaaaaccattacaatatctcaattttttgtccttccttccccccaaccgaataatcaattttcaaccttttgaaataaatgattatttagaggaagagtttttcttacttggccccccaccaaaactggtgaaan

SEQ ID NO: 17550 - DNA, 374 bp, Homo sapiens
  misc_feature 153, 235, 337: n = A,T,C or G
gtaccgggccccccctcgagagtacttctagaattaattaaggcaggttactcttctaagggttttatttcatatcatcttctgaatgaatgatatcttattccaacggggcaacccagtattctactactgaaaattaaatgttgatatganctatgtgtaatttaatcctttgtccacactaaaactacgtgaaatttcaaagacagattttggccaggcacagtaatcccancacttttgggaggccgaggcgggcagatcacaaggtcaggaattcgagaccagcctggctaacatggtgaaaccctgtctctactaaaaatgtaaaaattancccgggcgtggtggcggatgcctgtaattccagctac

SEQ ID NO: 17551 - DNA, 364 bp, Homo sapiens
ccccctcgagagtacttctagaattaattaaggcgggagacagcaataaaggaaacaaggtactaaaagagactcattaaacggttaaaatggtaatggtagctatatcactatcaataattacttgaaatttcaatagactaaatactgcaatcaaaggacatatgtagctgaataaatctttttagaaagacccaaatacactgttcacaaaaaaactcactgtagatttaaaaccacacatagggtaaaagtgaagacatgggaaaatatattctatccaaatggtaacaaaaagagagcagggataaattttcaccatacacaaaaaattagctcaaaatagattagaaacttaagtgta

SEQ ID NO: 17552 - DNA, 462 bp, Homo sapiens
  misc_feature 369, 370, 432: n = A,T,C or G
agtacttctagaattaattaaggcggggaagggtgtgaggggacagaggactaaatttactgctaacatgaatgttgtttaatatcaggctatgattaacatacatctgaaatttcaactgtgaattgttgttacgctacaaatatgtatacccacagaacagtacatgtcctggggcaaggtaaatggcagggaaatttcacaatccactccctgctccctcatcgaatctacagccagaggaaaagtgttggaaaccaagttttaggtgccaggcttagccttttgcttttcagttgaaatattttatgtttggacaccgcccaactttctcctattaagttattttagtggttaaggccccttttnnctttttttttgggccgggggccaaggggggttgggcggggggcagttcctttggaactaaanaatttttcttcaggggaacccacctgccag

SEQ ID NO: 17553 - DNA, 515 bp, Homo sapiens
  misc_feature 74, 81, 94, 422: n = A,T,C or G
agtacttctagaattaattaaggcgggacccagtgttcaggtgattgattctgatgcacactgaagcttgacanctaatantgtcttccaaaanaggaatgttgccaatatttcattcagctttctcttctacttgtcactgacttcgtagctatctttttaaagtgtttcagtaaccatgtgaactgtaatcacttggctggcaggagtgcaaatttgaacaactttctgttttgttctcttctccaacttcattgacaatatcactcaatataatacattggaaaccattatgttgcatttgttccaggaaaattcaattggtttaccacagagatcactttgatttgttaggaagtgacctaagagcttcatattacaatttaaccaagtttcacagcaaaaacaaacaaacaacaacnaaaaaaaacatggaaaattagcggtagactcttaggccactacaaattttttttctgatattcattatcatgcatacaatttgccctttacat

SEQ ID NO: 17554 - DNA, 368 bp, Homo sapiens
  misc_feature 4, 26, 27, 307: n = A,T,C or G
agtncttctagaattaattaaggcgnngactgctttgtagggtggggtgcaggtttggctcattttctagaaaaggcgtagcatcgttttcagatcagtaactttgggtcagacagagccagggttagacacttcctctgtgaccttgagcaatgtaacctcatcatgcctcatttatctcagtgaccaagtggggctaaaaatagtgcctaccttgtggggtccttaaagtataaaacaaaccaagcttatgcagcaaagtacctagtgaagttcccagcacaaataagtgctcaatgcatagtangtagaagtagtaatagcagtagtggtggtggtgagagtattttgattagtgggaagaatat

SEQ ID NO: 17555 - DNA, 335 bp, Homo sapiens
taaacccaccaagtgacatattaatttctctactggcttcttagaagaaagatttgaggtcagaaaataaaggaactataggtacccactcttttagtcatctgactatttgatttatttgatgagtgatctcagttgaccctcccaggcactgaaccatcagagagttatgctgctttgtgataagaaaccttgagagatacctaaatcttcttttaccactgggagtttcatctattctggaataaagaacatttttatgtatggtgtttctatctagatagctgtagaaatattcagaaaagattcacagacttaaattcattctgacaaag

SEQ ID NO: 17556 - DNA, 172 bp, Homo sapiens
gccgggccccccctcgagagtacttctagaattaattaaggcgggggaaaaagtaaaagctttgactgtggaaaatatcagtgtaaccaaaagataatataacttttataatcggggcacacactttactctgagtttccgggcagccacagcaaaaaaaaaaaaaaaaaaa

SEQ ID NO: 17557 - DNA, 443 bp, Homo sapiens
agtacttctagaattaattaaggcggggggatgtgtgaaatttaactaacttttgtatactttgcaattttatgtcagtatctttttttgtttttattgttatcactgtagggaatgtttatagtttgactagttagagtgtatttattagctctgatttggagtcagacaatagactattgtcatgggaaaatagatgttttaagtgtgtcgtaaatttcagataacgttacagtttgacccaatctgttgttatttttttcttgttttctgaattatctgcatttaatatataaccttggtttgagttctccttactgaaggcatagctttgttttttgttttttcaattgattttaagaagaaattcctattattgtcatgaacactggacatactagaaactttcttttcatggtaacaaaggtatttggaattctttt

SEQ ID NO: 17558 - DNA, 245 bp, Homo sapiens
  misc_feature 127, 131, 132, 136, 140, 145, 148, 149, 155, 169, 172, 174,175, 178, 179, 181, 182, 185, 186, 187, 188, 190, 196, 200,201, 205, 206, 210, 213, 223, 233: n = A,T,C or G
agtacttctagaattaattaaggcgggagaaaccccctaaattgtgacaattaacaatgatttcagggaatctctgagcctattctagttgcccatttaaaacaaaacgaaaaaaaaaaaaaaaaangggnnaaantggnccggnccnnggggtnaaaaaaaaattttnccngnnccnngnnttnnnnancccccngggnnaaanngggnaancccctttttncccaaaaaanaaaattaaaaat

SEQ ID NO: 17559 - DNA, 449 bp, Homo sapiens
  misc_feature 250, 253: n = A,T,C or G
agtacttctagaattaattaaggcggggaggcagcagtatgttatgatagtggctataaatagcaaccgtactctagcctgggcaatgtaacaagaccccatctccaaataaaaccaaaaatttaaacaaaaaaataaaatttaaaaagaaagtgtgcttaaatttctaaatgtttccactcacattcgcatgctgccatttaaattatttgaaattctaaattaaaagctggatattaatgggtttgangtnctaaaataactgtagaagtattttaacttcataaaagatgactgaaaaccagccaccaccaataaaaaaataatggcatgccaggaggagcctagcaaaaatggtttgcaagcttagcctgagagtcatctaataccagtatatgaacttgtgatctacctcattctccaaaagtagtgtgcaaaaaaaaaaaaaa

SEQ ID NO: 17560 - DNA, 412 bp, Homo sapiens
agtacttctagaattaattaaggcgggatggctgagttcaagctaaatagtatttcaagtttcaaattgtttggatttctttttggttacatagtcctaatatataaatcagctgccttctgaaaattggagttttaagcagaatctcactaagacttctcttgttatctaaatctaaataaaaagggatttacatactgtcagtatatactgaacagaaaaccttgtaaaacagtagtaaactggagggatgcattagttttaacacaaagcaaaaccttgtaaactcaggagatagataaacctgccaatagaatcacaattctaaatgtgaatctttatcgaagtggtaactcagtgtaaagaagggttttaaatcagttcattagtctttatggtcgcttccgttgac

SEQ ID NO: 17561 - DNA, 418 bp, Homo sapiens
agtacttctagaattaattaaggcggggtaatcaacgtaaatactagattttcaaaatcctgtttttattgttgaattatttgcttactagtcttctcactagaaataccataaatatagtaatatctaaaagaagaatgtcttggtacaagaagatgagatttataaataagaactagatataattaacatagatttttttcaattgaccagagcaatattttgtatatgcatgcatctgtgtgtgtgcgcgcgcctgtgtatatacatagctgtaaatccataatcccagcttcaaagatgaggaaactaaggcttaggctaaggctaaaagaaattaaataatttgtctgagactattcacctaaatcatgctgcctccctcttatctgggtgagattaatttctagtcgtaccc

SEQ ID NO: 17562 - DNA, 266 bp, Homo sapiens
  misc_feature 117, 133, 187: n = A,T,C or G
agtacttctagaattaattaaggggggtaagaatattctttttgcttccattttcttaagtttgaaactagatctttagcaatgatggagggaagacagtattaggattttgagaanagaaggtatgaaatanttgtgtcaagaacttaaatttactaaggaaacagtgggttaggatagtgttgantacctgtttgaagtttgtgcttctcaatttaagtcaacctgattgtatgatttttttctccaatgtttagttgctcatt

SEQ ID NO: 17563 - DNA, 475 bp, Homo sapiens
  misc_feature 23, 24, 53, 171, 181, 233, 319, 343, 374, 407, 464: n = A,T,C or G
ctgggtaccgggccccccctcgnngatacttctagaaattaattaaggcgggnatgcggaggttgcagtgagccgagatcacgccactgcactccagcctggatgacagagcaagactctgtttcaaacaaacaaaaaaaaaattcaaattagaaaatggacaaaagaacntcaacagacnttttactgaataaaatatacagatggcgaataagcacaagaataagcacaanaaaaggtgtccaacttcatccactattagagaagcacaattaaaatcacaatgaggcccagtactttgggaggctgaggcaagtanatcgcctgaggtcaggagttcaanaccagcctggaccagcctgggcaacacggcnaaaccccacctttactaaaaacacaaaaattanccgggcatggtggtgcacacttgtaatcccagctactaggggaggctgaggcagganaattgcttaaa

SEQ ID NO: 17564 - DNA, 422 bp, Homo sapiens
  misc_feature 137, 139, 190, 198, 233, 260, 262, 263, 271, 302, 335, 348: n = A,T,C or G
agtacttctagaattaattaaggcggggggatgtgtgaaatttaactaacttttgtatactttgcaattttatgtccgtatctttttttgtttttattgttatcactgtagggaatgtttatagtttgactagttananatgtatttattagctctgatttggagtcagacaatagactattgtcatggnaaaatacnatgttttaagtgtgtcgtaaatttcagataacgtnacagtttgacccaatctgttgttattntnnaacacgtnttctgaattatctgcatttaatatataaccntggtttgagttctccttactgaaggcatagctntgttttttgattnttcaattgattttaagaagaaattcctattattgtcatgaacactggacatactaaaaactttcttttcatggt

SEQ ID NO: 17565 - DNA, 392 bp, Homo sapiens
agtacttctagaattaattaaatcagtttcacagtattgtgttttggttttggaaatcacttcagacctataaccaatattgagtgagttgaaaagaattaattacttccaaatacaaggcactttacattcttctaaggagaggatgcaacacaaagctatttggtcagcttgatacaaaagctcttaggtgtgctcatgaagtaagtcaaatgtatacattttacaaccacatattaaatagaattagttttttctttttccttcccatttctttgaacagtcttattcagaatcttcatcattagcaactttgtcatcattggagcccttttctctagaacacatcagcctgggtgacagaatgagaccctgttaaaagaatctttttt

SEQ ID NO: 17566 - DNA, 325 bp, Homo sapiens
  misc_feature 23, 44, 92, 95, 101, 109, 157, 173, 189, 197: n = A,T,C or G
gagagagtcttccttgagaaatnctaaacacaagcacatgtttntatgattttggggtcaaagaccatattatctctgtggcccaaacaccnttnactttngtttggangagtttgggttattagtatacacaagtgcctggaagaactgacacagnatcttctttagagaanagtattttaaacacanacttcccngaagtgtatatgagctcataatttaaaatcaataaaaaattaaaatgagatgccattgtgcacctgtaagaaagagtagcttaaaatctaaaataccgtcaccccagatgctggcggggatgtgaaaa

SEQ ID NO: 17567 - DNA, 348 bp, Homo sapiens
agtacttctagaattaattaaggcgggaaggtcaggaaggatttcttaggagagaagggtgtgaaatggcaggattttgaaaatgcagaatggagggaaggctaggagccaagacagagacaagaagttctgcctttgacagtaatttgtcaagccactttgcctggagcatattccagaaaatgatttatgctggacacttgggtaaatagacccagctgctggagggtgggaagcaacaggcctgcagagtgtccctccccaaccccacagcctccctagctcctgcccagcccctgcccatcccctctgcaggctgaggagaaaaaaaaaaaaaaaaaaaaaaaa

SEQ ID NO: 17568 - DNA, 401 bp, Homo sapiens
  misc_feature 304: n = A,T,C or G
agtacttctagaattaattaaagcggggtggggaagcagcccggtgggcgtggagctgagtttgaaagggaagggttttgaaaagcctgagggctggagccagtgatttagagcatctggaagccactgagcctgtggcctaagtggaagtatagatactaacagaattcagaaaacgttgtccactgcctctagtctgtgggaattccagtagatgaaagccaaggggtccattaaaatggattccacccatgtaagaaacctgcacatgtaccccccaaaccgaaaagctggaaaacaacancaaaacgaacaaacaaaaaaacaaaaaacaccaacaaaaagctaacaataaaatggatccctagagcctgtaaagaagctctaagctgttcccaccg

SEQ ID NO: 17569 - DNA, 425 bp, Homo sapiens
agtacttctagaattaattaaggcgggggtcttattaaaatccagaaaattcatgtcttaaagtttgataattcaatgtgactttataaactaagtcttttaaaatgtaatttacataaatacatatttttagtggaaagggactataatttgaaagagtgttgatcactgctctttaaaaggagacaaaatacctttgctctgtagttggctataatatgtgatcattcacaaggttaccaatttacttgccagtttatttcttcttttcaataatcaagaccctgtcattttaagtctccaataaatccatcattctagagaagtacttccttttttaagtcaacaagacatcattttgaaactcatgccaatcattactaaaaatatttaatatttgttatcaaatatatgtactgtacaaa

SEQ ID NO: 17570 - DNA, 568 bp, Homo sapiens
  misc_feature 485, 524, 525, 526, 529, 530, 531, 532, 533, 534, 535, 536,537, 538, 539, 540, 541, 542, 543, 544, 545, 546, 547, 548,549, 550, 551, 552, 555, 557: n = A,T,C or G
agtacttctagaattaattaaaatcaactactagcatgattacattggaatggcaggaaatgacatctcagccatttgagggcttccctcacaagacatgactcaggattctaggatcttgcccaatgtgccaaagcatggagagtgcctgtcctgtcatctctcttccgtctgcatgagtatctgcgggatgcccagaaaagcttactctagatggggctgctccatggcttctgtctgacctacaatgccaaaaatatttgagaggttaggagaacacagtatctcaagctatacctcaacacatagccctcctgtctgagctttctcttctggccactataccaagggtattcaagatcacaggaatcctgtcatcctcacacaccccctttttaagtgatagggaggtatttgtctcatccttcttgttgctctcaacgtgtctttctcctcttctgggaacacctagcagaatctagaanaagtttgaaccattacattaataaaagcttttccccgannnaannnnnnnnnnnnnnnnnnnnnnnnggngngcccccccccc

SEQ ID NO: 17571 - DNA, 358 bp, Homo sapiens
  misc_feature 28, 34, 39, 98, 103, 104, 113, 115, 127, 132, 133, 144, 146,166, 167, 175, 179, 180, 189, 190, 192, 196, 197, 202, 206,215, 217, 218, 225, 227, 246, 282: n = A,T,C or G
cgcgtgcgtcttttcatcccctgcaatnaagggnaacancaggctgggtaccgggccccccctccgtagagtacttctagaaattaattaaggcgggnggcannacctggggncnggtagtgcgcangccannctgtacacacngnggattaaacccacgtctctnntgaaatanacgnncttaactgnncntggnngtgcntgcntgtgaattncnnctactancntaggctgacgcaagacaancgcttgaatccggtaggtggaggttgcagtgagccnagatcataccattgcactccagcccaggcaacaagagtgaaaccctgtctcaaaaacggaaaaaaaaaaaaaaaaa

SEQ ID NO: 17572 - DNA, 422 bp, Homo sapiens
  misc_feature 412: n = A,T,C or G
agtacttctagaattaattaaggcgggggttataaactgtagagacaccttgataagttattgtgcacatgtatggagagcacacgcacaatattgatcactgctagatacaaagttcagacttcaacagagatctgattctgatttttctccatcactcttcagtctatactcacagtttcataattaaagccttattatttcgtataaggaccataccttatgtttatcctttgttaaatgtgtgtgtgtgtttatgtatgtgtgtctggaaggatagaattttatcgttattactcatttaacacttagtacaaaaatattgcagacccttccctataaaaaggtgagaggagaaggtagggagaatagaagagaaggaaaagggggacactggtctcatgaaaatatnaaaagacaag

SEQ ID NO: 17573 - DNA, 500 bp, Homo sapiens
  misc_feature 474, 490: n = A,T,C or G
gtacttctagaattaattaagtggccagtatcatacataattaatattagctgtgtacacacgcaaggggcttactcacctgctacttagatgctgctctcttaggctgattaacaagctctttgcattggtgtgtgcatcactcatttgctacttgcagaagacatcttttgcctttacgtttcctacctgtatttctttttcttttctttctttcttttttttttttgagacaaaatctcactctgtcacccagggagtctagctctgtctccccggctggagtgcagtggcacgatctcagctcactgcaacctctgcctcctgggtttaagcaattctcctgcctcagcctcctgagtagctgggattacaggcacctgctaccacgctcacctttttttttttttgtatttttagtagagacggggtttcactatgttggccaggatggtcttgatctcctgacttcgngatccacccgcctcancctcccaaat

SEQ ID NO: 17574 - DNA, 327 bp, Homo sapiens
  misc_feature 17: n = A,T,C or G
taccgggccccccctcnagagtacttctagaattaattaaggcggggcacccattcccccagtatccccatctcaccgatggtatccctgtccacctggtgtttcaccctcaggcctcaagaattattctatttcttttatcccccaacacacttcctaatttagtgttgcagcttctacctcgggaatgtatttccagtgggccctcctctttccatctccagagataccctctgacccggcctccctctccgggctggagagctgcaggagcccccttcctgggccctgctaatcctgggctcctgtaaataaatctgtcacttg

SEQ ID NO: 17575 - DNA, 320 bp, Homo sapiens
  misc_feature 1, 10, 17, 23, 28, 31, 38, 39, 40, 41, 46, 47, 48, 49, 50,52, 55, 59, 68, 70, 71, 73, 76, 84, 85, 92, 93, 100, 107,108, 118, 120, 121, 129, 130, 133, 134, 136, 146, 147, 155,158, 159, 161, 185, 186, 187, 195, 197, 198, 199, 204: n = A,T,C or G
  misc_feature 208, 217, 219, 220, 221, 227, 229, 234, 238, 240, 243, 244,249, 250, 258, 262, 272, 278, 279, 295, 301, 304, 305, 306: n = A,T,C or G
ntcccccggngatgggntttatnttttnttnccaggannnnaaacnnnnncntcntttnttaaagggngnngngtnccttcccnnggggggnnggggggnaaaaaanncttttttttntnngggggggnnaanngncccccttttnnggaaaaanccnntncccttttaaaaaaaattttttttnnngggggggngnnnggggncccnaaaaaaacncnnntaaaantntggancccncnaannggggnncccccccntttntttaaaaacnttgggnngggggaaaaccccccngaaaanttnnnggggaaaaaaaaaa

SEQ ID NO: 17576 - DNA, 414 bp, Homo sapiens
agtacttctagaattaattaaggcgggaccatcccttgaggccaggaatttgagactagcctaggcaacataacaagacctttgtctcttggaaaaaaataaataaataaatattattagaagtgaaaatggggatgttgttacaaatgctgtggagattgatgagaaattatgaacaacttaataataaatgggaaaatataaatgaagtaggcagttccagaaaatgtaacttttcaaaagccatgtaatggaaaatataaatggtgggatgttgatgtaagaaatcatgatgcccagagacttttgccaaaccttcaaaggacagatcattacaattttacacaaaccattccacagtatattccacttatatactgtggaattggcccttactgcccttatcaaatttaa

SEQ ID NO: 17577 - DNA, 268 bp, Homo sapiens
ctcgagagtacttctagaattaattaaggcgggtggatcacgaggttagaagatcgagaccatgctggcaacatggtgaaaccctaaaatacaataatactaaattattttttataaattatttcttataaattataattattataaataatactaaattattatttttgtatagtaaatactaaaaatacaaaaattagctgggcgtggtgacaggcgcctgtaatcccaactacttgagaggctgaggcaggaaaatagcttgaac

SEQ ID NO: 17578 - DNA, 416 bp, Homo sapiens
  misc_feature 39, 47, 57, 71, 77, 82, 86, 88, 97, 113, 121, 180, 408, 409: n = A,T,C or G
agtacttctagaattaattaaggcggggaagtgataagnggtaaaangagacatttnctaggggtagaggnacaaanctaanaaananggaaacccngactgaattttacgtntcttattnccaactcctctcgatgtctacctggaaaactttccaatctttaagcattcagctgcagntgaaatatcctctggggaccttctgtgacatcccaagacagagttcatcacccttttttaatagtgtcctgtacttttcttatctttctattgttgcttttaaaacatattttcttgcaattaccttcacatgcactgtgaacaccggcaatttaatgtgtttttgtgcatgtgtatgcatgcacgctgaataagttccttgcatgctaaaaaatgtttcaacctacnnaaaaaaa

SEQ ID NO: 17579 - DNA, 460 bp, Homo sapiens
agtacttctagaattaattaaggcgggacggcagtgagacgcagtgggtcataaaaagtgagagctttggagcttaaaatacctacatgtgatatcagccatctatctaagtgatattgggcaagtgactattctgaggctccttagcttcttatcagaagaaatggaaacaccacctccattacaaaggaggtattatttccattatgagatagcacaactaaagtatctagttatagtaggcattcagtaaacagtgtatctttcagttctgttttctatatcatctaaatgaaatcacacgaacacaattctgtactaccactctacagtttctaagatagaaacaacacaggcataaagggttcttaatttacaaatgtacctcaatattagagttggattacagtgattttgttaaataaagccaatgtatattcaatggcctgaagggatcttt

SEQ ID NO: 17580 - DNA, 425 bp, Homo sapiens
  misc_feature 8, 11, 29, 83, 201, 260, 266, 270, 296, 328, 333, 334, 342,353, 355, 356, 361, 366, 370, 380, 390, 391: n = A,T,C or G
agtacttntanaattaattaaggcgggcngattgagctcacgagttcgagaccagcctggcaaatatagcaaagccccatctntattaaaaatacaaaaattagccaggcatggtgatacatgcctgtaatcccagctactagagagactgaggcaggagaatcacttgaacccaggaggcggaggttgcagtgagctganatcatgccactgcactccagcctgagtgactgtctcaaagcaaaaaaaaaaaggagagngtcctnaagnaaaaagatacataaaatgtgaatatnacatattgaaatttctttctttgggccggccntatcnntggaattnctgtctgcttnanncactntccantgcngcccccctanttttttttcnnctggagcatataacataactttcctagtgggaac

SEQ ID NO: 17581 - DNA, 344 bp, Homo sapiens
gtacttctagaattaattaaggcggggttgctttaatgtgtcagtcactactgcaaatttctttctactgctggcctcaaaaagatgaccatcccaatagtcacaggttcttaggataagctacccatattataactaaagggggaaaatcctgaaatttccacagcatctttgttgtaaggaactcaaaatggctcatctgcattattagactcatctttgaaagtatcttgtgaaaataattgcaacttttcattatcagatgagaaaacagacagaagtccagcctgagcacatggcaaaccccgtcttaccaaaactccaaaaaaaaaaaaaaaaaaaaa

SEQ ID NO: 17582 - DNA, 270 bp, Homo sapiens
  misc_feature 1, 2, 13: n = A,T,C or G
nngtacttctagnaattaattaaggcggggtgagagataaaagtctacaaatatggtgtggtgtatactgctcaggtgacgggtgcaccaaaatctcacaaatcaccactaaagaacttactcatgtaaccaaatactacctgtaccccaataacttatggaaaaataaaattaaaaaataaaaataaacatttcaaaaaatggtacttcaaaaacactaaaatattttaacctcataaccaccctatgggatggtattattatgattat

SEQ ID NO: 17583 - DNA, 729 bp, Homo sapiens
  misc_feature 43, 614, 637, 653, 654, 659, 677, 678, 697, 699, 709: n = A,T,C or G
gaattaattaagaaatataacctttatttaagttatggatagnatccttaactgtattttcaaaaaattaagtataaaattgtgataacagcctaacagtcattaattcaaaccaatccctaaattggcagaagttcagctggtatcagtaaaacaatcaaatattgctacccagctgctcctattcctatctgctccacaaatactgagacatacaagtcattctttcatttaacaaatatgtattaaacacctatgcacctaccatgtacaagactgcctactaaatgatgggaatacaggtgtgaataagagacaaggtttccggactcacaaaacttaaaatctagctgtagagacagacaataaacaaaagaaattacaaaatgtggtcaatgctatgaaggaaatacaggctgctcagacaaagaataacaagggacatctcatttaataaatgacagcaattaacattcactgagcactttggatagggtagtgagagaaaacctctctgaaaaaatgacggttaagttctataacaaaagaacaacaagggagacaccaatgtgatgactggggagaaagctttttagggcagaaagaatttccgnataccagatccttaagtgggtgnatcaaaaacctaaaannaacancttagtgggggctggatnntggtaaacaaagggggaananaatgaagttnttctttttacattggaaagg

SEQ ID NO: 17584 - DNA, 262 bp, Homo sapiens
  misc_feature 4, 133, 136, 143, 145, 160, 169, 191, 213, 217, 218, 226,227, 237, 240, 244: n = A,T,C or G
agtncttctagaattaattaaggcggggggaaattacaaaaacaacacttacaaaatgatagccgcttagcaacttcaagtatatatacctttgtttgtactaactactaatgtctaccactctccaattganatnactaagntncatggtcaaactatnattttaatnacagtgataaacttttaaaacntctgaaaaactcctatatagtnaggnnacagtttnnaatatatacnctntttngttaaatacataacacac

SEQ ID NO: 17585 - DNA, 320 bp, Homo sapiens
  misc_feature 28, 30, 36, 61, 69, 74, 83, 94, 95, 103, 105, 106, 108, 109,113, 129, 131, 139, 141, 147, 150, 157, 160, 162, 163, 164,167, 171, 183, 191, 197: n = A,T,C or G
tacttctagaaattaattaaggcggggngngtgagntgcatgggaaaatgcctgggactgnctttgctntgtgncaataatanccatgtgacanntttatatntnnannaatntagggctgattttttngnttgtttcntnatgaantgncttgaanaantnnnaanatanaccctgccatcnaaactatnttgaanttgagaaccaagagcaaacaaacccctgagctagcagacaagaaaataaccaagctcagagctgaactgaaggagatagagacatgaaaaactcttcaaaaaatcaataatccaaaagttggt

SEQ ID NO: 17586 - DNA, 361 bp, Homo sapiens
agtacttctagaattaattaaggcgggtgatattcttttggaataaggacttaaaaacacttgtgaggcaatctgagttcaagatcactccagatcgttgcaatttcccatccgcatgttttacaacagtttttcaatttttttaagtggtttgcttttatcatgtctttccaaggcatttcaaacttagttttcctataagcaatgtttttctttttattatcctattcaagaagtgtatataatattttatcaaattaaataattacaaataaaaatcagtaacacaactgactccagatggtcatacatgctaacttacaggaggagtaatgtacatgtgtattatcagagaaaagcc

SEQ ID NO: 17587 - DNA, 246 bp, Homo sapiens
  misc_feature 68: n = A,T,C or G
ttaaggcggggggaaaggggttctaacaaagttactttgcaaaataagaagttgagtcataaacctantctttcaatgctgtgtatgtgtgtgtaatcagaataatgtgaaacagagctctatacccacagagaacccagtcaagctctgaatgatcaaataatattctagagagtttctcatacagagaagcataaagacagtatctgagtatgtttccaaaaatcagtattaatgaattttgtc

SEQ ID NO: 17588 - DNA, 409 bp, Homo sapiens
agtacttctagaattaattaagggggaagggagggagaaagccgggaggggaagagagggaggggaaagaaagctgaagattggtttcatcaattttctggcttagtactattctcttgtgtggggatggaaggaactacttgaaatcagggaaagaaccctcctacatgctttccacacaaaacctaccttttagacatatatctgttaaaaataaaagaactaaaaaatggcagaaaagatagcaagagtggctgcctatattaatattagaaaaagcagattttagaacaaatgacgttgtcaggaataaagagaaacatttaataatgactaaggggtcaattcaccaaaatatcataatactcctaagaatagggcttcaaaatgtacaaattaggaactgact

SEQ ID NO: 17589 - DNA, 431 bp, Homo sapiens
  misc_feature 41, 68: n = A,T,C or G
agtacttctagaattaattaaggcggggtaaaggcatttantagtcattaaactttgatttcagttancatgcaggtatttatctctgtttccctgtctcattaccagacaaatatagtagtcatctaataaatgtgaagaagagaagcagtgacagaatcaaaaggtggtaatattgacaatcaatggaaacagtagggaattggactaagcataagccttgccactgccactgttggtgttgagactttggatgagttattcaacctttgttaggcctcagtgtttttatatgtaaaaatggaaaatgttattccatttactctgtcagggcttgagcaaacaattgtcaagcagtagctaacgataatgcttgtattggctttctcatttcttgccttatttcccttgtttctcaatctttttgacat

SEQ ID NO: 17590 - DNA, 429 bp, Homo sapiens
cggccccccctcggagtcttctagaattaattaaggcgggagaattgcttgaacatgaaaggcagaggttgcagtaagccagatagcgccactgcactctagcctgggcgacagagtgagactccttctccgcaccacccaaaaaaaaaaaaagtgctacattttccataaaacattaccttgaacagctttcacctttgtatcttagagtggaaactaccacataaaataactcgctaggacagaggttcacaagccttcctggtatatagtgcccttggtgtctgaggagttttgttgtgctcttaagccaaaaggagtaactagcagttgctttgatgacatagctgtatccaagcaacataactatattgtcttagcagcctagtagctattggaaaaaccaatttacattattggaaagaaaaa

SEQ ID NO: 17591 - DNA, 419 bp, Homo sapiens
agtacttctagaattaattaaggcgggctattggcaattcttcctctgtaaattactttgaatttttctaacagaaaactggtttggctaattatcaaatttgtatacttagctagaaaaatggaaactattcctatttattgccacaaaaaccatgtccctactttacttcatagaatgcacaagcaaaagccagctcaacccctgggattatttatacttaaaaattaataatggagagtattttgccagggcagcagtggtggataggaagaagagtaagaaaaagatctgctgttctagagctgggcccagtggctcaagtgaggtcctcctgtctgcccatcagtccacactcaggcctttctggggaaagaaaaacagtaagaagaaaagaaagttggatttaagtgttctca

SEQ ID NO: 17592 - DNA, 434 bp, Homo sapiens
  misc_feature 5, 30, 41, 47, 49, 50, 56, 58, 76, 79, 244, 301, 333, 357: n = A,T,C or G
taccnggccccccctcgagagtacttctanagtgggggaangagggncnncttgananccattttttttctttttnccncccgtgctgggtctgggctgcctgccattgcagcgggtgggctaatggttagatcaggggagggacttcccatggaaataagtgcatggggtaatgaggagtgtgggcccctggccaaaggaagagcaggctgaagagataaaaatggagagaggcaggcagcanacagtctcagaagggcattctcttcctgggcagtgttcgtccccttttttaaagcancaagatcctttcttctcacccacagcactganacagggctgctctggctgaagcanatgaagggggtctgagccctgattgctgggaaagcttaaaagtcacttacatctctgagactcaatttcccaattca

SEQ ID NO: 17593 - DNA, 436 bp, Homo sapiens
accgggccccccctcgagagtacttctagaattaattaaggcgggaggtagacattgcagtgagatcgcaccactgcactccagcctgggtgacgagtgaaacaggccaggctattttcacactcacacttctctggcctctgccttttcactctccctctcacgtgctgcggcacagacccacagaggctgctgggcgcatggtgtcgcaagagcaggagggcaggagaggagaatcctgctggaggaatctaaaacatcactcagcactaaattgtttttgtctgggacaaactagtttccgtaaagatgtgatttatgataacatgtaatgggattattattcttttaaaataaatttggctacagtggctcaggcctgtaagcccagcactttgggaggccaagatgggtggatcgcttgagaccaggagtt

SEQ ID NO: 17594 - DNA, 327 bp, Homo sapiens
ccccccctcgagagtacttctagaattaattaaggcggggggaaaaggaattagagaaggtagtctagagacagtgagaagacttacctgaaaaacaaggcttgcttcctgtaaatcattatttaccaggagactgcgcaggaagagaggaaacaacatgagcaaaggcatggcttcagttctcatttgtgtgtaaattaacaccacatggaaatgattgctgatgatgatgttcattctatcactttgtgacttagtgttctctttataaaatcctttacaacatcattgctggcattgctgttcgtctttcatatttccttagcc

SEQ ID NO: 17595 - DNA, 434 bp, Homo sapiens
agtacttctagaattaattaagggggcaaaagccaagtataaatcccagcatcattagtgatgatgatagaaatcttttatctccccccaaatcctccttgccacttttaaacaatctgaaaaacaggaagcagagttgttgacttaggaacccacagccttccattcccattattgggggaagcccttaaggaactcccccaccccagtgggattaaccaccaatgttgactacatgtcctgaaaacttttcttctgtaaaaagtttagaccaatttgtccatgttaaactctagtataatttcagaattcctccactgatatttcttgattacaatttaaatggtctgtttctcatgatgagacaactgcatttgaggagcagtttcacttacctgtgacatgttcttaagtcttcgagctgctctcatgct

SEQ ID NO: 17596 - DNA, 449 bp, Homo sapiens
  misc_feature 18, 22, 27, 29, 30, 31, 32, 34, 38, 39, 40, 42, 53, 54, 55,57, 58, 60, 61, 62, 64, 70, 72, 73, 78, 85, 94, 96, 287,319: n = A,T,C or G
tggccgtcgttttacatncggnaacangnnnnancctnnntnctggccgggtnnntnncnnnanagaaanannaaaanccttaangccggggangngtttttatttcagcaaatgtacatgtagtaaagttctacaattttaattcattctagctctaaaaattctatgattttatccttttttctgttcttttaaacttgttcctgtacaatttatagactttttttctgagaaaaatcttcctggagaaaagattgttaggcccttcaataatagggagtttctnttaaaataagtttagccgttttgttatttaanaaatgatttggccgggcgtggtggctcacgcttgtaattgcagcactttgggaatccgaggcgggcggatcatgaggtcaggagtttgagaccagcctggccaacacagtgaaaccccatctctactaaa

SEQ ID NO: 17597 - DNA, 404 bp, Homo sapiens
agtacttctagaattaattaaggcgggcgccagtaatcccaactacttgggaggctgaggcaggagaattgcttgaacacagaaggcagaggttgcagtgagccaagatcaagctactgcactccagcctgggcaaaagagcaagactgcatctcaaaaaataaataaatgttctaattgtgtattagtttacttccttctttcattacatctattttaggaaacctaactagcaggattcattcacctaggtgttgcttctgccttactttccaatctaaatttgcttcttagggttttcctctttgagagaaactaaaaggttaggaataattcctgacaaaggaggctttcagatagctgggccatggctatggtgaataaaacaggggaagaggcctaaa

SEQ ID NO: 17598 - DNA, 368 bp, Homo sapiens
  misc_feature 13, 35: n = A,T,C or G
aattaaagagaanatgccatttataatagtctcanagaacatcaagtatctcaaaagaaatttgacaaataaaaattttaaacagtattaacagaattttgaaaatctacataaatggagagttagctagaagataatatcaaaaacttaccaattctccccaaattaagctatagagacaatattatgccagtgaaaacctgagtaaggactttcttaaagtacagtaagataattctaaaatttatatgaaactttaaaggaccaagatattgctgaagaagaagaccgggaggaggaaacttgcccttcaaggaatcggggcttattatgaagctattgtaattaaggaaaggcaaaatgagaca

SEQ ID NO: 17599 - DNA, 347 bp, Homo sapiens
  misc_feature 28, 34, 46, 69, 72, 76, 81, 94, 103, 114, 137, 147, 149,173, 189, 237, 266, 310: n = A,T,C or G
agtacttctagaattaattaaggcgggncccagngttcaggtgatngattctgatgcacactgaagctnganatcnaatantgtcttccaaaanaggaatgtngccaatatttnattcagctttctcttctacttgncactgacttncnagctatctttttaaagtgtttcantaaccatgtgaactgnaatcacttggctggcaggagtgcaaatttgaacaactttctgttttgntctcttctccaacttcattgacaatatcnctgaatataatacattggaaaccattatgttgcatttgttccangaaaattcaattggtttaccacagaaatcactttgat

SEQ ID NO: 17600 - DNA, 516 bp, Homo sapiens
  misc_feature 492, 493, 494, 495, 496, 500, 502, 505: n = A,T,C or G
gtgccgggccccccctcgagagtacttctagaattaattaaggcgggaattgttcttcactgagccgtgacctaaatttagcggtgctgaagagtgagccccagccaacaggatttccctgagaacacgatgaagttcctgtatcaattcgattcattaactagaaagagggaacaagcagccagctttttttttctgcccccattcttcagtgaatcatttgttagtttgaccagaatttttgtgagatccagtctacaattctgtaagaaaaaaagacagcaaacctcattcaaatacttcttgcgacattaattccgaggcagaaaccaaattacattaagcagatctgattgtcttgctattaaagaccttgggtttactcactgagtattttcagcctgaagagaagaaatgctctcaatttgggtagggtgtttggtaactcgggataaaatgaataagagccaacttggctcacaagtggatttnnnnnaaancnaanaaaaaaaaaaa

SEQ ID NO: 17601 - DNA, 124 bp, Homo sapiens
  misc_feature 1, 2, 3: n = A,T,C or G
nnnagtacttctagaattaattaaggcggggaaggacaattacttaacaccatcctttttattgaacaaaaattaaataaagcaaatagctaagtattgaacaggagctcatatacgggagcaa

SEQ ID NO: 17602 - DNA, 380 bp, Homo sapiens
  misc_feature 365, 367: n = A,T,C or G
agtacttctagaattaattaaggcgggggcatagatttaattgtttggttcaactgggaagccatatattaacttctacttcaacccatcctgatctctccacagatgctagttttatacaggcctatttttctctgaaattgagcctgagagacaaaaatccacacttgggctgtcatagattttggtaaattgagtcttgtgactgattggtgcctcctgcctgccccgtgatcctgtatgtagtaaccacgtcgtgatcacaggtcatggattggggaaagttgcctccaaagatgtgggtgtctgtttttcactccactttccatttggccaaaaattcaacacttcagtttctgtttctnanaaaaaaaaaaaaa

SEQ ID NO: 17603 - DNA, 305 bp, Homo sapiens
  misc_feature 2, 21, 26, 31, 33, 35, 36, 38, 40, 44, 55, 56, 57, 61, 64,65, 66, 67, 68, 69, 75, 81, 86, 90, 91, 92, 96, 100, 101,102, 105, 107, 108, 126, 129, 130, 132, 136, 139, 145, 146,172, 226, 290: n = A,T,C or G
anactggccgtcgttttacanccggnaacangnannancnttanttctggccggnnntttnccnnnnnnaaaaanaaaaanccttnattnnnggcngggnnnttncnnaaagaaaaaaaaaaaaanttnntntgangancctgtnnatgaaaattctaaaataaatgctaanaaggccaccagtaaaaacagagattaagacatatttactccagatgaaattaangtaatacaacagtctggaaattactttaaaacaactttcttccataagaaaaaggaagtaatanttttcttaaaaagaa

SEQ ID NO: 17604 - DNA, 332 bp, Homo sapiens
  misc_feature 263: n = A,T,C or G
gtgccgggccccccctcgagagtacttctagaattaattaaatttacttgttggttgggattcctgaatttgtttgtatttctttgtatgttaattttaattcatcagattgtaaactcacaaatatggaaggacaagttagttccgcagagaaaaaaaaacccaggtctcagcactatgcaactcaggtctctttagctgtgtaataggaggtaatcatggcatttaaaaacattgactatggagttctctgagtaaatganaatattagctccaccacctttatccgtatgacttttggctaattacttaacatggatgagtcagtttct

SEQ ID NO: 17605 - DNA, 451 bp, Homo sapiens
  misc_feature 60: n = A,T,C or G
agtacttctagaattaattaagggggggagggatagcattaggagacacacctaatgtanatgacaagttaatgggtgcagcacaccaacatggcacatgtatacatatgtaacaaatctgcacattgtgcacatgtaccctagaacttaaagtattaaaaaaaaaaatcttggtgatggctgacagaagccacactgtttttccgaactcattgactcccagctttatattgccttatccctgtttgactacaacaacagtattataaagggcagttatgatgtttgctcaccgtttcatctctcctaacagattttaggtgatcaattcaaggggagcattctaagtcctacataaacctgtttattccacagctactaacaaaatggtctgtacacagtacaaagtcagcaaataactcccaaaccaccctaattacacaaaaagaac

SEQ ID NO: 17606 - DNA, 446 bp, Homo sapiens
agtacttctagaattaattaaggcgggataatggtaggtggagaagccagcttatagttctgagcaagattatatctttagcttttattaggcatgtaaatgaaatacttttgagattttcagctggaaaaatgaaactaatgtgaaatgcattatattgccagagatgacttccattgcctggtggggaagagactggaggaaggatggataatggcagcacacagatgctgctgagaagctattttagtagttcatgtaagagacaattgtcaaatttgcaataaacttccaggtgaaatggaattgactttctaatggcttggaatggtgtatataaaacagctggtaatgactccatgttttgaagctttagaaaatagattaataatggctcaaattactgagtgaaaaattctgggaaagaagcaggattggcaggatgc

SEQ ID NO: 17607 - DNA, 307 bp, Homo sapiens
  misc_feature 4, 8, 36, 37, 40, 183, 218, 238, 242, 267, 292, 295: n = A,T,C or G
agtncttntagaattaattaaggcgggaagaaaatnnatntattgtgttgaatgctggcctggcgcttattaaatgagatttgggctgtgatatggattttaaagtcactggagtgaaaaagattattaaatttatgtatgtggaagatatctagggaaaatatttgaagagaaacagctccnggaaagacatattaggaaaaaacacatgcataacntactattgaagggaatgtanaatnctatacagccaacttttaaaaacancatccagcaaaagcttgaagtaagnagnaaggaattactt

SEQ ID NO: 17608 - DNA, 294 bp, Homo sapiens
  misc_feature 287: n = A,T,C or G
ctcgaaagtacttctagaaattaattaaggcggggggggtctcgcttttttgtccaggttggtcttgaactcctggcctcaagcagttctccagttctcccaccttagcctcccaaagtgctaggattataggtatgagccaccatacctggctataactgacataactatttcttatattccatgatactacaaacaagacataactgtatttcttatattctataatactacaaacaagacaaaaagttaaatcagcctggagaacaaatactaagatacctaanaaaaaaa

SEQ ID NO: 17609 - DNA, 430 bp, Homo sapiens
agtacttctagaattaattaaggcgggggatactgtaattttggagcagtcatctgcaaattaacttatttggcagataccaatgtcaaattggtatgaaacaacaggaaagtaaagcatattataatattttccttaaaaatcatggaaaggtgatataacaccctgaagcctgaaactgctgtcgttagtgccaatgactatactgatttttaaaaatctggccgggtgcggtggctcacacctgtaatcccagcactttgggaggccgaggtgggcagatcacaaggtcaggagatcgacaccatcctggccaacatggtgaaacccgtctccaccaaaacacaaaaaattagccaggcgtggtggcacacgcccgcagtcccagccactcgggaggctgaggcaggggaatcacccgaacccagga

SEQ ID NO: 17610 - DNA, 595 bp, Homo sapiens
  misc_feature 2, 5, 20, 22, 23, 25, 26, 30, 34: n = A,T,C or G
gncgntttcaccccggaatnanngnnaccnatgntgggtgccgggccccccctcgagagtacttctagaattaattaaggcgggaggaatgcttgaacccaggagtttgagacctgtccagcttcctaaagtactgggattataggtgtgagccactgtgtctagccaagaataccttgttctattgcagaacatcttgtcatactgggattagatatactttaatgacttaaaacataaattggtgtacagaatgaagatagtttttattgataagcatatacacataaaatttgtatcaactcagtaattgtcaaggaagttttaattcctgaaagattttttttcatagaaaaatatttctcaagattcttagagagtgtctaagtcaatgccaagagaagtttggaaagactttgagagaaggctagcccagcatcttggaagtagaggtggatttagttttacatagttctgttggaggtgataaaagagaagaattccttagggaatcactgtagtgtaaaatactattaaaatctctcaaaagcctagaactgggctgggtgcagtggctcatgcctgtaaatcccac

SEQ ID NO: 17611 - DNA, 418 bp, Homo sapiens
agtacttctagaattaattaaggcggggacgagggtgcacatcagtaactccatgtacagctggaaagactgaggcacatagcactcggatgacttccacggtcacacgactggtgagtgacaacattcacacggacacacaattaactcccagcccttataactttaattagatcttttgaaatactattctagttccaaaaggcaattctacatagacttccccactctttttcaggggaaggagatagagatggggtgagatagaggaatctacaaattatccttagtctttcaaaataaatttgtgtctggatttctaaagtgtgtggagatttaagggcagggcctctagtctcttctatgtcagacttaatgaaaacaaccatgatataggacacaaagtttgctacttaca

SEQ ID NO: 17612 - DNA, 569 bp, Homo sapiens
  misc_feature 1, 14, 32, 39, 40, 52, 77, 86, 87, 91, 99, 113, 123, 125,126, 128, 132, 135, 138, 139, 140, 149, 153, 206, 225, 411,415, 421, 425, 449, 451, 457, 460, 463, 468, 488, 491, 522,530, 533, 534, 540, 543, 547, 557: n = A,T,C or G
ngagtacttctagnaattaattaaggggggangtatagnntagaaggtaatnaatttcagagcacggtatatggcantatctaagnntctntatgctcnacaaccgtggagcncccacagtcntnngngatnatngcnnncacctagtnaganagactgctcgcaatacaataatagtggaggaattcaacaccctactcacagtnttaaaacagataatcagtncaaaaaaatgataaaggctggacttaaactggactttagaccaaatggacctaacagaatttacataacattctgcccaactgcagaatatacattcttttcatcaacacactgaacattctcctaaatagaccatttgttaagccacaaaacaagtctgggcacatttttaaaaatcaaattatnttcnaggttntttntcaaggcccagttgaattaaactngnaaatcnatnccnaaggncaattcattcccagaggganttnggaattttcaaaatcctgggaaattcccaanatactccnaannaaaccnggncatngaaaaatttnaagggaatttaa

SEQ ID NO: 17613 - DNA, 235 bp, Homo sapiens
ataagcctgggcaacttggtgaaactccatctaaattttgttttttaataacaaaattcaggctgggattacagatgtgagccactgcatccggtcacatttgtttttttaattgctataaatttttactgttggtcctagatctggggcagatgagaggctgtttcttcacagtggagccagtaattacaggatccttaaggaatgaggacatcggtatacccacttgaaaaaa

SEQ ID NO: 17614 - DNA, 405 bp, Homo sapiens
  misc_feature 48, 109, 126, 166, 189, 271, 272, 273, 283, 284, 291, 292,293, 294, 295, 296, 297, 300, 306, 313, 314, 316, 319, 320,321, 323, 324, 325, 332, 333, 347, 348, 349, 363, 364, 373,403: n = A,T,C or G
agtacttctagaattaattaaggcgggtggatcacctgagatcagganttcgagaccagcctggccaacatggtgaaacgctgtctccactaaaaatgcaaaaaattanctgggcatggccgggcncggtggctcacgcctgtaatcccagcactttgggaggccnaggcaggcggatcacgaggtcangagaccgagaccatcctggctaacacagtgaaaccccgtctctactaaaaatactcatctaacaaaaaaaaaaaaaaaaaannncccccccccnnggggggnnnnnnntcncccctntgggggnnanttnnncnnnccccttnngggggagtttttannngaacctgggacatnnaggttgcanttgagacatgatttgcccgctgtactccancc

SEQ ID NO: 17615 - DNA, 482 bp, Homo sapiens
agtacttctagaattaattaaggcggggcaaaatacataaataaaataaagtgagaggaaaatttagactgagatttctacatggccaatttctaaaatcggcatttggaaatgcatttcactacttgttgcaaagacataataacagacatcatgtctttctcgaaaactcagaaaaatctcacttattttgcacatcttactgtcttcaagtaatatttacagcttttaatgcatacaaagaacattaatcaaaaacaccattatacctcaccagtgtttgttgagctcctactctatgctgagcactttataaacactttctgctttcctatggttctggggacctcttcccagttgggcacaccatactaattgcacttaagagaaccataggattgtagatgcagacacccatatcctaatacttagccaccatttccttcctcactcctcttccatctgcccctcatccaacaaac

SEQ ID NO: 17616 - DNA, 429 bp, Homo sapiens
  misc_feature 111, 409, 412, 413, 414, 415: n = A,T,C or G
agtacttctagaattaattaaggcggggggtgtctgctctcagcctgggctcccgcaagcgggagaagcagctccagctggggggaagcgaaaaagggacaggaccttcanagacagcccactgagggctgagtgtgcattgctgggcttctggaatctgtggtgagggtgctaataccatgaaatttcatatctgccaacagttgtccaaatgagtgatgttattactgtgagctcaccccacagacactgagaggggcatgggagtggtaacccaactggtatttctcctcttttcccatggtaatgtttttcaaattgcagatttgaccccacagttaggagataaattaagaaggttgatcagcattaaaaaccaaaaaagaaaaaatgaagtatattacatgtnttnnnnaaaaaaaaaaaaaa

SEQ ID NO: 17617 - DNA, 240 bp, Homo sapiens
  misc_feature 1, 2: n = A,T,C or G
nnagtacttctagaaattaattaaggcgggctatcaaaacaagttagctctaaagcatgtcaagttgaatgagtttatctaaaaaataatactatatttgttttagaaccatagataaaaatccagtattatgtctttataatcagctaacagatatggttacttcattggagtaatgctaatatgataataatatcatattcaatataggaaattcttcattgcaatgtgaccttgtca

SEQ ID NO: 17618 - DNA, 286 bp, Homo sapiens
  misc_feature 94, 96, 101, 263: n = A,T,C or G
agtacttctagaattaattaaggcgggagccaccgtgcctggcctgaaagcattgtttttaaattaactgcagtttactaaatgagtaaaccantngtcangacttactgataaatctcatagtctttaactaggacctcttataggcaattatgctactaagttcattttctctagtttactgaatgtttaatagagaatggaaatgtaatgggtaagttaaatgagcccttcccaaaacatgttcagaacttttggcttanagcaaaagtcagctttcaaatgt

SEQ ID NO: 17619 - DNA, 461 bp, Homo sapiens
  misc_feature 32, 93, 154, 215, 216, 222, 226, 228, 235, 248, 260, 274,275, 277, 278, 281, 283, 286, 287, 288, 290, 297, 298, 305,313, 317, 318, 320, 321, 325, 326, 339, 348, 349, 350, 356,358, 359, 360, 372, 373, 377, 380, 381, 388, 390, 391: n = A,T,C or G
  misc_feature 395, 399, 400, 401, 407, 412, 418, 422, 428, 435, 437, 439,443, 444, 449: n = A,T,C or G
tgcctgtgctcccagcactttggaaggccaangtgggcagaacacctgcggtcaggagtttgagaccagcctgaccaacatgatgaaaccccntctctactaaaaatacaaaaaaattagccaggtgtagtggtcagtgcctttaattccccanctactcagggggctgaggccagaaaattggcttgaacttgaggaggcaaaaattgcagtgnncttganatgnanaacttcncccaaacttgggnaacaaaactttntctaaaaaaaaaanntnnccnanaannngnaaaaaannaaacccngggccccnaaannanngggnncccctccctcttnaaaaaaatnnncctttncnnnggggagaaaaannttanaanncccttcncnngggntttnnntccctnttttnaaaaanaaantttttngccccanananaaannccccntttttttttttt

SEQ ID NO: 17620 - DNA, 193 bp, Homo sapiens
  misc_feature 33: n = A,T,C or G
ggtaccgggccccccctcgaaagtacttctagnaattaattaaggcggggcttggtagcacaggtatctgaggccaggagcttgaggccacagtgcagtgcactatgattatgcctgtgaatgtgtgaatagccactgcactccagcctgggcaacatagcaacatcccgtatctaaaaaaaaaaaaaaaaaa

SEQ ID NO: 17621 - DNA, 262 bp, Homo sapiens
  misc_feature 237, 262: n = A,T,C or G
aattaattaaggcggggtttgtgttctttcagtttctttattcttcagttccacccctgcctcccacacacaaaccccacttaatccagccttgagaaaatcagactttacactgagcatgttctttcttataaattgggtcactcaacagtcagcttctgggctatcgtctcattttctttgcaaatgctttactctcctttaaagcttaaaaatttcccagagaagagtcctaangatccgaaaaaaaaaaaaaaaaaan

SEQ ID NO: 17622 - DNA, 429 bp, Homo sapiens
  misc_feature 8, 86, 388: n = A,T,C or G
agtacttntagaattaattaaggcgggggctcatccaggacacctacctgcatttttccatcaaggttgaaacaaacactgcttgntcgcaaaggagtagacatttactccaaaaatatatttgccttccttgcctgaaatgcttctgccaaacccaccatctgtgaacttgaggaatgccttactcatgatcatgttattacatactcctgaccaaggaattcattttaccaaacataaagtgcagagatactcatgaaatgtattgctcttatcatgatcttcatcactctaaagcaactggcctgaaacaaaggtgaaatgagcttttgaagcgtcaactgagtgactaaattttgtgaagctaggataacattctccacaatgngggcatatggcctccatcagcaaccaatctatgaccctgtt

SEQ ID NO: 17623 - DNA, 297 bp, Homo sapiens
  misc_feature 12, 34, 35, 37, 69, 72, 79, 86, 87, 94, 95, 193, 284: n = A,T,C or G
gggaacaataanctgggtacccgggccccccctnnanagtacttctagaattaattaaggcgggaggangantagaatnagaatannaaaaaannattgatatctgggcataatcattaatagctactaaaatcattaggaaagaagctgatatggattttcctaatgaatagacaaagctgacagtacctanattcacagaccaatattaacatcaccaaaaaggaaacaagcaggcgttaggtgtccaacctcaatttgatcaagtctcgattactgtgcantctaatatggttg

SEQ ID NO: 17624 - DNA, 454 bp, Homo sapiens
  misc_feature 59, 82, 103, 109, 114, 115, 116, 121, 124, 132, 134, 135,137, 162, 170, 235, 259, 282, 296, 307, 314, 318, 321, 378,384, 401, 415, 425, 426: n = A,T,C or G
agtacttctagaattaattaaggcgggaggatggtttgggcctgggagatggaggttgnagtgagccgggatcacgccatgngtattccagcctggacggtanagtcanacccnnnctcanaanaataaaantnnanaaattaatgtaatacagctactatnaacccacnaaaactttaaaaaaaatttttaattattaaaaaaatgtaatgctgctactgctttgcttatgtanattgtgggctagaataggaaatanaactatcatttttaacacttttntggggggaaatatnattcgaatttnataacantcanctngatgaccttttaaaaatatatatggtgagaccattgtgatgttggggctgcctgttngcaaanaggatttttgtgagctngattgtccaaaatngaaatttgcnnacatcttactgagtttgctgtttccttc

SEQ ID NO: 17625 - DNA, 343 bp, Homo sapiens
  misc_feature 167, 267, 283: n = A,T,C or G
agtacttctagaattaattaaggcgggctgcatctgggccaagaaaatgttctatttcttgatctaagtggtaataatgtgagtgttcacttgatagctatttgttaaattgcacatataagtttaatgcacattactatatactttatatttcagcataaatgcanaaaaaaatgtaaatactggatttgacattcatgaagtcaccagtgattttaacaagggtggtttcaattagtggtgtaatggcagctgaattgggttgcngaacaaacgaacaatnacaataaaggtgtcaaatgctctacccttgagctagtcaagtaatctatacaacaaaccc

SEQ ID NO: 17626 - DNA, 272 bp, Homo sapiens
  misc_feature 213, 214, 224, 230, 235, 240, 243, 247, 255, 268: n = A,T,C or G
agtacttctagaattaattaaggcgggggaggggaagtgaaaatattcttcaaagatgaaggcaaaataaaaatattttcagaaaagcagcaacccaaaatattaattgccagtaggtctttactgtaggaaatactcaagggacttcttcaggcaaaagaaaatgaccccagaaggataactcaaaaggcaggagtgaaaaaaaaaaaaaannaaaattcccnaaaaanatttntttgngantaantaaccaanttttttttttaantttt

SEQ ID NO: 17627 - DNA, 313 bp, Homo sapiens
  misc_feature 33, 40, 42, 46, 48, 50, 52, 57, 62, 65, 71, 108, 264, 278,287: n = A,T,C or G
agtacttctagaattaattaaggcggggggggnacagatntncaantnantngaatnattcnaanctcctntttgggtaactgacagaacaagcaaaccttaccatcnctaccaaccaacttaacttggctgacatttacagaacattccacccaatgacagcagactacacattctactcaagtgaacatggaacatccactaaaagacaccattctgggacataaaacaagccttggtaaataaaaaaaaaaaatgaaatantgaaattaaattanaaatcaccncccgaaaaaaaaaaaaaaaaaaaaaa

SEQ ID NO: 17628 - DNA, 422 bp, Homo sapiens
agtacttctagaattaattaaggcgggcggatcacgaggtcaggagatctagaccatcctggctaacacggtgaaaccctatctctactaaaaatacaaaaaaatcaaccgggcgtggcagtgggcacctgtagtcccagctgctggggaggctgaggcaggagaatggtatgaacctgggagatggagcttgcagtgagccgagattgtgccactgcactccagcctggggaacagagcgagactctgtctcaaaaaaatatatatatatataaataaatatatatgtaaatatatataatgtataaaaatatatgtaaatatattaatatataaatatacatgcaaatatatattaatatgtatgtaaacattaatgtatatgtaaatatatattaatatatgtaatatatataattata

SEQ ID NO: 17629 - DNA, 438 bp, Homo sapiens
  misc_feature 111, 279, 385, 402, 403, 404, 405, 411, 412, 413, 414, 415,417, 423, 425, 426, 435: n = A,T,C or G
agtacttctagaattaattaaggcggggtagaaaataattatactgtaataatctggaaaaaaaaatgttcacacagtattaatgtgtgataatcatctcatacattccanaaatgaggtttgagagccttcactgaccatgtgtcatatccatttattttgggatccctttcaccccatttttaacttcctcccagttgcccaatgtcctctggagttttccatccaagacccccatcttttttttccctttcccccctttttagcttcctcccagtngcccaatgtcctctggagttttccatccaagaactccagcttctttttttgggggtgggggaggacggggtttcactcttgttgctcaggctggagtgcaatggcnaaactccctctcaaaannnnaaaaannnnnangggggncnnccccccccnggg

SEQ ID NO: 17630 - DNA, 132 bp, Homo sapiens
agtacttctagaattaattaaggcgggaggctgagcggcccccgacggaacgcacacctccaaggggccccattaccgcccccaacaaataaatgtagaatctacacggacaaaaaaaaaaaaaaaaaaaaa

SEQ ID NO: 17631 - DNA, 409 bp, Homo sapiens
  misc_feature 23, 26, 36, 41, 66, 100, 151, 157, 159, 195, 202, 254, 270,276, 278, 283, 288, 293, 301, 330, 335, 359, 367, 376, 393: n = A,T,C or G
agtacttctagaattaattaatnctnactaactaangaagnaaaataagaaagaacaaaggaaaanttggagcaaagaggaagcacaagataagatagtngacaataatccatttatattagtaattatataaatgtcaatgtggtaaatnccctantnaaaatgcaaatcttttcacagtggatttttaaaatntccacanttttcactttagaaaagatatgtgtcttgggctgtttatagggatccagaanaattcaaagtagaacnatgaananaaaanaaaanctgcncattatgnagcggctcgccaccgcggttggagctccnattcnccctatacgtgagtcggtattacnccgcgctnactggccgnctttttacaacgatcgngactgggaaaaccctg

SEQ ID NO: 17632 - DNA, 301 bp, Homo sapiens
  misc_feature 46, 51, 52, 56, 62, 64, 65: n = A,T,C or G
agtacttctagaattaattaaggcgggagggagagcgttaggaggnatacnnaatntttttnannagttaatgggtacagcacaccaacatggcacatgtatatatatgtaacaaacctgcacgttgtgcacatgtaccctaaaagtatagtaaaaagaaaatatatatatattaaaaaaagacaatcatagaagtaagacttctcttaattcaacttcttacacagttttgactttggaattaaaaatatttaacacagtcaaaaataatattaattcaaaaagaaaagagcaatttcta

SEQ ID NO: 17633 - DNA, 300 bp, Homo sapiens
agtacttctagaattaattaaggcggggtgtatagtatgagcaaaggccctgaagtgggccagagtatggcaagtacaaatgactgaaagaaagccagggtagtgaaattgcagtgtgtggtctataagataaggctaaagaggtaggtatagccaaatggagcccattattgggctgggggtggtggcccatacctgtagtctcagcactttgggaggccaaggcaggacaatagcttgaggccagaagtttgagaccagcttggacaacatagtgggaccttgtctctaaaaaaaaaa

SEQ ID NO: 17634 - DNA, 274 bp, Homo sapiens
  misc_feature 255, 256, 257, 258, 267, 269: n = A,T,C or G
ccgggccccccctcgagagtacttctagaattaattaaggcgggaaactaaaaacccatataaatattggcaaagaagcagcaaattactttgtttgtagagtacagtattacgtgtttagaaaatccaagagactttgaaaaaacacaaaaacaaataacacccccacacacacaaaaaaacaggttttaaagaacagtgtgacatatttggaaatcaagaatataaataaaaagcagttccccaaaaaaaaannnnaaacagaananaaaaa

SEQ ID NO: 17635 - DNA, 263 bp, Homo sapiens
  misc_feature 30, 55, 75, 79, 80, 87, 242, 243: n = A,T,C or G
agtacttctagaattaattaaggcgggttncatggcagagaggggtgtaaaggangaaagaaagggaagtagaanctanncaaaagntttaatatacttctctaaataatatataattatatgtgtgagataacatatatgcatttatgcataaaactatatatatgcttgtctatatgagaaattagaaaaagattgaaaagctagtctaaaagcatgctcaaaccatgacatacaaaaannaactccaaataaacctataa

SEQ ID NO: 17636 - DNA, 339 bp, Homo sapiens
agtacttctagaattaattaaggcgggggaaggaacagaaaaaaatctaaagaaatagtggctgaaaaatatccaaatttgctgaaaatcatcatcccacagacccaaaatttcaataagctccagttagaagaaagtgaaaaaaactacaccaaggcacataataatcaaaagcagtcagagacaaaggacattatgcacagaacaaaggtgatattgagcgaactccttgttggaaacaatgcaagtcggaagacaatggagcagcacctttaaggcactgaaagaaaaaaaactctcacctagacttccaaattaaaaaaaaaaaaaaaaaaaaaa

SEQ ID NO: 17637 - DNA, 387 bp, Homo sapiens
  misc_feature 54, 60, 317, 369, 373, 378: n = A,T,C or G
ggtaccgggccccccctcgagagtacttctagaattaattaaggcggggtaatnatggcnaaaagatagaaatatagatcacaggaatggaatagaccattctgaaatagaaccacacacattgccaactaattttcagcagaatgccaggtcaattcgataaagaaataaaaatctttccaacaaatggtgctagaataaccagaaatccataagaaaaattaaaaaaacctcatgccatatgcaaaacttaattttaaataagttataagcctaaatgtataaaattgtaaggcttttagaacaagacattgcanaaaatttttacaaacttgaataagcagttatttgttaggcaggacacacaanaacncaaanaaaaaaaaa

SEQ ID NO: 17638 - DNA, 252 bp, Homo sapiens
  misc_feature 16, 34, 57, 65: n = A,T,C or G
gtgcattgttcactanagaaaaatgttatccagncttaaaaagtgatagtaacaganaatatgtngatatattaaataatatttatgatatgtaaaatgaaaaaccaagatggcgatttgtatatacatcataactatttaaaatatatatttaaaagacaaaaaaaagatagtattcatttttatagaagaaaatgattgtgtatatttatttcctaaatcgtcataatatttataacatataatatattg

SEQ ID NO: 17639 - DNA, 348 bp, Homo sapiens
  misc_feature 4, 7, 28, 40, 57, 99, 146, 189, 224, 229, 290, 291, 294,296, 299, 301, 302, 304, 305, 307, 311, 312, 313, 315, 317,319, 320, 321, 322, 323, 324, 325, 326, 327, 328, 334, 336,348: n = A,T,C or G
aaanttnaatttaaagggcgggggtttnagtttggttttngtaagggggcttcaatngggtaagggggggaaagggccgaaaagaaaaaaggaaatagnaggaaaagaatagggggggaaaaatttaggaaaagaattaaaaaaancattactttttaggaaaggaaaaaaaaggaattaaaatttttnaaaaccctggaaaaaagttaagggaaaaagccagnaaagnaaaaaaaaaaggaccaaggccttaaggggaaaaccaaaaaaaaggcttaaaagggggcccnnaananaanannannanaaannnananannnnnnnnnncccgcncncccccccccccn

SEQ ID NO: 17640 - DNA, 265 bp, Homo sapiens
  misc_feature 29, 249, 256, 258: n = A,T,C or G
agtacttctagaattaattaaggcgggtnaatggaattaatgctccaagatcctagtattgtcgtggaagtggtaatagtaatcattgaaattagagagtaataattcatttctgtataatcactaaaaggattataaaatctaacaagatcaaatggcagaaaaatggaaaaataaatacttgattgagtcttaaagcagtaaagaaaaataaaaagaacaaagaacagatgggacaaaaaaaaaaanaaaaaananaaaaaaa

SEQ ID NO: 17641 - DNA, 430 bp, Homo sapiens
agtcttctagaattaattaaggcgggaggggaaaaatactatttggatagctattcactaaagaacaactcggttaagctgcatggtactcttgcttgctatcaggatgggggtaatcttttagatattagttattttactctgttacattgctaacagggtaaaacaggttaaccataatttatgtagaaaatatagaatgtgagaaaataaataacacaatgagaaatacaaagactaaacaaacattaaataaaaaaataccaaacacatgcataagatacaaactcatacagtaatactcagccttgaaataatcttctaaacttatgaaaatagcaaaacataatacaaaagagaaaatctcaacactgttattgtaaagttgttttaaattttgtgtgctaaatcattgatattaatattataa

SEQ ID NO: 17642 - DNA, 306 bp, Homo sapiens
  misc_feature 127, 130, 139, 141, 145, 154, 155, 157, 158, 163, 168, 169,179, 181, 183, 189, 207, 210, 212, 213, 214, 219, 225, 236,240, 243, 246, 247, 248, 249, 250, 253, 261: n = A,T,C or G
agtacttctagaattaattaaggcgggaggattgctagagcccaggagttccagaccagcctgggcaacacggcgaaacgccatctcgactaaaaatacaaggtaaaaaaaaaaaaaaaaacccggncgngggggttcncntttngggccccannanntcccnatttnnggccgggggngnancctttnacccccgggggggggggnttnannnaaagnaaatcncccccttgccntccnccntgnnnnnccnaccaaaantcctttttaaaaccaaaccaaaccaaaaaaccaaaaaaaaaaaaa

SEQ ID NO: 17643 - DNA, 431 bp, Homo sapiens
agtacttctagaattaattaaggcggggaaaggacagactattgaacaacagttatcctgagacataagttaactataagaaaataaaatcattatctcacatcatagagacacattttcaagctataggcttaaatgtaaaaataaaattttgacaatttttagaaaaaaaatgctctttaggtaatgatttttaaaataacatacaaaagtagaaattataaagtaaaagactgataaatgtgttactatgttgaagtttttaaaaattctaacaaaaggttcttcaaacaaaatgaaaaaccaaaccacagactacaagatattaacaaaatacataacaaaaaggtattaattttcaggatacattaagtcctaaaagtcagtaaataaatacaaacaactgtattgaaaaaaatgaggcaaaaaat

SEQ ID NO: 17644 - DNA, 677 bp, Homo sapiens
  misc_feature 445, 480, 494, 526, 532, 570, 608, 611, 612, 619, 623, 639,649, 656, 660, 669: n = A,T,C or G
agtacttctagaattaattaaggcgggaggattgcttgagtctgggaggtcgaggctgcagtgagccactgcactccagcgagtgatggagtgagaccctgtctcagaaaaaaaaaaaaaaaagaagaaaaaatatattaattcacaaaattgtcaaccacatgttgagaaatacatttttatacttgctgtatatttttcaataggtaatggttcaaaaattttaaagtacaaagggtatacagtagatggtagatttctgccacaactgtgcccacccaaccttttgtatttttccagaaacattctatacatatataaggaaatgcatataaatatatacatatataaaaacatatgcattttacatatgtgttaataccattggcacaaccacagacattatgcatgccggtttttttcacttgatgtatctgggttcttntttcctatacatttatctttttgtttcttttgagntcaaaagaaagttntgaagggggaaggaagaccatgctttgagctntttaanaaaggcttggaatgtttctttgtgttgcaataaaaatnttttttgccaaaatggattaaaatgaccagcttacaanaanngttcttnttanaaacttattcaattangaaaatttgnttttaancccntttttttgnaaaatttt

SEQ ID NO: 17645 - DNA, 190 bp, Homo sapiens
  misc_feature 2: n = A,T,C or G
cngaatacataaagaattacaagtcagtaagaaaaggacaacccaaaagaaaaacaaacaggatatttctgaacaattcacagaacaggaaacccaagtggattatagaatgattttctctgtgttagtagttacctaaaagatcattgaaattttatagctgtcagtttagaaaaaaaaaaaaaaaaaa

SEQ ID NO: 17646 - DNA, 352 bp, Homo sapiens
  misc_feature 5, 18, 49, 51, 53, 54, 58, 60, 322: n = A,T,C or G
aaatncagactgtcaaangaaaacttcaaaatatttttcaaagatgaangnannatananacaattttccaagaaacaaacctgagataatctctagcagacttcactacaagacatgttgaaagaagttcttagtactaaaggaaaatggcagggaatggaatcctcgatcaaccacaagaaagaggagtctcagaacaggtaaacagacaggtaaatgcaagattactttcattttttactatctttaaaatatgcttaactactttaaacaaaaaataggtaatgcaccatatgtctgataatacgttaggaagtaagnatacaccaccaaatacaaagggatggggaa

SEQ ID NO: 17647 - DNA, 415 bp, Homo sapiens
  misc_feature 40, 59, 152, 204, 228, 233, 241, 250, 252, 254, 259, 261,262, 264, 272, 273, 276, 277, 290, 295, 302, 303, 304, 305,317, 330, 332, 354, 368, 381, 396: n = A,T,C or G
agtacttctagaattaattaaggcgggagttatttaagantaatttccattacctaatnccttgatactaatgtgaaaaaaattatgaaaatcagaggtcaaacacttaaaaagatccacgaaaaatctcctacaaagacacttaaataagnaaaatcatcaaattttcataatgtaacagggagaagattgaagaaaccaaanaaaaaaaaaaaaaaaaaaaaaaanggggncccccccngggggggancncntatgncnntntagggggnnttnntaccccccccccnggggngggtttnnnnaatgaatagctnataggggttaaananccttctgcatcttccccctccntaaagcattccctnctttaaaaggaangtgagcaagccaagngagttgtaactatgcaatg

SEQ ID NO: 17648 - DNA, 381 bp, Homo sapiens
  misc_feature 10, 21, 22, 23, 24, 26, 44, 47, 57, 96, 105, 107, 126, 146,150, 163, 196, 208, 214, 235, 301, 303, 310, 319, 320, 321,322, 323, 328, 330, 344, 355, 356, 360, 362, 363, 364, 365,366, 367, 368, 369, 370, 371, 372, 373: n = A,T,C or G
agtacttctnagtgggggaannnnangggcggatcacaaaaacnaantttttttttntacccgcggcaacacagcaaccccacctctcctcaaaanacaaaaaantnttccctgcgtgtgggcggncgcccgcacccccagccccntctnctcctgaggctgnaaaaagacgctccccctagctccggagcttgcngccacccaaacnccgacnctctcccccaccccagccacngcaccagaccccgaccctatctctaaaatttaaaaaataaaatatataccttcccccccccaagtncnccccaantcccccctnnnnnaaaanantccccccccccccnggccccctttnncccntnnnnnnnnnnnncccccccc

SEQ ID NO: 17649 - DNA, 250 bp, Homo sapiens
  misc_feature 1, 3: n = A,T,C or G
ngngtacttctagaattaattaaggcggggccagcttgggcaacatagcaagacccagtctctaaaaacaatttaaaaagtttacaaaaaagaataataaggcataaaagggtttcttaaaaagcacaaacaataaagaaaatcctgataaattcagtaacattaaatttagaaactcacgtctaacaaaagacactaattttgaaaagtcaaagatgggccactgacctagagtaaacatttgcaaaac

SEQ ID NO: 17650 - DNA, 174 bp, Homo sapiens
  misc_feature 1, 2: n = A,T,C or G
nngtacttctagaaattaattaaggcgggtggtaatcagtcaaaagtgtatttgtaatctctagagcaacctctaaatgaaaaaagaatatataacgaaaagctaatagaggagaaaatggaatagtaaaaaaataactgattactccaaagaaaaaaaaaaaaaaaaaaaaaa

SEQ ID NO: 17651 - DNA, 619 bp, Homo sapiens
  misc_feature 28, 38, 40, 43, 45, 46, 48, 49, 50, 53, 54, 57, 59, 61, 63,65, 72, 77, 78, 79, 80, 81, 82, 85, 88, 89, 90, 100, 101,102, 110, 111, 113, 118, 125, 128, 129, 134, 135, 137, 142,145, 149, 153, 154, 156, 160, 163, 165, 167, 168, 172: n = A,T,C or G
  misc_feature 181, 182, 183, 189, 193, 201, 203, 208, 209, 210, 211, 212,214, 215, 217, 221, 225, 226, 228, 238, 239, 241, 242, 246,248, 251, 263, 270, 275, 277, 288, 326, 373, 401, 525, 549,555, 561, 574, 579, 587, 605: n = A,T,C or G
agtacttctagaattaattaaggcgggnccttgaatgncnatntnntnnntannctnangngngnaaatggnggaannnnnngangcnnntcttgccaannnccaatatnntncctcngctctanaanntgggnnanttatnganactntgtnncnaaanacnanannaatnattcgcagnnnggcgcngagnttcacacngnttttnnnnntnntntganaagnnanggcggacgannanncttntnaanaaatccaaaccntgctggntaacncngaaaaaccccntatgttgctgaggtggttgctcggcctaatggcccttncccctgggggggtggctatgaaaagcttatgaatcttcccaggtttngccaatgccgggcttttttttaaaactnttcctgattccaacgctctggaatctgtggtaatccatgacttcctccactgtgcttccacagcgattctgacttctaactacttgtatctgactgcccaaattagagtatgaacatcttaaangggtttattcatgtttataccggnccaaangctcancaaatcacttgtnttaangaatgaanggcttccaggtactggcnaatgacttaatatt

SEQ ID NO: 17652 - DNA, 272 bp, Homo sapiens
agtacttctagaattaattaaggcgggggacgttgtgttttcaccacaaaattgataactatgtgatgtaacgcatttattaattagctagatttgaccattctatgatctacatatagttcaaaatatcatgttatacccaatgaatacatatagtttcatgacaatttttaacaaacaaataaatttgtaaaaagtttatggattcagtttatgaaataacctaggaaacaagatatttctaaaaaaaaaaaaaaaaaaaaaaaaaaaag

SEQ ID NO: 17653 - DNA, 428 bp, Homo sapiens
  misc_feature 127, 139, 294, 333: n = A,T,C or G
aattaaggcgggggggtcaagtcatttcccaagggagtacaggacaattctgaaacctctcttcatgtataccaaagcacaacaggtaagtaagtagattgtcgacagtgggagccagcattttctntgctggacaganaagttacagataaactggaggggaaggctagaataatccctatagaaatggattatagttggagatataaacatgaactcatgtagagcttaatagggatgctgatgaatatatatcaaattacagacgtgtatatgcacgcatttgtatatacncacctgtttcccagctctgtccctttgagggggccaaanaagccaggatatcccagttaatgatgaacacaccagttgcccagatcttgagatcttaattccattctcccaaaaaagaaactagggatcctttg

SEQ ID NO: 17654 - DNA, 659 bp, Homo sapiens
  misc_feature 270, 271, 276, 277, 286, 290, 293, 295, 296, 301, 306, 307,319, 336, 341, 353, 360, 362, 365, 369, 378, 380, 382, 383,385, 387, 390, 402, 411, 412, 415, 426, 433, 440, 450, 451,453, 470, 472, 478, 485, 497, 505, 506, 508, 516, 520: n = A,T,C or G
  misc_feature 526, 529, 532, 537, 541, 544, 558, 559, 565, 580, 583, 599,602, 605, 613, 626, 629, 632, 635, 641, 645, 649: n = A,T,C or G
agtacttctagaattaattaaggcgggcagatcacgcggtcaggagttcgagtccagcctggccaacatagtgaaaccccatctctactaaaaatacaaaaaaattagctagacaattgtggcatgcgcctgtagtcccagctacttgggagactgaggcaggagaatcacttgaacccgtgaggtagaggttgcggtgagccgagatcacgccactgcactccagcctgggcaacagagagagactcctctgtctcaaaaaaaaaaaanncttcnnacctccttntggnaancnnccccnttttnnaaaaattgtttncttttttttccccccanaaaanttttttcaaaantttaaancnggntggncccgggggntnanncntntantcccaccctttngggaggccnnggnggccaaatcanagggtcnggaaatngaaaccttcnngnttaaaaggataaaaccntntttttnttaaaantccaaaaatttnccccggcnngnggggggcntttntatccnacntcntcggnaggntgnggccaaaaaatggnntaaccntgggaggcaaacttngcnttgaccccaaattggnccnctngccttccncccctaggggganaanagnganaactcntttntccnaaaaaaaaaa

SEQ ID NO: 17655 - DNA, 270 bp, Homo sapiens
  misc_feature 30, 31, 199: n = A,T,C or G
gggaggtgatacataaaattcaaacatgtnntacaaaattgatttttatcattttttcttaaccataaaggtatcttttagaaattagtatttcttgtagaaaaagcacctcaaggtcagcaattccttaagtttaacaatttttgttacgtttaggtaaaacctggccgggcacagtcgctcacgcctgtaatcccanaaatctgaaaggctgaggcgggtggatagcttaagctcaggagttcaagatcagcctgggcaacatggcga

SEQ ID NO: 17656 - DNA, 668 bp, Homo sapiens
  misc_feature 589, 605, 631, 632, 633, 634, 635, 636, 637, 638, 639, 641,642, 643, 644, 645, 646, 647, 648, 654, 656: n = A,T,C or G
gggtgccgggccccccctcgagagtacttctagaattaattaaggcgggggaggaaaaacattaggagaaatacttaatataggtgacgggttgatgggtgcagcaaaccaccatggcacgcatatacctatgtaacaaaactgcacgttcttcacatgtaccccataacttaaagtataataaaaataaataaataaagatggatctttcacagagaagttttgaaaatgactgatctaaataacattatgtaaaatgataggaaaactctaagttaaataaaaagaaacaagtttatttcttgcaggactttacaaactccttaaaatggaaattcacagtgtgaatctccagataacagttaatagaatcatttattttcttttgggtatacacccagtaatgggatttctgggtcgaatagtaactttaagttccttgagaggtctccagactgctttccacagtggctggactggtttgcattcccaccaacagtataaaagcattcatttttgtcacagcctcatcagcatctgctgttttttttgagtttttgatggcagtcaaccctggctggtgtgagangggattcttcatattntaccatttggaatactccccgccccnnnnnnnnnannnnnnnnaaaaangncccccccccccc

SEQ ID NO: 17657 - DNA, 442 bp, Homo sapiens
  misc_feature 3, 18, 36, 39, 442: n = A,T,C or G
gtnccgggccccccctcnagagtacttctagaattnatnaaggcggggaaaatgaggagatgttggtcgaagggtacaaagtttcagttatgctggatagataagttccagggatataatgtacaatatggtaactacagtcagtaatactgtattgtatacttgaaattgctgagagagtagacattaatagttctcaacacatagaaaataaatggtaactatgtgaggtgatggatatgttaattagcttgtgataattattttgccatgtatacatatatcaaaacatcatgttgtgcaccttaaatgtatacaatttttatatgccaattatgctttaaagaagctggaaaaaattagcagaaagcacaaaaataaattatgaaaaatttaaaaactaaaaccccacaacaagcaaaaaccaaaccaaaaaaaaaan

SEQ ID NO: 17658 - DNA, 394 bp, Homo sapiens
  misc_feature 259, 264, 288, 295, 327, 344, 359, 362: n = A,T,C or G
aagtacttctagaattaattaaggcggggggcttttgtgtgataacggttgtaatgttaagttttgttgaaatgtctgtagattaagttaaatagtatctgacatttgctttgaaataatcaaggagggaaggggcagaaaaaggattatccatgagatgataactggtagaagctggtgatgggctcatggggttcattatgtaattttgtcttctctggtataagtttgaaatgtttcatcttaaaaacatttttangctangtgccatagctcacacctgtaatncccaccnctgtggggaggctgacagggatggacagcttnagccccaggagttcaanaccaccctggccacncantgaaaccctgtcttaaaaaaaaaaaaaaaaaa

SEQ ID NO: 17659 - DNA, 414 bp, Homo sapiens
  misc_feature 6, 20, 160, 297, 331, 356, 358: n = A,T,C or G
tacttntagaattaattaangcggagaggtgacgttaaatctcttggagaatacagcaaaaaaagaaagatatgaaaaaactactagagcaaaatatttgaaaattagaggacagatttaaaagtctaggaggtacaacattcaaataattgagttccanaaaaagagaacagtgaaaatgaaggagagaaataattatcatacaatttggtaaaattttctggaatttagacacttgagtttccaggttgaaagaacctagagatgtcaagtataatggatgaaaatggacacacnataagtcacagtgaaaattcagatcatgaacaanaaacaaaacactgtattaagctttnanagagagggtagaaaattcacttacaaagcataacaaattgaaataggcttagattt

SEQ ID NO: 17660 - DNA, 277 bp, Homo sapiens
  misc_feature 20, 22, 23: n = A,T,C or G
ggtaccgggccccccctcgngnntacttctagaaattaattaaggcggggagtcttcattctctaaccctgtagtcagtgagcattaagtatctttttgttattaggactaataaaataataatgttatatttatttgtatattgcttataattttcaaaggctttcatgtaggttatcccatttgatcttggcaataatactgtgggattaatattattaacatcttcatgatacagatgaagatgccaaggctcaaagtcaataatttcattgcc

SEQ ID NO: 17661 - DNA, 346 bp, Homo sapiens
agtacttctagaattaattaaggcggggggcgggggatgatttttgagtcccagtttcaccacttgttgtctgtctgaagttgaggcagttacttaactctctgggactcagtttcctcatccataaaataagagtcatcatgagacctacttccaaggtgtgttgtgagaattaaataatttaaagcagaatcatttgatttagattcatttgtaaaaagtctggcccataaatatatacaaacattattactgtttttttttcctttgagactgtgtctcactctgtggctcaggctggaatgcagtgcgagactctgtctcaaaaaaaaaaaaaaaaaaaaaa

SEQ ID NO: 17662 - DNA, 633 bp, Homo sapiens
  misc_feature 36, 60, 111, 121, 150, 220, 422, 475, 501, 505, 514, 517,541, 549, 558, 563, 594, 596, 612: n = A,T,C or G
aagcactgttttcggtaaaagcagtgaactcaatangaaatgaatgaagcacgcctgcancttttctagtctaaggttgcagtcctggttgggatgaatggcaggcttacngaacaaccanaaatgtaatagggagatcctggaagtganagagccataaaggggttgtatacattctccatgcatctctgactaactagggactctctgtacacccaanaagactgtcaggaaaataaaatctgggcagatatggaaactatataaactttggatgtcatcttcaaatcacacacagatccaatgggtagaaggtaggttttatgggcttaaggtgtttgaacacaatcttttgaccagtcattggctgaccattaagttatgcagatgatgctagaaagccaaactaaaaagtaaaaatntaagaatttttaaaaatttttaacagagacattagtggtgacacatggcagangacaaaggttgaagccagaccagttngaanaaatattanagngataatccaggtgagacatgatancgaatttntcatgcccnaggtnagacctaataattggggtttattgggggatntntcagtggaggaaaaanaaaacttttaacttgggaaaa

SEQ ID NO: 17663 - DNA, 331 bp, Homo sapiens
  misc_feature 304, 310, 315, 323, 326: n = A,T,C or G
agtacttctagaattaattaaggcgggagataatctttgataaatggtgtctggaatttttcttaggcagaagaaaatcatttagattcttacctaaatgattagagaaaaataggtcccaactggaaatagtaaaataaaaaatcaagccactggtaaattagaaaaaaaaattgatattaccaaatatatggaaagaaaaggaatttcaaagtctaaaagaaagggaaccggtcattaaggaaaagatgaactgacttgattaaataaaaataattctttacgtaaaataattaaaagtganaaaaanaaaanatagaatnaanaaaaa

SEQ ID NO: 17664 - DNA, 314 bp, Homo sapiens
  misc_feature 24, 26, 27, 28, 29, 33, 35, 37, 39, 49, 51, 54, 56, 57, 58,65, 68, 69, 71, 82, 158: n = A,T,C or G
ccgtcgttttacatccggaaacangnnnnaccntnantnctggccgggncnttncnnnagagaanaannanaattaattaangcgggatttctcagttatgtgactgcattggtactgcagttcagggaaacttaattcttactggtttgttttgttntgttttgtttttagtttaataagagataatgtctgaaaggacatgagcaaaagtaaagaaacaaaaatctagtcctgctgcttgacaaaatagtatgagaaaaaagcagacaagcaccaaaccaaacaataatagcaaaaaaaaaaaaaaaaaaaa

SEQ ID NO: 17665 - DNA, 172 bp, Homo sapiens
  misc_feature 11, 22, 35, 162: n = A,T,C or G
ggtggccgggnccccccctcgngggtacttctagnaattaattaaggcggggaaaaatgcaaaaaagaaaaccatacctaggcatatcttaaactatataaacaaagactgagagaacatttaaaagccaaaaaaaaaaaaaaaaaaaaaaaaaaggggggnccccccccgg

SEQ ID NO: 17666 - DNA, 428 bp, Homo sapiens
agtacttctagaattaattaaggcgggcagattacttgaggtcagtaaagtttgacaccagcctggccaacatagtgaaaccccatctctactaaaaatacaaaatttagccgagcatggtggcatgcatctgtaatctcagctactcaggaggctgagacatgagtatcacttgaacccaggaggcagagggtgcagtgagccaagatcatgccactgaactccagcttgggtgacagagtgagactccatctcaaaagaaaaaaaaagaagaaaagaaaacagaaaacacaggaaaatatctttgcaacttggggataggcaaaagtttagtagggcagcaaagcagtaacaatagaagaaaaaaatagatattcatcaaatttttaaaattctgctgactgaagacactattgcgtaaaaaaaaa

SEQ ID NO: 17667 - DNA, 354 bp, Homo sapiens
agtacttctagaattaattaagcatagtaggataacaggaaagcctttaacctggttaaaaaaaaacaaaaaaacttatccacaaccctccatcattcagcatcatcagtcctgatgcctgaaaggactttaaaaatctttaatgatgcatctaaaaataaggcctaaaacacaaatacccaagaaatagaacaaaggactttcaattaggaaccgtgggattttctcttaattacaagtgggttggaattggctttacaggataaaagatgaaatgataacagaattgaaaagtctatggtagcagcgagcaaactacagcccgcaggccaaatctggcccatctcctatttt

SEQ ID NO: 17668 - DNA, 445 bp, Homo sapiens
agtacttctagaattaattaaggcgggcattctacaaaacttggagttgtataatttatagtcgggattttgatttgacctagcaaaagagaagatcaaaatcgtaacaaaaatcatgagtcctctcattaaataaaataagaatcagcaatgtcatagaatgctattaaaagattatatgactagcattaaacttggctgtttttactgtgataaatttagtgtgtaactaaaaaccacaatttgagactgtagatttgataaataacagaagcctagcataacaatgaaattaagaaataattgttaatttattacatataggtaatttaaatgaactagttaaacatggtctgcgtgccttaagagagacgcttcctgcagaacaggacctgactacaaagaatgtttccattggaattgttggtaaagacttggagtttac

SEQ ID NO: 17669 - DNA, 813 bp, Homo sapiens
  misc_feature 4, 112, 193, 214, 215, 217, 220, 221, 230, 233, 237, 241,242, 247, 251, 256, 260, 261, 270, 271, 273, 274, 277, 279,280, 286, 290, 295, 300, 316, 321, 332, 334, 336, 339, 369,373, 389, 392, 393, 410, 411, 412, 413, 419, 429, 430: n = A,T,C or G
  misc_feature 446, 452, 467, 473, 477, 479, 482, 488, 492, 499, 500, 520,521, 524, 526, 527, 531, 542, 543, 544, 546, 568, 580, 605,606, 607, 611, 612, 613, 625, 643, 648, 649, 650, 657, 664,665, 681, 684, 686, 698, 700, 701, 702, 717, 718, 719: n = A,T,C or G
  misc_feature 720, 740, 742, 751, 754, 756, 763, 765, 779, 784, 787, 796,798, 799: n = A,T,C or G
cggnccccccctcgagagtacttctagaattaattaaggcgggtgagggataaaaaactacatattaagtacagtgtgcactgctcaggtgacaagtgcactgaaatctcanaaaacacactaaagaacttatccatgtcatggaaaaaccacctgtatttccaaaaccattgacacttaaaaaaaaaaaaanccttttgaccgttttttaaanngntgnnaaaaaccanganccancccnncccanattngaaanaacnnaagtttttnngnntcnannccgaantttnggggnatttngaaattaaattccaangggcnattaaaattgncnangtnttttttgggaaaaaaaaaaaaaaaaacctngacnaccttttttttggttnttnngaaaaaaaaaaaaaaannnnccccgngggggggggnntttccccccttttttntccccnggagtttttttaggngctttngcgncncgncccgtntttnttccccnngggggggggggggggttttnnaanannaccncccgggccccnnncngggggaaaaacccccccctttntttttttttttnaatacccccccttttttttccccgnnngggnnngggggggggggnggcccccctttttttttnccccnnncctttanggggggnngggggggggggggagnaantnttttttttttancnnnggggggggggggggnnnnccgtaaaacctttaaaatananccccctttngtntntcccccngnggggggaaaaaaanaaagnggntcctcttcncnnaatttttttttttt

SEQ ID NO: 17670 - DNA, 515 bp, Homo sapiens
  misc_feature 28, 41, 42, 47, 50, 52, 56, 61, 62, 64, 100, 101, 126, 128,151, 154, 159, 165, 166, 177, 198, 209, 221, 226, 232, 254,255, 256, 257, 258, 263, 273, 277, 282, 297, 323, 416, 466,468, 504: n = A,T,C or G
agtacttctagaattaattaaggcgggnatgggtgcatagnngtatnagntnatgnacatnntnccttacattacccgcaacactagctaggctcaaacnnacatcgtccttccctggctggcctngnttagatgatgaaacatggggctnacnccttntcaganncccatgctgcnaacagtcacatgctgtacacntcaccgagtcnatatcgagctantatantctacntgattcatttgcctatgtcctnnnnngcaantaaccctaangatnacatngctttcctattctanagtccatatcaacaatagggtttacnacctcgatgttggatcaggacatcccgatggtgcagcccgctattaaaggttcgtttgttcaacgattaaagtcctacgtgatctgagttcanaccggagtaatccaggtcggttttctatctacttcaaattcctccctgtncnaaagggacaaggagaaataaggcctacttcacaaangcgccttcccc

SEQ ID NO: 17671 - DNA, 426 bp, Homo sapiens
  misc_feature 229: n = A,T,C or G
agtacttctagaattaattaaggcggggagggcctgttgagagcagattcattttggaaatactgttgctgtgctcttcaaagtgaaggaaaaggcgctgtgcctcatttttaaaagacctacataaaagacaaggagacttgacacttgttacttttatgacactttgtcccagggtattgcaggtagaaagtaatgtgggacagcttcacagggtgtctgccagaanataatgtgttggaactgtgggctggcctaagtaagacattttgtgaattgaaaaaaggtatagtgatcatttctagcaaattcatttaatcatttatataaatgaggcattattttcttcatgcttccatccaatcctggaggtgaattttttccgtcagatcattctataattcaccaattcaaattttcgcttgg

SEQ ID NO: 17672 - DNA, 237 bp, Homo sapiens
agtacttctagaattaattaaggcggggtaagatttgccgagttccttttactttttttaacctttccttatgagcatgcctttcttcaagttaaatatgtcaaaattatgtcccctattgttcatatgtattacacacacacacacacagaggaatgtccatccctccagagtaaacaggtatcactattccaaaaagcaatggaatagtctttatctgctactgagatcattttt

SEQ ID NO: 17673 - DNA, 392 bp, Homo sapiens
  misc_feature 8, 22, 60, 61, 65, 71, 94, 115, 117, 119, 121, 152, 174,175, 321: n = A,T,C or G
agtacttntagaattaattaancgggggccacttgagaagtgaataaatggggcggtttnngaancgtcantgttaccatgttatggatctctntgcgtttgaataaagactatntntncnggaaactgcgcaggaaaaaaaggaaaaaaanatgagcaaaggcatggcttcanntctcatttgtgtgtaaaattaacaccacatggaaatgattgctgatgatgatgttcattctatcactttgtgacttagtgttctctttataaaatcctttacaacatcattgctggcattgctgttcgtctttcatatttccttancccaaataagaactgataacagtatattgcaagtcctaccacatttttaaggatacatagccatcacattt

SEQ ID NO: 17674 - DNA, 406 bp, Homo sapiens
agtacttctagaattaattaaggcggggatggggtagggagaggagacaggcagggtggcttcccccagctcaggagtgaccacagcctgtgaagatgctgctcctgctccagcatcaaccctcctccaaatgcttggatgcctgtccagggtctcaactgacctccctgcagtcagaggttgctccaaaaagggaccatctccaagcctctcttgaactcccttctctactcagcaaggccttgggcatcaagctaagatcactgccaactactgatgccttgcccctgagtacaaatgcaggagcccacctaggggtcaaggagctatcgtcaaacaggattcctgggttcaaatcccaatctccacctcctactggctgtgtgaccttggtcaagttacttaa

SEQ ID NO: 17675 - DNA, 375 bp, Homo sapiens
agtacttctagaattaattaaggcggggttgaatgcctgctatgtgccatgtactcttctaggtgttagtgacattgtgctgaacaggacatggagcttatacatgttctcctgagtgtatgctcaagtcacctcattgatttggctgctctatttaatctttatagggagttctctgtttttcttcctaatattccaagataacttttttcttgaatttatgaagtcctgtttatatataaccctaccttatgatcatagcatttaaataattttctcctcccccaagtaagtaagtgtttctgggttgctactttttaatggctgcatagttcaagcaagtgtaccgtaattttacttagcaagtatttgtta

SEQ ID NO: 17676 - DNA, 415 bp, Homo sapiens
  misc_feature 37, 41, 42, 45, 47, 57, 67, 111, 112, 119, 122, 128, 131,132, 133, 135, 138, 152, 164, 170, 172, 173, 175, 177, 210,211, 215, 219, 258, 264, 291, 292, 298, 299, 309, 312, 314,315: n = A,T,C or G
agtacttctagaattaattaaggcggggatggctaangggnncananaaccaggacnaatgaataanatctggtatctgatggcacaacagggtaactatagtcaataatnnttaaatngtncatttnaannncnctnacagagtataatangattgtaatatnataaangnntnanttgatagataccctcatttaccttgatgtaatnnttgngcancatatgcctgtatcaaatattccataaactccataaatntatgcncctactatgtccccacgaaaattaaannttttanntaaatccaanaantnntcaagttttctcctgtatgtataaaatttccaggctggtctcaaaaattttaaaaagagtcttcttttaaaaaattatttcagtgttttgaacttaaatt

SEQ ID NO: 17677 - DNA, 434 bp, Homo sapiens
  misc_feature 23, 24, 26, 27, 30, 34, 35, 37, 39, 40, 56, 59, 69, 72, 77,79, 83, 84, 92, 96, 100, 108, 109, 114, 117, 118, 123, 124,132, 136, 138, 140, 142, 145, 146, 151, 153, 154, 159, 160,164, 166, 168, 170, 172, 173, 174, 176, 178, 179, 184: n = A,T,C or G
  misc_feature 185, 186, 190, 198, 203, 204, 214, 217, 224, 227, 229, 231,234, 235, 241, 245, 250, 253, 263, 280, 286, 333, 336, 349,352, 375, 398, 401: n = A,T,C or G
agtacttctagaattaattaagnngnnaancctnngngnngcccctcgagaacggntgnccgataaatncanacgtncntgtnngggccggntccnaccntgactatnngcatnacnnttccnnctgtatgngccngncncnganncttantnntgcanncccncntntntnnnancnngcggnnngctnatcacaangtctnnacatacacantcntgctgcntanancnacnnatcccnaccnttacnatngagtaatcancctcccgccttaattanggcggnggactgcaaaggccaatgttggtgctggcaaaaagtgagctggacancgnatcacagcccaangantaaaagtgctgcaatgatgttanctgtggccactgtggatttttcncangaacattaataaactaaaaacttcatgccaaaa

SEQ ID NO: 17678 - DNA, 364 bp, Homo sapiens
  misc_feature 28, 29, 30, 31, 36, 39, 44, 49, 50, 51, 53, 54, 55, 56, 64,67, 68, 69, 75, 77, 78, 84, 96, 97, 100, 101, 102, 103,108, 109, 114, 115, 117, 122, 125, 131, 134, 137, 142, 144,145, 146, 147, 150, 152, 222, 229, 231, 255, 257, 261: n = A,T,C or G
  misc_feature 275, 278, 295, 298, 336: n = A,T,C or G
agtacttctagaattaattaaggggggnnnnagctntgnctccncttgnnnannnntagggctnatnnntaatcntnnccctgnagccaatgtgcnnctnnnntaacnntgctnncntgccntgnaccctntgnaantaaancnnnntgntnctccaaaaaacaaaggaaaaaaaaaagctttaggaaattatgcactcaacaatcaaaaaaaggggatgtnagggatntnttcaaaatttttaaaaatacctgnanttcncaaattccttattntgngggataaaaaattattnttnatttttccaatttctacccctgtttttattgacataanctaatttagttttttcttttttcagaaa

SEQ ID NO: 17679 - DNA, 474 bp, Homo sapiens
  misc_feature 31, 32, 63, 66, 94, 97, 108, 137, 147, 148, 168, 189, 194,196, 197, 202, 204, 206, 214, 215, 216, 219, 221, 223, 225,226, 227, 232, 234, 239, 278, 283, 294, 295, 297, 302, 309,399, 410, 454, 463: n = A,T,C or G
agtacttctagaattaattaaggcgggagtnntgtaccacttttagaagataccagatgcctntgncctcattttgtttcctatgatcatcctntanataccagatanaggcccattcctgcatttgagatagggtnggaatatagnnctctagatgatgaatgtgtntgctttgtgtttggtattaancatgncnnatttncngnacaacatnnntanananannntaggncnccccnccccgggggggcccccaaggaacccgacccagggctggnatgancccccccctgnngnctaantatccantgagccctgaataaccagcagcagtacccaggtagcatatcatgggccttgggtgaccctctacgatgtgctggtttaggtgtgacctancacgttcctanctgtggtggctatagtgagagattctttctgcttgagaaagcanagggagaantaatggggact

SEQ ID NO: 17680 - DNA, 295 bp, Homo sapiens
  misc_feature 272, 276, 279, 280, 282, 283, 284, 286, 287, 288, 289, 290,292, 293: n = A,T,C or G
agtacttctagaattaattaaggcgggggtggagcgctgatcatttcaaggatcttcaggaactgaaatgatcagaacttgggaatgactgcatgtgcgaataagggggaaaagtcaaggaaatgcccaggtttggggcccaaggaacaggtttgggaggccgaggtgaggagttcagctttggacataatgagtttgagatgcccacaggacatccaaatacaaatgttaaaggggtaactgaatatatgtgactggagtttgcgtaaaanaaanaanntnnnannnnnannaa

SEQ ID NO: 17681 - DNA, 641 bp, Homo sapiens
  misc_feature 420, 484, 510, 551, 552, 581, 582, 588, 589, 597, 605, 609,626: n = A,T,C or G
agtacttctagaattaattaaggcgggtatgttcaccacattgatgtggtgatgatttatgtgtgtatgtatttgtcagacttataaaattgtactatgtcaattacatctcagtgaagctgtttttaaaaaacaaatatttgtgggctcggcatggtggctcacgcctgtaatcccagcactttgggaggctaaggtgggcagattgcttgagctcagtatgtcaagaacagcctgggcaacatggtgaaatccatttctacaaaaaaatacaaaaattagccaggtgtggtggtgggcacctgtagtcccagctattcaggaggccgagacaagacgattgcttgagcctggaaggtggaggctgcagtgaaccaagatcacaccactgtactccacctgggtgacacagtgagactntgcctccaaaaataaaataaaaaacaagtattttgtgatttggaataagtaaagatttctcaancttgggacataaaaaggagacaaacnaatattttgtgatttaggaaataaattaaattttttctcanncttgaacaatgaaaagaaaaaaaattggnnggtcannatgtttanccaaaaantttnaaaactttctttgcttnttaacaaaaaaaaaa

SEQ ID NO: 17682 - DNA, 430 bp, Homo sapiens
  misc_feature 266, 344: n = A,T,C or G
agtacttctagaattaattaaggcggggggtgtatgggaaattgtccccgcagaaagtaaaggctggccaggccgcccccagcacgtagagggaatgagtcaggctccggctccacactggcacgtagtgggcggatcgcgccggcgctgagtaggaaggagcttcagccgccagcccggaacgcatcataggttagcttttcaagacacttcctgcatctctgacctgttgcacctctgttatcttggcacctctgttatcttancagcaagcacctgcctcaactgacccttgagccattacccataactcctgaaaagtcatcaagtctaaagtgaaccanctaactcattaagactggaatcatgagcaacaatggagcagacctaacctttggttacatctcctgttttgtagctatccttttgt

SEQ ID NO: 17683 - DNA, 478 bp, Homo sapiens
agtacttctagaattaattaaggcggggagtcaaaatccagcaactaaatgttttggcctggaaacatcacatgacacttggctattggccagactaatcacataaccccacctgaatgcagggaggcaaggaacttcagtctttcgtacgtgcaggaatcagaaaagatccagatactggtgaatactcgtgggtttcaataaaaataccattgaattattgggaagaaactagacaagctataaaactttatatgatcacgcctgtaatcctggcactttgggaggccaaggcgggatagagaccagttttctctggaagtttgtttaaatgacagaagcgtatatgaattcaagaaaatttaagctgcaaaaatgtatttgctataaaatgagaagtctcactgatagaggttctttattgctcattttttaaaaaatggactcttgaaatctgttaaaataaaattgtacattt

SEQ ID NO: 17684 - DNA, 485 bp, Homo sapiens
agtacttctagaattaattaaggcgggtaaccccaaacacttaacagttgtatctctgattcctgtttttggtaaaattatcacagatttttaaccctgcatacagccacacacaaaatctttagtgaatattgccattattataaaatatctatttactaagcctaaggtggaaataaaagtaactttttttttcagattattactagggagatagtactattttggtgaaaagcgttgtttgtgtccctgtccaagattttcatcttagttctaatacttatttgtggagtgacttggcatattgctagttttctcggtctcaatttcatcatctataacgtgggtataataatacccacctcgaacactttttgttagaaccgaatgaggtaatgcacgtaaaagcttaacatagtcccaagtatatagtgagcattcagtacatggtaccttatcaagtttaatagcattatgtcattggt

SEQ ID NO: 17685 - DNA, 331 bp, Homo sapiens
  misc_feature 208, 232, 262, 290: n = A,T,C or G
agtacttctagaattaattaaggcggggcagctcgatcaagcaacatttctaccacctgctcgtggccactccttgctccacagtgcagtggtgtcagaccatcctgttgaacaaaggaaacatcaccaattaaatttgacaataaattctatgagtgcagtgtacttcttcaagatccagcatggcacccaacatgctgtggtcaancgggcttcaaacatttgctcattnatttcataaaataattccttattttaggtngaaaactacattttttcataagtttaantagctgcaaagtatgtaatttcccacaagtttgaatattga

SEQ ID NO: 17686 - DNA, 320 bp, Homo sapiens
  misc_feature 35, 36, 44, 78, 107, 124, 216, 218: n = A,T,C or G
agtacttctagaattaattaaggcgggggttgcanngagcctanattgtgccattgcattccagcctgggtgacagancgagactccatctcaaacagcaacaacancaaaaaaaccctctgtntctctttctaatgtatatttcctgtcataagtgcaatcaatattcagtttctccatgaaatgttaacatcatcactctatttcttaaagaanantgaggtgatagagcattttattgccaaatggctcagaaaaaaagttccttgtattgtatttgtaatttctctgtaagtatgagattgtttcaattttttttt

SEQ ID NO: 17687 - DNA, 424 bp, Homo sapiens
agtacttctagaattaattaaggcggggggccaaccgctgcgtcgtccctgggcccgaataactgtcgcccgcttccctcagcgtgaggtaggagaagggcgctggggcctagtgcctcagggcccctggcagccgtgcccctgcggcgtcctgtgtggcgcatcccgccgaggacctcttcgcccgtctcctgcccgcccctgtcggccccggggcggtctgaggcggggccccagatggactcggcctgcccctgcttttcttcctcaggctcccgagttgtctactcagaaacgcgggcgttgtttctacatcggtgtccccagctcacaggcttttcttgctcctctgaactgggacgggcgtcgctggccgcttggcgatgtcccaagtcccagtcacgcctgacggggaaacttaaaa

SEQ ID NO: 17688 - DNA, 450 bp, Homo sapiens
agtacttctagaattaattaaggcgcgtaggcctaggattgtgggggcaatgaatgaagcgaacagattttcgttcattttggttctcagggtttgttataattttttatttttataggctttgctaggcagagaagtggaagagtacaagaaattaacaccacctgtaaggttcgaagtgttatctcccttggctagcagagtgttcctttataaagaagctactctttgattaatagacttattgaatcaggtgaactaacatagttttagtaattaaagaattgcaaaatgttccaagaaaaaaaaacagacatttgtaattataacaactctagtagcattgcaggagtatttatcagttcttgtagtcagtatgttgacctcagaacccctgaatgttacccaaataactaaatacatggcttattttaggaaacttactgtact

SEQ ID NO: 17689 - DNA, 722 bp, Homo sapiens
  misc_feature 454, 494, 567, 573, 576, 593, 631, 636, 658, 663, 667: n = A,T,C or G
agtacttctagaattaattaaggcgggaggatcgcttgagcccaggagttcgaggctgtggtgagctatgatttcgccactgtactccaggctgggtgacagagccagactctgcctctacaacaaacaaacaaacaaaaatttgattcctgtatatggcactttctatgtagctgtgcagctggtggaggagaattcctggaattcctaataactccactgaagatggtctggagtcttccctcagagctcagcgcagagaaggtttgctcagcagagcaggtatgcaaggcagaaggcctggctttgcaggccgaccaattcgcttctgtgactttcatgttgtttgatttggtttcttcatctaagcattgcagtgtttaagagcaaggacaggggatagagctagggttgggtcctgccttaacaactagccacatttcattaaatctangacatcatggtttgcaagatgaaccattattttatgtatnccccaaaaaaaaaaatactggccaactatgacaatgatctcttatcacttggaattttattttacctttattnaaaaanctnttttggccaaactcggngctcatgcctgtaatcccatcctgtgggaagcccaggnggtanatcacttgagtcagaattcaanaccancctnggccacatgatgaaacccgtctgttctaaaatccaaaatttaaaaaaaaaaaaaa

SEQ ID NO: 17690 - DNA, 446 bp, Homo sapiens
  misc_feature 33, 43, 44, 48, 51, 52, 54, 55, 59, 60, 81, 83, 90, 91, 102,113, 128, 141, 369, 409, 431: n = A,T,C or G
agtacttctagaattaattaagggggaggggcnacatattggnnattnatnngnnagtnncctgtatcccaaagggattgncngggtggnnatccgtaactnatttggtggtnaactctgacatggtnaagctcagaggtnaagctatttataatcattacttatctcacttaatatgttcatatgttttgctgccaaaatattaatgcccaaaatactactagagtgttaacatataatacatatattttattacttttacataatctgaaaaacttggaattctaatatatatatggccccaaaagcttcagaaaagacactgtgaagtgtattagggatctcacataaatcttttttttttgtatnatataaattcattaccctcactgggaaaatgaaatcgtantactttatgcttgaatcgttanctatttgtaatgctt

SEQ ID NO: 17691 - DNA, 452 bp, Homo sapiens
  misc_feature 28, 35, 45, 50, 56, 60, 61, 62, 65, 68, 72, 74, 97, 116: n = A,T,C or G
agtacttctagaattaattaaggcgggnggatagntagagcccangagtnctatanctgnnnggnctntatnangagaccccgttctccagattctngttactactaaagaaatanataagcaataatgtacaatttttattgaatattttgacatcacattcagtaaggatatctccaaatgatcagtaaaacagtgagctaaaactagagttttgagtggtgagcgtgtgtgaaatgcagagaccaaaccttagttcaagggcaaggtgagcaaattgaatctgaagctcccgcgttaaaatactgcacttggatgtggacaaaatgatacacatacatacacagctccctgcataagcaaatatatatcctctagaggaaacatactgcatttaggcacccagctattttcaccggtggctatcatgcaaatagaagtttaggagcaaa

SEQ ID NO: 17692 - DNA, 512 bp, Homo sapiens
  misc_feature 24, 27, 29, 32, 33, 42, 44, 46, 51, 54, 59, 63, 65, 67, 68,73, 79, 81, 85, 86, 87, 88, 90, 94, 95, 96, 104, 108, 113,114, 130, 132, 139, 144, 152, 156, 163, 170, 171, 172, 175,179, 181, 182, 183, 184, 185, 191, 193, 194, 197, 198: n = A,T,C or G
  misc_feature 199, 200, 202, 209, 210, 212, 213, 220, 221, 222, 224, 225,228, 229, 230, 231, 234, 239, 243, 246, 248, 250, 261, 265,276, 277, 280, 283, 288, 289, 290, 291, 298, 304, 306, 309,316, 318, 324, 327, 340, 343, 344, 348, 391, 418, 423: n = A,T,C or G
  misc_feature 432, 459, 467: n = A,T,C or G
agtacttctagaattaattaaggnggnanggnnacgtcgggncntncgccntgntgganaggnantnncggtnatggtncntgannnngntatnnnaacccacntgantgagnnacgattcatactagcnanctggtanctgcntgcatgcnctantgttgantatatgnnntantttntnnnnnagatantnntgnnnncnttataanntnntactatnnntnnccnnnnggncaatnactntantntnacctggtcccncttnattacgagttnnccnatngccannnngtagctnatatcnanaantactacntnatctgnatngcgcatactgtantanntctnacgtgctaaatatcattcacctagcagtgatacaccttgaccntttgaacaagtaaaactaccacctggnattgngcataccantttccacggggttgggctgccggtcanagcttaanaggactagcaccctgcaatgcccctcttcactctaaaatgtacac

SEQ ID NO: 17693 - DNA, 446 bp, Homo sapiens
  misc_feature 41, 42, 45, 46, 50, 51, 52, 56, 71, 80, 135, 140, 142, 145,148, 151, 156, 157, 164, 165, 175, 177, 187, 199, 202, 203,208, 216, 219, 227, 234, 236, 237, 243, 247, 248, 252, 255,257, 258, 259, 263, 272, 276, 277, 278, 285, 286, 291: n = A,T,C or G
  misc_feature 295, 296, 298, 299, 300, 301, 302, 311, 315, 321, 322, 323,326, 328, 329, 343, 346, 350, 355, 357, 363, 364, 367, 369,372, 376, 383, 417, 422: n = A,T,C or G
agtacttctagaattaattaaggcgggcacgctggtggaanngcnngccnnngcangggaggacatacggnccgtatganaaagtgccgatggcctgatggcatcgggtgcagagggtgggaaaaacccaggatnttgantnatnganacncggcnncctttcnnccctggagancnccattctcangagcgcccctcnggnnacggntggaggtnaanctggcctncctaagngnngcaccntttnngganttncnnnaaantgggctctngagnnnatgccanntaatncccnntnnnnnctttaaatntctnccctannngcnanncggtctacttatanaangggnaaatntntaatcnnggntnttnatanctaatantaaacacggcaattggccaatctatcaccctatngaaanaactaatgttagtataagtaacat

SEQ ID NO: 17694 - DNA, 429 bp, Homo sapiens
agtacttctagaattaattaaggcggggtggctgggatttgctggaagaggcataggtccagaaaagaatgtaaaaaaggtactagaaagaaagaataaggcctatagccatcaggctgctagaacctttggacaagtcactatctaaaagcaggtaaagacccagctttttgtccatctggtcaggcacctggtggcgtgagtctttcagaacatactggtcaggcggtggctcacgcctgtaatctcagcactttgggaggctgaggcaggaggatcacttgaggtaaggagttggagaccagcctggccaacatggtgaaaccctgtctctactaaaaatacaaaaattagccaggtgtggtggcgggcatatgtagtcccagctacttgggaggctgaggcaggagaatcgcttgaacccaggag

SEQ ID NO: 17695 - DNA, 444 bp, Homo sapiens
  misc_feature 33, 272, 410: n = A,T,C or G
agtacttctagaattaattaaaaaaaggaagcngaaaaggaatttgtggctataggtccaaattaaatagctataaatggaccacagaattattttaggccctttgggaaactctcaagaagttcagtgatctacttcatctggtcatacatccaaggctgactcaccgagagaatctctttgctagccccccggaggagaatggtgcaggccttggggtctttgcagtcagtgatgaaagtaaagtattcatctccaattttcttgatttncaacaggcctgctcctgttccaacatcatcttctctcagttcctctggtcggctgactatccgggccccacaggctctaatggacggaagaggtggggagaatcagatgatttcagatacttgtacccatttccctantctctagggtctgtagctagggataagggcaaaa

SEQ ID NO: 17696 - DNA, 337 bp, Homo sapiens
agtacttctagaattaattaaggcgggggaatcacttgaacccaggaggcggagggtgcagtaagctatcatgccactgcactctagcctgggcaacagagagagactccgtctcaaaaaaaaatttcagagttttggcctcttgagtctgatgatgtaaacgagatcacttcttagcttcatttgattgtcctagacccctaacagttgccttctcttcctttttttcttctgcagtggataggtcatttacatcttttcttgttatttggctaggttctgaagccagacacaagatgaaaaagctaactccaaaacagaaattttctgaagattt

SEQ ID NO: 17697 - DNA, 723 bp, Homo sapiens
  misc_feature 28, 29, 34, 35, 37, 41, 42, 56, 57, 65, 71, 80, 93, 95, 103,106, 108, 115, 116, 120, 121, 123, 131, 134, 144, 145, 146,150, 151, 153, 159, 168, 169, 173, 180, 184, 189, 190, 191,192, 200, 202, 203, 217, 218, 223, 232, 234, 252: n = A,T,C or G
  misc_feature 258, 263, 278, 279, 370, 420, 462, 467, 489, 491, 530, 541,552, 578, 582, 590, 596, 603, 606, 607, 615, 627, 638, 639,640, 645, 650, 652, 662, 663, 670, 672, 682, 685, 696, 698,700, 714, 717: n = A,T,C or G
agtacttctagaattaattaaggcgggnnctggnncngtgnnaaatatggaatatnntatatgtnataccntgtcatatntacttgcaatatnanaccttgcnttnantatacanngcanntnactctttncanacctgcattnnncagnnancaatanaaagattgnntganaaacatntatnacaannnnaaaaaagncnnccccccccgggggnnaaccncaataaccncntcaacccctgttttctgncccccntcaangggcttaggtatcannggggttgggaaatgaaaagtaggagaaaagtgagattttactaaagacctgttttactttacctcactaacaatggggggagaaaggagtncaaataggatctttgaccagcactgtttatggctgctatggtttcagaanaatgtttataccattatttctacccgagaattaaaacttcanattgntcaacatgagagaaaggctcancnaccgtgaaataacgcaaatggcttcctctttcctttttnggccatctcanctttatttggngtaattcattttgagggaaaaaaacnactnccctggtnttttanttcaagngcnnttaaaagnctccaaatgggnaaaaaaaaccnnngaaancattnanatgcctgggnnaaaagcnanaaggaaaacnccnatggagccttnantnccctcccaaccttnccntttttt

SEQ ID NO: 17698 - DNA, 481 bp, Homo sapiens
  misc_feature 30, 31, 39, 41, 42, 49, 58, 65, 71, 92, 94, 101, 102, 106,109, 110, 111, 114, 119, 122, 128, 132, 137, 138, 139, 142,149, 155, 162, 169, 171, 207, 212, 260, 276, 280, 281, 289,347, 350, 442: n = A,T,C or G
agtacttctagaattaattaaggcggggtnntcgctctngnngagtctnttcaaaccngcacggnctgatncggaaatatggcctcaatatntnccgccanngttnccnnnacntctcnaangatatnggtnacatnnnttnggactanatgctnttccttncaaggantntcacggggcatctactcagtgaagaaccatgatccnctttntatataaagataaacgtacatggcataaaaagccacaatgggacctgntcccccctgtgggggncatnntactatcnctgtgtgggtatgtactctcccccccctatgggcgtttcattaaagagaagagaaacnttngacaaaatcaatattttagaaataccaaattagtatttttcaaaacttatgaatatcgatccccatgtttaaaaaactcagaacctcaagcnagagaaacacaagcaaaaccacaagcaggcaaatcctag

SEQ ID NO: 17699 - DNA, 398 bp, Homo sapiens
agtacttctagaattaattaaggcggggacaagagccacttcaagtggtctccgccttatctggagtgcgagaacgggagttacaagcccgggtggctggttactctttcctctgccatctacgggttgcagcctaacctggtcccggaattcaggggtgtcatgaaagttgacataaatcttcagaaagtggacattgaccaatgctcaagtgatggctggttttcaggaactcataaatgccacctcaacaattcagagataagaaacctgacaatgagaatccacagaagtgacactgcagcgggataattaaggaaccagagagaccgaggggttgaggaggaattatttaattatttaggtgcacagaccgagtccaatgaacatccaaagga

SEQ ID NO: 17700 - DNA, 669 bp, Homo sapiens
  misc_feature 52, 61, 158, 172, 218, 226, 432, 516, 532, 539, 542, 545,557, 568, 572, 583, 643, 651: n = A,T,C or G
agtacttctagaattaattaaggcgggggaatcgcctgaacctggaaggcanaggttgcantggaccgagatcgcaccactgcactccaacctgggtgaagctttatcttcttcaaagcctttcctaatcatgtcaatgcaatctgatcttctaaatntctgatgatatctntttttaataactattatttatttccatgaagtataaatatcatgancagccatnattttaagggtacacgcaaattttgcataagacaaatgtactgtttgactgtcagttctaagaatcaggtctgagttgcaatcatccatttgctcaacatagtttttagacactatgcaaggcaatagagataggaatgatactcatactttaaaaggagaagaaaggaggaatgcaaaaggaggaaaaaaggaagaaaaaggaanggaggaggagaaagaaaggaagaatgaagattagccctactggaaaggttaaagaaagaagaaagagggagaaaggaggggaanaaaggggaaggaggangaaacantantantgatagtggtantgttgctgatnaccnattattttgcnctgccaaatgtaaaaaattatcaagggttcttttttgaaaaaaattttcccaattctgcntgaaaaancaagtttttaaacttttt

SEQ ID NO: 17701 - DNA, 460 bp, Homo sapiens
  misc_feature 24, 27, 28, 38, 39, 41, 44, 45, 47, 50, 52, 54, 57, 59, 60,62, 65, 67, 68, 72, 73, 77, 80, 84, 85, 88, 90, 94, 95,96, 100, 103, 123, 125, 141, 142, 151, 153, 178, 187, 203,212, 215, 216, 225, 229, 232, 233, 242, 247, 248, 252, 256: n = A,T,C or G
  misc_feature 259, 271, 272, 275, 276, 288, 289, 295, 298, 324, 347, 381,400, 403, 410, 437, 442, 444, 446, 458: n = A,T,C or G
agtacttctagaattaattaaggnggnnagaaaaggtnntngtnnanggntntnttnanntnctnannctcnnaatnctnggcnnttncnttcnnntcantanatcttaatacctcagagtgnanggcctcttataaaacnntcaaatatntnttagagtatggacaactattatatntcctcaaanaaaaaaaaaaaaaaantaaaagtcnccnnccccccccngggnggnncccccatcnccctnnaagngacnccncccccccccccnnttnngacctttttatnnatgacncanggagaattgcgtcatttaaagcctanttaacgcatttactaaaccgcanaccgaaaatggaaagattaatttgggagtggtanggatgaaacaattttgganaanatagaantttgaagtgggaaaaactgggaagacngaaantncngggaaggcgaanaa

SEQ ID NO: 17702 - DNA, 502 bp, Homo sapiens
  misc_feature 50, 150, 203, 243, 247, 255, 263, 269, 270, 271, 272, 274,276, 277, 279, 282, 285, 290, 294, 295, 298, 302, 303, 304,306, 308, 313, 326, 327, 341, 355, 364, 377, 384, 385, 395,397, 399, 402, 408, 415, 416, 420, 425, 429, 437, 439: n = A,T,C or G
  misc_feature 440, 457, 463, 467, 470, 472, 494: n = A,T,C or G
agtacttctagaattaattaaggcggggttagaccattgccaagtcccanactggcaacagggtgggtggtgcatctgtgggacagatccaaaaagcactgcaaagactttgaaaacttaactgacattggagttctggctggggaacantgcaaggatgtcctctctggcaatttctattggtattgaagttctcgccagtnaaataaaccaaaggaaaaaaacattaaaaaaaaaaaaaangggncccccccngggggggncccccnnnngncnnanttnganattantttnnccncccnnntngnccccnttttaaaaagatnnatattactgcccangtggatgccgaaanaaaaagaanatgtgaaatcttntgctgannggggtgtctntntnaanggccangattgtnnaatnttganaaanagatgganannatgaaaaacttaattcnttttgntcanatnancattgaaggactttgaatgaancttttcca

SEQ ID NO: 17703 - DNA, 540 bp, Homo sapiens
agtacttctagaattaattaaggcgggggctgtggcggggcagtctggatcggccggattgaggcaggggcggtccatgtaaccatgaccaacctcagccttattcagcatttcctcccagctgtccacttgatagtttattttctttaactcttccaggaattccaaagggtcgaagtttgtccaccgcaaaggaggtttacctctgcaaaagaaattaggagacgagaccatgaaaagagccttctaaacgcatcgtaaagtaacacggctgcgcccactgcatccaccttgtaggaggttcctggcaatgctgcaattctgggactctggcatcaaaacaaatgctcctttccagcatatctgcataaaaacttaggtcaggaaaataattcatgactgaagatgctaagcagagagaggactcataagttaatgagggcactgaataatctttaattgctgatattgtatatttaatatctacatacaaaattagccaaaaagacagatccaaaattcaatttttttttttttaaa

SEQ ID NO: 17704 - DNA, 319 bp, Homo sapiens
agtacttctagaattaattaaggcaggggaatcatttaggtaggagactgtgccaagcagtattgggaatgaagagaaatcggaagaagtattgacaaggacaaatcaaatatctgactggatatggaattgaaagaggaaatcaatgataacaaggttcgaggatcagttatgctgcaggtctaccttgtcttcagtattttattgaagtcattcctataacatctgtgctagtgcttgcttcagtagcacatatactaaaattggaatgatacagagaagatcagcaaataaaaatttaagtacaaatttaaaaaaa

SEQ ID NO: 17705 - DNA, 452 bp, Homo sapiens
  misc_feature 42, 43, 44, 50, 55, 56, 62, 66, 67, 68, 69, 79, 97, 114,116, 122, 145, 152, 154, 159, 187, 189, 191, 194, 207, 249,253, 408, 440: n = A,T,C or G
ccccccctcgagagtacttctagaattaattaaggcggggtnnnatttgncgagnncctttnactnnnnttaacctttncttatgagtatgcctgantgggtgctggttgctgngncttgantgtaaataaactcctatcatgcnttttaananaaganaaaaaaaaaaaaaaaatataaattatangnanatnaccaagaggcatnccgacctggagccattgtgtctccatggaggctgaagagtgngacncctcactgcggctgcctggaatccagctggaggaagcaggagagtaccgatgtgaggtggtggtcacccctctgaaggcacagggaacagtccagcttgaagttgtggcttccccagccagcagattgttgctggatcaagtgggcatgaaaganaattgcgtgaacccgggaagcagaagttgcanaaagccaagatt

SEQ ID NO: 17706 - DNA, 467 bp, Homo sapiens
agtacttctagaattaattaaggcggggtagataatacatatcaatgtgacaacttcatgctctcgttttattaatataatgctaaaattatagctaacatttattttctttctcagtacgttatatagatatatttattctttattttcacaaagtagatatattctttctcattttaaggaagatgacttggagatatgacaaccggcacaagaacagagacagtaagtgattgacctaggatttgaaccaagaactgaaacaagagccacagcttttaactattacacaagagctatagaagcaaaaacaaaagagacattaacctgcgcttagtgtggctccaggttttacaggtggcaacaaaatatgatgattcaacacgcttaggagtggcatatataataatcaaggtctgtatttgacatcacaccttctgctactactacaaactctcatttagtaa

SEQ ID NO: 17707 - DNA, 398 bp, Homo sapiens
  misc_feature 232: n = A,T,C or G
agtacttctagaattaattaaggcggggtatggaaaagtaccaagtattgggccaggcctacagtagctcctcaaaaatgccaggtccttctgccttccagtcaccacgaccttttatacttttgttcttttgcagttcccagtccttaaggtcagtggtggagccgaatttgctttgtactctatgactttcttggaaagggccctttattgattcccttatgaataggtntctggcctttctgcaatgctggggaatagttgggcataatttacatgtaaataatgccaggaaaaaacaaaacaaaaaggccccaaagaatcctagaaagacagagctgggcaaactctgagggttcctttaatgccaggacaaaatttaactggcttgtaatgaa

SEQ ID NO: 17708 - DNA, 447 bp, Homo sapiens
agtacttctagaattaattaagggggggttataaaataagaattatttgcagttgacacaactttctctttgaaaaaattcaagataactgaaaaatctaatctaaattaaaggtgcattcacagatgtaactgtacaaaagagcactggctttcttatatgccagccataaccagtcagaataagcctaacaataaaagttcaggaccttggtgaagaaatgcataaagcctcaatataaaagaaaatgaacaaacaaaatgcttgccatgcctttggatggtaaggctcaatggtgtgaatatggcaattctgtacaaattcatctacggaattaacacacaccgtaagaatttctttttctagaacttgacaaagttatttctgaagttcatttggaggaataaacatgcccaacttgccaagaaaattttgcggaagaacaaa

SEQ ID NO: 17709 - DNA, 175 bp, Homo sapiens
agtacttctagaattaattaaggcgggacatctctttgctccttcagtcctagcttgagactgagtctcaacctgatacaggttctaagattggggcaggcaaaggaggtaagagatgtcccgcattgtctaatgtagttaataccaaaaaaaaaaaaaaaaaaaaaaaaaaaaa

SEQ ID NO: 17710 - DNA, 709 bp, Homo sapiens
  misc_feature 49, 50, 54, 55, 58, 62, 372, 430, 480, 483, 511, 533, 536,567, 568, 598, 603, 612, 621, 636, 639, 640, 646, 652, 662,663, 664, 686, 699: n = A,T,C or G
agtacttctagaattaattaaggcgggcatggggacgggcgcctgtaannccannttntcangaggctgaggtaggagaatggtgtgaacccaggaggcggaggttgcagtgagccgagatagcgccactgcactccagcctgggtgacagagcaaggctccatctcaaaaaaaacaaaacaaaacaaaaaaaaaacagtcttctggctactcattagggaactctgagccaattacttaacctctctaagcctcattcacaaaatattcaaacatacctcggtataaaaatgaatgatcccctatcccacgatgtatacaattaagatctgtccatcaaaaaaaataatacactctgggccacccatgcantgggctcaaacctgtaatcccagcactttggaagtcgaggtgagaggactgctttgantccaggagtttcgaagacccagtctggggcaacataaggaaaatgcttgnctntacaaaaaaaatttaaaaaatttccctnggtgtggttggcaccgcacctntangtcccaaccaaactttgggaaacttaaggcnnggaaggaatcacccaacccccaagaagggnggaangtttcaatngggcctttnacccatttttcaggnggnnactttnaacctnggggccgacnnngaaccgaaaaaaattacccccntttaaaaaaattnaacctttccc

SEQ ID NO: 17711 - DNA, 541 bp, Homo sapiens
  misc_feature 473, 539: n = A,T,C or G
agtacttctagaattaattaaggcgggggctgtggcggggcagtctggatcggccggattgaggcaggggcggtccatgtaaccatgaccaacctcagccttattcagcatttcctcccagctgtccacttgatagtttattttctttaactcttccaggaattccaaagggtcgaagtttgtccaccgcaaaggaggtttacctctgcaaaagaaattaggagacgagaccatgaaaagagccttctaaacgcatcgtaaagtaacacggctgcgcccactgcatccaccttgtaggaggttcctggcaatgctgcaattctgggactctggcatcaaaacaaatgctcctttccagcatatctgcataaaaacttaggtcaggaaaataattcatgactgaagatgctaagcagagagaggactcataagttaatgagggcactgaataatctttaattgcttgatattgnatatttaatatctacatacaaaattagccaaaaagacagatccaaaattcaatttttttttttttnaa

SEQ ID NO: 17712 - DNA, 646 bp, Homo sapiens
  misc_feature 30, 38, 39, 43, 56, 62, 64, 67, 74, 83, 88, 93, 95, 99, 106,116, 117, 121, 122, 123, 137, 138, 139, 141, 144, 147, 150,159, 160, 164, 167, 171, 176, 177, 184, 187, 188, 193, 204,208, 216, 218, 220, 221, 226, 230, 231, 234, 299: n = A,T,C or G
  misc_feature 329, 414, 548, 558, 559, 562, 567, 586, 613, 634, 645: n = A,T,C or G
agtacttctagaattaattaaggcgggtanggcgaggnnagcnaggcttgctacangtcatnanaangctattnttgggagtngagtntgaantncttnaaatgtnaaatgcatgnnaacnnnatttttaccgtgtnnngnaanaanatntagatgttnntgtnttncttnattcnncacaatnaanngcatntaactgtgaantgtntatggaantncnntatcnaccnnatncatatatttacctgctttgatgcattctctgtatcccaaataaacagaggatgctgaaaaccacncaaacgagttatattatttacatacatagngaagtatcaatatattattctgaatcttgcttgagtttgaccagtactactggagtcagcaacttttttaatataagagaaggtngtaaatattttaggcattgtggaccatatgggctcagttgcaactacttaaactgtgctacaggagcacaaaaacagccatagataaattataaacaatgggcatgactgggttcctattaaacttcatttacnaaactaggcnncanaccanatttggccccaggctttantttgccaacctctgcatggtgcatgcntatcttttatttggcttgacnaataaaaggcnc

SEQ ID NO: 17713 - DNA, 441 bp, Homo sapiens
agtacttctagaattaattaaggcgggggcttagtgtcgacttcaataattggaaagactgggaagatgattcagatgaagacatgtctaattttgatcgtttctctgaggtaagttcctttaaatggacctctccccattcgaagcacacggtacctgtctatgtagtcaatttaatatggttttgggcacctaatggtattcatgatgcatgttattttatttttaagaccattttgcagtcatagtaaatagatgttaacaatggcaattttaatcctgaagttgaaccattttaatgattttaaaaggaattagtgttagctacaaaagttacaaaagttaatgcattaagacaaactaacacagctagtttgctaatttcatcattgggactttttttttttttttttaaagcatgattgcagtagttgacttgga

SEQ ID NO: 17714 - DNA, 538 bp, Homo sapiens
  misc_feature 250, 251, 252, 268, 269, 273, 275, 276, 278, 284, 285, 291,293, 296, 297, 298, 300, 304, 307, 310, 312, 315, 316, 317,325, 330, 348, 376, 384, 390, 404, 419, 425, 428, 438, 453,456, 463, 465, 471, 479, 485, 513, 520, 522: n = A,T,C or G
agtacttctagaattaattaaggcgggagggtaacgagaatgcatctctacaaaaataaaaataaaaaagttagctggacgtggtggtgcatgcctgtggtcccagctactcgggaggctgaggcaggaggcttgcttaagcccaagagattgaggctgcagtaacctgggattgtgccacttaactccagcctgggcaacacagtgagatcctgtctctcaaaaaaaaaaaaaaaaaaaaaaaaacggnnnccccccccgggggggnncccnanncncccctnnaggggntnttnnnancccnccntangngcnnntttttaanatcangacatcccgatggtgcanccgctattaaaggttcgtttgttcaacnattaaagncctacntgatctgagttcanaccggagtaatccangtcggnttntatctacttnaaattcctcctgtcnaanggacaananaaatangcctcttnacaaancgccttcccccgtaaatgatatcatctnaacttantnttataccccccccccc

SEQ ID NO: 17715 - DNA, 459 bp, Homo sapiens
  misc_feature 252, 369, 411: n = A,T,C or G
agtacttctagaattaattaaggcgggggctgcagtaagccaagacctcaccactgcactccaacctgggcaacagagtgagaccctgtctcagaaacaaaaataagaaaagaaaagagatatggaagagttgcctgttttctacagtacatactagaggaaataactaaaacgttggttaaatattttttgaacttaaaaaaaaaacctgcagtacatgcaagaggtggcaagatactaaggaatgctcanatcaaaagctaagtcatagcaggaacccagaacaagtaagcaagggctccaaagacagctttcatttccaatgcatttgctcaaccccagtgaatttgaccttttctctgcgtgaanaaatgcaaggccgggcacagtggctcacacctgtaatcccanaactttgggaggccaaggtgggtggatcatgagtttaggaattcagga

SEQ ID NO: 17716 - DNA, 480 bp, Homo sapiens
  misc_feature 32, 34, 39, 42, 43, 54, 55, 62, 63, 64, 66, 69, 75, 77, 79,80, 83, 84, 86, 92, 96, 100, 101, 117, 120, 122, 125, 127,131, 140, 144, 145, 149, 150, 152, 157, 161, 162, 198, 202,209, 211, 212, 213, 214, 228, 237, 247, 249, 251, 259: n = A,T,C or G
  misc_feature 260, 261, 314, 376, 420: n = A,T,C or G
agtacttctagaattaattaaggcgggggggngnagggngannttcatgggaannacctggnnntnatntacaantnanncgnngnataagnaccnaccnnccacatgtatacatcnatnantancntgancaatgtgcncatnntccnnanagctnctannatgcttaaagatgtttttatttagtttttaaactantganctcattngnnnnaaaatgattttttncattctgtnccagtctcangncnaacattgnnngtcctagagtctggaatcagccacttatgccaataaccctgattacttttggncagaaatgatatttagagatcagaatatgatgccagtagtacaagggatgccgttgctttanttcagtggacattagtagaaaaatattatttcactgaatctaanatgtggtcaattatagttatatgtgttactaggaaagaaaaaaacagtgccaattaattt

SEQ ID NO: 17717 - DNA, 443 bp, Homo sapiens
  misc_feature 30, 31, 39, 40, 46, 47, 49, 53, 55, 58, 59, 60, 62, 63, 69,70, 71, 73, 75, 76, 79, 83, 85, 87, 91, 92, 93, 101, 105,107, 112, 120, 125, 128, 129, 144, 152, 163, 179, 186, 187,195, 210, 211, 213, 225, 227, 228, 230, 235, 240, 254: n = A,T,C or G
  misc_feature 256, 257, 269, 278, 279, 280, 285, 286, 291, 300, 310, 324: n = A,T,C or G
agtacttctagaattaattaaggcgggctnngagggccnngcctgnngntcangntcnnngnnaggctnnngnannagnatgncntngacnnntgatatgnaggngntaggnatccaagntcacnctnntgagcttaacactanacttgtcnctactactccntctcaagattaacacncgcatgnnggcgcacngtctgtcataccganntntcttgatgcttnannangatgntcctnaactgcccaggttnannccgtaaataacntaaatgctnnnttggnnactgnatgaacctntgtttcttancaaaagaaaacaanatagaaatgaagaactactgatacacacatgactcacatgcatgatgttaaacacaagatgtcagacacaaagactatatattatatgagtccatttagatgtcattcaacaagacaag

SEQ ID NO: 17718 - DNA, 422 bp, Homo sapiens
gccccccctcgagagtacttctagaattaattaaggcgtgatcccactaccgatcagcacgggagttttgacctgctccgtttccgacctgggccggttcacccctccttaggcaacctggtggtccccaaaataccattaagacatttaaaaatgtcagttgtcccttacactgcctttctagtaacaaaagggaaacctaacagagtttgggagagtggggcaggagacagtagactgtctgatttaaagaaaattaatctagtaaaaaaaaaattagccgggcatggtggctcacacctataatcccagcactttcagaggccaaggcaagaggattacttgagtacaggagtttgagaccagcctgggtaacatagagagacccctgtttctacaaaaaataaaaaattagccaggtg

SEQ ID NO: 17719 - DNA, 414 bp, Homo sapiens
  misc_feature 45, 88, 126, 169, 319: n = A,T,C or G
agtacttctagaattaattaaggcgggaggatagcttgagcccangagttcgagacctgcctgggcaatatagcgagacccccttctncacaaaaaggaaaaacacaacaaaacaaaaaaacaaangacaaagaccagtttggataggataacaaaaattctagttggnaattgagaaattctaatacgtttagaaagatatgaataccacttttaatatttctctacctttattccaagataaatcatttgggtttcaatgggtaaggttattcataggtcacctatcatcatagccctacccatgagtgggatatangcaagaatactattaggttggtgcaagaattattgctgtttttgtatcacagttacttttgcaccatcctaatagtatgcacaaagtagttctct

SEQ ID NO: 17720 - DNA, 398 bp, Homo sapiens
agtacttctagaattaattaaggcggggggaggtgatacataaaattcaaacatgtagtacaaaattgatttttatcattttttcttaaccataaaggtatcttttagaaattagtatttcttgtagaaaaagcacctcaaggtcagcaattccttaagtttaacaatttttgttacgtttaggtaaaacctggccgggcacagtcgctcacgcctgtaatcccagcactttgggaggccaaggcgggcaaatcacttgaggtcaggaattcgagacaagcccggccaacatggtgaaaccctgtctctactaaaatacaaaaattagctgggcgtggtggtgcgtgcctataatcccagctactcgggaggctggggcaggagaattgcttgaaccc

SEQ ID NO: 17721 - DNA, 453 bp, Homo sapiens
agtacttctagaattaattaaggcgggtgtgctcttttagctgttcttaggtagctcgtctggtttcgggggtcttagctttggctctccttgcaaagttatttctagttaattcattatgcagaaggtataggggttagtccttacctccgagggttattatgatggttaagcaagttcatacttctaaaatgtttagcatgctttccagcactaataagcacaatatgtttgtttagaaaagtaaaataaatagtcttaatttgtaaaaatgaggaaaactgtgtacctcatagagttgttgcaaccattaaataaggtaataattacaaactacttatgtagtattgttacctgataataggaagtgtaccaaagtattacttataaaaaagtaatgagaatataactccagaaatatatttttaaaattgaaaattatttttaaatttt

SEQ ID NO: 17722 - DNA, 395 bp, Homo sapiens
  misc_feature 380: n = A,T,C or G
agtacttctagaattaattaaggcggggtagctagttcaacctagtttgaataatatcaatttagtttcaataatatacaaacgctctgctcctatatgtctctccctcccacttcattatggcatgagccaccgcatccaaccttatgatgcataattttagagattgcttttttagacaaatattgaactcatgtattaaacagtttaatgaaaactcagactctatctgaatatgatctcttttacttttattcttaagttataccgtgtttattataaaaatattcaaattagtagggaatttttaaaaatgtaaaattatcttggttcatcctaaatcccattttttcagtagtaactactgtgaacactttttngggagggggggaggg

SEQ ID NO: 17723 - DNA, 449 bp, Homo sapiens
  misc_feature 32, 36, 49, 51, 58, 59, 66, 76, 82, 83, 84, 85, 93, 96, 97,100, 104, 112, 124, 127, 137, 147, 150, 151, 154, 158, 159,168, 170, 171, 173, 182, 186, 197, 203, 205, 211, 219, 224,229, 232, 242, 243, 256, 260, 275, 285, 312, 317, 337: n = A,T,C or G
  misc_feature 426: n = A,T,C or G
agtacttctagaattaattaaggcgggggggncatngatatgagatatnantactttnnccactgncttaccattntaatgnnnnactgacanacnngtntggntggatcantggccccatatnacnaaacaagctntatgaacttnatnnagntggnnaaaaagcantnnancacacgacntatncaaaagtcagnaaccangnccggcncgggcctntaaancatgngtnatgggaaccnngatagacaatgcnagtngaggtcctgtggtcnctgaagaatntgaatgaaatcactaaacagatactgnatagnggatggattagtttgtggtncctgggatcttctgtgtattctgttgaagctcaataatcacattactgcggacctccaaaattttacaaaggactgcacacttcctcangtcctgggtcctacgccatcatc

SEQ ID NO: 17724 - DNA, 445 bp, Homo sapiens
  misc_feature 28, 29, 37, 41, 42, 46, 50, 54, 55, 61, 62, 69, 70, 82, 85,86, 90, 92, 94, 109: n = A,T,C or G
agtacttctagaattaattaaggcgggnntcctttcnttgnngatnttcncatnnaggtgnncaggaanngacggaaagganggnngatntntntggtaacatatattnattctaaattccaaactaatggaaccaacctttccatagatacttccaaaataggtttcaatcaaatgtttttaagctaattaagagatgatccataaagaaacccagaccaagaaataactttagagcaggttcttatttcttcactttcgtatttttcttttctattcctttcttttgtgggggaagatgggggataaaaaaagtgaaaggttaaattaggcaagctaatagtatttttgggaaaaggaaagggggaggcaaaattccctgcaagagaggcacagccataaagtagttccataaatgtgccatttctacaatgtactttcaaat

SEQ ID NO: 17725 - DNA, 428 bp, Homo sapiens
  misc_feature 113, 145, 148, 150, 152, 155, 156, 158, 160, 162, 164, 166,168, 172, 174, 184, 186, 187, 188, 189, 196, 197, 200, 206,210, 221, 223, 225, 227, 228, 235, 239, 246, 250, 254, 256,260, 261, 262, 265, 268, 270, 274, 275, 276, 282, 290: n = A,T,C or G
  misc_feature 291, 292, 302, 308, 311, 312, 315, 316, 317, 324, 341, 347,348, 350, 353, 354, 356, 364, 367, 372, 388, 416: n = A,T,C or G
agtacttctagaattaattaaggcgggcatctataggaggctgaggcaggagaatcacttgaacccaggacatggaggttacagtgagctgagagcacgccactgcactccantctgggtgacagagcaggaaaaaaaaaaaaanttntntnttnntntntntntntntttntntaaaaaaaanannnnagggttnnccntgaaangggnaaatgctgggntntntnntttactntatnaaaaaanatgncaancnggcnnnaanaananaaannnaaaaantgtgtccnnncccccccganggggangannctnnnccccctnaaaggatttaaaggacncccccnncntgnntntaacaaanatnatggngccttgaggaatacanaatatttcaatcaactaaaagacaatantaacataattct

SEQ ID NO: 17726 - DNA, 398 bp, Homo sapiens
agtacttctagaattaattaagggggcattgaaacagagacaagctgcccgatgaagcaacaccatccagtgcagctggactgtggacacctgtgtccttaggttttcatacattgtgagagcttcgtttacaaagtgcatgggataagaggaggggcaccccaaaagaaggaaagcaggaaaaggcagggaccccagaggctcagtctctgcagagggtattactgcctcacagatgttggccaaagaaagttactcacagaagtggaaggtgatgggatgggctttggggatggaggagaagctggatgggaggggcttatgcccatgttcattgagtcaacgctgtggtgctgtaggtaccacgctgagcaccaggaactcagtggagaaaaaga

SEQ ID NO: 17727 - DNA, 452 bp, Homo sapiens
agtacttctagaattaattaaggcgggagctataacgcagacctcagataacctaagagctgcagaaacaattttaaaatcttattataaccagtatcattcaccaggtaattaagagaatttaattttcacataagcctcaaagcaacactaagaagaaaatgaaacatctttaacatgtaagaattttttttattcttttggctttttttttcaaaattaacacaaagctaataagctgaatacacaatgcaaagcatcctaaatcttgggcaataacaaaatctaagatcctaagatcatgatatttaaggtaggaaaaaagtaatcagactagactgggcgcggtggctcacgcctgtaatcaatcccagcactttgggaggcagagatgggtggatcacctgacgtcgggagtttgagaccagcctgaccaacatggagaaacccca

SEQ ID NO: 17728 - DNA, 431 bp, Homo sapiens
agtacttctagaattaattaaggcgggtgtcactccttgccaaagctttagaaagccttcctcttcaatgatccctagagctgtgcgcaccattcccctatagggggcagattctcttgcaccgtctcccaaccgagcaagagctgcttctccttgcatttggagtcgagtttttgtgagatccaggggaaaggttgctaacaaaaacacaaatgcagggaaaaacccacaacattcagagaaacaaacaaaaatctaaaatcataggagtaatattttcccaagactggttgttctcaaattttagaatatatcagaatcagctagggagattttaaaaattagaaatttcctagccccgtgcccatggattctaattcagtaggttgaagagggtttagaaacttgattctcacacagtcccaaattta

SEQ ID NO: 17729 - DNA, 635 bp, Homo sapiens
  misc_feature 458, 497, 535, 600, 615: n = A,T,C or G
agtacttctagaattaattaaggcgggggggtgggattcttagacctagccatgcaactctaattcggtgtgccttgtttttctttctcccttaagttgattggctgcataatcgggcgtcaaggcgccaaaatcaatgagatccgtcagatgtctggggcgcagatcaaaattgcgaacccagtggaaggatctactgataggcaggttaccatcactggatctgctgccagcattagcctggctcaatatctaatcaatgtcaggtaagattgctctaccttttgtcttatttatgccaacacagtaatgtgtgtgttggggagagctgcagtgtgagaaaaatgggtgtttccagaataaatggtaattgctgcctccagaaactgccttgctgtcctattactccaatgtccttattacaattaagggtgctttggactccaaatcaaatcagngaaagaaaatattagtctatattgctatggtagaacaanagagacccccatttgatttttgtgagtgctctagccanaagactcttactgaaagacaaaggacccactcttccctcttaccaaaaccatcaagttaaatgcnggcaatctgtgcttnccccccccccaccaaacccc

SEQ ID NO: 17730 - DNA, 463 bp, Homo sapiens
agtacttctagaattaattaaggcgggcattcttttgagatcaatttagtaaattaactaatttcataaattgcagaccaaaaataatttggaatactagggcaaaaatcttttcagttgttaactcttttaaaaatctgaattaaaagtcatattaatttattgagtagtgcttatttcacttcctacttttttatatagagaaatataatttgcgatcactgatttataacattcttttctcagacaggagacaatttatccagcatgttgctagaaaatctaactgataatgaaagtgaaaatactaatcttaagaagaaggtatttgaaaaggaggcccatatccaagaactttcttgtttgtttcagagtgaaaaggtaagcaaaatttgagcttttgagcttaattcattatattaatattgactcccttttttttcccatcctggccccaactcct

SEQ ID NO: 17731 - DNA, 441 bp, Homo sapiens
  misc_feature 29, 72, 86, 135, 193, 212, 223: n = A,T,C or G
agtacttctagaattaattaaggcggggngtgtgtatatatatatgtatatatatgagagaataagcatgcntaattacctttatnactgaatactttctgacagtgcaggagtttttcaaagaggagaaattgngcttagtccagccaagctgtcatacttaaaagaggtttataatgaaatctgttgcatntaattgtcctttaaagtanacatgatttantggaatccaaaactggaaaagttaagatgatgctttgggcacacataaaaacttggttaaaatttcattttaaactagtatactgaagtggtaagtgatgaatgatttcatgacttgttaatggacattcttggtactaagtttttcctagaaatgattctaaatatgtaaatgctattggggtaacactttaataccccatttcaacaaggagtacc

SEQ ID NO: 17732 - DNA, 304 bp, Homo sapiens
  misc_feature 25, 29, 30, 32, 35, 36, 40, 46, 49, 52, 54, 57, 64, 65, 85,89, 91, 105, 117: n = A,T,C or G
agtacttctagaattaattaaggcngggnntnaanncaangcaatnacnatnanaanctggccnnatttttttaaaaggatacancttntnattataaagccacnatcactaatcanacgatccatgaatagttatgctgactttttaaaaactgagcaaaattgtcaagggaggttagcaccaagcctaccagcattcagacacattaaaattcttaaatgagacaagattataatctttaaataaaagtgtgtgtgtgtgtgtgtatatatatatatatatatatatagagagagagagaga

SEQ ID NO: 17733 - DNA, 412 bp, Homo sapiens
  misc_feature 28, 30, 33, 34, 35, 38, 42, 43, 48, 52, 56, 58, 60, 61, 67,69, 70, 71, 72, 74, 75, 77, 88, 92, 94, 95, 96, 98, 104,106, 107, 108, 118, 127, 129, 131, 136, 151, 152, 159, 162,190, 195, 201, 210, 214, 231, 233, 244, 257, 404: n = A,T,C or G
agtacttctagaattaattaaggcgggngntgnnnatnacgnngtcangttngcgntngnnatcaanannnnanngnactactacggnatcntnnncngtcccnannnctaacttttncatttgatnantnaaaanattatacgcaaaggnnctaggtntgntcctaaatcctccctatcaaaaattaanctctnatggcncatataccnaatncccgcgaacgaacctcntnattatggcctnaacctcgactaanaaatgcctgcctttttttcctccctgctttcttctacaagccacacaacattgcttataaaaggtacttttattactatttttagaatatatacaccccatatgtaaattaccctcacttttaaagtaataatagttccttcacggnaaaaaaaa

SEQ ID NO: 17734 - DNA, 427 bp, Homo sapiens
agtacttctagaattaattaaggcgggggctactgtgagtgacagcaacagagaccaaggagtagaaagagggaagtttgaggggcacaatggggcaactgaggggcaaggagatgggagactgaataagtatatagataatttgaacagtatgattaacatactctatttaatggtcatatatggaatgttgcacccagtatctgaaaaatatagaatcatttcaaaagacatacagctaccagaatggctaaaattgaaaagaataacagcatcaagtcttggttatatctacagcagctgtaactctcctacattgctgggggtagggggtaaaatgctacaaccattttggaaaacagcttggcagattcttagaaagacaggcatacatccacatgacggctagcaattctactcataggta

SEQ ID NO: 17735 - DNA, 389 bp, Homo sapiens
  misc_feature 91, 135, 136, 137, 139, 141, 148, 149, 155, 156, 161, 163,166, 170, 171, 172, 175, 177, 182, 187, 195, 196, 197, 199,201, 203, 204, 205, 207, 210, 212, 216, 218, 221, 223, 233,241, 247, 249, 251, 256, 257, 258, 261, 262, 269, 315: n = A,T,C or G
  misc_feature 318, 339, 347, 359, 372, 375: n = A,T,C or G
agtacttctagaattaattaaggcgggaggatagcttgagcccaggagttcgagacctgcctgggcaatatagcgagaccccgttctccanaaaaaggaaaaaaaagaaaaaaaaaaaaaaaaaaaaaaaaaaannngngnccccccnngggggnnccccnantcncccnnnaangngggantttancccccccnnntngncnnngnttnanaaanangangnaccggtaggngtactganctacananancgagnnnacnntcttctngtgaaaaaagatgcaatctgggctggtgctgctcctgggtaccagnagntctttctccccgcgccgtagntggaagtncactccactcangaggctgaggcanganaactgcctgaaccc

SEQ ID NO: 17736 - DNA, 260 bp, Homo sapiens
  misc_feature 193, 228, 260: n = A,T,C or G
agtacttctagaattaattaaataaaagcactgaatgaaatgatacaaaaaacattttatcacttcaagtggtaaaagcttttctaactaagagtttttaagatttctggacttcatattgacatatttaactatataataatcagaaactctatatgcaaaaaaaaaatcaaaaagtaaattaaacacttanaaaaatcatttgcaacccatatcactacataagcncaaatagcttcctgaaaaaaaatttttaaaan

SEQ ID NO: 17737 - DNA, 394 bp, Homo sapiens
  misc_feature 64, 70, 77, 82, 91, 97, 106, 110, 115, 120, 126, 127, 173,213, 217, 280, 325, 386: n = A,T,C or G
gaacaaaagctgggtacccgggccccccctcgagagtacttctagaattaattaaggcggggcngggctntgtggantgatngtgcgcatnggcganaaatatgtngacntgtcnagtcnacaccnntattcaaaagctgggcagcggctatgcgggagattggtctaacaantgtcggttttctgccatacactgaaaatacttaaacttgnaggnactactaaacatcttcctgaacacgaggacatttttaaagaccaaattctttggaactaccanacatggaatctaaaataactgttcagtatgttaaaatctctagtngaaaaggcaggcaacttgtatggtcaggtaggatatttcagcagagagatagacactgtangaaaataa

SEQ ID NO: 17738 - DNA, 683 bp, Homo sapiens
  misc_feature 24, 26, 28, 32, 41, 42, 44, 58, 66, 70, 72, 83, 86, 99, 120,200, 219, 258, 264, 284, 295, 304, 313, 321, 327, 337, 345,348, 378, 383, 395, 405, 410, 412, 417, 430, 438, 451, 456,469, 470, 474, 482, 483, 497, 502, 513, 530, 546: n = A,T,C or G
  misc_feature 547, 549, 551, 553, 554, 555, 571, 576, 587, 610, 611, 617,621, 623, 636, 641, 642, 651, 663, 667, 671: n = A,T,C or G
agtacttctagaattaattaaggngngngganaggacggtnngnaagagaaaaaaatntttttttntttnancccgtaatacntanactttggaggtangacccctggtttaaatctaantctagttttgaggaagtcacttaacctttattgaaaagactctggatttaataaagctgtgttaactggtactcgatagntacccaaagttcagtctangatgggcacaaaaccacctctcagggaataaaccctaangacatncaccttctagggaggacttncaatttatttnaaatttttngaaacctgntttttggncctctnccttgggccnattaaaanacntttggaacaagtccaattgtaaaaggggtnaaagnggcaaaaatttntaaaaggtgngggantnaaagntttttttaaaatnaacccgcntattcctaacctncattngtttcccagaccnnactnagacatgnnactcctccaatacngtaanatttaatcacntatgccggggcccggcncaaccccggccggggnngngnannnccttccccaaattctnttctncccttaattanggaggaaggtccgtattttaacnncccccncctncnaacttgggccccntgctnntttttatancaaacacgtctntgtnggancttgggggaaaa

SEQ ID NO: 17739 - DNA, 541 bp, Homo sapiens
  misc_feature 24, 25, 26, 27, 31, 37, 38, 45, 46, 48, 49, 50, 51, 53, 56,57, 60, 61, 65, 68, 69, 72, 73, 74, 75, 76, 82, 83, 85,86, 87, 92, 93, 94, 95, 96, 98, 102, 108, 109, 110, 113,114, 116, 132, 154, 155, 156, 168, 174, 185, 200, 212, 233: n = A,T,C or G
  misc_feature 235, 236, 237, 248, 479, 489, 521, 522: n = A,T,C or G
agtacttctagaattaattaatgnnnngaangggccnntggcctnncnnnnanttnntanntctngannatnnnnnactganncnnnggccnnnnnanatgnagactnnnacnntncattgagtacttaaancgctttattccactgccctacnnntcatcagcacangactancatggacattnaaaaacatgtctccngaatcgtggtcntatcatcccaccaatataacntnnnattaccctganttcaaaccaccattatctctcacctggattactatagtaacctcctatcttgtctctcagttacccttttacacatccttttgcagtcttttccaaacagcctgagtgatcccttcaaaaagtaagtgaaatattttactactttgctgaggactctccagtggctcttcatttcactcagtttaaaagccactggcctaaaagggcgtataggatctgaccacctgttanttttttctgngttacctttctacttttattcttttctttaannctttcccttctattctttt

SEQ ID NO: 17740 - DNA, 440 bp, Homo sapiens
  misc_feature 32, 33, 35, 46, 51, 54, 55, 69, 74, 75, 77, 78, 79, 81, 83,88, 94, 95, 96, 100, 107, 110, 118, 121, 130, 132, 138,149, 159, 167, 168, 173, 177, 215, 237: n = A,T,C or G
agtacttctagaattaattaaggcgggacacnngnacatcatggcntacantgnnaggcaccaggaggnactcnncnnnancnttagnttaaannntgancccgagnctnatcgactntanctgcacacncnactatntgggaagctgnaggaagaganagccaacnnctcgncacncccagcacagtctctggagcataagtgtcagtgcccangccccgtcctcacctccagatnagggcgtgagctcaaaaagaacccccagagatttgcagtcacagcgaaggtgtgctgagtccaacggcacctgaggacactttcaccacatctgggatgccggccgccaagagcaagggccccagggcctccaacaaattagtgggttaagaaagagacttgtgtggggaaggcagaccctataaataaaagagttttaacag

SEQ ID NO: 17741 - DNA, 348 bp, Homo sapiens
agtacttctagaattaattaaggggggggaaaaaaggaaatttaagaaattaaaatcttaatatcaaacacagcgaagaaagaattagcaaactggaaaatatatacaaagaggaaaatggaaaatataaaggacatattaaaagatattaagataataagaaggcctaatatatatatctaatctgagcccagaagcagaatgcaaagaatgaagaaaaagcaatatttaaaatgataattttaaaaattgctgtatatttttctgaactgatgataaacatgaatacagagatccaggaagcacaacatataccagtaggttaaataaaaagaaatccagctgggt

SEQ ID NO: 17742 - DNA, 478 bp, Homo sapiens
  misc_feature 36, 43, 51, 54, 57, 60, 61, 63, 64, 66, 68, 70, 72, 75, 79,80, 86, 90, 91, 95, 102, 119, 121, 127, 144, 161, 164, 167,171, 173, 174, 191, 199, 200, 212, 213, 223, 224, 227, 347,414, 416: n = A,T,C or G
ctcgagagtacttctagaattaattaaggcggggcntccactnggtgcccnggncgntgnngnncntntnanctnaaannaaaatntcanntgcntcatacncacaccctgggattacntncctatncactgcgttcggtacantgcgacaccacctaaantanctncctncnnttaagagatttgtactnttggtgtnngcgagtctcatnnatactaatgnntanacatggaatatcacctgaaaacttgtgttaaagttctacagcgcgcactgttaactgaacgtctttttcttcagcctatacgcggatccttgttttgagctctcaaaaatcactcccacnacattttgtaactgctgctgttgctttctacatacaccttataaagtgacatttcaaaagaaataangngcccaagttttaaaccagaaggtggcactctgtggctccttgtagtattatagctatactgg

SEQ ID NO: 17743 - DNA, 412 bp, Homo sapiens
agtacttctagaattaattaaggcggggaggacttcttaagtgtgccgctcgggagcctcccgctcgtcccgccccgaggggcgtgaggaggggaggggctgcggacttcggactcgggcctggagaccgcctcctacccagagccggagcccgcaacccgctcaggcggcgacggagccatgtcgccgctgctggggctccggtccgagctgcaggacacctgcacctcgctgggactgatgctgtcggtggtgctgctcatggggctggcccgcgtagtcgcccggcagcagctgcacaggccggtggcccacgccttcgtcctggagtttctagccaccttccagctctgctgctgcacccacgagctgcaactgctgagcgaacaagcaccccgcgcaccccacctgg

SEQ ID NO: 17744 - DNA, 586 bp, Homo sapiens
  misc_feature 29, 30, 34, 35, 37, 39, 41, 43, 47, 49, 56, 57, 60, 63, 64,67, 68, 73, 74, 79, 80, 82, 86, 94, 99, 102, 105, 107, 110,112, 121, 125, 129, 135, 147, 152, 156, 158, 161, 166, 168,173, 177, 178, 181, 183, 184, 189, 191, 196, 198, 201: n = A,T,C or G
  misc_feature 202, 206, 324, 334, 367, 368, 370, 371, 374, 376, 388, 415,416, 417, 428, 446, 478, 508, 514, 527, 537, 544, 547, 553,554, 573: n = A,T,C or G
agtacttctagaattaattaaggggggannacanntntngnancaantnctatgannacnacnngcnnttttnnggccnncnccgntgggttgnatatnctnctnanatnantggcaaaancacnttcngggatntggatggaatcntggancctncngantggcntngacgncttnncantnntgacngntgatncngcnncagncaaaaccacttactgctcctaaattcatttggaccaaaccataaattcaaccgtgacttggcaccccagaacaatatgtaccttattctaccactatgaaagaagattcaggattggntcccaccttnaacaccttacatgtcaagacaatgattaacatnngnnacntncaaaatatggancttttcatgtaattactcttttactgnnnaccattcactntaatttcacaattaaaantggggtgacttctgctaccattcgcctttaanaaatcaacattcgcttaaggaataaaaatnaaattnaagaattaaatanaatgaattanatgagtnatnacatcnnaaaaagctgttgaaaaacncatctaattccat

SEQ ID NO: 17745 - DNA, 452 bp, Homo sapiens
  misc_feature 166, 177, 257, 260: n = A,T,C or G
agtacttctagaattaattaaggcggggtatttggagcttctataggagtggagaggggcagctcattgttgagagttgcatgctgcaacctaatggtcagcaatgaaataaatacttgtagaatgttcacttccatatagtaatctatacttttttctctcattnccttcattttntgagccgtaagtgtaaggcattttgctggtattattacaatggttatgaggagttactttgcttgcccaaggtcacatanctngcaagttaaagtagattcaaatccaggcctgctagatccaaattattatttaagagtacttttcactactcctaaataatgacacagatatgtttgtcttacacatttcactttattgtcaagttattagtatgtttattttcaaaaggtattttttgcaatttctttttattattccgtactttttaaatt

SEQ ID NO: 17746 - DNA, 403 bp, Homo sapiens
  misc_feature 37, 38, 39, 41, 42, 44, 47, 49, 60, 61, 63, 64, 66, 67, 72,74, 76, 78, 80, 81, 82, 96, 99, 104, 109, 110, 117, 119,147, 148, 149, 154, 155, 158, 161, 163, 164, 165, 167, 173,178, 181, 182, 186, 187, 189, 202, 210, 211, 215, 217: n = A,T,C or G
  misc_feature 219, 222, 223, 225, 228, 229, 231, 232, 238, 239, 240, 242,248, 254, 281, 293, 303, 322, 324, 338, 340: n = A,T,C or G
agtacttctagaattaattaaggcgggggtggtacgnnnanncnatncngatattatacnncnntnntgtgnanancngnnngactgaacctctgnatngcgantattnnaatatanangataggtaacatggaaggattcctacgnnnttatnngancanannncntaaatncaaanccnnaagnntnggctcaaggccanaatcagannggcnangnaanntnctnntnnaggccnnntnttcatncttcanggccttaaaagtcaagaggtaaggtancaacagagctcnaatggggcantgcactcttaccctccttntnaacttttatttaancngcgctaaatgttttctttaagggaaccagatttagttctttacagaattttccagtgaaataa

SEQ ID NO: 17747 - DNA, 366 bp, Homo sapiens
  misc_feature 319, 337: n = A,T,C or G
ggatgaatcacttgaacccaggaggaagaggttgcagtgagccgagatcatgccactgcactccagcccaagcgacaagagcaagactccatctcaaagaaaaaaacaaaacaaacgttaagtatcaggaagactcttacctaaacaattaatttatattatgtgtcttccttttccccttctggaatccaattttcttcccaaaagttgaggaagtgtaagtaatataaaggccacatcaattgtagaaaggaagagctgctatgcatgtgctaatagtaataatgattaacaattgccatatatagtaaaaacagtntaaaattaaagaccaatntttttaaaaaaaaaaaaaaaaaaaaaaaa

SEQ ID NO: 17748 - DNA, 558 bp, Homo sapiens
  misc_feature 137, 140, 141, 142, 151, 159, 164, 165, 167, 168, 172, 173,175, 176, 177, 180, 181, 185, 187, 188, 198, 200, 201, 204,205, 208, 213, 221, 222, 224, 226, 240, 242, 267, 273, 275,284, 289, 305, 334, 339, 345, 350, 368, 406, 408, 413: n = A,T,C or G
  misc_feature 423, 426, 448, 466, 483, 487, 493, 494, 495, 505, 520, 523,533, 538, 548: n = A,T,C or G
agtacttctagaattaattaagggcgggggtctatacattcctgagattctgggaaaggtgctcaaagatgtactgagaggaggggtaaatatatgttttgagaaaaatgaaaaaaaaaaaaaaaaaaaaaaaaaanggnnnccccccccngggggggnccccnntnncccnntnnnggnnattntnnaccccccccncnnggnnggnttttnaaaattannananaatggatggtatantnaaaatgctgaaagaacaaaacctgncagctnanaatactgtncccancaaagctatccttcanaaatgaacgtgaaataaactctttcccanacaangaaaanctganataattcatcaccactanattggcctaacaagaaatgattatgctgagtcctacancnagaantgaaaagcangtnattactgtcatgaaaacatcanaaattataaaactcacanatagagataaatttgtnatcnaactcnnnatactccatnctatgatgatgctgngtnaatctttcanacctnaactctgaangttaaaagtc

SEQ ID NO: 17749 - DNA, 386 bp, Homo sapiens
agtacttctagaattaattaaggcggggggtgctaagggcattaaaaaaagtataagcaaaaggacaacagaaacataaaccttcctaaataccaaatttaagattttgtttttaaagaagagcacagtaaacacattataacgaaaaacagactaaatgtaataaatataataattacagcataaaataatctggcagggttgacagcaaacatattcatcttaacacatgtgaaagggcttacttcacttattaaatggaaaagatcttcatttgggttcataaagaaccaactatatgctctattcaagagaaacacctaaaacaattatttagaaaggctaaaaataggccgggcgcagtggttcacgcctttaatcccagc

SEQ ID NO: 17750 - DNA, 444 bp, Homo sapiens
agtacttctagaattaattaaggcggggtggggccaggctagaaaaaaagcaatacaacaaaaaaggaagtctgattttcccaattataattctcaattttcttaagaaaggacaaaggggctttctgagcttcctgtcattcacagcgctcacctgttcaaacaagggctgctatggctctccctccttccctatctccactgacttctacctcctttccatgtctgcattctccaatctgactggcctcaggtgcttattatcagcttctgattccatctctaagttctttctcactttcctctacactccctcaagtttctcttcagtctcatttcattcaagattgtcaggtaccatctgtctacatctctattatctactgagcatttactaggcatcatgctaggtgaggtgctttaaataaattatctcacttcctt

SEQ ID NO: 17751 - DNA, 454 bp, Homo sapiens
  misc_feature 33, 38, 43, 44, 47, 59, 68, 92, 106, 114, 122, 124, 130,137, 153, 155, 156, 157, 158, 159, 169, 171, 176, 177, 188,193, 196, 204, 205, 206, 212, 213, 217, 218, 223, 224, 226,227, 229, 231, 232, 233, 234, 239, 244, 248, 253, 254: n = A,T,C or G
  misc_feature 256, 260, 272, 281, 316, 318, 329, 331, 377, 385: n = A,T,C or G
agtacttctagaattaattaaggcgggggttgnattcntagcnnctnatgaagcacacnttggaccgngctgtattaagaccagacggcatnatcgccattgcatnatgttaanaaggatgncntccacngcacganctaactttactatgtntnnnnncacccactanangatcnnccagattattnaggtnggnccttaagnnnctacanncatnnttatnntnncncnnnntaacnctggnagantttannanccanctgtcaacatgntgacagatnacccgaagacagaaagttaacaaggatacccagcngnttgaattcagntntgcaccaagcagacctaatagacatctacagaactctccaccccanatcaacanaacatacatttttctcagcaccacaccgcacctattccaaaactgaccacgtagttggaagtaaagcac

SEQ ID NO: 17752 - DNA, 427 bp, Homo sapiens
agtacttctagaattaattaatgcttgtaggacataataataacaattgaatgtctgcacagccgctttccacacagacatcataacaaaaaatttccaccaaaccccccctccccccgccttaattaaggcgggcagagctcttgcgacttactcacctcccaattgctacaccttttaatactgttacattggggcttacgtttcaatgtgaattttggaggagatgacatgattcaaatcgcagcacatgctttcatttctttggggtcgatatcttggagtgaactggctgagttatattgtgggtatgtgtctaacttttaagaaactgacaaagtttttcccaccagcagtgtatatgagttttagttttttcatatgcttgccaacacttttatgatcactctagaattttagttattct

SEQ ID NO: 17753 - DNA, 249 bp, Homo sapiens
  misc_feature 24, 31, 32, 33, 35, 38, 46, 50, 52, 61, 77, 104, 122, 129,185, 241: n = A,T,C or G
agtacttctagaattaattaaggngggagannnancgncagaatancatntntacagacantaaaagcacactaganagacacacctacagatcaaaaccttanctgtttcaaaatgtgatnaaagacnttaagaaaatgataacagatatgaaactacataaatcaggaagtagaaaaattcanaaatgaagtgacagaactcacaaatgtattagaaatgaaaggaaaaatcatttcanaatgaaga

SEQ ID NO: 17754 - DNA, 334 bp, Homo sapiens
agtacttctagaattaattaaggcgggtttaatagtattcttagctgaagaaaaaattagtaaactagaagatagatcagaagacaatatccataccaaagcacagagagacaaaaggatggaaaatgaaaagaaaaagaaaaatatgtaagagacaaatgggacactgttaaaagtctaaaatacttataattggaatctcggagaggagaaagaataggtcagaagcaatagtaaaagacataataacttgagaatcttccaaaactaatacagacttgcatatttgagaatcactgtagctctaagcagaatcaataccaaaaaaaaaaaa

SEQ ID NO: 17755 - DNA, 380 bp, Homo sapiens
  misc_feature 242: n = A,T,C or G
agtacttctagaattaattaaggcgggggaatgtgggataatgttaggaatgctgtattcaacgatgagccatatgtattaatacataatttcttaagaaaaataatttttttaaaaaatcaaaccttaacattaacagaaccaaattgcaaagatcagaaataccaaagtgaaactgaatgttagtactgaaatttaagctacatttaaaaaaaaaaggctgtcaaaccaatgaaaactanatttcagtgtctccttttagtgactagttctatatattatgtttctctatatctggaaaaatgttcttaatataatacacgtgcagtctgaagtaatttcagttctcaagtttatgaaaggattgggtttaaaaaaat

SEQ ID NO: 17756 - DNA, 383 bp, Homo sapiens
  misc_feature 300, 327, 328, 329, 330, 331, 333, 344, 352, 353, 354, 356,357, 366, 367, 368, 370, 372, 376, 377: n = A,T,C or G
agtacttctagaattaattaaggcggggggaaccccggatagctcagtcggtagagcatcagacttttaatctgagggtccagggttcaagtccctgttcgggcgtttgtagttttcgttactttaacctgctaaattatcccatcaagtcccaagagcggacatcgtaaacccttacatttcaagttgaattcaaatcatttttcactggtttcagaatatgctagatagacgtgttttcagggaggaaaaaaaaaaaaaaaaaaaaaaaaaaaaaaaaaaaaaaaaaaaaaaaaaaanccccaaaaaaaaaaaaaaaaaaaaaannnnngnccccccccccngggggggnnncnnccccccccnnnangngggnnttttcc

SEQ ID NO: 17757 - DNA, 421 bp, Homo sapiens
agtacttctagaattaattaatttactcttcatgaaaaccacataaggtagttactatattatgtccatttttacagacgaggaaacaaacgattgtgttgcctgccaaagatcagcacacaactgagaagctgcaaatccaggatttgaactcaggccatctcactctagaatgtcagctcctagctgccctgcatactatgtcctgaaggagagctcttaagaaggccaactgaagcctatggggaacagtatcctggtcattcatttcccaaattgttattgagtgtctactatataccaggtgcagggaatacccccaacagccatggtcactgttcctgtctagtcaacattcctgttgctttcctaattgccatttgttatagctcccagagagtaagcatgctgaatccattag

SEQ ID NO: 17758 - DNA, 442 bp, Homo sapiens
  misc_feature 37, 45, 51, 65, 72, 90, 109, 125, 179, 199, 202, 217, 222,223, 225, 229: n = A,T,C or G
agtacttctagaattaattaagggggcttatgaggtnagtgatantgaaangaggaatcaaacanactaaangaatgctataaaaagaangaaaactgatagagtgcangaagcagaagcagganaatgtgcttgttaggagaaaacccacataggagtgtgaccttaggtgagtcatnttacttctttacattacttntgnccatttgtgaaacanctatnntnaaantacctttctcatagctgtagttgtgagagtcaaatgggctattacatgtaaagcgcttagaacagtccctgacagtgagcattctgctgatgttggctactactgtaattatattaagatattctgttaggtagtctccattcaagcaaatctttaattcaagaaatactctgtaggtctctgtattacactgagctgactaatgcctatctt

SEQ ID NO: 17759 - DNA, 391 bp, Homo sapiens
  misc_feature 238: n = A,T,C or G
agtacttctagaattaattaaggctggcattgctgcaactgagtaatgttaaataaagtagtgcaagtagatgcttttaaaaaggaaacagcaatgattttacaaataattaaatgttttctctatgttaatggtttgccccattgagaaatggtttttagaggactataaggcattgtttgcattacagtaggaaatactatcaattttctcattgtctctcacttttttcttttangtcatggaaaatggaagatttgcaaaatacaaatattttacccatgtcatgatcaataagacagatatgctaatgataaccagacgtggtgtattgtttgtaacaaagggaacatttggacaactcacgtgtgagtggcagtatagttttgat

SEQ ID NO: 17760 - DNA, 831 bp, Homo sapiens
  misc_feature 59, 107, 174, 182, 183, 184, 185, 187, 189, 191, 193, 195,197, 201, 206, 216, 217, 220, 230, 232, 236, 238, 247, 248,251, 252, 258, 267, 269, 272, 285, 288, 289, 294, 297, 298,305, 306, 308, 313, 321, 323, 336, 337, 339, 346, 354: n = A,T,C or G
  misc_feature 356, 358, 359, 372, 374, 375, 387, 388, 391, 398, 404, 416,432, 444, 447, 460, 478, 479, 507, 529, 533, 534, 541, 546,556, 566, 573, 591, 593, 594, 629, 633, 656, 660, 664, 665,667, 668, 677, 678, 684, 698, 701, 705, 711, 712, 723: n = A,T,C or G
  misc_feature 727, 729, 733, 734, 738, 744, 746, 752, 753, 756, 757, 768,770, 771, 776, 783, 785, 799, 803, 805, 816, 819, 820: n = A,T,C or G
agtacttctagaattaattaaggcgggtgcctgtagtcccagctacctgggaggctgangcaggagaatgacatgaacccaggaggcggagcttgcagtgaacgaanatcgggccactgcactccagcctgggcgacagagcaagactccgtctccaaaaaaaaaaaaaaaacnaaaagggnnnnancnantncngnaaanttttnaaaaccccannaangttttttttntngccngnattttttcnntannaaaaanttttttttncntgnctggtcaaaaaanggnnacctnaannttcccanngnaaaanaatttaangnattccggattttnncnctttttngaaaaaancnannttttttaaattgncnnacctggttaaannggnttttttnctttgncataattttttnaaaaaaatttcctttntggctttaattnaanaaaaaattttttncccccccccccaaaattnnaattttttttttttaaaaaaacctgganaaaccttttttttttcccgggntttnngaaaccnggggntttttttttntttaaaaatnaaaaaancctttttttccccctttngnntttccccctttttttttttaacccccctttttttntttngaaaaaaaaaatttttttcccgngggngggnnannaagggggcnncccctncttttttttacccnaantccntttttnnaaagctttaancccngntggnnttcnccccgnanaataannaanntttttaaaaanannccccngggcccnanttttggtgaaaaancccntnttttttttttnatnnttcccaaaaaa

SEQ ID NO: 17761 - DNA, 446 bp, Homo sapiens
  misc_feature 32, 33, 41, 68, 79, 97, 104, 113, 119, 126, 129, 148, 156,159, 176, 204, 220, 316: n = A,T,C or G
agtacttctagaattaattaaggcgggggttnnaactactngcctcatttcctcctggaagcctgttnatgtggaccanctgaccttgatcatccantaccagntcactgtangtcagnatgtcanaangcagagggggagatggaanaaatgctngantggacatagactcccanagtttgatcagggactagtggagaaaanaagtttgactaatcantcacaataatttcaatatagacaaaaataattattaagattcagtcaatctggttttgccttcttttccaagtgttctgcagagtgtaaacattanactaaattctccagctcccattctcagttaaaatagatttgtaattactttttacatgccaaaagtcaggcacttttccaaaaagtcaaactactgagtgattccaaatcagcaccagagcattaacaaa

SEQ ID NO: 17762 - DNA, 440 bp, Homo sapiens
  misc_feature 30, 31, 42, 56, 63, 67, 79, 89, 129, 142, 158, 161, 174,198, 221, 224, 246, 276, 277, 294, 298, 303, 310, 317, 322,328, 329, 333, 334, 339, 341, 343, 349, 355, 356, 357, 359,400, 424: n = A,T,C or G
agtacttctagaattaattaaggcgggggnncacgctggatnccaatgtaactganataaagntgangaaaatattatnaagatgttangaaatgaaagttgaggaaaatgcctagaggtgaacagganctaaaatatttanagccgtataattgaanttncagtacccacaanccacatgtgctttttgagcacttnaaatgtggctagtctacattganatntgtttcaaggataaaatatgcnctggatttccaaagacttgtccttaaaacnngggtgaataataaaagnggcnccccnccggggnggacccnccatnggcctnntggnntccantntncccccncccccnnncntttttttccacatataaaacgtgtctcctttgtctctccanaaaatgaaaggaattaaaattaanagaagggagagattga

SEQ ID NO: 17763 - DNA, 437 bp, Homo sapiens
agtacttctagaattaattaaggcgggtcaagctatatacaaaaaattattccagattacatacttgaatggtaaaagcaaacatttgcaatttttagaaaacaacagaatacatcctttgaaagatgttgtaatgacataaaaagattaataaacttgacaacaataaaatgaacaactcctgttctttatgacacctgagaataaaaaatcaagaagaaactcagaatacatgtttaacacgtatgatgaataagcaatttatgtctacaatattaaattacttctagaattaatactaaaaagaaaaataatccagtagaaaaatttgcaaaacactttggaaggcagaggcaggcaaatcaggaggtcaggtgttccagaccagactgtccaatatggtgaaatcccatctctagtaaaacagtacaaaaatt

SEQ ID NO: 17764 - DNA, 468 bp, Homo sapiens
  misc_feature 468: n = A,T,C or G
agtacttctagaattaattaaggcgggagaatcatttgaacctgggaggcggaggttgcagtgagccaagattgcaccactgcactccagcctgggtgacagagtgagaccctgtctcaaaaggaaaaaaagagaaatcctactaagagtcgttgattcaatcattattttatttataaattcaacagctatatttataagtatcattttctcctactgtctgtcaaattttggaactgggttattctgatctggctaacatgaattaatgatgtcctaccattttcaatgtttggagataattttctacaggaactggcagttccttgaacgtttatgagacagaacttacccataaaatcatccagtactttttggggaaggagtggaatcttttactatattcaccatatttttctggttatgggtttactctatttttctacttcttcttgagggacaatttan

SEQ ID NO: 17765 - DNA, 407 bp, Homo sapiens
agtacttctagaattaattaaggcggggtaagactgaaataataaaataactacttttcacatagatatttccaaggcaccctgtagtgctacagtacattgatttaaaagaagactatattgtatttagtagagtttttattactaactctatataaatcaggaactatatagagtatatgtgactaaatcaaatagtttatgaaattatttgtgtggaatgacctttctcccctagacataatcctagtgaaatcaaggaacctgttttatttgcttccttatactcagcacctagtgcagtgaccagcacgtagcacatatttaatgtgtttccatgtcaaaatactatttaagttaagacttgattgagtctgttaggtaccagagtcactcactcattactt

SEQ ID NO: 17766 - DNA, 767 bp, Homo sapiens
  misc_feature 39, 40, 41, 63, 69, 74, 241, 242, 270, 322, 334, 346, 366,369, 370, 372, 385, 391, 395, 412, 429, 431, 432, 434, 437,452, 453, 455, 456, 459, 462, 467, 477, 488, 490, 514, 525,534, 552, 556, 557, 570, 577, 579, 592, 593, 596, 597: n = A,T,C or G
  misc_feature 599, 608, 618, 630, 631, 645, 648, 651, 652, 667, 677, 682,689, 701, 708, 713, 723, 743, 756, 760: n = A,T,C or G
agtacttctagaattaattaaggcgggccattcatagannnttttttccatccatgcccaaanaactgntccancatggagtgaacagatttactttcactcctctggttggcaaaagatggaaaaaaagactatgaatggctcgcttctttttatgttttccaaagaaagcaacattggtttgcattctttgccacactgctttggtgctggaaaccggaagccagaggatgtctcatanngtgatgagcctctgtcaaccctggttgngatgtatactgtcagcatttcatggtacccttcttgtttcatttggtcaatnccaaggttgggnggccttaaaccncatagaaaagccattttttnaanntngtggggccaatgnttttangttntaaaaaattatttccgntatttcccctgggccantnntnatnttcaacccccatttnncnntantgnatttngattttcaanttggaaaaacnantaattttaacctggaagctccaanctgggataatnggttgcctnaagggccaaccattggangggnnggaccttataagnaaacttntncatctttcccaannaannantgggcttcntctttttttnttctttttattnncaattcaaccaatnatnacnnttaaattttgtcttnaagaattatngtggnccctccntcttaaaaaatntattccnaattntaaaaggaanccccccaccccaatttattnaaaattttcaaangggngggaaaa

SEQ ID NO: 17767 - DNA, 430 bp, Homo sapiens
  misc_feature 305: n = A,T,C or G
agtacttctagaattaattaaggcgggagaatcgcttgaacccgggaggcagaggttgcagtgagccgagaccgtgccactgcactgcagcctgggtgacagagcaagactccgtctcaaaaaaaaattatatatgtagtatatatgtaaatatatatgtagtatatatgtatatatatatagtatatatgtaaatatatataaattgaagagctaacaaaatgtagtcaaatagtggttttactggccatacttctaatgatttgtatgtaaattaattctggtaagtttttagattgttcaanaacagttgtttttcctgtttatttatattatccacaatgggtttttgtttatctgtattttattcagagttccttggtttgaacctggtgtcctgttccaggcatccatccaggatactacatta

SEQ ID NO: 17768 - DNA, 312 bp, Homo sapiens
  misc_feature 14, 294: n = A,T,C or G
ctagagagtacttntagaattaattaaggcgggggaaggggcctctgggtggcagctctgggcttttgggtgttggacaaccataggcaaaactgaaatggaacaggggcagaaaatagcacacttttactctacgcaactgttgctttttcatgatcttcaggaattttactgggataattatccaaataaattgcaagcattctatccaaatgtgaacatgactcctagtaggaaaagcaaggaagaacactaataaaaatatgctaagatattattgatggttaactctanatgggaaatctgggaaga

SEQ ID NO: 17769 - DNA, 332 bp, Homo sapiens
agtacttctagaattaattaaggcggggaagccgaagactggagaggtgaagcaatttgccccaggtcatttgaccactgggtggtagagctgggaatccaggccaggtctctcaggcctcagagtctctgcccacacctgtatttcaggtacctccaggtggtagccagtacactgtagtgggaagagccaggagacctaggtacaggcccagcaccgtggtccagccatgtgacttggaagggttgtttaacatccctggggctcatctgttaaatgaggagccaagattgaatgacctctctcccaaattctactcttaagattctact

SEQ ID NO: 17770 - DNA, 363 bp, Homo sapiens
agtacttctagaattaattaaggggggagcaggaagataaaacacctgatagaaaaatgtcacccacagtccctttactttgaaggtgataaacaatgttaacattttgtttatcctttgagcctttattccctactaatgtttaaacaaaattaggataaccatgtacacgctgttttacaacctgctccccccttaatgttaaataaattttcccatttgattaacatcttcttacaaaatggaaaactgtgttcattaagaccttagagaggatgatgaactgtttcataccatagagtatgttatcaaagagagttaaagtgcatgttatcacatcacttgccatttggactgattgga

SEQ ID NO: 17771 - DNA, 300 bp, Homo sapiens
agtacttctagaattaattaaggcggggctgggcggcggcggcggcggcggtcatggaacgccaagaggagtctctgtccgcgcggccggccctggagaccgaggggctgcgcttctgcacaccagtgaggattactgatgtggacagttgatggggtttgtttctgtatatttatttttatgtacagaactttgtaaaaacgaaactatttaaaaaacaagaataacatttttagcatctttattcaaggagatttatggacttcaatttgtctatcaaacattaaatagctttttatt

SEQ ID NO: 17772 - DNA, 425 bp, Homo sapiens
  misc_feature 371: n = A,T,C or G
agtacttctagaattaattaagcggggattgtgtgttgaaggataaaggttgtacctataaaagagtaacataaggaatccttttggtgatggaaacgtcctgtttcttagctgtatcaaggtcagcatactgttgtgatgttgcagcagttttgaaagatgcctccattggaggaaactgaaaaactgcatatgaagctataattaattcaaaaaaatgttaaactaaaacacacacacgcaaagttattatccttgcaaagagttaaaataatgtttataagtagtgtgactaagaatatagcatgtaagtttgtggtaaaatttgtctaatttagtactatatacctcattttccatagagtgctcanaagccaagttctactgctctttagggagatttggccagctaaaaaaaaaaaaaa

SEQ ID NO: 17773 - DNA, 406 bp, Homo sapiens
  misc_feature 29, 30, 33, 39, 40, 49, 51, 54, 56, 59, 61, 62, 66, 67, 68,69, 72, 75, 77, 84, 86, 87, 88, 92, 94, 95, 99, 103, 108,112, 121, 126, 130, 131, 141, 142, 148, 172, 179, 181, 184,187, 195, 200, 208, 211, 220, 221, 225, 229, 233, 234: n = A,T,C or G
  misc_feature 237, 245, 246, 256, 277: n = A,T,C or G
agtacttctagaattaattaaggcgggcnnatnataggnnttgtgaccncnaancnggnannttannnnaanaancntaagatncnnngagntnntatnatgnacatntctnaccctatanacaanatgnnaactgatgcnngatgantatggacccccccgggcctaatcnttgcccnanggnctntgcctttnttganccaactanctnttgctgccnngtcnttanacanngantaaaatgnnatcctgcccngttcatttgccctgttatcanctgaatatggttaaacacactcaatttttcatgctgttttgaaattgatattttgttgcatttaaaaaatttaaatgatggtcaaagggtacaaaatctccgacaggaagaatccattttataattttt

SEQ ID NO: 17774 - DNA, 447 bp, Homo sapiens
  misc_feature 320: n = A,T,C or G
agtacttctagaattaattaaggcgggactccttaaaattaacatatgttgaaatatctacactaatgttgtcagtacaagtgttggatagtgtatcgcaaacatatttttgcaaatttctgattccttttagtttctggattgcctcccagttttaaacatagggtaggtgatgaaattgttgggcatcaaatgcatttgaaagttgcaaatgcgttctattttcttttaaaattatttgacagactctcattagtgtttgttttacaataacaattgtatcttctagtgtttgcccctcaggtggaagttctccttanaagagaagatcttttgggatcagttccccccattttcttatatgttcactaatcagctggggttaacatttaattattcctcatattcacaaccacttaaacatttaatagagtttttaaaaatcca

SEQ ID NO: 17775 - DNA, 447 bp, Homo sapiens
  misc_feature 28, 31, 32, 33, 34, 39, 40, 41, 43, 45, 46, 47, 48, 55, 58,61, 66, 67, 75, 76, 79, 92, 93, 101, 105, 106, 110, 111,119, 124, 125, 128, 132, 151, 158, 165, 170, 173, 199, 202,214, 215, 218, 220, 222, 223, 224, 228, 237, 243, 246: n = A,T,C or G
  misc_feature 250, 270, 300, 335, 339, 341, 366, 368, 408: n = A,T,C or G
agtacttctagaattaattaaggcgggnggnnnnacgtnnngngnnnnacacctntcnggncaacnntgctgaanncanatgtttactcaanntacaacanttanngacnnatggtggngggcnnctngtanttacagctactggggtggntgatgcntgaaaanttgtntancttacacagcaagctcttgcgataancgncaagataagccnntgngntnnnttcnagacaacanatcaangantcanctttcattcactatttcatntaccatttagctatctgcaagagacaccancacgagcttgaaaaatcccaccattttaaatggtntctngntttgctcatatttaatttaaactcntnaaagtgaataatgatatcaaaatcacaaaaagttacagangcataaaaattgtaattttgcaaactcaactaaagtttt

SEQ ID NO: 17776 - DNA, 447 bp, Homo sapiens
  misc_feature 29, 40, 41, 43, 44, 61, 62, 64, 73, 75, 88, 120: n = A,T,C or G
agtacttctagaattaattaaggcggggnctgggtatganngnntcaagggagagaccctnntnaggcagtcntngcacgggtaaacngagctggcattttaccaactatctaaattcanggactgggaatatttctgggcttcattcaccctccagatactgcacataactgtctagccatctgaagtccaggccaccattcattaacttagtagagaaaaagagactagcctactgagcacaacataaactcagctctagagtgcctgtggtaataaaaagcagtataacaattcaaaacgtatttgtatttgacttaattatcatttaaagtaagtttcaattccttggccacagcatcaagtgacaatgaaaaccattaaaacataattctgttaatgagaaaggcaaagttagctggggaggaaaagtttggcatgtcatga

SEQ ID NO: 17777 - DNA, 685 bp, Homo sapiens
  misc_feature 29, 30, 38, 49, 51, 57, 58, 65, 68, 70, 71, 73, 75, 77, 78,80, 89, 90, 92, 94, 96, 102, 103, 104, 107, 110, 112, 117,118, 121, 124, 133, 134, 140, 148, 150, 151, 152, 153, 160,162, 163, 169, 171, 173, 175, 178, 179, 180, 182, 183: n = A,T,C or G
  misc_feature 185, 188, 192, 195, 196, 197, 200, 203, 226, 231, 257, 278,308, 342, 357, 360, 364, 374, 375, 381, 386, 387, 406, 486,497, 507, 512, 513, 528, 612, 640, 664, 670, 675, 678, 679: n = A,T,C or G
agtacttctagaattaattaaggcggggnnaagcctgngtggctcaccntnctacannggctgcnccntnngntnanngntgatctggnngnancnattggnnngtnctngnttgannagnganaatgaaatnnaaaaancctaggangnnnncactacnanntgaacnancncnggnnntnntnacntacncannntgnctntacagccccaccacatggcacantctangatcaattaggacatcaccaccgccnaactgaatacatcatgccctnaccagccttcctgctgcctgtgggctacgnctagataagacatttgttgtaataatgttggcantaaaaatacagttanccntgtnctggacattnnatatanctggnntcaccctttcccctggaangcacttctttaccctgtatatattttcctctattgccaaataatgcatgcatgtttagcaaaatatacagggacacattnaacacaccacnaattacttancgtanngctttctgattccanattacttcttatcttaacttcatttttatttcttttcttcattcttcccgttcaaaatctgacttctttcatcttccccacttnacacaaattgctcaatattcttacaagngggactttctggtctgataattancaagcnattcnttnntttatt

SEQ ID NO: 17778 - DNA, 358 bp, Homo sapiens
agtacttctagaattaattaaggcggggtaaatacgaatagaggcctctttactctgaaaagtgtctggttttttgaacagctggttcaataagtaaagctgaagaaatggtaaagcactccacagggttcatgggctctcaggtcttccacacattcaagaaaaagagaaaactatttctgttgaaaactttggccacactgggccaggcatggtcacacctgtaatcccagaactttgggaagccaagacgggtggatcacctgagatcaggagttcgagaccagcgtggccaacacggtgaaactctgtctcaaccaaaaatacaaaaattagccaggcatggtggcgggcgcct

SEQ ID NO: 17779 - DNA, 316 bp, Homo sapiens
  misc_feature 41, 63, 88, 127, 151, 158, 223, 226: n = A,T,C or G
agtacttctagaattaattaaggcgggtagggaaaatattnatagttttaaattcatttgttnataaaaaaagattacaaaatcagtnaactatgctgtcaagttaggaaataaacctatttgaggnataagaagggattaatagagaaanagtaganactaatgtggtaaaaatgaaagaatagagttaacaaaagaagaaaccttaacaataataaaatantantaaataaactttctgttgttatgacaaaaaagagatatggaacaaataaacaatgttagaaataaaagtatggaataagtacagatacca

SEQ ID NO: 17780 - DNA, 326 bp, Homo sapiens
ctcgagagtacttctagaattaattaaggcgggcctctttgacactgccatatcactccgtcagacttttaagcttcccttaacgccagtctttgaagggcttgccttcaagtatgtataaaattatttttttatagtcttttctaatgcaaatatattatcctcttgctcagtgtgaaacagtcgtcataagccaagtagcccatataccatttatgatttgaagaagtgttttgtttaatccatccaagcattcttaaaaagaatttcaggctgagcgcagtggctcacgcctgtaatcccagcactttgggaggcccaggcgg

SEQ ID NO: 17781 - DNA, 677 bp, Homo sapiens
  misc_feature 513, 515, 534, 539, 552, 576, 579, 598, 600, 611, 629, 632,638, 663: n = A,T,C or G
agtacttctagaattaattaaggcgggtatctcaattagcctttgctgtataacagactaccctaaaacttagtggcttaaaatagtgatgtttatttctcatgatttcatgagttgggctcagtcgggaccattcatgtggctataatcattgacagctcaactggagctggaggggctaagatggcctcattcatgtgtctggggccttgctgctttttgttggcttgggctctctttatcactcagtagtctagcctggacttccttgcatggtagcaggagcattccaagagggtgaatatggaagtctagatccctaaacttggacaacatcacagcctttacattaaattaatcaaagcatatcatcaatccagtccaaattcaagggatgaggcaacaggccccacctcttaggaggtgcagaatatcgtcatcatattttttccatctgtcatagataattacaaattataattttaatccttgaatttcctttttttttttaananacaggatctcactctttcntcaangctggaatgcaanggggcttcaatgataacccactgnatnactggatcctttaactccngnctcaaattatnttcccccctaacctcacnagngggtangaccaccggggggcatactataccnggctattttaaaaa

SEQ ID NO: 17782 - DNA, 602 bp, Homo sapiens
  misc_feature 577, 581, 593: n = A,T,C or G
agtacttctagaattaattaaggcgggaggattgcttgagcctgggagttggaggatgcagcaagccgtgattgccactgcactccagcctgggcgatagagcaagactccgtttccaaaaaaaggtaaaaaatagttcttcctgattcacattgatttttgttttcttgccaaagttttttaaatgagaatagtacaggcttgtaaacaagtaaacaaaaaatataacaagaattatttaaataatggataatagtttcctatttgtccccctcacccccgcccaatctactccctagaggtggtcattgctaataatttgtttttatctatgcagacatctctctgcatataaagatataacgtggtatatatatgaatatgtatacacttttttacataaaaggaataatactgtacatactgttctgtatttggtttttcacttatgtacatctttctgtgccaatatatgtaggtgtgcttcactttttaaatcgctgcccgccaattctattggggtggatctacaatattttaatgagtcctctattgatatacattttgggattggttnccanaatttattttantttaaaaaa

SEQ ID NO: 17783 - DNA, 432 bp, Homo sapiens
agtacttctagaattaattaaggcgggtacatggtctgttccaagtaccatcaattcaggggacaaagtagatttctctttatcctgaatttatctggtttggatgttagcaatattaactggagaaagatcattttctaaatttcttttgaggctgccgtgaactcagtttaatgttttggtttcaaatggaagagtttaaaatatatgcgtaaaatgttatcctgtttgagataggataaagacccacttcagaagttaggaaagtagccataaattcatgcccagtttcatctttcttggagtctttcattaatgttgatgggtttaccttcattttgcttgcctagaaggtgaaagtacaggtagagacagaattgtaatatagttttcatgtctaaactctattgactcaaaattcaaagagctcat

SEQ ID NO: 17784 - DNA, 392 bp, Homo sapiens
  misc_feature 367, 368, 369, 370, 375, 376, 378, 379, 380, 381, 382, 383,384, 385, 386, 388: n = A,T,C or G
agtacttctagaattaattaaggcgggcaggcagaagcttgatgatgaagtggccttgtcaaagaggcatctgcaagaaaaatattttgagtatgttacataggcaccatgcagttgaacatatattgctattatacattcctagtgtacttttaaacatattagtattttatttttatgaatactttatcaagtaaagtattcaagcaactgctcaagcaacttgctcccttcttacaataatcttggatatcttatgtcaatatatatattatagtttaacttcactcacagcttcacaacattctattatatgaacacaccaaaatgtactgacaaaatccccactacctaaaaaatcccaaannnnaaaannannnnnnnnnanaaaa

SEQ ID NO: 17785 - DNA, 388 bp, Homo sapiens
  misc_feature 32, 39, 43, 53, 55, 56, 57, 59, 61, 62, 64, 65, 66, 69, 77,78, 79, 82, 86, 87, 103, 109, 121, 124, 130, 132, 146, 161,179, 194, 197, 199, 209, 216, 220, 221, 295, 296, 304, 305,352: n = A,T,C or G
agtacttctagaattaattaaggcggggggantagagtnagancctgcctcanannnancnnannnatnctttatgnnnctncatnnactacagaccatgtangcaaanattgcattcctnggncctctnantatctgccgactcntgtctgagagatagnacaacttgccgttgatcnctcttatgaagttgnatngngcctgcttgnatgtganttanntctgtgtcaaactttttttgtacaaaagattcatacctctttcctgtttgaaattattttactgtgtttcatcnntctaatgnntatttttattacaccagtaatttcctcattgtgttgaatcttacagnggcttataaatctacatgtacctagaaatgtttagc

SEQ ID NO: 17786 - DNA, 688 bp, Homo sapiens
  misc_feature 85, 433, 440, 501, 605, 623, 637, 656: n = A,T,C or G
agtacttctagaattaattaaggcgggtggatcacgaggtcaggagttcgagaccagcctggccaacatggtgaaaccccatctntactaaaaagataacaattagcaggtgtggtggtgcacacctgtaatcccagggaggcagaggctgcagtgagccgagatcgcaccactgctctccagcctgggagacagagcgagactctgtctcaaaaacaaacaaacaaaaaaaccctaaaatccgagcactttggggctggacgcggtggctcacacctgtaatcccagcactctgggaggccgaggcgggtggatcaccgaggtcaggagttcgagaccagcctggccaacatggtgaaaccccatctctactaaaaaggataacaattagcaggtgtggtggtgcacacctgtaatcccagggaggcagaangctgcantgagcccgagatcgcaccactgcttttcagcctgggagacaagagccgagactctgtcttnaaaaacaaacaaacaaaaaaaaaccctaaaaatcccgagcacttttggggagggcccaaggcaaagaaggatcggctttggagctcagggagtttaaaaaaccnagcctgggcaaacacaantggagacttttttntggtaccaccacacaacancacaaaatttttttaattgaaaaaaaaaataa

SEQ ID NO: 17787 - DNA, 369 bp, Homo sapiens
  misc_feature 38, 77: n = A,T,C or G
agtacttctagaattaattaagggggtcctatcaatangaaacataatgctttatttagttcttaaaaatcatattntatcttttctttaataattttctcccattatttttttctactctttctgaaacatctgttagccacatattattgtttcttaattgactgtacacttttcttttctttttattgtccattttgctgtctttttgttctactttctgggagatttcctagatcctgtctttaaacattccattaaagactctatttcagctttcctatttttaatgttcagaagctcttttgactctctgatatttgtttttgttgcatttatttatttatttatttatttatttatttattt

SEQ ID NO: 17788 - DNA, 451 bp, Homo sapiens
  misc_feature 29, 31, 38, 39, 40, 43, 44, 45, 48, 54, 58, 59, 62, 63, 64,65, 68, 73, 77, 80, 83, 86, 88, 95, 96, 129, 130, 131, 132,133, 134, 139, 142, 143, 144, 147, 149, 152, 157, 160, 161,164, 171, 175, 179, 180, 181, 182, 183, 185, 187, 189: n = A,T,C or G
  misc_feature 190, 192, 197, 199, 202, 209, 211, 218, 226, 228, 236, 238,241, 244, 256, 259, 272, 273, 281, 285, 292, 301, 311, 315,317, 323, 352, 358, 359, 380, 395, 398, 400, 403, 405, 406,422, 428: n = A,T,C or G
agtacttctagaattaattaaggcggggnanttgctcnnnccnnngangtggangttnntgnnnnccnctatnccanctntgnccncnaacctgnncgacaagagtgaaactcccatctcaaaaaaaannnnnnccccnggnnnggncntanctttnctnncanaaaaaanggtncaannnnngnananntntaaantntcncctaatntntgttagngagttaantngaaaagtntnggnccntgtcagtatttnggngttttttttaaannggaaaaantaanctcctgncccctaaantttacccaanttancntcctanttttgctcataaaattttttcctcaaagnttaaanntttttagtacccttttaaaanccttttttgctgggnttncnggngnnaaccaccgcacccagntttacntgtttttaaaaaaaaaaaaaaaa

SEQ ID NO: 17789 - DNA, 490 bp, Homo sapiens
  misc_feature 308: n = A,T,C or G
agtacttctagaattaattaaggcggggtatgattgttggctaataaaatatgtccaaataccatggacatagtcccctaggaatagtctcaaaatattgtattttacaaaataactggtctgaaatctttaaaaacaaaaacaaaattaaaaaaaaacatcatgaaagctggaagaaaggaaaaagaaaagaggcagtgggactgtttcagatgaatggagtttaagcatgatagctaaatgcattccatgatccctgcttggatcttaaatttagggaaaaaaatactagaaaggatattactganacaactagagaaatttgaagaagcggtgtatgctagataatattgtatcaatgctaaagatattttgagtgtaataatggcgttggggttatggaggagaatgtccttgtttttaggagatacatgctgacctttaagaagtgaacagttgtttgcaatttactctccagtgtttaggggaa

SEQ ID NO: 17790 - DNA, 471 bp, Homo sapiens
  misc_feature 85, 100, 112, 121, 123, 132, 134, 143, 147, 156, 170, 174,182, 209, 225, 237, 239, 264, 265, 266, 291, 297, 311, 317,320, 336, 346, 351, 380, 390, 393, 406, 419, 421, 445, 446,461, 464: n = A,T,C or G
agtacttctagaattaattaaagagcaaagcttttttattactttgtaatttaaaaaactgaaaaaaaaaaaactgaaaaacttnggggggaattttgtncttttttcctgngtaaatatngnacttttttnanctttatcgnggtngttaatttnaagtaataacgtgnaaangattaaanaaaaaaaaaaaaaaaaaaaaaaaaaanaaaaaaaactttcacnaggttctttcanancctgggcatattttgactggaatannnggtgtgttttcaccccttgattaangctganggagtgagatgacnaaaacnttnaatctgtgactttganagtaaatganaaccnaatggctttaaggggggaaaattgacttncccccccctncantcacacaaataanatggacttacttnanaaaatttggaaaatggctccatanncactttcttgactgntgnactcccc

SEQ ID NO: 17791 - DNA, 392 bp, Homo sapiens
ttaaatctgatgatacctagtgggctgatataagtaatctcataggaaacaagaagagtattgttgcataaagaactaaaggagttctattattaagtaaataatgagtgggatcttgtgaacaaacggagatgctggtgttatgtaagagcaaagaaactatgatgtcaggatcctttacactgttacgttactgaagccccccaaaaagcctctgtgtatccaagttatatctgtcagtatttgccatactgaaattaaaactaaaataattttaaatagtttaaaatgttacatgttaataacatgactttctttgaaaaataactcttcaaaacaaaaatttggtaagaatagtggcactgttttacatttttacaaatctcctaaat

SEQ ID NO: 17792 - DNA, 466 bp, Homo sapiens
  misc_feature 28, 36, 45, 52, 67, 74, 94, 143, 159, 162, 166, 188, 191,194, 199, 202, 216, 219, 229, 243, 246, 247, 249, 250, 253,255, 256, 257, 267, 273, 287, 288, 296, 297, 298, 299, 300,308, 319, 326, 334, 340, 349, 354, 355, 362, 366, 368: n = A,T,C or G
  misc_feature 376, 434, 455: n = A,T,C or G
agtacttctagaattaattaaggcgggnggatcatntgaggtcangagttcnagaccagcctgggtnacctggngaaaccctgtctctattaanaatacaaaaaacttaactgggcgtggtggcaggtgcctgtaatcccaantactcaagaggctgangcngganaatcacttgaaccccggaggcncangtngcagnganccgaaattgtgccnttncaacaagagngaaactgtctcaanaannannatngnnngactatttgnaaaaanaatctaaaataatnnattatctnnnnncccccctngggttaatgtnatgtatnttattttntttcanttggacccnccccnntgaccangatntnttccaatntgcaagcagttattaatgaagtttgtaggcacagaccgctgaatttgggtccctttgnggtacgtgctttccttcgtanttcaacaagtg

SEQ ID NO: 17793 - DNA, 188 bp, Homo sapiens
agtacttctagaattaattaagggggttttatattgataattgttgtgatgaaattgatggcccctaagatagaggagacacctgctaggtgtaaggagaagatagggaaattagaagataaaaacatacttttagaagaaaaaagataaatttaaacctgaaaagtcggaaaaaaaaaaaaaaaaaa

SEQ ID NO: 17794 - DNA, 449 bp, Homo sapiens
tcgagagtacttctagaattaattaaggcggggcctaactggtagggtgggcactgcttacaaaagctgcaaagaaccacaggtgcatgggtgtaaacataaaatagaacaactaaggcccagaggagaatctggggtaagactttggggaattaagaacagttacatatacaggggggatttaaaatgcgacatgcatgcccagggaaaacacttgcccggaaagttctaagacccaagctttcaccttggtctggtccctaagcccaaaagcaggccaaagtaagtattgaaggattacctgggacaaagctgatttgtaaaatctaggattgctcctagcattcaagggaatttatgtcaaaatagctgaacgtgacataaaaggaagagagacttcagtgatcacacacagaaggaatagtcttttataaaaataatttggaaaa

SEQ ID NO: 17795 - DNA, 770 bp, Homo sapiens
  misc_feature 26, 32, 40, 48, 49, 52, 58, 68, 70, 78, 163, 165, 210, 211,219, 229, 282, 301, 311, 335, 357, 360, 376, 444, 633, 658,667, 683, 692, 702, 711, 712, 740, 741, 756, 759, 768: n = A,T,C or G
agtacttctagaattaattaatgcangatttncaatagcncatcgctnnatnacacantaactacaanangttgcatncgatagtgaaaagattggcgataggccattgcaggatgaatcacttgtcacttttcttctgtgctgggaaaaataatcaacagangntgggcctttcatgagcattgacggatcgtttatcttactatgtannccccccanttcaatgatntataacaacagaagcacaagtctatgctcatttgcctgactggaatcattaantagtaggccaaagcagatngtagaaacancatctcacgagtttgaaaattcgnggctggtgaaaaaaataaactntanatgatgatacttttgnacagttttatataaggctctgagaactagaagaaattattaactttttttctttttttaattctaatncacttgtttattttgggggaggaagactttggtatggagcaaagaaataccaaaaactacttttaaatggaatcaaaccaacttttatttcttttttttccccccatactgggtaggataaaagccaaaccttttattaagtgggggcttttttgaaaagaaaaagttacaaagccttaaagaatacanaaagccttttgttcaaaaggggatngaaaagccntcttaaaaagtttaanggcttcaanaatcaaattnttttaccannattggatttttttcaggttttttaatcnnactgggacctggcanatngtttttttntt

SEQ ID NO: 17796 - DNA, 236 bp, Homo sapiens
  misc_feature 30, 123, 133, 159, 164, 209, 216, 218, 225: n = A,T,C or G
agtacttctagaattaattaaggcggggtnagatttgccgagttccttttactttttttaacctttccttatgagcatgcctgtgttgggttgacagtgagggtaataatgaggattatgtcnaaggacttcnggtgtttgacaaggaaggaaatggcnccgtnatgggtgctgaaatccggcatgttcttgtcacactgggtgagaanatgacanangaagaantttagatgctg

SEQ ID NO: 17797 - DNA, 440 bp, Homo sapiens
  misc_feature 221, 243, 252, 253, 255, 257, 264, 266, 267, 273, 275, 277,279, 280, 281, 282, 286, 288, 290, 291, 305, 306, 307, 308,317, 434: n = A,T,C or G
agtacttctagaattaattaaggcgggaagaaacaaagaactaatgatacaagaaataattttgctgcagttctattaagaattttgcaaagacaggccaggtggggtggctcacgcctgtaatcccagcactttgggaggccgaggcaggcagatcgcgaggtcaggagactgagaccatcctggctaacacggtgaaaccccgtctctactaatataanggacaaaaagaataaaaaaccnggggccccnncngnggggggncnncaatcncncntnnnngggntngnnttccccccccctcnnnncgctttttnaaaactgcaatggctgctgctaaggcacctacaaaggcagcacctaacaaaagattgtgaagcctgtgaaagtttcagctccccgagttggtggaaaacgctaaactggcagattanattttt

SEQ ID NO: 17798 - DNA, 426 bp, Homo sapiens
  misc_feature 32, 34, 36, 59, 63, 69, 78, 83, 86, 91, 94, 96, 104, 108,127, 137, 151, 154, 163, 172, 183, 186, 195, 200, 201, 208,212, 213, 215, 216, 217, 218, 221, 223, 224, 229, 259, 260,270, 271, 272, 273, 279, 282, 288: n = A,T,C or G
agtacttctagaattaattaaggcggggatgncncntgaacctcataggggtaaaaaangctncttaanggagggatnggggnctntggantcncncctacaangatnaaatccattttgtatgatntggacatatngaatgggagggttngtnagaacatcntgtgtgcanccattatttanatnaaaagcctnaaatnnaccagtntctnntnnnnacntnncatcntgactgaccatcttagctgaaaatgtaccnncccctcattnnnnctagtnctnactcanattcatttattatagcacctcatttaaatgcaaactcaattggtatttctcccacaggtttttttcagtaccatatctgtgtgagcctttttacacacaatccccttagaaaaggaatgttgtctaaaaataggtgaa

SEQ ID NO: 17799 - DNA, 429 bp, Homo sapiens
  misc_feature 34, 35, 39, 43, 58, 65, 68, 72, 74, 142, 145, 146, 147, 149,151, 161, 162, 173, 196: n = A,T,C or G
agtacttctagaattaattaaggcgggaggatgnnttgngccnaagagttcaacaccnggctggncangctnangaagaccaagggctaccccagaggctgcaccacttctacaaagatagggactcctaatttattattgngtnnncntngagaatgaannaaacaccccantaacaaaaaaaaaccttttaccnaggtcaaagggctctgtaattcagggacaagggatatgaaaggcaaaagaaggatggttttggagctaaaagcagggactaggaatgatttctccccaaggtcacctggatccatcttatttctgcaccttcccctctttcatgatggatactggacccttgaaccattcaagaagaaacattccaccttattgtatcccctaaaagaaaacacaactgaaggttaattttga

SEQ ID NO: 17800 - DNA, 433 bp, Homo sapiens
agtacttctagaattaattaaggcggggaagccaagggcctcagggagcacagaattcagtccttggttcctgtagcttttcttttgatcctttgagctatcccagtatatcccagtagttgtttttagctacatgagccactaaattacctatttttgcttaggttagagctggatttttgttgcttctgaaatacttttattaacaactgagaaaagtaaacaaagtgctgtgaaatatcttttgtaaaatgaataattttgaaattttgtctcttctagattgttggaccttcagatggaagtagttacattatagattactatggaaccagacttacaagactgagtattactaatgaaacatttagaaaaacgcaattatatccataaatattttttaaaagaaacagatatgagcctccttgatttt

SEQ ID NO: 17801 - DNA, 370 bp, Homo sapiens
  misc_feature 73: n = A,T,C or G
agccattggggcttttgaacaggggagcaaccaaatctgatttaggttttaaatgtaaccatggtcactgaanaacagactgtgggttggagtgtttgtctgcacgaagcagccactgtccacagtttaatatttccttccacacatttcttgtgtgtgtgtccacaagcatacaactgcaaatagatattttaagagaattttttgcatgcatagaattatattgccttaaaaattgctttttacaaaagcagtatgtcatatatttacatattggtaccagtaaatcttcattttctaatagagcctataggtagggtcagcacactttttctgtaacagatcagatagtaagtttattacgcttcat

SEQ ID NO: 17802 - DNA, 440 bp, Homo sapiens
  misc_feature 62, 64, 70, 71, 260, 326: n = A,T,C or G
agtacttctagaattaattaaggcgggtgcctgtaataccagctactctggaggctgaggtntnagaatnncttgaacctgggaagtggaggttgtagtgagtcgagatcacaccactgcactccagtttgggcgacaagagtaagactctttctcaaaagaaagtggaaattatatcatagtttttctaagagaatcaagaaatgtattttcatctctgtattttgtttacttgcatgcataacaggtaaagaagcttnttaataaagtagtgctccgtgaatcttgcttttaccggaaattaacagacacctcaaaagatgaanagaaccatgaagagtctgagtcattgcaggaagatatgctaggtctgagtaatattaagattttgctttttaataaatatactagtaattaaagaagaaaaataacttactaaa

SEQ ID NO: 17803 - DNA, 444 bp, Homo sapiens
  misc_feature 32, 44, 60, 93, 95, 118, 157, 160, 161, 166, 168, 170, 180,182, 197, 204, 205, 301, 314: n = A,T,C or G
agtacttctagaattaattaaggcggggatgnctttacatattncaatacaaaaactatnacattcaatagtgtgctgtcaaagtgtgcttancncacctggatatacctacattgtnaaatgtctaaacagtaatcattaaaacatttttgattanaannaaaangntnaaaaaggagngnaatgaaacgaacctncttcaanncaactatccaaacgttcattctctctgccatttggcacggggtatacccaggatattatctaacgtttctaacaggggtgttaatgacattagcancaagagctatganaaataactttaaacattatttcattgaaccttcccaactgaaattattttatgatgttataacatggatagtaactcaagtagcaataagttacacagttgtgccatttgtgcttctttctataaaacca

SEQ ID NO: 17804 - DNA, 236 bp, Homo sapiens
  misc_feature 28, 40, 49, 52, 55, 59, 79, 83, 86, 88, 90, 92, 129, 143: n = A,T,C or G
agtacttctagaattaattaaggcgggngggtccggccantaagcctcncanatnaatntgctcatgtggccggcaagngtgnccngncntnaagaggcaacacacgtggatggccccgaactgcggcnggaggaaaagaaantggaagcaaagaaagaagaatccgaggagtctgatgatgacatgggctttggtctttttgactaaacctcttttataacatgttcaataaaaa

SEQ ID NO: 17805 - DNA, 434 bp, Homo sapiens
agtacttctagaattaattaaggcggggaaaatacaagattagtttgaaatattttgtcatgttaggaagtaaggaaatgctcacaaaatggggaaaatgtgaaagggaaacagatccactttgaataaacttccatagccaaatttgagaaaattggggcaataaaatagataacaatagtaatatattacaatctacagaagaaaattttcaattaatccaggccgggtgcggttgctcatgcctgtattcccagcactttgagaggcagaggcgggcaggtcacttgaggtcaggagttcgagaccagcctgaccaatgtggtgaatccctgcctctactaaaaatacaaaaattagccgggcatggtagcacatgcctgtagtcccagctactccggagactgaggcaggagaatgtcttgaatcccgga

SEQ ID NO: 17806 - DNA, 699 bp, Homo sapiens
  misc_feature 42, 47, 110, 116, 126, 147, 153, 169, 172, 209, 221, 231,244, 254, 271, 273, 276, 282, 284, 300, 301, 318, 324, 329,332, 336, 338, 341, 350, 354, 355, 356, 368, 378, 381, 396,399, 401, 404, 442, 445, 472, 488, 527, 538, 539, 550: n = A,T,C or G
  misc_feature 594, 596, 614, 615, 633, 638, 650, 655, 677, 679, 681: n = A,T,C or G
agtacttctagaattaattaaggcggggatcctgcagtttgnactgnttgccgggtttgtccagggttccgggtctgttcttggcactcatggggacaggcatcctgctngtctgnggggccccgntggagcccttacgtgaaactnaaggtntcaacctaaggggctntanggcaatgggaccttcatccggaactaagcaagggtcngggagaggcctnttgggctatntgggatgaacttncaacaaaatntctgttggaagaacatnangtntcaacnanggctttgggactcatnncactgaatgtattttcnagctgntgaanggnctgntncangctatccantgannngtaggtggtttntctaattacntcntccttaaaatcgganatntnctnttaatgctgggctgctcttgcctcctcactgtgttttncangggtgtctgccagttagaaacctagcnatttttaaaaacttgncttctttgtactagataacagcctatactaccttttacntatttaccacnncacaatggggnttaatcacccaccacatttaccacataaaaaccctcattccacnanaaaaacacccttatgttnnttccccctatcccccatnttctnctattccttaanccganattattacccgggtttttcttngntnaaaaaaaaaaaaaaaaaa

SEQ ID NO: 17807 - DNA, 458 bp, Homo sapiens
  misc_feature 24, 31, 36, 37, 42, 44, 45, 50, 56, 58, 64, 66, 69, 73, 76,78, 80, 83, 84, 87, 95, 100, 101, 107, 109, 128, 136, 143,150, 152, 153, 154, 155, 160, 163, 167, 169, 171, 173, 177,181, 182, 183, 184, 185, 189, 190, 191, 193, 194, 196: n = A,T,C or G
  misc_feature 209, 212, 255, 296: n = A,T,C or G
agtacttctagaattaattaaggngggtgantatannctaantnnacatntgtagntntaccancnctnagantancngntannacngaaggaanagcanntgtcancnatgagggtggatgtgtgcnaccacatncctttcngatgctnannnngtaangcntacntncntntagngtannnnnaatnnncnntncatctgtgtcatnttnccagtaatcatactggtttacctcataaggagatccttgggtngaaagcagttgtggcacctctggtttcccaggtagttattncatgcatataaatttcataagtaaattctgttgttctcatttctagtactttcttggtgtactaggttatatatagacagttgtatttcacatgtatggttaattggtatgggtatgctctttaatgaagtcactctaatgcctcataaaatctagttagac

SEQ ID NO: 17808 - DNA, 433 bp, Homo sapiens
agtacttctagaattaattaaagctgcaattggcagtaactaaattctccgaggtttctttcctctcctctttgctactgaaaggtgcagaaatgcttttgacagcatctttcctactgacagatgaattgttttgacaggagaatttgaaaccttcaactgaagacacattcagatgtcaggcctggtacagggcgatcgtgttcatagaaataagtgagatgctttagatgtgtgtgcatgtcagctgccacctgaaagaaaggcctcattaaagattttcactgattaactctttgattgttcttgggatctcagatgggaattcacgctgcttgctgcagagctcttgggctaagtgtattttcttaattactgagaaatgcgtgttatcagtaagcagtgaaaagtcttgaaaaaaaaaaaaaaaaaa

SEQ ID NO: 17809 - DNA, 215 bp, Homo sapiens
  misc_feature 84, 172, 187, 203: n = A,T,C or G
agtacttctagaattaattaaggcgggagagtggaaagctgatggaagcactggattatgggtcctccggatggaaaaggtaanatggccgaggacagaattctagattttgtcaatatttaatggtaaaagaattagcaaaggagatggataaagagaagtctgagtgtanagcaaaaaggcttangaaaaaaaaaaaaaanaaaaaaaaaaag

SEQ ID NO: 17810 - DNA, 440 bp, Homo sapiens
  misc_feature 28, 31, 37, 41, 49, 67, 76, 78, 174: n = A,T,C or G
agtacttctagaattaattaatgcagcngtncatatnatgnaacattanatacttatgaaatacganccaggttcntncagaaaatctggaaggacggtaggcagcactcattttaaaattctccttaccaaatctgtctactctggcattacaggtttagcagcagaatttanaagaattctatatgatccaagtaaatacaacatttttttcaactcaggctttactagtgattggctcaactcacaaggtagaatgaagacactatgctggttacaacagagttaacttagaaatattcatacacacacacacagttgcacacacactgtcacacacacatactgttgctcacacaaacttatttctctaacttttacttgatctttctgaattcagctgaggtgttctttataccaaaagtcttttaagatcttcc

SEQ ID NO: 17811 - DNA, 428 bp, Homo sapiens
agtacttctagaattaattaaggcgggtggggaagaggttaacaagaccacagatgctgcagatgggactcacacgaagatgtccttcccaccagccaggccatcgctggctttgtaagacgcagccaactgccaccaggtggcagaacaagatgagaaaaccgtgccccacggagtccctgagcccctgctgctgcagtttttgaggacatttgggtagcagggaggtctcttcttctctgcactgcatgcacccaggaaaggccatgtgacgtcttagcaagaaggaggcaaaccatgaggagagccttcagcagaaaccaaatcggccagcaccttgatcttggacttcccagctggcagaactgtgagaaaataaatgtctgttgtttaagtcaaaaaaaaaaaaaaaaaaaaaaaaaaaaaag

SEQ ID NO: 17812 - DNA, 551 bp, Homo sapiens
  misc_feature 28, 40, 43, 46, 47, 51, 53, 56, 59, 63, 64, 67, 70, 72, 74,88, 95, 96, 97, 98, 100, 104, 108, 114, 115, 121, 122, 125,140, 141, 143, 161, 163, 165, 166, 173, 182, 193, 215, 240,248, 252, 260, 265, 299, 305, 310, 311, 366, 380, 384: n = A,T,C or G
agtacttctagaattaattaaggcgggnataccacatcangantannagancntgntgncctnnatngtnanantgctgtatctactntaactannnnanatgncctnggcttnntggccnntgnttaaaatctacctanngnggaacgctgaggccagancntnncttgaanccgggaggngctaggtactncacgagccaagattgaaccctngtactccatacgatcacatgatacntgcacacnactncatcatgnttacncctaggggataaacaagcgccaatcctattctanagtccntctcnncaatagggtttaccgacctcgatgttggatcaggacattccgatggtgcagccgntattaaaggttcgnttgntcaacgattaaagtcctacgtgatctgagttcagaccggagtaatccaggtcggtttctatctacttcaaattcctccctgtacgaaaggacaagagaaataaggcctacttcacaaagcgccttcccccgtaaatgatatcatctcaacttaatattatacccaca

SEQ ID NO: 17813 - DNA, 598 bp, Homo sapiens
  misc_feature 440, 527: n = A,T,C or G
agtacttctagaattaattaaggcgggtgtttctctttcttcaagtagacttaagttcgactttcctacaacatgtagctggtaaatacaggcttgatttttgccaaaagatagtttgacttcctgaaactaacagataactcttgtattcaaaaaataaatgtaatggatttaaagactggtaagaagtattttcttttcttttcatttttgagacacagtttcactctgtcgcccaggctggagtgcggtggtgcgaccttggctcacagcaacctccgcctcctgggttcaagtgattctcctgcctcagcctcctagctgggattaaggtgcccaccacccctggctaatttttgtgtttttagtagagacaagtttttgccatgttggccaggctggtctccaactcttgacctcaggtgagttgcccgcctcangcctcccaaagtgttgggattagaggcgtgagcctctgcgcccagccagaagtcagaaatattttcatttttgcatttcaagttcanatttgggccatttaaatttattttgccatggtaaataaaaaaagtaagagacttaagaatcattaaaatac

SEQ ID NO: 17814 - DNA, 215 bp, Homo sapiens
  misc_feature 4, 38, 189: n = A,T,C or G
agtncttctagaattaattaaggcgggccattcatagnctttttttccatccatgcccaaagaactgctccagcatggagtgaacagatttactttcactcctctggttggcaaaagatggaaaaaaagactatgaatggctcgcttctttttatgttttccaaataaagcaacattggttttgcattntttagccacactgctttggtgctgga

SEQ ID NO: 17815 - DNA, 355 bp, Homo sapiens
  misc_feature 325: n = A,T,C or G
agtacttctagaattaattaaggcggggagagaaggaaggaggagagggagggattccatgatctgttgaggactatccctggagtctttggttaagtaaaaactgatctgtgtgtgtaaaaaaggaaactactcaaagctaaggaaagaatccgaaaaacacagaactcagaatagtttgtattcccaccagtgagagtggaaagaccttctattgcataagacatctggtatagttctcaaaaggaaaccattcataagtaattattacctaagtaatgggaatatactataaccttacactaaaactttaaaaagcctgtangtaagcctcaaaaaaaaaaaaaaaaaaaaa

SEQ ID NO: 17816 - DNA, 415 bp, Homo sapiens
agtacttctagaattaattaatggggcaggagagtggcaagaattgatccactttgactgcagaaaacacaacccacttctggcaggagcctgagaacagcgtgtggtattgtggcaaaaagattagcctcaaaggtagacagatctgacttttctgttctggctctgctgtttattaactgtttaacctcaggtcagttatatactatttcctagccttagctttcttatatttcacaatggagtaataattcctgtcttactgaattgtaaagattaaatgaaatgaaatttagtgaaaccatctagcacatatagtatgtactcattaaatactgtatctccagtgccactttttagtgatagtggggaaaaactttttgcttctctgaattttattttagtatttataagt

SEQ ID NO: 17817 - DNA, 595 bp, Homo sapiens
  misc_feature 499, 509, 527, 529, 561, 565, 566, 572, 577, 578, 584, 595: n = A,T,C or G
agtacttctagaattaattaaggcgggctttggagttgaactgcctaggttcaaatcttagctctaccaattactagctgtgtgttctcagacatgatattttacatctcagattccttatctgtaaagtagacataagtgcacctataaagggttctgaaaaaagtaactgataaaatatgtaaagcccttaggaacagagtttgtgatattaaatgtgcaataaatgttagctactgtctgttgtgcactgtagttcttgggtgtcatttcaaaaatcctttaaaaacctgaataacatacatcccaacatttattacacaattcagttaacaacatttatatcttcaaagaattcattctctaaaatgctacccatttaacatactaaatggaaattagtcaccagatttgtcagagactggtgtcatgaaatattttttctattctcttttattattaaaaaaaatctgaatccccaagtctgttcatgccttancaactcaaanggtcaaaagtgttttttncnaattctagattaaaccggtcattttccccttnggtnnaaaccnaaccnncccaanaaattcccccn

SEQ ID NO: 17818 - DNA, 538 bp, Homo sapiens
  misc_feature 49, 55, 65, 69, 82, 98, 118, 127, 132, 136, 147, 151, 157,182, 192, 194, 203, 208, 218, 222, 225, 228, 230, 236, 267,288, 300, 324, 336, 338, 391, 397, 402, 435, 468, 493, 504,528: n = A,T,C or G
agtacttctagaattaattaaggcgggggacatttcaaaaaaaaaagcnttacancagaaagatntccntaaaaaaattaancagaatgaaagtgccnctgatgaaattaatcaccanagtctgatncagtntaanaaaaaagtccncaanccaaanaaagatggagagaccaaagatgtanaacacagcananagcaaattntcccncctcaggatntaanccnttntnttaaanataaaactcgccaaacaattcccaggattanaaattattacttttgtagttngccccgaaaatntaggcaaataaactcacaagttanacggaggccgcntntgggtaggcggtatgctattaatctggatgtccaaaaggaggcaattaatctnttaaanaattntcaaacgttgaatgaagccataatgcatcagtntccgaattttaaagaggaggcccagtgggtaanaaaatattttcgggaagaaccaaangagaatgaatntttcccactaagcctttcaacctnttttaaaaag

SEQ ID NO: 17819 - DNA, 350 bp, Homo sapiens
  misc_feature 64, 306, 312, 313, 314: n = A,T,C or G
agtacttctagaattaattaaggcgggtgagctgagggaggcaagctgcctcgtgagcctccanaacacaatagaggctcggtgagtgttaacgccctgctgatcctctgcacaaggtggtttagaaaaatgtttttctcctcagattcattcactcaacaaatatatttattaggcctttactacagatgaggaactgctgtagatgctataaatatacctatggacagaacacacacagttcctgacctcaaagagcttctattctaatgagggagacaggtgttaaattaaaaaaaaaaaacntccccnnnaaaaagcggccgcttttttttttttttttttttttt

SEQ ID NO: 17820 - DNA, 427 bp, Homo sapiens
  misc_feature 10, 73, 171, 177, 224, 297, 360, 373, 413: n = A,T,C or G
agtacttctngaattaattaaggcggggaaaatacaagattagtttgaaatattttgtcatgttaggaagtanggaaatgctcacaaaatggggaaaatgtgaaagggaaacagatccactttgaataaacttccatagccaaatttgagaaaattggggcaataaaatanataacnatagtaatatattacaatctacagaagaaaattttcaattaatccangccgggtgcggttgctcatgcctgtattcccagcactttgagaggcagaggcgggcaggtcacttgaggtcangagttcgagaccagcctgaccaatgtggtgaatccctgcctctactaaaaatacaaaaattanccgggcatggtancacatgcctgtagtcccagctactccggagactgaggcangagaatgtcttgaa

SEQ ID NO: 17821 - DNA, 635 bp, Homo sapiens
  misc_feature 21, 24, 29, 36, 41, 43, 50, 55, 58, 61, 66, 71, 72, 76, 77,79, 81, 85, 87, 91, 94, 97, 103, 104, 107, 110, 111, 112,113, 114, 118, 121, 124, 125, 127, 129, 133, 136, 144, 147,148, 154, 162, 164, 165, 169, 171, 177, 178, 182, 189: n = A,T,C or G
  misc_feature 191, 192, 194, 195, 203, 204, 206, 215, 217, 225, 231, 234,239, 242, 257, 261, 268, 270, 274, 275, 276, 277, 281, 284,286, 293, 296, 297, 299, 341, 343, 346, 349, 350, 369, 388,393, 399, 408, 517, 521, 547, 554, 557, 585, 599, 609: n = A,T,C or G
  misc_feature 610, 611, 618, 619: n = A,T,C or G
agtacttctagaattaattanggnggganatgaaangaacnanatacatntctangancantgatntctgnncatnnancntggngnatcnaanacnacaggnnacngtnnnnnaacnttntcnngngnttgnatntcccatcnctnnttttgnggatcaangnnctgnanctttanncccnctatgangnngnngatttaannanatgccatgnancatgatgncgaacntgnagagnctnagtcggatgacaggncctnaaattgntnatgnnnnctcngancnggaaganganntnaacgatggttcccgatcaaattaaaggcatcatgcggctggncntcnctnncattgctggttgcccccangcgcacacacaccagtgcncacanccagcncttgtttanaatggttgagctgggccaaatggtatacgtgtctttctcaatataaacatggactgcattctctggacacgggcctttcccccttaattaaaggcggggttaaatgganaaanatacttgtttttattaaacattttgngatttanatnaactacattttaactgaatgtctaaagngattatcttttttnccccaggtannncttaaannttttgggtttgaatga

SEQ ID NO: 17822 - DNA, 859 bp, Homo sapiens
  misc_feature 81, 323, 324, 343, 349, 350, 357, 358, 359, 360, 361, 365,366, 367, 373, 374, 397, 399, 405, 406, 407, 419, 422, 431,450, 451, 462, 463, 471, 488, 496, 507, 511, 512, 517, 518,524, 525, 528, 540, 545, 563, 565, 596, 597, 601, 602: n = A,T,C or G
  misc_feature 606, 607, 608, 611, 612, 613, 614, 615, 618, 619, 629, 633,657, 660, 671, 673, 675, 682, 683, 699, 719, 723, 726, 734,735, 738, 739, 741, 754, 763, 766, 767, 768, 772, 781, 782,784, 787, 799, 804, 816, 838, 844, 845, 846, 847: n = A,T,C or G
agtacttctagaattaattaaggcggggtaatagattttacttataagtgatactcagttggcttattttatagacacttntctggttactatcaaggattcactgccattgtaaattcccaacactcctcagaagtaagacaatcactggcgtggttcccaggctagtatttattcagtgccacagtccagaagacactgtataatgattaattgggctgtggatcacagtatagggatagaattagatatctggaagtcataattgatgcaataaagaagctgaaatataacaacattgtaagggagaagaaagaacattnntccaaagccatagagtatncttgcnnaaaaaannnnnaaannnaaaaannggggggggccccccccggggggncncccaannnccccctttttanaangtttttttnccccccccaaaggggcccnnaaaaaaaaaanncctttttnaaaaaattacccccccncttttttntccaaaaaaanaaannttttnnaccccnnaantttttttttttnaaaanaccccggggaaaaaaaantnaaaaaaaaaccccccctttttttttttcccnnaaanngggnnnaannnnnaannattttttttnttanaaaaaaaaaaaaaacccccccccnggnggggggggggntntngcccccnngtggggaaaaaaaaancccttttttttaaaaaaagngggnggncccccccnnggnnangggggggaaaaantcttttttnaannngggnggggccccnnanaanaaaaaccccccnttttntttttttttttnggggggggggggggccaaaaanaaatannnncccccccggggg

SEQ ID NO: 17823 - DNA, 386 bp, Homo sapiens
  misc_feature 360, 361, 367, 369, 374, 384, 386: n = A,T,C or G
agtacttctagaattaattaaggcgggagtttgaagtagccacatttcaggtgcttaatagccatatgtagctagtgactgctgaattagcacagctaataaagctttcaggatgtgcttccacctgccttttctcctgttttcattgcatttcagccagtttgtattgtctcttcccctaccctcaaatatcactggctctttcttcccctttttgaacctttgcaaatgctgttaatgacaatgacataatggccaatatttattgcaggcatgatttataaggcatgatgcattatatttttttaaaatgtcacataactttatgatgaaagcactattattatcctttttttaaannaaaaananaaaanaaaaattaanan

SEQ ID NO: 17824 - DNA, 423 bp, Homo sapiens
agtacttctagaattaattaaggcgggcgcctatagtctcagctactcaggaggctgagactggagaatggcgtgaacctgggaggcggagcttgcagtgagccgagattgcacactgcactccagcctgggcgagagagcgagaatctgtcaaaaataaataaataaataaataaataaataaataaataaataaataaataaataataaaatgttttaaaagacaagagcattgccagatatttggatcaatagcagattttatgcaaggctcatttatttaaagatatatagaaatctttaaatataacaatataatcatttttaaaataatattagaaaacatttaaaacttaccaagctgaatatttcttatcccactgattgttttgtttcttttaagattttctcaaagtaaaccc

SEQ ID NO: 17825 - DNA, 513 bp, Homo sapiens
  misc_feature 298, 310, 363: n = A,T,C or G
ttaattaaggcggggatcatcaaacatctgtagtctctcagaaacatcagatgatggattaagaagatcaaaaagctcttcattatagatctccaacagagacactttgactgaaaattcagtaccattatcagtaagtttctcaaaaatttgatgaagggtaccgtggaattataccagccaagggatcctgaaattataataaggactaatataaaggaagaatgccatttactgtggcagttaaaatacatgggcctcctttataatatatttaaacataagtatggcaaagcangttaaaacaaancaagaaaagaaacaactaacctaatgttagagaagtcatttacaacagtctgntctacagtagtcttcacaccctccataaacctgtcacacttcttagccatcttcatccctgagcattacatagaaaccaatggaacctatctacttaaaaagccaagttcggccaggcacggtggctcacgcctataatcccagcacttt

SEQ ID NO: 17826 - DNA, 374 bp, Homo sapiens
agtacttctagaattaattaaggcggggcagcagaacatcgagtgttggataacttctctgacatagtagaagggtaagcattagtatttgttcttttaaaactctaacttgtgccgtgaaataactctagccttgactgaacccaatgggattcttaattgtaattatactcaaaagtgatagatccttagcaaaaataggaccagcagaaaggactccataaactgcataaaccacatgttgccataagatacatctgagggtgaaaatgaatgtcacttgtaaatggcttatttgatgttctatttggtttggtttacaacactcttctgtacagctacagtagctgagaggataactggtctcttgaaag

SEQ ID NO: 17827 - DNA, 171 bp, Homo sapiens
agtacttctagaattaattaaggcggggggaaagtgatcccagtcaggctagtcagaatctctggaatgttctcaactctaaactattaagcttggggtttgttgatgttcctgctggtctacagcaagagaggctgaagccaaaaaaaaaaaaaaaaaaaaaaaaaaaaa

SEQ ID NO: 17828 - DNA, 299 bp, Homo sapiens
  misc_feature 20, 24, 27, 31, 32, 36, 38, 41, 44, 45, 46, 47, 49, 51, 54,63, 73, 74, 80, 85, 93, 101, 136, 191, 291: n = A,T,C or G
tctggccgtcgttttacacncggnaanaagnnatancnatnatnnnngncngtngttttccanaaagaaaaannaaaaanctttnttgggggnccgtgagncatttttacaaaaaaaaaataattgaaacacagcntgctaaaacctatggtatgcagttaaagcaatactaagaggaaagtttatagctntaagggcctacataaaaaagcagaaaaactttaaacatcctaattatgcatcttaaaaagctagaaaagccatagctgaccaaacccaacattagtagtngaaaaaaa

SEQ ID NO: 17829 - DNA, 470 bp, Homo sapiens
  misc_feature 1, 23, 24, 27, 29, 30, 35, 38, 42, 44, 45, 55, 70, 370: n = A,T,C or G
ngccgtcgttttcaccccggaannagngnnacccntgntggntnngcgggccccncctcgagagtacttntagaattaattaaggcgggggagaagttattttggatatatggctttaatcaggatagactagtttatattactgcctgattacttttgaaattccagaagatgtgtaatcctaactgcatgatcacagtgaatcttatataaagtgaaaaataccactattactgaattataatatgctagaaaagctgttgatggtaatgtggtctatttttaatttacttcatttggaccatcaccatgaaaataaatctcaggatggtttgaacaaatgaataacccacttgcccagcctatcctncaagaaaatatattgtggcaaattccattcttcagcttttgctgaccctgttgtgttattctccccattccctccctcctgccagtcaaatatttgtgta

SEQ ID NO: 17830 - DNA, 273 bp, Homo sapiens
  misc_feature 259, 261, 268: n = A,T,C or G
aagaaacctggacagatcataatgtttgcagtgattattcctcagtggtgggagcatggatgattttcagtttctttgtattttggttattttcaaatgttcagcaatgagctcaattacttttacataattacagaatatttggagtcaaacattcacctatttcccttttactaaaacttattggaattaacatcatttgatatagtgactatttctgagttaagaaaacataattaagaccgcacaaaagaaaacngnatatttnaaaaa

SEQ ID NO: 17831 - DNA, 390 bp, Homo sapiens
  misc_feature 24, 28, 31, 41, 51, 55, 56, 57, 59, 72, 74, 85, 86, 87, 110,111, 116, 119, 124, 126, 129, 139, 190, 192, 193, 255, 324,336: n = A,T,C or G
agtacttctagaattaattaaggngggngcnacttgaaatntgaatgattngtgnnncnctaggagactccnantgttccatgtnnnggatctatttgtgtaatttaaannctatntcntatgntnacnaattcaatanatggccttcaaagtagaagacaggcttagtgaaataaaagacaggtcattntnnaaatttaaaattgtccaggtgtagtggctcatccctgtaatcccccacttttggaggctaanatgggagaactgctagaggccaggagatcgagaccagcttgggaaacctagcaagaccccgtatcttanaaaacaaaaacnaaaacaaaaaaacaaaaatcaaaactgttgccatagaactagaaaaaaagaata

SEQ ID NO: 17832 - DNA, 385 bp, Homo sapiens
  misc_feature 35, 41, 59, 62, 95, 110, 142, 245, 287, 300, 302, 341: n = A,T,C or G
agtacttctagaattaattaaggcggggccaccancacggncaggaagccagtctctancancagggagtcccactggaaataaaggaacaccanctaagtgaatatggngatttgcatacacttacattgattcagaaatngtgtttaattccacacaagaaaaagaatgtggatctttttcactggaaaaaaaagtcgccatgtatcatcttaatcatgttttcctgggatataatctatacntgacgcccatttaagccttcattgcatctatgcacgtggttngctttcctcttgngngaaataatgttggaccacacgggtttgggccacagcccncgaagacacaatcctgaacgtcataatcccaaatgttgaagtcc

SEQ ID NO: 17833 - DNA, 435 bp, Homo sapiens
  misc_feature 48, 51, 61, 66, 76, 79, 81, 86, 90, 111, 118, 127, 135, 136,146, 164, 165, 171, 175, 181, 196, 204, 206, 276, 347: n = A,T,C or G
ctcgagagtacttctagaattaattaaggcgggggcttgcgcacgggntgngggttaaacngcctnggggaatgtntangnagacngaantttttaaattgaatttaacgntacctgnctatatccntaaatgtnngaatattctnaaaaaccaaatgactcgnncacttnaaangactgncttgtgtggtgcatnaaactgtntntttatatcaccttctcaaaatcgaataaatgcagacggttcacacactgttttcccagcactttgggaancaaaggagggccgatcacctgacatcaggagttcgagaccagcctgaccaacatggtgaaaccccatctcnactaaaaatacaaaagtagccgggcgtggtggcacatgcctgtaatcccagctagctgggaggccgaggcaggagaattgcttgaact

SEQ ID NO: 17834 - DNA, 443 bp, Homo sapiens
  misc_feature 393: n = A,T,C or G
agtacttctagaattaattaaggcggggtaagatttgccgagttccttttactttttttaacctttccttgaaaatatttttaaattaataagcaaatgtaactcacagtgctcgtagtgttggggattgtgtgcgtgtgacttttttttacaaatactgtgtttttcctgtgtgaatctgcaaaagcccagatctggtcaactgaatgaaatttcatttgctaaagggatctcagatattcaaaacgatgatttaatgtctacaaactataagagtctcttttaaataggtttgaggatacttctgcctgtttgtccagcagaatctgaactacagtcattctctccccatcattcctactccttaaactatagctgagagaatagcataantccttagtttgggccattctggcattgccactatgatggcctgttgtctt

SEQ ID NO: 17835 - DNA, 694 bp, Homo sapiens
  misc_feature 19, 26, 27, 29, 31, 33, 39, 40, 41, 42, 46, 48, 49, 50, 51,54, 57, 58, 59, 60, 68, 69, 75, 85, 90, 96, 97, 98, 100,103, 139, 142, 197, 287, 394, 398, 402, 409, 417, 419, 421,423, 425, 426, 443, 446, 449, 452, 453, 454, 458, 460: n = A,T,C or G
  misc_feature 463, 468, 470, 475, 476, 484, 486, 496, 497, 498, 502, 504,510, 516, 519, 520, 521, 522, 523, 524, 530, 552, 568, 569,577, 578, 579, 585, 588, 600, 603, 606, 609, 610, 619, 620,621, 632, 640, 644, 645, 651, 656, 661, 665: n = A,T,C or G
gccgtcgttttcaccccgnaacaagnnanancnatgatnnnngccngnnnnttnccnnnnagaaaaannaaaaanctttattgcnggaangggaannntntantcgaataaatatttttgttctgatttttatgagttnatncacatcttaagatgctgtattattcattattttgaagtatattgacaagaacagngtgtttttggcatgcccttattttaagcatgtgatgccaggtaattaaggtgaagcagccaggtgtggtggctcacatctgtaaccccanccctttggtaggctgaggcaggaggatcgcttgaggccaggagttcaaaatcagcctaggcaacatggcgaaaccccatctcaaaaaaaaaaaaaaaaaaataagcngggncccnggggggncaactgtntntncncnncctgggggggctaaccnagnggnatnnnatgncnctntttgncnccttnnggaaaaanangttttccctnnnaggncnaatttnggcccnttnnnnnnttaaanaaccttgtcccaaaaaaaccantggggggttttttaanncaaaaaannngctttnttntggccaatttcnttngcnaanngcccttttnnntttttttaaanggaaaacngggnntttccnccccnggggncccntaagaaattttttttttttttgggggggg

SEQ ID NO: 17836 - DNA, 436 bp, Homo sapiens
aacaaaagctgggtccgggccccccctcgagagtacttctagaattaattaaggcggggtaagatttgccgagttccttttactttttttaacctttccttatgagcatgcctgtgttgggttgcattagggattaggttttaatgtgagttttggagggaacaaaaacattcaaagcatagcactgtccatctttgtattttcagtatttgtcacagcactctgcacagagtaggcactaactaattactgtataccttaactgactttcattctttctataccactcagaaaacatcaaagccatagaaacacaaagcctccctcccactaggtttttattttaatcagcagttctcaaaattttaagaaatgggatttcttggaaaaattcaaaatattttggggagaaaccacaactgggtttggctaataa

SEQ ID NO: 17837 - DNA, 248 bp, Homo sapiens
agtacttctagaattaattaaggcgggaggccatgtatgtaatttaggaagtgtaacacctgtggcatattattgaagcatgacaactgagtttaaatattaagctcattgtttaaattcacttgtttaaaaaaggcctatactacttctccccatattaaagattatttaatgtgtaattaatcttagctgctactttcagtcaatagcaacaatttcttagttcaaaaaaaaaaaaaaaaaaaaaa

SEQ ID NO: 17838 - DNA, 419 bp, Homo sapiens
agtacttctagaattaattaaggcggggaagaaagggtctgctagtgctctaaacagtggtttggccccccagggacatttggccatgtctgggccatttttgattgtcatggcttgggagacactactaacatctagtacgtagaggcctgggatgctgctgaacatcctataatgcactgacagccctcatcacaaagaattactcaaccccaaatgtcaatcaatactatctaggctaagaaatcctgatccagaaattttttttcaaaaacaggagctagagttgtcagaaaaggtttcaaagacaaagtgagccttggtttggacttggtttgggggcagatcatctgaaaggcatcttttgcctgacttttattttctctgacaagaattttaacctacaaagtttcccttac

SEQ ID NO: 17839 - DNA, 369 bp, Homo sapiens
  misc_feature 360, 362, 363, 364, 365: n = A,T,C or G
agtacttctagaattaattaaggcgggagaatataggagtagatatatatttgcttgtattttaaaaaactggaaatagtaaaactaacaaaatggtcacatagaaaaaggaagggaataggttgaaaagtataagaatgaaagtgagacttctattaatgtaccttattagtctagtttggactgtcaaagaatttaaaagttttacataattaaaaacaataaattggctgggcatggcggctagagcctgtaatcctgacacttcgggaggccaaggcaggaagatctcctgagccagggagttcaagacaaccccgggcaaaataatgaggcaatatatttaaaaaaaaaaaaaanannnnaaaa

SEQ ID NO: 17840 - DNA, 552 bp, Homo sapiens
  misc_feature 2, 68, 186, 195, 209, 212, 213, 219, 255, 266, 267, 274,288, 291, 292, 293, 294, 295, 296, 297, 298, 299, 300, 301,302, 303, 304, 305, 306, 307, 308, 309, 310, 311, 312, 313,314, 315, 316, 317, 318, 319, 320, 323, 324, 326, 328: n = A,T,C or G
  misc_feature 346, 353, 355, 356, 369, 377, 383, 384, 397, 399, 400, 407,408, 415, 418, 419, 422, 423, 424, 425, 446, 447, 452, 453,454, 464, 465, 469, 472, 473, 474, 475, 477, 481, 482, 483,484, 487, 489, 490, 493, 494, 495, 496, 502, 503, 504: n = A,T,C or G
  misc_feature 505, 506, 507, 508, 509, 517, 518, 519, 520, 521, 522, 523,530, 531, 532, 536, 551: n = A,T,C or G
cncaattaccctcctaaagggacaaaagctgggtccgggccccccctcgagagtcttctagaataatnaggcgggaagttttagtagttgaaataatataatttcatttaggaaaaggaagaagaatatgaagagacaacagagggtgaaaattagtgatgatttctaaaccttggtggatgcctntaataagtntaatttcctgccanccnngggggnctttggcaagttctttaggaatttttacctttcttntttttcccccnnggccccntttttttttttttnttnnnnnnnnnnnnnnnnnnnnnnnnnnnnnngcnngncnccccccccccgggggggnccccccncnncccccccttttangggggggntttttnnccccccccccccntnnggggggnnttttttnaannccnnnnggggggggggaaaaaaacccnnggggnnnccccccaaannaatnttnnnngngggnnnnaancnnccnnnntttttnnnnnnnngggggggnnnnnnnaaaaaannnagcnccccccccccccccnc

SEQ ID NO: 17841 - DNA, 329 bp, Homo sapiens
agtacttctagaattaattaaggcggggggcaacctgtatcaaactctgggtccatataggggcacagaatattttcaccatagtgatttggttagacctacctttaggctctcaacctcaggttcataaagactgtcatttggtatctcataatttgatctaccaaatattctccaaattttatttctttctcctcttcccattcctccccacactcatcgcccttaccacgctactcctacctatctccccttttatactaataatcttataaaaaaaaaaaaaaaaaaaaaaaaaattaaaaaaaaaaaaaaaaaaaaaaaaaaaa

SEQ ID NO: 17842 - DNA, 380 bp, Homo sapiens
agtacttctagaattaattaaggcgggggataataacatggccaaagatgtgagggagagagagcttttttttttttaatatataacagatccattcttgttaaaattagcccattcccataataagaacattaatccattcatgagggcagagtgcttatagcttaattaaggcgggaaagtgaaaaaatctccatttgtttgaaaactaatgaatatgcttctaaataacccatgtgttaaagaagatataatactggaaatcagaaaacatgtaaataatgaaaatacaaatatcacaacttgcaggaagaggataaagtgatacttaatagtcttcaatggataaattagataagaaggctaaaaatcaataatct

SEQ ID NO: 17843 - DNA, 382 bp, Homo sapiens
  misc_feature 33, 36, 41, 50, 51, 57, 66, 76, 81, 92, 102, 110, 112, 113,124, 135, 137, 141, 142, 145, 150, 154, 155, 167, 176, 181,186, 219, 242, 257, 259, 274, 280, 284, 306, 318, 324, 344,363, 379: n = A,T,C or G
ggccggggccccccctctgagagagcttctagnaanatatnggcgcgggnngattangccagagtnacctgtttanctttnatttaaccttngccttatgancatgcacngnntctggggatgncagcacagatnanaacnnacnatagnatgnngggatagaagcnatatcattnaatgntgaanaacctgttaaattatgcatttttttctatgaangaactaaaaagcaactagctccntaatggtctataatntnatatcttttgggttnaaagcnaaanagaagaaatagagaattccagnagaattcagtgngttgtntactatccatacttcttatnactttagtttttcatcagncaatcacaattaattnact

SEQ ID NO: 17844 - DNA, 549 bp, Homo sapiens
  misc_feature 72, 115, 118, 127, 139, 488, 502: n = A,T,C or G
agtacttctagaattaattaagggggtcatatctactggtctaaaattctagtttcctttctctatgcattnaatggcattgcgttaccttttttgatatagatgatcttacttnctngaaagcttnttcaaaatgctnatgactaaccttgagttcacctatggagtaaatgcacaaatatacacatctcagtatcgtatggtaactgacttagaacttaacttcctttgaaagacttcaaaactttcaaggggtccactaaagagatcagtgatgagatgggctctgttctttttcagaacagtattctagccagatatattctgctcatcagattttaatccaaaaccacccaaagagatctgccactcataagttggtaactttttgtaggcctctttgcattgtttaacttaatggtgatgcctatgaacaagagccagaattattcagataatttcaataaatgtaactggaatagaaaggnaggattccataagnattaatatttaagagtatgccacacacaatgagatcttatggagcca

SEQ ID NO: 17845 - DNA, 319 bp, Homo sapiens
ccgggccccccctcgagagtacttctagaattaattaaggtaatggaaaaattttataatcaagccactatgtaaccttaaagattagccactggagaacatttccaacaactgtgctgttgtgcattttttatttttgaggtgctttgattttccttagctgcatggtgcagaagcagcaaaccatatttctcagtacttccatctgggttcttcatcagctcttctgttggctcctcaggaagggcatgactccatcagtctgcctgcctgcctgcctgcctgcctgcctgcctgcctgcctgcctgcctgcctgcc

SEQ ID NO: 17846 - DNA, 502 bp, Homo sapiens
  misc_feature 148, 152, 154, 160, 166, 170, 178, 182, 206, 209, 219, 229,232, 238, 241, 244, 245, 247, 251, 255, 263, 264, 266, 267,268, 274, 285, 286, 287, 288, 289, 290, 314, 315, 316, 321,329, 331, 332, 333, 335, 336, 346, 347, 349, 353, 354: n = A,T,C or G
  misc_feature 367, 373, 400, 407, 413, 450, 466, 478, 490: n = A,T,C or G
cccccctcgagagtacttctagaattaattaaggcgggagaatcgcttggacctgggaggtggaggttgcagtgagccgggatcacgctattgcactccagcctggacgacagagcaagactctgtctcaaaaaagaaaaaaaaaaancccntnaaaaantacccnggcntgggggcntgtncctgtattcctaccggaggctggnatnaaaggattgntggaccccanccngggcancanagnnanaccntttntccttaannannnaaaaanaaaaaaaaaannnnnncccccccccgggggggaccccccnnnccccntttggggngnnntnncccccccccnntngggnnattttttaaaatnaaatgncatttaagtgtagattatgccatcttngaaggtnaagttnggaaaaggtaaaattaaaattctttttttttaaaaanttcaaaaaatatttanaagttttttttncccttctaaaancctttttttttg

SEQ ID NO: 17847 - DNA, 432 bp, Homo sapiens
agtacttctagaattaattaaggcgggtcatgggcctcaccagcaaactgttgtgtgacgtataacacattcaccagggtatcgtcattcattaatttgaatttatttgtagctaaattatgaagagtaagaaattgaggatggtctctgacatactcagcattttttaacaggctggtcttctgcttttgaagcttccaaagcatatcaaatgcacatcccacttgcttttctgaaagtatggctttgtttctttcaataaaaccaaacatttgctcctcatctgtacacttattcatctgaataattagtggttcacaactgatgggtcgaaattgaaacactctccaggagaatggacaaatagctcttagacgaagcgtatttgtaaccaatgactctaggaaaacaggtgtttttttcatttatatc

SEQ ID NO: 17848 - DNA, 183 bp, Homo sapiens
  misc_feature 156: n = A,T,C or G
agtacttctagaattaattaaggcgggtgtaatagcaagggagtcactgaaagagactttaaagaatagtgtagtctacaccttcaaagtcagaaaaattgggtagatttgttcattataacctcatcagcaacttaggaaaacacaacatatccnaaaaaaaaaaaaaaaaaaaaaaaaaaa

SEQ ID NO: 17849 - DNA, 478 bp, Homo sapiens
  misc_feature 2, 14, 26, 29, 32, 33, 35, 38, 40, 41, 43, 44, 48, 50, 71,75, 79, 99, 103, 133: n = A,T,C or G
anactggccgtcgntttacaccccgnaanaanngnaancnntnntggntngccgggccccccctcgagagnactnatanaattaattaacatatgtgtngtanatgtttaaatgttcatagagaatgcataanctctagaaatatttttgctgatttcagattgcgatataaagtaatcaatgatataaaagaagtcacaatagtcatttaattcctcagcctgtgtcactgtttccctctgctttgagactcttatttcctttccacccagtaactgctgattgctgtgggtccatcccaggcctgtccagtcacggggaaaattactttgacaaacatatgcacagtaaggcattgcttacatactgagtaacttctcccaggattatttataaaaactcccgccttaattaaggcgggagaatgctcgctggggtatctcattggccaatatcttgatcttggactttccaactt

SEQ ID NO: 17850 - DNA, 362 bp, Homo sapiens
  misc_feature 31, 42, 43, 47, 59, 61, 66, 67, 88, 89, 92, 95, 100, 135,139, 155, 172, 181, 201, 207, 210, 226, 246, 257, 264, 272,282, 290, 307, 311, 314, 335: n = A,T,C or G
agtacttctagaattaattaaggcggggtanctctgacctgnnatcncagcactctggnangccannatgggtggatcatgcttaggnnggnagnatganacgtagcctgacacaacatggagaaaccccaactntatnaaaaatatccgggtgnggcaccagcatgcctgncatctcagntactcaataagccgaggcangagaantgnctgaacccaggaggcngatgttgcatgagcccagantgtgccactgnactctancctgggcnacaagagcanaactccgnctcaccgtgggtgtgtncaanaanaaataagtctgtaagccttgnctgggaataaatagtttatatacctaa

SEQ ID NO: 17851 - DNA, 175 bp, Homo sapiens
agtacttctagaattaattaaggcgggctgcgggcaaagagagagaggatcagggtgggcagaaagatcagggtaggcagagctagggacgcccctgacagacattgagatcacgactcccagaaccagcagtcatcccctccccaaaaaaaaaaaaaaaaaaaaaaaaaaaaaa

SEQ ID NO: 17852 - DNA, 327 bp, Homo sapiens
  misc_feature 299, 302, 309, 313, 316, 317, 320, 321, 324, 325: n = A,T,C or G
agtacttctagaattaattaagcgggagtgattattgtaacctttgatttaggtttcctgtcctatccactaattaagttgccgtcttcctattatgttcaattttgaagtgtagaagtgagaaatgtggactatatatatggttttctactattacagtaagaattataagcatttctattttctacataagtactgctgttttttctttcacacagccaggaagaaagctcaggcccattagtgatgactctgaaagcattgaagaaagtgatacaaggagaaaagttaaatcagcnganaaaaaanaaanaannaannaannaa

SEQ ID NO: 17853 - DNA, 429 bp, Homo sapiens
  misc_feature 37, 66, 285, 294, 342, 345, 401, 413: n = A,T,C or G
agtacttctagaattaattaaggcgggtgtcactccntgccaaagctttagaaagccttcctcttnaatgatccctagggctgtgcgcaccattcccctatagggggcagattctcttgcaccgtctcccaaccgagcaagagctgcttctccttgcatttggagtcgagtttttgtgagatccaggggaaaggttgctaacaaaaacacaaatgcagggaaaaacccacaacattcagagaaacaaacaaaaatctaaaatcataggagtaatattttcccaanactggttgntctcaaattttagaatattttagaatcagctcgggagattttaaaaantanaaattttctagccccgtgcccatggattctaattcagtaggttgaagagggtttanaaactttgattntcacacagtcccaaat

SEQ ID NO: 17854 - DNA, 489 bp, Homo sapiens
  misc_feature 3, 6, 23, 27, 30, 33, 34, 36, 39, 41, 42, 44, 45, 49, 50,51, 60, 65, 68, 87, 103, 104, 110, 113, 127, 140, 141, 143,149, 156, 159, 164, 167, 170, 180, 184, 189, 194, 203, 211,219, 233, 238, 263, 265, 292, 297, 319, 329, 378, 390: n = A,T,C or G
  misc_feature 429, 459: n = A,T,C or G
aanacnggccgtcgttttacacnccgnaanaanngnaancnntnntggnnngcgggcccnccctnganagtacttatagaattaatnaaggcgggcgcctgcnntcccanctncttgggaggctgangcaggagaatggnntnaacccnggaggcngancttgnaangancggaaatcgntccnctacnctccngcctgggcnacggggcnagactccntctcaaaacaaaancctgnctcaaaagaataaaagaaaaaatancntgggcataggctctttatctagagaanagcangccacagcccagaggctaaatncttcccactncatatttttggtaaataaagttttactggaacatagtcatgcccattcntttattcattgntaatggctgcttttgtactacaaaggcacagtggagtanttgtgaccgaaactactagacctgtaaatncaaaaatatttactctatgacacttttcaa

SEQ ID NO: 17855 - DNA, 432 bp, Homo sapiens
agtacttctagaattaattaaggcggggaggaagaaggtaaagagagaatttcaggatatagcacatctagcttagcactacttgactgaacttcctgtgatgatgtggaaatgtatatttgcagtgtcctgcatagtaggcactagctatacgtggctactgaacacttgaaatgtggccagtatgaccaagtaactgaactctttattttaattaaacagtatcaaaattgcttgcttaaaacctaagcaatatgcattttgcttgaactgcttactgtaactttaacctaagattatagtgaccttattcaggaaaaaaaaaaatttagtgtaacttcaaagacttgacattcttgtcagaggaaaaaaaatttctagatactgtttgcttgttttttgttgtttgtagaaagataaaatattttggta

SEQ ID NO: 17856 - DNA, 211 bp, Homo sapiens
  misc_feature 7, 31, 37, 38, 40, 41, 45, 52, 53, 55, 64, 72: n = A,T,C or G
agaaaanactggccgtcgttttacaccccgnaataanngnnaccnatgctgnngngccggcccnccctaganagtacttatagaattaatgaaggcgggggactttaatacaaaaaataattaaaacaattattacagagttcctcagcagaagggcataccgatgctgtccttgacctttcatggaataagctaatcaggaaaaaaaaaa

SEQ ID NO: 17857 - DNA, 409 bp, Homo sapiens
  misc_feature 43, 55, 75, 90, 168, 172, 178, 181, 183, 193, 197, 200, 219,225, 232, 233, 234, 238, 239, 240, 248, 258, 259, 261, 275,280, 281: n = A,T,C or G
agtacttctagaattaattaaggcgggggaaaagtttaaagtngcctaagaaganaatgtctaaataaatggatngctttttagcaatanagctgctttctagtggtaaaggaaggggtcacctgaaaaataggacatttttattaaaataaagttctcttagcgttngccnaaaaanaananaaaaaaaaanaaanagnccccccccccccggggggncccccnctccccnnnaacnnngtttatanaccccccccnntngcccccattttaancctannagcaccccaattaagaaagcgttcaagctcaacacccactacctaaaaaatcccaaacatataactgaactcctcacacccaattggaccaatctatcaccctatagaagaactaatgttagtataag

SEQ ID NO: 17858 - DNA, 428 bp, Homo sapiens
agtacttctagaattaattaaggcggggggaaaggcattatcagggttaaagtgagaaacatattaacagcacatctggaccaatgaattaactcagaaataaggctgaaaaatcaggataaccacccacactcttccttctgaatggagatttgtcagatttgaagcaaagaaccttcctctcttcaagttttctggggaagaaagtctaagaaatgtaaaagcccaggctctgaggacccaatgctcctcacgccatccccatggcctgatgatgggggcactacaagaataataatttgaatgccttttgcttaaatactgcgttctacttgtatctcattatctatcccatgataacacagtaatccaggaaaggcaggaattaaccccactttagagatgaggaaactgagacccagaatggt

SEQ ID NO: 17859 - DNA, 410 bp, Homo sapiens
agtacttctagaattaattaaggcgggagggaactaggcaaaccctggattgacttgtgtgaagtcaggtagtgaagatgaccaatatgtaataaactggtgactctgggccacgtgccatgcaatggcacatcctcatcatcacagctgatcttgggcaccactacttggtagaaatctccagaaatctggaatcctggacctggattctcttagtatgctgtaggggctattatatgtagcctgtcctcaccatcatcctgaaggggtagaacaagaaatcaacagaatttacttggaattttggttccaaatggctgttaattaaagcggggtgtgtgtgtgcatggaagatgcctgggctgtctttgctatatgtaaatagaaccattggatctttatttttgatt

SEQ ID NO: 17860 - DNA, 453 bp, Homo sapiens
  misc_feature 19, 68, 127, 155, 156, 160, 161, 162, 163, 164, 165, 166,167, 168, 169, 170, 171, 172, 173, 174, 175, 176, 177, 178,179, 180, 181, 182, 183, 184, 185, 186, 187, 188, 189, 190,191, 192, 193, 194, 195, 196, 197, 198, 199, 200, 201: n = A,T,C or G
  misc_feature 202, 203, 204, 205, 206, 207, 208, 209, 210, 211, 212, 213,214, 215, 216, 217, 218, 219, 220, 221, 222, 223, 224, 225,226, 227, 228, 229, 230, 231, 232, 233, 234, 235, 236, 237,238, 239, 240, 244, 247, 257, 258, 259, 260, 261, 262: n = A,T,C or G
  misc_feature 263, 264, 265, 266, 267, 268, 269, 270, 271, 272, 273, 274,275, 276, 277, 278, 279, 280, 281, 298, 330, 331, 332, 333,334, 335, 336, 337, 338, 339, 340, 341, 342, 343, 344, 345,346, 347, 348, 349, 350, 351, 352, 353, 354, 355, 356: n = A,T,C or G
  misc_feature 357, 358, 359, 360, 361, 362, 363, 375, 412, 417, 424, 444: n = A,T,C or G
aagggggaaacaaaagctngggtacccgggccccccctcgagagtacttctagaattaattaaggcgnggggagattgggtgatcaactgccaaatggtacccagaaaaaaaaaaaaaattcaaaanggaaaaaaaaaaaaaaaaaaaaaatttnnaatnnnnnnnnnnnnnnnnnnnnnnnnnnnnnnnnnnnnnnnnnnnnnnnnnnnnnnnnnnnnnnnnnnnnnnnnnnnnnnnnncgtncgnggactgggannnnnnnnnnnnnnnnnnnnnnnnnatcgccttgcaagcaanattccccctttcgccaggcttggcgtaataannnnnnnnnnnnnnnnnnnnnnnnnnnnnnnnnnagtttgccccanccttgaatggcaaaatgggaaaattggtaagccgttnaaatntttttgntttaaaaaatttcgccggtnaaaattttt

SEQ ID NO: 17861 - DNA, 145 bp, Homo sapiens
  misc_feature 110: n = A,T,C or G
agtacttctagaattaattaaggcggggtaagatttgccgagttccttttactttttttaaaaatccctcattagcatgtgccagtgcatcttttctaaatgtggacagngaactaatactggtaaattggaaaaatcaaatttg

SEQ ID NO: 17862 - DNA, 723 bp, Homo sapiens
  misc_feature 5, 405, 524, 535, 606, 622: n = A,T,C or G
agtanttctagaattaattaaggcaggagaatggcctgaacactggaggcggagcttgcagtgagctgagatcacaccactgcactctagcctgggcgacagagcgaaactgtctcaaaaaaaaaaaaagaattaaaaattaaaaaaaagaaaaagaaatgtcagttgagacatttctaagtttatgtgaaactgaggggaaacccattcttcacatgcattggtatatccgaagtattcctgtaatgtaaacaacagctacaataatgtcatgtacaatacatttggccaaatacctgactgtacactaaggcctgaactaaatagaacaaaatcttgaattcttacataaatgccaaagtacaatgaacattcaagaggcattaaccaggccacacaaatatntgaaaggaaaacctggggagatggcacagagaacagtcatgtggaataggatcctgggtggagagttcaagagtaaacctgggactgttttaaaatagcccaggaatcttagacaggangggtgaattanaaaaaaccaaccaagggccttactttaattagcacaatccccctgtggtttcaccaatgagcaacaaggtntgagcatcacttcttnaatactcaatttaactgattttttttgagctgggaaatttgagaggaaaaaaaactcctaaacttcctttttttgcccgtcaaaaaaaaaaaaaaaaaaaa

SEQ ID NO: 17863 - DNA, 518 bp, Homo sapiens
agtacttctagaattaattaagggggccctaccaaaattgtaagggtgtaatagagttacagtaataaagaaagtatgcctgtgcaagagtagacaaagtaatagaacagaagagactattcatgcttagacttgtgtagaagtagaatttgatggttatgaccacaatggcgatgacatttcatatcagtagatggaagaaatggattatttaccaaatggtcttggaaaactggcaagctcctccagtaggggaaaaagcaaaacaaataaaactgggatttcctacttttttctgtagcccaaaataaactctacatgggcagtggaactataaaagtactggaaaaattcacaaggtcaggtatatttattatcttatgtgtggaaagtaatttctaagcaatgcacaaaaactagaaaacataaagatatgaagggaatttgattatataaaaattttaaattgcacatggcaaaaagcattctttagattaaattaatagatatagtctggg

SEQ ID NO: 17864 - DNA, 422 bp, Homo sapiens
agtacttctagaattaattaaggcggggggggcttaatttagacccagttgaggaaatttgtaaaattcggttgaaatgcgtaatattgtgtagtggcagtttctcttatattttgtctgacgctgctgaaatcatctcatattttttcatctttcacacttcttccatattctctatcagttaacctttatttgaagaaagaagaaaaaaaattaagtaggtagttggtagttactgagacagttaataggatgaagggagagttggggctgtttgggcatctgtggagggtggtgctgacagggctaggcctgcacctctctggcctcctcaagagctgcttgttaaatgtttccgtgtaaatagaatgaatagagaccgccatttccacatggcaggcctaaaaaaaaaaaaaaaaaaa

SEQ ID NO: 17865 - DNA, 658 bp, Homo sapiens
  misc_feature 3, 27, 34, 36, 39, 41, 42, 47, 48, 50, 60, 62, 64, 65, 68,73, 74, 76, 82, 83, 89, 98, 107, 109, 133, 155, 157, 183,240, 306, 349, 432, 474, 527, 551, 557, 607, 608, 609, 613,614, 615, 617, 618, 619, 620, 621, 622, 623, 624, 625: n = A,T,C or G
  misc_feature 627, 628, 631, 633, 636, 637, 644, 648: n = A,T,C or G
ganactggccgtcgttttacaccccgnaacaagngntancnntgatnntngccggtcccntncnntanagaannantaaaannctttangcggggccncgcccaagntnaaacaaaatagaacaattgaccantcattgcactcacccataacantntcaacaacccacaggacaagtattantatcagaattgctataatgttatctgaaatgtccagttttcaacaacaaaacaaaanatataagacaggcaaagaaataggaaagtgtgacccatatacagggcagaaagcgagccatagaantatctttttgaaggggtgtcattggtggcctcaggagactaanacttcaaagcagctattataactcagttcaaataactaaaggaagccgtggaataaagaattcaaggaaggtgtgatagcagngtctcttcaaatacataatattgttaaagatatgggaaaatnttacgaccaaattagaaattaaccaaatgaaaaattcccaggaagggctgaancagtaaatttggaactggtaaaanaatccntgaaacttaatgaattagagattattttattttggaaaaacagatgtttnnnaaannngnnnnnnnnntnnaananaannaaaaaangggncccccccccc

SEQ ID NO: 17866 - DNA, 626 bp, Homo sapiens
  misc_feature 503, 579, 591: n = A,T,C or G
agtacttctagaattaattaaggcgggtggatgacttaaggccaggagtttgaggctagcctggccaacagtgaaaccccatctctattaaaaatacaaaaactagccaggtgtggtggcagacttctatctggcaaatttctattaatttctcaaggccaggttcaaacatcacttcctctgagggagctttcctctctctcaatctatctgctgaacttgtctttcaaactaaattgtgggcagctgtcccactccaatcagttctagcactggcttaaatctctgctttcaccaaaagctttaaaaaataaaaataggccgggcgcggtggcttggcctgtaaccccagcactttgggaggccgaggcggtcagatcagctgaagtcaggagtttgagaccagcctaaccaacatggagaaacccgtctctattaaaaatacaaaattagccgggcgtgggggcacatgcctgtaatcccagctactcttggaggctgangcaggagaatcacttgaacctgaaaggtggaggttgcaattgagcccaaaatggcgccatttgcacttcaaccctngggaaccaagantggaaactgtcttcaaaaaaaaaaaaaaaaaaaaa

SEQ ID NO: 17867 - DNA, 226 bp, Homo sapiens
  misc_feature 199, 201: n = A,T,C or G
agtacttctagaattaattaaggcgggtggggaaccttgttttcttgcaggaaccttgggtgcctgtagagcggctcaggccttgatgatttgagcttgtgttttctttctgtgtcagcacactgtggggttgaatagaagatgcttgccttttaaaaaatgcgataatttgacatacgaaaaaaaaaaaaaaaaaaananaaaaaaaaaaaaaaaaaaaaaaaaa

SEQ ID NO: 17868 - DNA, 356 bp, Homo sapiens
  misc_feature 335: n = A,T,C or G
agtacttctagaattaattaaggcgggaggcaactgaagaaaaaacacgtccaacttcaggatgggtcctagatcagaaaaaggatattaaaaactagtgcatttaaaaattcattaattaaggcggggcagccggagctgttgacggaaaggagtagccccaaaggagggcatgtgaagtcgcacgcggagctcgaggggaacggcgagcacccagaagcccccgggtctggagagggaagcgaggcgctgttagagatctgtcagagaaggcatttcctaagtggaagcaagcagcagcttagccgggattctcttctgagtgggtgacagancaagaccctgcttcagaaaaa

SEQ ID NO: 17869 - DNA, 538 bp, Homo sapiens
  misc_feature 7, 15, 18, 19, 24, 28, 29, 31, 35, 43, 104, 154, 160, 225,263, 268, 269, 270, 279, 335, 348, 351, 353, 358, 368, 369,371, 381, 382, 387, 397, 406, 423, 426, 503, 523: n = A,T,C or G
atgattnctggccgngcnnttcancccnnantaangggaaccnatgctgggtccgggccccccctcgagagtacttctagaattaattaaggcgggaggattgnttgagcccaggagtttgagaccagcctggccaatatagtgagaccctgtntctacnaaaaataacaaattggctgggtgtggtggcacacgtcctgtggttccagctatggagaggctaangtgagaggcttgcttgagcctgggaggtcaaggctgcngtcannnatgattgcnccactgctcaccagcctgggcgacagaattgagaccttgtctcatctaataaaaancctttattatgangcncnccccnccgggggaanncncaattccccnnaagtngacccttttnccccccccnacaggcctatttttaancanctttttcttttgctaccaagagtttcaaaaaataaatgccagtatttgatttcaggctgctaaatgggctcatttancattcattcctttgatgtanacattaaaaaaaaaa

SEQ ID NO: 17870 - DNA, 447 bp, Homo sapiens
agtacttctagaattaattaatgagaaaacttgaattgtgatgtttaaatattagtcagtgagtattcttaagtcagtatttctttcagttttctagtagtgtggatgaaatgcaaatacagagaaaatgatataggaaaaataaaatcttcataaagaggctattttgagttgtggatattgtagtatttattaagtgaaaaaacgaaaaagctttaagtgaaatacagatattgtctgtccatactgtcaatatgtaaaggcagaaagggcctccaatataacactacgatgctttaattttagtcgactttatgtactacaaggtggccttgcccagcaagaatggagagtgcctgaactattgcacagactactgaagtacttggaacccaaactcacccaggtttacaaaaatgtcagagaaagaataggaaggtaggtact

SEQ ID NO: 17871 - DNA, 555 bp, Homo sapiens
agtacttctagaattaattaaggcgggggaaacagaagacaaagctgggttccacattcaagttcaatttcctgtccatcacgtccgatctttactggtttatgttcattccaaggattggtgagatgagccgacttagtgaagggtaattcacgcctaaatacaaagtaatatcaattacattcttctgcagaatcctttaaggaccttatactacttttagtagtgaattcctgtattaactgtgacttaaatgtgactaaattttaaaaaccacttacagtggttaattccctatagaaagcctcttcagagactttttccatattctccagttttctaaaaaagagcttaagagcaagggcttgagaaccaagataacttggggcttaaaccccagcctgctctcttctctgagcctgaatctatttctttgataaacaagaatatcaccatctactttatagtttgttttaccgcagtttgcaaatggaaatggacccagaaaatatttagtatatcccctttcttctatgaactcaaaaaactttaaaa

SEQ ID NO: 17872 - DNA, 461 bp, Homo sapiens
  misc_feature 258, 376, 429, 436: n = A,T,C or G
agtacttctagaattaattaagcttatagttcctaaataaaccaggaaacgggtttataatttttaagggactcgccccacccttacactcaggatcttccacatctagaaactccccatagtctcttgcccccatgcaaaactttatccacagaattgggagccggacctctagccttaaaccagcgtgaaaaggctcggccggaaccacaaggaccatgcctctgcggctttctctactgccggccaactcacggntgggctttgggttctgtaacgtcacccaccacgagtgcccctggcccctgaccgctgcgcaaggcagacgcacatcagatggagaaccggtcagctgctcttgatgaaaacggcagtnggctctgaaaagagcctttagatcgaccacttaaaaatataccttaggcccgntccccgnggatgcggctgaccaactggatgtc

SEQ ID NO: 17873 - DNA, 615 bp, Homo sapiens
  misc_feature 442, 462, 486, 507, 535, 543, 564, 568, 580, 599: n = A,T,C or G
agtacttctagaattaattaaattgtaattacaggccaggcatgatagctcatgcctgtaatctcaacattttggtaggccaaggcaggagaatcacttgaggccagaagtttgagatcagtctggttaacatagtgagacctgtctctatttatatgttaaaataataataatagtaataataatcaattgtaattatagttattcctagagaagttgatttagatatattacttaaataaggttttaaaagtgataatttagctaaaatcattattttaaaaatgtacattttcagatgatacaacttttacagaattacattagaacgtacagttcgttatgtctatgaaggtgttttttttcccttttcatcttgttagggcacgtaccatgttatttttagatgaaagccattacaaagagttgctcacacatcatngttagtcctcctcctgctancttcaagttctgaaatggctcacnttaattcgtatgggggtaaantgttttttattggttttttaaaaaaatncattattntaaggctcctccatttttcantttngcacaaaatttnttttttaaatattttaaanaaaattttttaaaaga

SEQ ID NO: 17874 - DNA, 252 bp, Homo sapiens
agtacttctagaattaattaaggcgggggggaaattttatactataatgaactgttctccagtatgaagttcgttaactccaccaattacgtagccaacaattagaaacctaaaagcagtaattttgaaataatttagtgctttgcaacagtgcatttacctcacataggtgactgtttttctgctgtaggccattttctaggtgaggtttccgtagggcaaggaaaaaaaaaaaaaaaaaaaaaaaaaaag

SEQ ID NO: 17875 - DNA, 280 bp, Homo sapiens
  misc_feature 267: n = A,T,C or G
agtacttctagaattaattaaggcggggtttggtattggaattggtcaagttcaataatggattgtttccttcaggcccgacaggagatgaactgcctttgctgcttttctgcccagttttatactcactcttctcgtaaaagtgttgcatcaggaaccttttaagaagtgcttaaattcagattcacttgtccctagtaattcattcataaagcacaggggttcatttaaacgtatgttgtaatccattcgcaaaaaaaaaaaaanagaaaaaaaaaaa

SEQ ID NO: 17876 - DNA, 417 bp, Homo sapiens
  misc_feature 404: n = A,T,C or G
agtacttctagaattaattaaggcggggtaagatttgccgagttccttttactttttttaacctttccttatgagcatgcctgtgccgtttctggaaggcaccgagcaaacacataagtcctgcagagcaggaatgacacagccctctgggcatgtgggtagactggcagcagtgttgctggtggtagagggtgtacagaaattggtggtatctccttaagacccttgaatggctgcaaactcaaaaaaggttcctagctggaaaactgtctgaaattggtggagtaaactccgagcatataacaatgctcagattataccataataaatgaatgtattctattttcaaaaaaaaaaaaaaaaaaaaaaaaaaaaaaaaaaaaaaaaaaaaaaaaggaaaaaanaaaaaaaaaaaaa

SEQ ID NO: 17877 - DNA, 258 bp, Homo sapiens
  misc_feature 54, 55, 130: n = A,T,C or G
agtacttctagaattaattaagtttgaggggtttcctttcctatatgctttcanngatttattttgctttttaaataaagattgtttgtttattacctgaaagttgatactgatttaggaatatattttntgtgattggaatcctcaacaatatattttggaagcttgcagatggctaggtttgaaattgaaatttgtgtttttctccttcttttctcatacgacttctaagtcatcctttctgacataaggcaactt

SEQ ID NO: 17878 - DNA, 296 bp, Homo sapiens
  misc_feature 275, 280, 281: n = A,T,C or G
agtacttctagaattaattaaggcggggaatctttgtaaaaattgatattctgtataacagagtgcctctctgttacttttggcctatgttgttagaaataagatgctatcttgcatagttagaattaagcatttatccaggttgcgttatccaaactgatttgttaaagctccaggtcacgttcttacactaagaaaatcattcagtaaacatgagacaagtttaggaaaaactaataaaataaacctgtcttaaaaaaaaaaaaaaaaaaaantttannaaaagcggccgccac

SEQ ID NO: 17879 - DNA, 345 bp, Homo sapiens
  misc_feature 150: n = A,T,C or G
agtacttctagaattaattaaggcgggtgaaactgtacagtctgtgagttagcacgatggcagcaaaggtgctgactgccgaaaggggcagagggtcagggtggggtgtcggtagggctgctgtcttggcagccgaaaactagaggccanaggttgggtctgaggtgagaaaaatgatagggacaacactgcacgactctccctagactgcttggtgtttgattttgatttttatagctccttgccctaatgaccagagagcagagtcataccccccttgcccatgcctccagctacaaaacaattcaattgcttttttttttggtccaaaataaaacctcagct

SEQ ID NO: 17880 - DNA, 427 bp, Homo sapiens
agtacttctagaattaattaaggcgggcgactgaagcgttgatccagtgccatatctacatcttcttcatcagtaagcaatgatgctttcatgatctaaaaaggcaatatctatagaatgaatgtgcttcccagaatcaaaaggccataccaaaaaaaaatgcagtttacaacaaccaaaaatattgttcctcctcaaggctgtgtacagagctagtatatttgtgtgatggatggaccccattacactgtgtgtgcctgaaaggcagaattcatataatacttctcttctttgtatctatagcgtctcaccagagcctggcacacagcaagttgctatgtttgctgataaaataattttaaagtcaaacataagccaaaggttaaacacataacacaccaaaaggcactgggataaagggaagtaa

SEQ ID NO: 17881 - DNA, 446 bp, Homo sapiens
agtacttctagaattaattaaggcggggtagaagcaaagagaggcgacggagccgctcaagaagtcgagatcgaagatttagaggccgctacagaagtccttagtatgtaactatagttatgattttggtttgagggttattctctgggtattcagatggcagtttaacttgagtgatttgaattgtgaatttttatttttttaatgattggttaaaaagtattgaattaaggatattggcattgaatactagtaaagtgaaaatacagtgcatagacaaataagtaaaaatttgcttttactaggcatactgactattttctgttaaactatcagagtttctaaattgtatgccagtcaacgcaaactggatgaaagcactagagtgcttgaaaaagatgacattgtagtgcccaaatacctaagaaagcttaacaagtgtctgg

SEQ ID NO: 17882 - DNA, 254 bp, Homo sapiens
agtacttctagaattaattaaggcgggctgttagtgttgtaaactacatgcgctttaaataccttttaccgagtgctagagccgttcatcaccaccccacgcagaatttcagctgcttacgttgaacaaattcaacaagtttatcctcaagtttatatgcagcaacaaaggtctatgaatttgggctcataaaactcaggcgaattaaagaggaaacagtcaaaaaaaaaaaaaaaaaaaaaaaaaaaaaaaaa

SEQ ID NO: 17883 - DNA, 511 bp, Homo sapiens
  misc_feature 157, 158, 167, 178, 179, 186, 188, 190, 191, 193, 194, 195,197, 199, 201, 202, 205, 207, 212, 217, 219, 220, 223, 227,237, 240, 245, 254, 257, 264, 274, 275, 277, 278, 279, 282,296, 299, 300, 313, 315, 322, 325, 330, 332, 337, 339: n = A,T,C or G
  misc_feature 341, 347, 353, 354, 355, 357, 359, 376, 386, 387, 390, 395,397, 401, 403, 404, 405, 408, 409, 412, 414, 423, 431, 442,451, 454, 461, 463, 469, 474, 485, 489, 494, 497: n = A,T,C or G
gggtaccgggccccccctcgagagtacttctagaattaattaatgcgggagaaacacttcaacccaggaggcagaggtcgcagtgagcagagattgcaccaaaactgcactccagcctgggtgacaaagcaacactctgtctcaaaaaaaaaaaaannaattaaagntttgatttttnnaaaaatngntnngnnnantncnngtngntgttnaaaantnntgnggcnggaaaacctnttnacccnaggaggcanagntttgcanggacccaaanntnnnccnaaaactgccctccnccnngggggaaaaaagnanccctccnttnttaananaaaanangnggaaangggggnnntncncccctttttttaaaaantttaaaaaannccnggttncncttngnnnaanngantnttttttaanatttttgnaaaaaaaattnttttttttnganttttttnangggggnttttnttttttaaaancccnttttnccnaaaaaaaaaaaaaa
